United States Patent Application Publication US 2017/0114356 A1 - sequence listing, part 77

SEQ ID NO: 116479 - DNA, 1730 bp, Zea Mays
ttttaagttactgtgtgcttgttgcagtatctgtaactaattcctatgcgattctcttgtttgtagggcgaagatgagggagatcctgcacatccagggagggcaatgtggcaaccagattggcgccaagttctgggaggtggtgtgcgatgaacatggcattgaccctaccgggcggtacactggcaattccgaccttcagttggagcgtgttaatgtctactacaatgaagcctcctgcggacgctttgttccccgcgctgttctcatggatcttgagcctgggacaatggacagtgtccggaccggaccctatgggcagatcttccgccctgacaactttgtgtttgggcaatctggtgctggtaacaattgggctaagggccactacaccgagggtgctgagctcattgactctgttctggatgttgtgaggaaggaagctgagaactgtgactgcttgcaaggattccaagtatgccactcccttggtggtggtactggatctggtatgggtacgctgttgatctcaaagatcagggaagagtaccctgaccgcatgatgcttacattctcagttttcccctcaccgaaagtatctgataccgtggttgagccatacaatgccactctttctgtccaccagttggtcgagaatgctgatgagtgcatggttctcgataacgaagccctctatgacatctgcttcaggactcttaagctgaccacccctagctttggtgatctgaaccatttgatctctgcaaccatgagtggagtcacctgctgcctaaggttccctggtcagctgaactccgacctcaggaagctggcagtgaacctgatccccttcccccgtctccacttcttcatggtcggcttcgcgccgctgacgtcccgtggctcccagcagtaccgggccctcacagtccccgagctcacgcagcagatgtgggatgccaagaacatgatgtgtgccgctgaccctcgccatgggcgttacctcaccgcctcggccatgttccgcgggaagatgagcaccaaggaggttgacgagcagatgatcaacgtccagaacaagaactcgtcctacttcgtggagtggatccccaacaacgtcaagtccagcgtgtgcgacatcccgcccaggggcctgtccatggcgtccaccttcatcggcaactcgacctccatccaggagatgttccggagggtgagcgagcagttcactgccatgttcaggaggaaggctttcttgcactggtacacgggcgagggcatggacgagatggagttcaccgaggccgagagcaacatgaacgacctcgtgtcggagtaccagcagtaccaggacgcgactgccgacgaggaggagtacgaggacgaggaggaggtgcaggccgatgacatgtgaggggagggctgttatcgtgtgaagccttgtggtccctagggcaagcggacctcgatgagttcggtgttccctttcgtgttgttgccatctttctactgctagcgtacccaccctcgtggcccattccgtcgctgttgacgtatgtatttttcttgtgctatggaaccttgcttttggtacggtactatcctgctagtatgcttggcgtttgaggttcctggcgtgaatttaagccttccgtatgcagtgattggagttggagaccggctgcttcgtccaggcgaagcaattgacagcgacgtgctatacactcaag

SEQ ID NO: 116480 - DNA, 1927 bp, Zea Mays
gatatttgcgaggggcagttcgggcacttcgccgccgcacggtgggaaatttgaaaaccacgcaaggtggagagagatcttgaccgagcgccgcgaggagagctcggagcgggagggtacgggccgtcggatgctcgcagctgccaccgccgcctacggctattttaaccccgcgctcctgccgacgccgcactcgcccccggcctcctcccgcctcccagatctcgctcgctcggcgccagttgcctcgcagtttggatcatctcatacctcggcgaagatgagggagatcctgcacatccagggagggcaatgtggcaaccagattggcgccaagttctgggaggtggtgtgcgatgaacatggcattgaccctaccgggcggtacactggcaattccgaccttcagttggagcgtgttaatgtctactacaatgaagcctcctgcggacgctttgttccccgcgctgttctcatggatcttgagcctgggacaatggacagtgtccggaccggaccctatgggcagatcttccgccctgacaactttgtgtttgggcaatctggtgctggtaacaattgggctaagggccactacaccgagggtgctgagctcattgactctgttctggatgttgtgaggaaggaagctgagaactgtgactgcttgcaaggattccaagtatgccactcccttggtggtggtactggatctggtatgggtacgctgttgatctcaaagatcagggaagagtaccctgaccgcatgatgcttacattctcagttttcccctcaccgaaagtatctgataccgtggttgagccatacaatgccactctttctgtccaccagttggtcgagaatgctgatgagtgcatggttctcgataacgaagccctctatgacatctgcttcaggactcttaagctgaccacccctagctttggtgatctgaaccatttgatctctgcaaccatgagtggagtcacctgctgcctaaggttccctggtcagctgaactccgacctcaggaagctggcagtgaacctgatccccttcccccgtctccacttcttcatggtcggcttcgcgccgctgacgtcccgtggctcccagcagtaccgggccctcacagtccccgagctcacgcagcagatgtgggatgccaagaacatgatgtgtgccgctgaccctcgccatgggcgttacctcaccgcctcggccatgttccgcgggaagatgagcaccaaggaggttgacgagcagatgatcaacgtccagaacaagaactcgtcctacttcgtggagtggatccccaacaacgtcaagtccagcgtgtgcgacatcccgcccaggggcctgtccatggcgtccaccttcatcggcaactcgacctccatccaggagatgttccggagggtgagcgagcagttcactgccatgttcaggaggaaggctttcttgcactggtacacgggcgagggcatggacgagatggagttcaccgaggccgagagcaacatgaacgacctcgtgtcggagtaccagcagtaccaggacgcgactgccgacgaggaggagtacgaggacgaggaggaggtgcaggccgatgacatgtgaggggagggctgttatcgtgtgaagccttgtggtccctagggcaagcggacctcgatgagttcggtgttccctttcgtgttgttgccatctttctactgctagcgtacccaccctcgtggcccattccgtcgctgttgacgtatgtatttttcttgtgctatggaaccttgcttttggtacggtactatcctgctagtatgcttggcgtttgaggttcctggcgtgaatttaagccttccgtatgcagtgattggagttggagaccggctgcttcgtccaggcgaagcaattgacagcgacgtgcta

SEQ ID NO: 116481 - DNA, 1746 bp, Zea Mays
gttgttcccgcgatgtaaccggaaatgcgattggatccgctgatttgccacctaggaatgtcctggcccatgcttgtctctctctctctctcttttgacgaaggttattcgattggttttgtgattgattctcttgtttgtagggcgaagatgagggagatcctgcacatccagggagggcaatgtggcaaccagattggcgccaagttctgggaggtggtgtgcgatgaacatggcattgaccctaccgggcggtacactggcaattccgaccttcagttggagcgtgttaatgtctactacaatgaagcctcctgcggacgctttgttccccgcgctgttctcatggatcttgagcctgggacaatggacagtgtccggaccggaccctatgggcagatcttccgccctgacaactttgtgtttgggcaatctggtgctggtaacaattgggctaagggccactacaccgagggtgctgagctcattgactctgttctggatgttgtgaggaaggaagctgagaactgtgactgcttgcaaggattccaagtatgccactcccttggtggtggtactggatctggtatgggtacgctgttgatctcaaagatcagggaagagtaccctgaccgcatgatgcttacattctcagttttcccctcaccgaaagtatctgataccgtggttgagccatacaatgccactctttctgtccaccagttggtcgagaatgctgatgagtgcatggttctcgataacgaagccctctatgacatctgcttcaggactcttaagctgaccacccctagctttggtgatctgaaccatttgatctctgcaaccatgagtggagtcacctgctgcctaaggttccctggtcagctgaactccgacctcaggaagctggcagtgaacctgatccccttcccccgtctccacttcttcatggtcggcttcgcgccgctgacgtcccgtggctcccagcagtaccgggccctcacagtccccgagctcacgcagcagatgtgggatgccaagaacatgatgtgtgccgctgaccctcgccatgggcgttacctcaccgcctcggccatgttccgcgggaagatgagcaccaaggaggttgacgagcagatgatcaacgtccagaacaagaactcgtcctacttcgtggagtggatccccaacaacgtcaagtccagcgtgtgcgacatcccgcccaggggcctgtccatggcgtccaccttcatcggcaactcgacctccatccaggagatgttccggagggtgagcgagcagttcactgccatgttcaggaggaaggctttcttgcactggtacacgggcgagggcatggacgagatggagttcaccgaggccgagagcaacatgaacgacctcgtgtcggagtaccagcagtaccaggacgcgactgccgacgaggaggagtacgaggacgaggaggaggtgcaggccgatgacatgtgaggggagggctgttatcgtgtgaagccttgtggtccctagggcaagcggacctcgatgagttcggtgttccctttcgtgttgttgccatctttctactgctagcgtacccaccctcgtggcccattccgtcgctgttgacgtatgtatttttcttgtgctatggaaccttgcttttggtacggtactatcctgctagtatgcttggcgtttgaggttcctggcgtgaatttaagccttccgtatgcagtgattgga

SEQ ID NO: 116482 - DNA, 237 bp, Zea Mays
tacctcctctctgctgcttttcgtagaatcatgcacatgaaatgctttctcgactttttcgattgcagctctagccttttcaatttcagcaagtgcaagagccctttcctcttcagctactttgcgtgcatctacacagacctgcttaaggaagttagccaatttttttacttcagccttctcataaattaactccccttctcgttgtgtcagctggacagctagtgcctccacctg

SEQ ID NO: 116483 - DNA, 1293 bp, Zea Mays
atggttcaagaagtagtttcgaaggatatgtatgcttatttgaaaaggaacacaaggcttgtgctttctgttgatagtgaggaaggaggacaggaagatggtgatgctactgaacctgaacaaacaaaagtacaggaaccaagttcagggacaaagcacaagcaagtgaagaagaaagcaactcaaaccgccatcagcttcattgttgttttaactcatcccacccaaaagttcagcaagtcagtggctaccatgttttgcaggacgccacaagaaaataccattcagtcaactcttgaagcttgcactaggaaaggaaaggaagccaaccaaattgttgacgaccacgtcgccgattttctgtatgagaacaaaataccattgcacgtcgtcaattcaaggagctcggaagttatgttggagtcaattggtccatggtaccatgatgttagggtaccttggcttgatagggctgtcgataggacaacgacattgaggttgaagcatgaacaggcttggaaggaatatgactgctcaattatatcagatgcgtggaccgatacaagacagcggcatttgatcaactttcttgctaatagtcctgcagggacattctttttagcttttgttgatgcaccgaaggacatcggaaaaatcaaggaattcagcgactacattactatggcaaagagggtgtcgaggttcctctacaagcatgggcgatttcatagcctaatgagggagaagctaggtggggaccttgttaggccaggtattactcggtttgcaacatcaatcctcactttggcaagcatgcaaaaacataagaatggtcgcacagtttgtttatttgtgatgagtggcagatttctaaattctctaccagtcaagaagggcttcacaacccttctcattgctctaaagattgttgatggtgatgagacaccagcagctccagagatcatggcagcaatgggtaaagcacgagacaccatccaggaagcactgaaagggaagcctagagtacttaaagaaatccatacaaaaaagaggaacagactggagcaccagaggctaaataaattggcatatactcagacagaaagctatgctagaaccagaaaacgacccataaatgcagcagctacagctcaagacatacgtgaagatgacaattctcctgctgaagatgaacaagaacaaatgaatgatgatgaagatgaaggcgaacaaggatcaggtggaaggggagctgctggtgatgaatttcagttggacgaagatcttctttag

SEQ ID NO: 116484 - DNA, 1964 bp, Zea Mays
gagctcccgcaacatcagcagcaaggacatcctggtggagccgtcgcgcatctcacgcttccttcacctgaccaacagccaagccgggaggcacgcttgagagccacacactgagacctcacgcgcggatggccgccgccgcgggcgggaccggcggctgcggctgccacattgtagcggtgccgttcccgggccgcggccatgtcaacgccatgatgaacctgagccgcctcctcgcagcccggggcgcggcggtcaccttcgtcgtcaccgaggagtggctcggactcatccgctcctcctccgccgccgccgctgccgagccggccggcatccgcatccgcaccatccccaacgtcatcccttccgagcacggccgcgccgccaaccactcaggcttcctcgacgccgtcgccacagagatggaggcgcccttcgaccgccttcttgacgggctcgaaggcccgccgcccgcggcgctcgtggccgacgcctacgttccctgggtggtcggcgtcggcaaccggaggggcgtccccgtctggtcgctcttccccatgtccgccgcctttttctttgcctactaccacttcgaccgcctcccggcctggcttaccaactctgagcacgcgccggaatccggaaactctgatcagagacttgggcactatatcgctgggcaggcttcaagttcaatacggttgtcagatctcgagcccttaattcacaacaagagaacagtgaagcatatcctaacaactatctctagcatcagaaatgctcagtctctccttttcaccaccatgtatgagcttgaggccagtgtcattgactcgctaaggtcagtactctcttgtccagtgtacccaataggcccctgcgttccatacatgatgcttgaagaccataccgtgtccagtggcaaagttgccaggcaaggagattatttcacatggttggattctcaacctgtgaactcagttttgtatgtctcccttggcagttttgtttcagtctcagcctctcaacttgaagagatcgcattgggcctaatagccagtgaggtcaggttcttgtggattcttcgagaacaatcccctcgggtgcaagaactcttctctggcatcaataatgggatgatactgccatggtgtgagcagcttgaggtgttgtgccatcattcagttgggggcttcatgacccattgcgggatgaactcgacacttgaaggcgtcttcgctggtgtgcctatgcttgccttaccactgttttttgatcaaccgattgatgggcgattaattgtggaagagtggaagattggccttgccgttagggattgggctagcaagggtggtctgatcgggagagaggatattgcacgggctgtgaagaagctgatgtcttctgatgaaactgggacaaaggcgctgagggaacgtgctcttgagttgaaggaggcttctcgcagagcagtcaatgagggtggatcttcatactgcaatctgagttcattgatggagacggtatgcactccaaaataattggaattgtatttggtatgtgctaaaacactgtagtggtggtgtaacctgtaaccatcatgcttcaaatatcaattctacaatcaacccttgcgcagctcaactctttagaatttgtgcaactttcggaaagggtgatgatgcgattgatgtacgatttgttcaatacgttgttattttgtccgagctccatttggattgtacttatagcaaaatgtcttcgtttcaagatagctgcgaattagcttgaagtttcaaatttacagcagcctttgaattgtacttatagcaaaatggattgtacttaccattttgatcctgaagacttgagcagcctttgaaggacaagggtgtttgggtctggtttttgtaaggaaaaataacatttgatcaatgaattttggtgtttaataatcaaacata

SEQ ID NO: 116485 - DNA, 1976 bp, Zea Mays
gagctcccgcaacatcagcagcaaggacatcctggtggagccgtcgcgcatctcacgcttccttcacctgaccaacagccaagccgggaggcacgcttgagagccacacactgagacctcacgcgcggatggccgccgccgcgggcgggaccggcggctgcggctgccacattgtagcggtgccgttcccgggccgcggccatgtcaacgccatgatgaacctgagccgcctcctcgcagcccggggcgcggcggtcaccttcgtcgtcaccgaggagtggctcggactcatccgctcctcctccgccgccgccgctgccgagccggccggcatccgcatccgcaccatccccaacgtcatcccttccgagcacggccgcgccgccaaccactcaggcttcctcgacgccgtcgccacagagatggaggcgcccttcgaccgccttcttgacgggctcgaaggcccgccgcccgcggcgctcgtggccgacgcctacgttccctgggtggtcggcgtcggcaaccggaggggcgtccccgtctggtcgctcttccccatgtccgccgcctttttctttgcctactaccacttcgaccgcctcccggcctggcttaccaactctgagcacgcgccggaatccggtgagactattggaaactctgatcagagacttgggcactatatcgctgggcaggcttcaagttcaatacggttgtcagatctcgagcccttaattcacaacaagagaacagtgaagcatatcctaacaactatctctagcatcagaaatgctcagtctctccttttcaccaccatgtatgagcttgaggccagtgtcattgactcgctaaggtcagtactctcttgtccagtgtacccaataggcccctgcgttccatacatgatgcttgaagaccataccgtgtccagtggcaaagttgccaggcaaggagattatttcacatggttggattctcaacctgtgaactcagttttgtatgtctcccttggcagttttgtttcagtctcagcctctcaacttgaagagatcgcattgggcctaatagccagtgaggtcaggttcttgtggattcttcgagaacaatcccctcgggtgcaagaactcttctctggcatcaataatgggatgatactgccatggtgtgagcagcttgaggtgttgtgccatcattcagttgggggcttcatgacccattgcgggatgaactcgacacttgaaggcgtcttcgctggtgtgcctatgcttgccttaccactgttttttgatcaaccgattgatgggcgattaattgtggaagagtggaagattggccttgccgttagggattgggctagcaagggtggtctgatcgggagagaggatattgcacgggctgtgaagaagctgatgtcttctgatgaaactgggacaaaggcgctgagggaacgtgctcttgagttgaaggaggcttctcgcagagcagtcaatgagggtggatcttcatactgcaatctgagttcattgatggagacggtatgcactccaaaataattggaattgtatttggtatgtgctaaaacactgtagtggtggtgtaacctgtaaccatcatgcttcaaatatcaattctacaatcaacccttgcgcagctcaactctttagaatttgtgcaactttcggaaagggtgatgatgcgattgatgtacgatttgttcaatacgttgttattttgtccgagctccatttggattgtacttatagcaaaatgtcttcgtttcaagatagctgcgaattagcttgaagtttcaaatttacagcagcctttgaattgtacttatagcaaaatggattgtacttaccattttgatcctgaagacttgagcagcctttgaaggacaagggtgtttgggtctggtttttgtaaggaaaaataacatttgatcaatgaattttggtgtttaataatcaaacata

SEQ ID NO: 116486 - DNA, 1585 bp, Zea Mays
gagctcccgcaacatcagcagcaaggacatcctggtggagccgtcgcgcatctcacgcttccttcacctgaccaacagccaagccgggaggcacgcttgagagccacacactgagacctcacgcgcggatggccgccgccgcgggcgggaccggcggctgcggctgccacattgtagcggtgccgttcccgggccgcggccatgtcaacgccatgatgaacctgagccgcctcctcgcagcccggggcgcggcggtcaccttcgtcgtcaccgaggagtggctcggactcatccgctcctcctccgccgccgccgctgccgagccggccggcatccgcatccgcaccatccccaacgtcatcccttccgagcacggccgcgccgccaaccactcaggcttcctcgacgccgtcgccacagagatggaggcgcccttcgaccgccttcttgacgggctcgaaggcccgccgcccgcggcgctcgtggccgacgcctacgttccctgggtggtcggcgtcggcaaccggaggggcgtccccgtctggtcgctcttccccatgtccgccgcctttttctttgcctactaccacttcgaccgcctcccggcctggcttaccaactctgagcacgcgccggaatccggaaactctgatcagagacttgggcactatatcgctgggcaggcttcaagttcaatacggttgtcagatctcgagcccttaattcacaacaagagaacagtgaagcatatcctaacaactatctctagcatcagaaatgctcagtctctccttttcaccaccatgtatgagcttgaggccagtgtcattgactcgctaagttttgtttcagtctcagcctctcaacttgaagagatcgcattgggcctaatagccagtgaggtcaggttcttgtggattcttcgagaacaatcccctcgggtgcaagaactcttctctggcatcaataatgggatgatactgccatggtgtgagcagcttgaggtgttgtgccatcattcagttgggggcttcatgacccattgcgggatgaactcgacacttgaaggcgtcttcgctggtgtgcctatgcttgccttaccactgttttttgatcaaccgattgatgggcgattaattgtggaagagtggaagattggccttgccgttagggattgggctagcaagggtggtctgatcgggagagaggatattgcacgggctgtgaagaagctgatgtcttctgatgaaactgggacaaaggcgctgagggaacgtgctcttgagttgaaggaggcttctcgcagagcagtcaatgagggtggatcttcatactgcaatctgagttcattgatggagacggtatgcactccaaaataattggaattgtatttggtatgtgctaaaacactgtagtggtggtgtaacctgtaaccatcatgcttcaaatatcaattctacaatcaacccttgcgcagctcaactctttagaatttgtgcaactttcggaaagggtgatgatgcgattgatgtacgatttgttcaatacgttgttattttgtccgagctccatttggattgtactt

SEQ ID NO: 116487 - DNA, 2023 bp, Zea Mays
ataatcgctccagtcaaatctcctctatgtacaggaggtgatagtcttcagcccagctcgctctgcagtcttcgcgtagcaaaaacaatggccacagcggcggcagctcggcacgtggtcgcagtgccgtaccccggccgaggtcacgtcaaccccatgctcgtcgtgtgccgcctgctcgccgccgcggacgctgccttgagcgtgaccgtcgtcgtcacagaggagtggcacgcgctgctggccgcagcgggggtgcccggcacgctccccgaccgcgtccgcctcgccaccatccccaacgtcatcccctccgagagggtccgcggcgccgacttcgcaggcttcgtcgaggccgtgcatatcaagatggtggcgcccgtcgagcggctgctggaccggctgtccctggagcggaagccggacgccatcgtggccgacaccttcctggcttggggcgttggggttggatctgcgcgggggataccggtgtgctcgctgtggacgcaaccggccacgttcttcttggcgctctggcacctggaccgttggccgccggtggatggtcatcaaggggaagaaggcctaagctgcaggtccctggatcaatatctcccgttcccagccctcgcgccggtaaaatgttctgatatgaagaccctccgctccatggtgctgccaatgaaacggctagcgcaggtgttctccaacctgcgcaaggcacagtgtgtcctcttcacctccttctacgagctcgaaaccggcgccatcgatggaacatcgcaagtggttccatgccctatatatgcagttggcccttcaattccatatatgccactggaaggtgattcgggcgagtttcaccatgaagaagactacttcggttggctggatgcccagccaagaagctcggtactgtacgtctcatttggcacccatgtctcgatgccttcgtctcagctggaagaggtcgccctggggttgcatgaaagcacggttaggttcttctgggtggcccgggacagagctagcaccgccacccttgagcagatctctgctggtggcaagggcttggtggtgccgtggtgtgaccaactgaaggtcctgtgccacccctccgtcggtggcttcctgagccattgtgggtggaactcgaccctggaggccgtgttcgctggagtgccgatgcttgcctttcccgttgcttgggatcagctggtgattggccatctcgtggctgatgagtggaagatcggcgtcgacttgagggaacggagaagggaggatggtgttgtcggaagggccgcgatctgcgatactgtaacgaagcttatggatttgactgacgatgatagcctagagatgagaagaagggctgcggagctgagagaggcttcacgccgcgcagttcaggaaggtggatcttctcggtgttctttgaacagtttcgttagagatgtcatcgaaggaagactgaatgttgcagaaacttcacggtaggtttttgcttgaatttgtagtttcagggggacagaactgttgctcgtaggcagaaacgttgtgctcctgcaagtaaaggtacgtggctcctatcatgttcacgcatattcaccgccaccccactcgcaacaattattactggcttgaaatcacgattgccacagtgcaggagtatagctgcacattttctgaagctgaaaacagaagacttgatgctgtctgtagcaaagatgggggacagcgatagtgatggcacaaaaaattctgtgctcctggacttgtgtaggttatgcacgtgatgagcaagcgtgtatatagccataaaaaatattgttttacatcgtatattatttatatagtaaagtttggataagaagtgtgatggggaaggataagaaagacttctagagcagcctaaaaatattaatatcgtggaataatcaagagctttgtatcgtaacagagtttatatgtacttcttaaaaaagtggtgttgtattttatataccaaagtttataggtt

SEQ ID NO: 116488 - DNA, 1921 bp, Zea Mays
ataatcgctccagtcaaatctcctctatgtacaggaggtgatagtcttcagcccagctcgctctgcagtcttcgcgtagcaaaaacaatggccacagcggcggcagctcggcacgtggtcgcagtgccgtaccccggccgaggtcacgtcaaccccatgctcgtcgtgtgccgcctgctcgccgccgcggacgctgccttgagcgtgaccgtcgtcgtcacagaggagtggcacgcgctgctggccgcagcgggggtgcccggcacgctccccgaccgcgtccgcctcgccaccatccccaacgtcatcccctccgagagggtccgcggcgccgacttcgcaggcttcgtcgaggccgtgcatatcaagatggtggcgcccgtcgagcggctgctggaccggctgtccctggagcggaagccggacgccatcgtggccgacaccttcctggcttggggcgttggggttggatctgcgcgggggataccggtgtgctcgctgtggacgcaaccggccacgttcttcttggcgctctggcacctggaccgttggccgccggtggatggtcatcaaggggaagaaggcctaagctgcaggtccctggatcaatatctcccgttcccagccctcgcgccggtaaaatgttctgatatgaagaccctccgctccatggtgctgccaatgaaacggctagcgcaggtgttctccaacctgcgcaaggcacagtgtgtcctcttcacctccttctacgagctcgaaaccggcgccatcgatggaacatcgcaagtggttccatgccctatatatgcagttggcccttcaattccatatatgccactggaaggtgattcgggcgagtttcaccatgaagaagactacttcggttggctggatgcccagccaagaagctcggtactgtacgtctcatttggcacccatgtctcgatgccttcgtctcagctggaagaggtcgccctggggttgcatgaaagcacggttaggttcttctgggtggcccgggacagagctagcaccgccacccttgagcagatctctgctggtggcaagggcttggtggtgccgtggtgtgaccaactgaaggtcctgtgccacccctccgtcggtggcttcctgagccattgtgggtggaactcgaccctggaggccgtgttcgctggagtgccgatgcttgcctttcccgttgcttgggatcagctggtgattggccatctcgtggctgatgagtggaagatcggcgtcgacttgagggaacggagaagggaggatggtgttgtcggaagggccgcgatctgcgatactgtaacgaagcttatggatttgactgacgatgatagcctagagatgagaagaagggctgcggagctgagagaggcttcacgccgcgcagttcaggaaggtggatcttctcggtgttctttgaacagtttcgttagagatgtcatcgaaggaagactgaatgttgcagaaacttcacggtaggtttttgcttgaatttgtagtttcagggggacagaactgttgctcgtaggcagaaacgttgtgctcctgcaagtaaaggagtatagctgcacattttctgaagctgaaaacagaagacttgatgctgtctgtagcaaagatgggggacagcgatagtgatggcacaaaaaattctgtgctcctggacttgtgtaggttatgcacgtgatgagcaagcgtgtatatagccataaaaaatattgttttacatcgtatattatttatatagtaaagtttggataagaagtgtgatggggaaggataagaaagacttctagagcagcctaaaaatattaatatcgtggaataatcaagagctttgtatcgtaacagagtttatatgtacttcttaaaaaagtggtgttgtattttatataccaaa

SEQ ID NO: 116489 - DNA, 1390 bp, Zea Mays
ggtgtggtggataaggcgttcctgccgcgcgcgttaaaccagttgctcggctcggctgtgcctgtgtccccccgaaaatggcctcgtccccgctcttcacctcgctccggctgcccgtgcccaccatcataccgcgctgtgcttctccgccgcacggcgtgccctcggcggacgacgccgtccctcggccggcgcctctcgtggcggccgctagccacaggagggagctggtggtaggggcggcgctgaccgcggtgctgttgccgagggcgccgctgccggcccaggcgcgcgaggtcgcggtcggcacgtacctgccaccggcgccgtccaacccgggcttcgtcttcttccgcgccacccccaaggacacccccgcgctccgcgccggcaatgtggagccgtacgagttcatcctgccgccgacctggaagcagacgcgcgtcgccaacatcctgtccgggaactactgccagcccaagtgcgccgagccgtgggtggaggtgaagttcgaggacgagaagcagggcaaggtgcaggtggtggcctcgccgctcatccgcctcaccaacaagcccaacgccacgatcgaggacatcggcagccccgagaggctgatcgcctcgctggggcctttcgtcaccggcaacaccttcgactccgacgagctcgtcgacaccaacgtcgagaacgtcgatggacagacttactacagctacgtgctggagactccattggcgctaacaggttcgcacaacctggccaaggccaccgccaaggggagcacggtggtgctgttcgtcgcaagcgccaacgacaagcagtggccggcgtcgcagaaggttctgaaagccatagtggactcgtttcaaatatgactggtttgggtgatgcgttacgttgttggcaacatctatcggcctttttgacttgagttcagttgagttgcttgtacccgaagctctaaaatacgaggtatataactatatactacaagcttataaagccaaaagggaaaagaaggcactgcttgttttaggcttgagtgacggttgctgttcgtagcttgtcgaagacgacatgtcagatgtacatgtacacggaaatgaactttttcagtaacgaaatgctggttaatatcttgacactatctccagcatatctctccattttaaatttgtctatgcaaacaatgttaaatagtgtcatctacagttatacgtcttctattttacacactctactgaagacagtctatattggacaaagatgcatttttagttttaatttaatacagaaaattacagcgatgtgtgtgacgacatatatgtgcatgtgtgtatcactacttgtcggcgtttcgaccccggggggtccctggaccgacgag

SEQ ID NO: 116490 - DNA, 853 bp, Zea Mays
cagaggccgcgaagcgcacctccatgacttgcttctcgtagtccctgagctggtgcgcgtaggtcatgtccttgttggccacccggaacatgtaggtggagatccaccccaccgtcatcccgagcaccaccagcagctgcacgacgttgccggcctgcaaggggtcaactcccaggagctgcgcgtagcgtttcccggcgagtaaatcagaagcagatgaaaaacaaacgaaacttttgcagtgaacatggacagacacggcggcggcaccgacaccggctcctcacctcgagcccgtacttgaggccgacgccgaaggcggtgacgccgaggccgatcagcagcacgtctttcctcgtgtacccgaacggcgcctgcacgcgaccgtagtaccccgctcgatcggttagtttttgtgcgtgctttgtgtttggtggtgtgggggcgtggattaccttctcttgtttcggggattgggagtcatccgtgctgctctccgaggtgctgctccgtgccgccaagcgccgcctctgcctggcggatctgagcaggccggtccgtggtggcagcagcacgattttggcttaggggggagcacgaagcagtaaaaagaaaaggattggattccgaccaaattaaccagcgcaagatggcgagaaagataagagagttgcagtggcacgtactggaagagtggaaagggtgcagggaggctaccctggcggagcggacggcgccggcgggggcgagcgcagctgccgcgcgggagaccgaagccacgggagcggccaccggtgccggagccattgcctgacgcgctactcccgctcggctcggccgcacgccagtaagt

SEQ ID NO: 116491 - DNA, 1298 bp, Zea Mays
gccgacggctcacacgtccgaagggacacgcctgtacagttcctccttgtccaggcgcggcgtggcgacggcctgcagcggcgtggccatgaaggtgacgagcccgggggactccatcatgctcacgtcctcgggacaggtcccgctcggcagcgtccacgtgaagtggtgcagcatgtggccgatcatggacgccacgaggttgatcccgagctgcgcgccggggcacacccggcggccggcgccgaacggcagcacgcggaagtcggcgcccttgatgtcgatgttctcccggaggaaccgctccggccggaactcgagcgggctgtcccacacctcggggtcgcgcgccaccgcccacacgttgacgacgacgttggcgcccttggggatgtcgtagccggcgatcttgacgctggcgctggccctgtgggggagcatcagcggcgtcggcgggtgcaggcgcagggactccttgacgacggcctgcaggtaaggcaggttcgggaagtccgtctccgacaggacccggtcgcggccgacgacacggtccagctcctcctgcagcttctcctgcactctggggttcctcagcagctccgccatcgcccactccaccgagatcaccgtcgtgtccgtgccggcggtgatcatgtcctggacaacacaacccacgtacgcagcaagccggtcgatggccagtctcatcagtcagtgaatacaatcaagcacacaaacagatcggcacggaacggaagaaagatggacgggccacattaggcagaggcagcgcgcgtacccagaggaggcctatgacggtgtcatcgctgaggtcgtacttgtccctgagagtgaagagcgcgtcgacgaagtgctgctgggcgccgcgctgcttgagggccctggcgtgctcctccatgatcttcacggtgaggcggtcgcgccgttcgccgtgggctttgaaggcctgctcgtcgaccggggccagccagcgtagccacgggatgtgctgcgcgatggagagggacgcaccgatcttgatgccgttgtggacgatccccttgaactcgcgcccttgctcgtccagctcgccggccgcgtccacgaaccgcttcccgaaggccagccgcgtgatgttgttgaaggccaccatcgagaggtggttctttacaaccaacggcttccctgcactgcctgcgtgtaagcagggaaaataagggtgtgctctctgagtgcaaggatttcattgagaacaaacagctcaatgattcaatgaaatcgataacgtagttctccta

SEQ ID NO: 116492 - DNA, 876 bp, Zea Mays
gaaagggctaaaatacaaaaaagttggccgccacaacaatatcgcattgacatatcgttcatcggatccagtcctctcccgggatctcctccggctataaatttccggccccaattcacccaatccagatgcgcaaacatcgaatcgtctcgctagtggctgccctactcgtgctgcttgccctcgccgccgtttcctccacgcgcagcgcacaaaaggagtccgcggctgacaacgccgggatgttggcaggcggcatcaaggacgtgccggcgaacgagaacgacctccagctccaggagctcgcgcgcttcgccgtcaatgagcacaaccaaaaggccaatgctcttctggggttcgagaagcttgtgaaggccaagacacaagtggttgctggcacgatgtactatctcactattgaagtgaaggatggcgaagtcaataagctctatgaagctaaggtctgggagaagccatgggagaacttcaagcagctgcaggaattcaagcctgttgaagagggtgctagcgcctaaggttgtggccacagcccggctctcgcaggatctgtcgtctccctgtgcaatttgctgcctgaagcgcaaaactaagttgcagaataaggagctgcttcggaacatgccagagcatgcaccctcgcgtattttcataaaatcagtgctcttaatgtaatatcttgaattgccgtgccatgtgtaataagtaatatcatgaataacagttgctattatgggttctaaatgtgtattaacagccatccatggcagagttctcatattactttgctgaagtctttgttggaatatacatgacagaattctcacattgccttgctgaagtctttgttggaatttt

SEQ ID NO: 116493 - DNA, 653 bp, Zea Mays
gaaagggctaaaatacaaaaaagttggccgccacaacaatatcgcattgacatatcgttcatcggatccagtcctctcccgggatctcctccggctataaatttccggccccaattcacccaatccagatgcgcaaacatcgaatcgtctcgctagtggctgccctactcgtgctgcttgccctcgccgccgtttcctccacgcgcagcgcacaaaaggagtccgcggctgacaacgccgggatgttggcaggcggcatcaaggacgtgccggcgaacgagaacgacctccagctccaggagctcgcgcgcttcgccgtcaatgagcacaaccaaaaggccgatctgtcgtctccctgtgcaatttgctgcctgaagcgcaaaactaagttgcagaataaggagctgcttcggaacatgccagagcatgcaccctcgcgtattttcataaaatcagtgctcttaatgtaatatcttgaattgccgtgccatgtgtaataagtaatatcatgaataacagttgctattatgggttctaaatgtgtattaacagccatccatggcagagttctcatattactttgctgaagtctttgttggaatatacatgacagaattctcacattgccttgctgaagtctttgttggaatttt

SEQ ID NO: 116494 - DNA, 196 bp, Zea Mays
caaaccgggctccgtctccgttgtccccaccgtgccgaaccattaagcaatcagcagcagcgacaaacgaccgagcaaggagcgacactgacacgcgcgccgggcaagcttgcccgcttccgcgtggaaaaacagagaccagtttggcaagctggcgagggcgacgcctatacggccttggcgggcggcggctacc

SEQ ID NO: 116495 - DNA, 1094 bp, Zea Mays
cacactcgctaggcctggttgtcagtcttgcggtcgccgtgcgagtcgcgctcctgcagcagcgacccggcctcctcgtcggcctgcgccgccttcttctgcgcctccttggccttgagcgcctgcagcttgacgtggttgtagtatcccaccccgaggaaggcgatcccgtagccgaagaggttgatgggggtgacggtgtcgcggatgacggaccaggagaaggcgatgagcagccagtccttgacgacgccggcgacgttcatggtgagagccgacgtcttgccgacgagcaggaagacggcgaggttgagcgcgaaggcgcagagggagttggtgccgaagacgaagaggtccggctggaagatgccgacggcgcgcagcctgggcagctcgacgaagacccagggcacgacgaggaaagcgaggcagcagggcgcgacgtagtagagcgaggtgatggggttgagggagatgcccttggaggtgaggaggatctggatgaggacgaggcgcgtggcctcgaaggcgacggcggcgagctgcagggcgacgccgcgggcgtcgaagcgggcctctccgtaggcggcgatggcgacgccgaacgagatggagagcatgttgagcatggcggaggacttgaaggtctccttcttgaagaggaccccgatggagtagacggcgacgggcatgagcgccttgagcatctggatgaaggagacggagaggtagatgtaggcggagttggagaaccagagcgagagcgagtagagcgcgccgatagggagcacggaggagacgtagagctgcgacgtcatggcgggcgaggacgggaggtcgacgacgcggaggacgcggacgagcgccacggcgagggaggagcagaaggccatgtgcaccatggtgagggagatggggaagggccagttgtacatcttggggtcgaggatgtacttgttgtagacgatcacggagaaggagaggaagatccacaccgccacgtacatgtacgagaccaggaccttgcggatcaccgactccgacatgccgccgtcgctggccccttccttgcccatggctggcctctggccccc

SEQ ID NO: 116496 - DNA, 1089 bp, Zea Mays
atgccggagtggccatttgtcaagcggcggatggcgccacgacaccttggccggtcgcgtcctgccccgacacccaagcctttcggggagcacgcgaagtggtcaacgactcgcgtcagcgaccgcgcgtacagtatattatatcttcttcatcccccctgccactgcccgctgcgcgctctgcatcgcctaggtaggaggagtaggactctctggcttgggttggcaatgagcgagggcgcgcggaacacgcgccagttcttcgccgcgtcgaccagcggcagcgggagcagcagcgcgacctaccgggacggcggcggcggcatcggcgtggcgcgggccagtctcgtgaacacggggatcctggacgagaacgtcctggcgctggtgttccggtacctcaacttcgaccccaaggcgctgtgcaccgtgtcctgcgtcagcaggcggctgcgggccgtcgcggagcgcgtgctgtggcgggagctctgcgtctcgcgggcgccgcggatggtggcctcgctcgcgggcggcggcgcgcccccggggcgcgtcgtgggcgggtggccggcgctggccaagctgctcctcttctgctgcggcgcggcggcggcggccgtgcggggccacttcacgggcgtgtcccgcttctccaagacgtccggccggagcttcctgtcgcgccggtgccggggcgacctgctctacgtgtcggacccctgcgagcacgccgtccacggcgccgacgacgacgtgggcgcctaccgcggcgtgttccggggattcacgcgctcccggacgcgcgcgtgcctggtggggcgccgggccccgctggagacgcgcgtgcgctgcccctactgcggcgcgcgcgtctggagcatggtggcggccgggatggcgccgcgcagcgcgtgccgcaggctcggcgcccacgagggacgcctccagtactacgtctgcgtcagcggacacctccacggcaactgctggctcgcgcgcctcacctccagcgacgccgatcgcgacgccgactccgaggatgacgcttccacggaaggcggcgacgatggcgcccacgtggcgccgtaa

SEQ ID NO: 116497 - DNA, 1669 bp, Zea Mays
atggccaaacacatggtgatgacaaggaacgccgaacgcgaccttgaccggagcagacgtttggagtctcagaccaatcgtcatatccgaccccataattttatttcgacatatcaagtctaaagcaagcgcactactcctcggatagccacggcagcagcagcagccatggcttgctccgcgcaccttgtgtcccagagcctctactcgtcccaccgcgccagcccgggcgggcctaggaatctccgttcccagggccgaccgccggcgcgggcgtctccctctgcgaggcctggctcaagggtcagtggctgccggggtgtcagcctgagagtcgccgcgtcgttcgagcagggaaggaggcaagtggaggtctcttatgacccacaagcgaggtttaaccagatagcagaccaaattgacaaggatgctgggatgacacggcttaacctattctcaccttgcaaaattaatgtgttcttgaggataacgggcaagagaccagatgggttccatgacctggcttctctatttcatgtcataagtttgggtgatactatcaaattctcattgtcaccaagtaaaagtagagatcgcctgtcaaccaatgttccaggtgtcccagttgatgaaagcaatttgatcatcaaggcactcaacctttaccgacagaaaactgggactaataacttcttctggatacatcttgataagaaggtcccaactggtgctggtcttggtggtggaagcagtaatgctgcaactgcactatgggccgctaaccagtttgctggctgcatagcttcagagaaggatcttcaagagtggtctggtgagattggatcagatatcccctttttcttttcacgaggagcagcatattgtacaggtagaggagagattgtccaagatatcccaaatcccttgccggaaaatttaccaatggttcttataaagccacctgaagcatgctcaactgctgaagtttacaagcgattcaggttggaacaaacaagtcaagctgatcccatgaccctgctcgaggaaataactcagaatgggatatcacaagatgtttgtgttaatgacctagagcctccagcttttgaggtgttgccctcacttaagaggttgaagaaacgaattattgcagctggccgggatgattatagtgctgtttttatgtcaggaagtggaagcacaattgttggtattggttcaccggatcctcctgcattcgtgtatgacgatgaagactacaaggatgtttttgtgtcagaggcttgcttgctcactcgcgacgagaacgagtggtacagggaaccaatctcggccaatgccacgtctggcaaagaaggtttgcaagcctcggttgctgactgatttaagtcaggttctgtatcagttttgtgactattatacagatacaggatttgatcaacgcctcgacatggtaggaaagaacactacggtataggcggggattgttcacaagacaatctggttctggaatggaccattttcagtatagcaactattgatttgagcaacagtcagactaatggttccaggagaaatttatcccgtagatgtataaggatcaaatgaacaagggaaaatgactttctccgtgaatttttaacaatacaagcacacgtagttttgaaac

SEQ ID NO: 116498 - DNA, 978 bp, Zea Mays
atgtccaatagggccacacattggtgttatgcctgtcggcggccaattcgtctccgtgggcaggatatcgcatgccccaactgcaatgatggttttatccaggaaattagtgagatgggtggcatattgaacacttatgggctaattgaaccagactttgaagagcgtcgagctagaagattcggaatgatggatgccatgtcttcccttatgcggcaacggatggaagaaatgggaagagatggtttgtttgatattcgtggtagacaaggaacaggtactgaatatggaaggaggccaactgctgttcctacattggtatttggcggcatcccttctcctggagttgatagcggtgatgttaatgttgtcctcaggggaggccgcagagttggcgctgcccaaccaaatttcagtagtttagttgttggtcccagtctggaagccctttttgagcagctacttctccagaacaaccgtcaaggcccagcacctgctccacagtcagctattgactccatgcctgtggtaaagataaaccgcaggcatcttgacgacgatccacagtgcgcagtttgcaaagacaaattcgaggttggagcagaggcacgggagatgccatgcaagcacctgtaccatactgactgcatcatcccctggctggttcagcacaattcttgccctgtttgccgccatccactgccatcacagagatcaggcagtaccagtagcgcccggccttcagcttactacaacgaagccgctgatcctcctggggtcaccagagcagatcttgaacctgctccaagagacggtggcagggaaagccaggaaaggcgccgctccttctcgtttctgtggccgtttggcccgtcgagttccagatccagttcttaccagtacgaacagaatgttgatgagcctgcagtatacgatccaaaccagatagcatattctgagtggcactatgaccactga

SEQ ID NO: 116499 - DNA, 774 bp, Zea Mays
atggagtcgaagttagtccgtagcgcattcaagcaggaggcgcagctccgcagcgacatcagcactgacggggatcatctcgccggcggcgaggggcaggggcaggggcggggagcgctagggcaagaggggtttgggggtcgagcgagttcttattcctttttatgggtccctcgtgatttcgggtcatcgaatcagtctgagggtggaccccacagagggtcgggctcgccgctgcgcgagttcctgtacatccatgaccattgctcactctccaactgcgccgacgacctaatcgatgccatcatgggatccatggccatcaccgtgtccaacaactacttcacccaccacaataagtggttggatttctcatctaatggtgaaggacaagacaatgcatgtgactcctatgtggaggacaaggcaatgcaggtgaccatagccttcaaccatttctgtgaaggtctcatccagagaatgccaagaatctcaatggttcttgtttcaagtgccggcaccaccagtgaggtgttaaaggttgtagaggatggactgagggaagctagctttgagattggacttgatgatcgaaaggtgcacaaggagatggacgagatctatacaatgttcttaaacatctctactcctattaatgtatacaataagttgtttgttttgcaatcaacactgcaggcaactataatctcgagaataccatggaatctcagtgttggtgtatgttgtattgacccttatcattcaaaatcttaa

SEQ ID NO: 116500 - DNA, 1018 bp, Zea Mays
acggatgtcgatggtgacccactcgctgtcgctgtggatgacgaccctccacatgagggcgcccacgttgctccccgccgtagtcgcgctggacggcttggcggccgcggtagcctggtggcgccagggcgagcgagatcgtgaggtagtggccaatagaagacggcacggcggcggcacgcggccatgcgggcgcagtgagactcgatccccgtcggcggcggcgtggagtcgtgtctatctgattccaggaatcaagcgtattgtggtgaacatgaactccacatcttctcagcgtggttaccctgccaagaggtggtgtgcagcgaacatgagctccacatctatgcgtcactctgcatggaagtctgagccctggactcaccttacccacaaacagagacgaccacaatggattgcttataatccaaggacaatgaggcctccaccacttagcactgataccaattctatgaagattctgtcctggaacgttaatggactgcaagctattgtacagtcagggttttctgcagatgaattggttgccagagagaactttgacgtcttatgtcttcaagagacacacttggaggagcgcaatgttgacctttttaaaaacctggtacatgaatatgattacacctgttggtcatgcagtgttgcaaggcttggttattcaggaactgctgttatatcacgggtacaaccaatctcagttcaatatgggcttggcataccagagcatgatcaggaaggcaggcttattaccttggagtttgatgatttttacttggtcaatgcttatgtcccaaattctggccgtggtttacgtagactgaattacaggatcaatgattgggatccatgctttagcgacttcataaagaaactggaatgttctaaaccagtaattgttgctggggatctaaactgtgctcgtcaaagtattgacattcacaatcctcaagtgccaattttgttaaggggaattgcagactttattttacattgttag

SEQ ID NO: 116501 - DNA, 935 bp, Zea Mays
ctacacatatcctcgagagccactttcgccaaggtccccataggccataggttgccctgcgggttttacaaaacaagaagaaaaaaaatcacctgctcaacggcggcatcatcggcaagacggcgggtttctgtaccaatctcagccttcgtgtctatctgattccaggaatcaagcgtattgtggtgaacatgaactccacatcttctcagcgtggttaccctgccaagaggtggtgtgcagcgaacatgagctccacatctatgcgtcactctgcatggaagtctgagccctggactcaccttacccacaaacagagacgaccacaatggattgcttataatccaaggacaatgaggcctccaccacttagcactgataccaattctatgaagattctgtcctggaacgttaatggactgcaagctattgtacagtcagggttttctgcagatgaattggttgccagagagaactttgacgtcttatgtcttcaagagacacacttggaggagcgcaatgttgacctttttaaaaacctggtacatgaatatgattacacctgttggtcatgcagtgttgcaaggcttggttattcaggaactgctgttatatcacgggtacaaccaatctcagttcaatatgggcttggcataccagagcatgatcaggaaggcaggcttattaccttggagtttgatgatttttacttggtcaatgcttatgtcccaaattctggccgtggtttacgtagactgaattacaggatcaatgattgggatccatgctttagcgacttcataaagaaactggaatgttctaaaccagtaattgttgctggggatctaaactgtgctcgtcaaagtattgacattcacaatcctcaagtgccaattttgttaaggggaattgcagactttattttacattgttag

SEQ ID NO: 116502 - DNA, 1146 bp, Zea Mays
cgcagtgaccagtgacgcgcacggatcaatcacgtaaaggcgagaccgcaaggacaccgagctacttcgaatacgaatacgagctcagcctgttccgagatggacgacgagagcgaggcgagagcaatgccgcggcggcccacgccgccgtcgccacccccgtgggaggcgctccacctcgtcgcgccgttcctcgacgccgcatccctcgcggcggcgtcctgcgtgtccacctcgtggcacaccgccttcgccgcggacgacctctgggcgcggctctgcgcgcagcacttcccctccgcgctgggcctcctccccgacaccgacagcgaccggcggtgctcctccccaccccaccgacgcctgttcaagctgttccgctccgcgtccgtccgctgccgcgcgctcccggccccgcgcctcgccctcgcggacgtctcgttcgccgtcgacgtcgtcacggccggcggcgacagcacgctgtccttcctggtagccgcggacaaggccgcccacgtcgagaattccgcggggctgttcctgttcggggtcgacctgagcggtcggaacggggcgatcgggccaggggagtggcgcgtcaggtggacggcggtgcggacggcggcgcgccgcggcgaggaacccgcggcggtcctgatgatggacgccaaggtgccggcggcaagggcggcaggagccgtcgccttcggcggcagaggtgaggcgggggtctcggcgaggctgcccgcgcccggctgcggcggcgccaagctggacgcggaggtggtggtagagctggctggggaggagaaggccgtcgggaaggtgaggctcggagtgatgtgcgagtgtcggtacgtgtgcgccgacgaggggctccggtacctgcagcatttcctcgtgtgatgtaaaacgcacgtgattcttcgatgatctcgtgcacgcggtcgaatgagaactccgcttgagggaagcagagtagtgtagctgtggaggtagtgcaatgaactgaaccccgaagtctcatttgttgttttcgccgtttaataatggtttcatcttgtagttgttcatatactttttcggacatctttgtgtgtgtgtgatgattctcagattaaagcatcttcaagagttctcaaaaca

SEQ ID NO: 116503 - DNA, 1022 bp, Zea Mays
aaggttctccatctggatattgctcttgagtggcacgtactccccaaggtaccctccaaggtgctcatacaacgcagtccggtcaatctgctggttgtggaaggccttgcaggcgtagtagaagacgctctgcacgagcagtcccagcaaattgacacagacaagaacgcacagcagcacggcgccgacaagcagccgcccgggcaaggccagaccgaagctcccctcctcggcgcgccccttaacgacggcggcacggaacagcacggaggtgacgccgcagaccgcgaagtaggagacgacaagcgtggctgcggtgccggtgcggccctggagcagatccttgctcttggccatggcggcgagtccgcagagcggctcgagcacggagatgacgctggcgaggtgccacagcgcggagatgtagacgtggatcccgaggaagacgaagacgacgacgacgaggaagagtacgaaggcgagggagggcggcgcggactcggactcggacgcgttggggatgaagacgacgatgagcaggaggacggtgagcgcgaagacgaggtggtaggcgagcatgagaagggagacccagaggaaggtgcggaggaggcggggcaggatggggggcagcgcggtgagcgaggaggagatggacgcgggcttgttggcgtagagcgaggcgacggtgaagacggcggcggcggtggagaggagggagaaggtgaagaggacgatgaggtagaggaactggtaggcgaagagcctgagccactgcgctagctcggagtgggtggcgccctggatgcggagcaggatggggtgggtgaagagggagtgcgcgagcacggcgaaggagagcgggaagacgaggcaggcggtgagcagcgcgaaggtgcggggagccgcgcgcgggatcgacgccgagacgcggaccagctccgccgcgcccagcgccgcaaggtcgctcgacgccaggtccatcgccacgggctgcggcttgtgtcggccggcccggttgg

SEQ ID NO: 116504 - DNA, 1337 bp, Zea Mays
cggcatttcactgtctccgcaaaaccctccttccagcttcacgcctgccacagccttgtcaatggcgtcggcgttagtgccggcctctttttccctggctcacccagcagcccgccgccccgtgaattcaaccggccccgcggcgatgttaatgttacgccgagcgggtctcgccaccgtatgcccgccggagcggtcgctgggctccgattgcctgagggctggcgctgacccgaggctggcgatccacgttgctttgcgctgccgctctgcgtcgtcgaccgggcgtgggacgcgcgccgcggcgacgatgaccaagaagagcgtgggcgatctcaccgcagcggacctcgaggggaaacgcgtgctcgtgcgcgccgacctcaacgttcccctcgacgacagccagaacatcaccgatgacacccgcgtccgcgccgccatcccaaccatcaagcacctcattagcaacggcgccagggtcatcctcaccagccatctgcaggagcttgattaccttgtaggagctgtttcaaaccccaaacgaccatttgctgctgttattggtggctccaaagtgtcatctaagatcggagttattgaatcactattggagaaatgtgacatccttcttctgggtggtggtatgatcttcacgttttacaaggcacaagggcactcaataggttcttccttggttgaagatgacaagcttgagcttgcgacctctctccttagaaaagcaaaggagaagggtgtctcccttatgttgccattcgatctggtcgtcgctgataagtttgctcctgatgctagcagtcaggttgttcctgcatctgcaattcctgatgcatggatgggtctggacataggtccagattcgatttcggcgttcagttctgccctggaaactactcagacagtcatctggaatggacccatgggagtttttgaatttgacaagtttgcagttggaaccaaggcaattgcaaagaagttagccgagcttagtggcaagggcgtcactacaatagttggtgggggagactccattgcagctgttgagaaggtgggtgtcgccgactctctgagccacatttcaactgggggtggtgcaagtttggagttgctggaagggaaggagctcccaggagtagctgcactggacgaagcttaggatgaccaagcttaggatgtcttcaggaacatcacctaaatttcattatctaaagaagcacattctaaaagatttcgtcttttatatcttctctatctccagtgtcctctaaattcggttctctatatttatagtgataacaaaattcttattccaattt

SEQ ID NO: 116505 - DNA, 1215 bp, Zea Mays
ctgtctccgcaaaaccctccttccagcttcacgcctgccacagccttgtcaatggcgtcggcgttagtgccggcctctttttccctggctcacccagcagcccgccgccccgtgaattcaaccggccccgcggcgatgttaatgttacgccgagcgggtctcgccaccgtatgcccgccggagcggtcgctgggctccgattgcctgagggctggcgctgacccgaggctggcgatccacgttgctttgcgctgccgctctgcgtcgtcgaccgggcgtgggacgcgcgccgcggcgacgatgaccaagaagagcgtgggcgatctcaccgcagcggacctcgaggggaaacgcgtgctcgtgcgcgccgacctcaacgttcccctcgacgacagccagaacatcaccgatgacacccgcgtccgcgccgccatcccaaccatcaagcacctcattagcaacggcgccagggtcatcctcaccagccatctgtgctttcagtctcctactctcctggaccccggtcttcacggtagcaggaaatgcagcatgcacaagacagggaaacataaccaaggagatcatccattttccttttccgtgtcagcttcatatgttgcttccactcagcactctgcaagtaccaagtaacaccaatgtaatggcttggagatatataatctagttggttgtccagccatccttcatcaccattttgccctctaattatgttgtgaaatgtaatggctgcagctgcgatcttgatttgattttctatgggatggaatgtgtctacttttagaattgggaaccttttcttaagaacaccaatggccctctctatatggttgcggagaattgcatggcgatgattgaataactctttgtagtttgcataaccactttgtgatgaacgactcctcctaaattgactgagatggtatcgaacacctctgtatggtgcaatgtatgatggtgtatttgcatacccaccatctacaagataaaactttccttctggcacactaaatcttttgctaatagcagatcgaagcacccctgcgtctgatgccgacccttcccatccacacgagacaaatgtaaaattgagatcaaagtcgcagactaccataacattgtgtgaaagagttccttttctatttctatatggaggggccctatcttctgcgatagtgatggatacatgtgtgccgt

SEQ ID NO: 116506 - DNA, 1806 bp, Zea Mays
aagtagtacgagtaacaaacaatccaatggacgcggcgaaatattggcacccggcagcacacccccaccaatcccgtgtccccacgatccagatcagaaacgcaaaggacaatcgacacggacgcgacgcgaaggcgacgcaccagcaccacctaaaattctaaaaaggcagggccgtttccccgaccaccgcccgacgaatcagcgcgtccgctacaacgccggcgacccccgccggcgacgacccaccagggcagcgatccacgcaggcgaacaacgatgggcggccgcaagatcgcgctgctggtgggcatcaactacccgggcaccaaggccgagctcaagggctgctacaacgacgtcgaccgcatgcgccgctgccttgtcgaccgcttcggcttcgacgaggccgacatccgggtcctcaccgacgccgaccgatccgcgccgcagcccacgggggctaacatccgccgcgccctcgcccgcctcgtcggggatgcccgccccggggacttcctcttcttccactacagcggccacggcacgcgcctgccagccgagacggggcagcacgacgacaccggctacgacgagtgcatcgtgccctgcgacatgaacctcatcacagatcaggatttcagggaactcgtgcagaaggtccctgaaggttgcctattcaccatcgtctctgactcatgccatagtggtggcctgctggacagtgctaaggagcagataggtaatagcaccaagcagaataagacccagtcccgtgaacctgatgagcctcgtcattctggttctggcagcggcttccggtcatttctcaaagagactgtccgcgatgtgttcgagtctgaggggattcacatccctcatagtcgtcgccatggggatgatgaccaggacgacggttacgcacagccaactggaaatggccgcaccaaaaaccgctccctgccactctcgaccctgatagagatgctcaaggaacaaactggaaaggatgacattgatgtgggttctatccggatgacgctgttcaacatctttggtgatgatgccagcccaaagattaagaagttcatgaaggtcatgctcggaaagttccaccagggccagtcaggtgagcaaggcagtggtggtggtggtgtctttggcatggttggtgcccttgctcaggagttcttgaaggctaagcttgaagggaaggaggaagaggctttcaaacctgcattagagcaagaggttcacagtgttgacgaggtgtacgccgggagtaaggcctgggcaccaaacaatggcattctgatcagtgggtgccagactaaccaaacatcagcggatgcaactacaccgcagggtgtctcctttggtgctctgagcaatgctatccaaaccattcttgcagacaagcacgggaaggtgacgaataaggatctcgtgatgaaagcacgtgagctgctgtccaagcaagggtacactcaacagcctggactatactgcagcgatgagcatgttcatgtcgctttcatatgctaaaacttggattgttacagcgattgctttcctccatccttttgtgttgatcggtgcaccagaggttgatgtttttcttcccatgtatgttacagctatattgtatcagtgtttgttgcttgaggatatgtttcaatggactatgtcaatattgaaataacttttgagaaatgtttctatatatgaataatatacacacttgtatcatgatctgtaccaacctgtaagctacactaaacatatcagttttcctacattccgtcg

SEQ ID NO: 116507 - DNA, 2219 bp, Zea Mays
cttcctcttccctcggctcttcgcgcctcgcctcgcctcgcctatatataacagtctcgcgccaatcccctcattcatcagacggactcacagctcgcagcacctgcaccacttgacaaccagccagctagctaaccaaccggcggagccaagaacaagcaagagacaacttgccccgtccaggcagcatgtgcaactccaacgtcaagtccgcgggcgtcgcccagatcgacggccgcccggtgctgcagccggcgggcaaccgcgtggcggcgccggacgccgcccgcccgctcaagaagtccctgcacaagtccttctccatgccgccttcctacgacaacaatgccaccgtgcccgcccgtcccgcccctgccgagaacacccgtgcggcgccggcgccgccttctctgctgcctcctacgacgccggccccggccccggccgccgcgagggcgaccaaggcggcgggcgccgtgcccgcggagaagcccaggtccaaggccaggaagcccggcgccgtgctgccggtggcgacgttcgcggcgccagaggcgttcgagccggcggggagcatcgccgcggcgcggcgggagcatgccgcgcaggcgcaggcgcagcgcaagtcgcggatcgcgcactacggccgcaccgcgtccttctcccgggtggagggccgagtcggcgccaccgccacggccgagccggccgtcccagcctcccccaccaccgggctcgacgagaagcgctgtagcttcatcacgccctactctgaccccttgtatgtggcgtaccacgacgaggagtggggagtgcccgtgcacgacgacgagttgctgttcgagatgctcacactgtctggcgtgcaagtcggggccgattggacttccatcctcaagaaaagacacgtctacagggaggcgttctccggcttcgacgtggatgcggtcgccaagtacaccgagaagcagatggcgtcgctgagcgccgactacgggctggatttgggcaccgtcagaggaaccgtcaacaacgcctgccggattcttgaggtaccgtcgtcaacttgattgacctcagtcctcagttgaagttggtagtgtttctgataagatactagtagttccagtaccacatctcgcaaccgaagcttaaccgaaagatgaagggaagcggtcaattaatgaagggaaggccttaggcctgtatgaaacgaaaccagtttagcaactgaaagcgaagtcttagctgaatccctgaaccctctccgtctgagccgcgttctgccctttattatttataaaggtgaccaccctggcgatgcgccgcggagcaagtgcgtcgtaaaagcagctgggcacagccaaaaagagtgagcccttgttaatgggcattttggggacggagcaggaaaagatgctggttgtacttgttcgtcacgcctttattagttttaagctttgcttcttcacattctcgcgaacgcaagatgatgtcccgcgcgtctccggcagaggagtaccgtgtgttgcgcaccactctgtcgcggacaaggttccattttccaaaacgggccactgtttagccggttccctctaaccaccaatcaggcagtgctcggtagctgctgccacaccacctaaactaatctatctatcggtcaagtagttactactattggtgtgtatatatatacatatacattagagcatggcatgcaaaaggatgtaattaatctgatggcgttgcaggtgcggagggacttttgctcgctggacaagtacgtgtgggcgttcgtgaacaacaagccgctgtcgccgagctacaagtacagccggaagatcccggtgaagacgtccaagtcggagtccatcagcaaggacatggtccggcgcggcttccgcttcgtcggccccactgtcatccactccttcatggaggcggtcgggctcaccaacgaccacctcgtctcgtgcccgcgccaccgcgtctgctccgccgccgcccgcgtaaataactgattctgctgacgaccaccaagcaaaacacaagagggaattatctaaggacaaccaagacgagagagagagagagaggtagcagtagtaatatacaaaagagagtgttggcggtttgcatgtgtgtatgatgacccagtgtgcttgtgtagattaattacggcctctgattagcgaatgaatgatcttgcttgctgtgaa

SEQ ID NO: 116508 - DNA, 1520 bp, Zea Mays
cttcctcttccctcggctcttcgcgcctcgcctcgcctcgcctatatataacagtctcgcgccaatcccctcattcatcagacggactcacagctcgcagcacctgcaccacttgacaaccagccagctagctaaccaaccggcggagccaagaacaagcaagagacaacttgccccgtccaggcagcatgtgcaactccaacgtcaagtccgcgggcgtcgcccagatcgacggccgcccggtgctgcagccggcgggcaaccgcgtggcggcgccggacgccgcccgcccgctcaagaagtccctgcacaagtccttctccatgccgccttcctacgacaacaatgccaccgtgcccgcccgtcccgcccctgccgagaacacccgtgcggcgccggcgccgccttctctgctgcctcctacgacgccggccccggccccggccgccgcgagggcgaccaaggcggcgggcgccgtgcccgcggagaagcccaggtccaaggccaggaagcccggcgccgtgctgccggtggcgacgttcgcggcgccagaggcgttcgagccggcggggagcatcgccgcggcgcggcgggagcatgccgcgcaggcgcaggcgcagcgcaagtcgcggatcgcgcactacggccgcaccgcgtccttctcccgggtggagggccgagtcggcgccaccgccacggccgagccggccgtcccagcctcccccaccaccgggctcgacgagaagcgctgtagcttcatcacgccctactctgaccccttgtatgtggcgtaccacgacgaggagtggggagtgcccgtgcacgacgacgagttgctgttcgagatgctcacactgtctggcgtgcaagtcggggccgattggacttccatcctcaagaaaagacacgtctacagggaggcgttctccggcttcgacgtggatgcggtcgccaagtacaccgagaagcagatggcgtcgctgagcgccgactacgggctggatttgggcaccgtcagaggaaccgtcaacaacgcctgccggattcttgaggtgcggagggacttttgctcgctggacaagtacgtgtgggcgttcgtgaacaacaagccgctgtcgccgagctacaagtacagccggaagatcccggtgaagacgtccaagtcggagtccatcagcaaggacatggtccggcgcggcttccgcttcgtcggccccactgtcatccactccttcatggaggcggtcgggctcaccaacgaccacctcgtctcgtgcccgcgccaccgcgtctgctccgccgccgcccgcgtaaataactgattctgctgacgaccaccaagcaaaacacaagagggaattatctaaggacaaccaagacgagagagagagagagaggtagcagtagtaatatacaaaagagagtgttggcggtttgcatgtgtgtatgatgacccagtgtgcttgtgtagattaattacggcctctgattagcgaatgaatgatcttgcttgctgtgaa

SEQ ID NO: 116509 - DNA, 1626 bp, Zea Mays
cttcctcttccctcggctcttcgcgcctcgcctcgcctcgcctatatataacagtctcgcgccaatcccctcattcatcagacggactcacagctcgcagcacctgcaccacttgacaaccagccagctagctaaccaaccggcggagccaagaacaagcaagagacaacttgccccgtccaggcagcatgtgcaactccaacgtcaagtccgcgggcgtcgcccagatcgacggccgcccggtgctgcagccggcgggcaaccgcgtggcggcgccggacgccgcccgcccgctcaagaagtccctgcacaagtccttctccatgccgccttcctacgacaacaatgccaccgtgcccgcccgtcccgcccctgccgagaacacccgtgcggcgccggcgccgccttctctgctgcctcctacgacgccggccccggccccggccgccgcgagggcgaccaaggcggcgggcgccgtgcccgcggagaagcccaggtccaaggccaggaagcccggcgccgtgctgccggtggcgacgttcgcggcgccagaggcgttcgagccggcggggagcatcgccgcggcgcggcgggagcatgccgcgcaggcgcaggcgcagcgcaagtcgcggatcgcgcactacggccgcaccgcgtccttctcccgggtggagggccgagtcggcgccaccgccacggccgagccggccgtcccagcctcccccaccaccgggctcgacgagaagcgctgtagcttcatcacgccctactctgaccccttgtatgtggcgtaccacgacgaggagtggggagtgcccgtgcacgacgacgagtaagcaagcattaatccctggtccttgcaaacggaagctgctgctgatagtagcaggtagctcacggcagcagttctcacatgtggtggcactgaaatatgacaggttgctgttcgagatgctcacactgtctggcgtgcaagtcggggccgattggacttccatcctcaagaaaagacacgtctacagggaggcgttctccggcttcgacgtggatgcggtcgccaagtacaccgagaagcagatggcgtcgctgagcgccgactacgggctggatttgggcaccgtcagaggaaccgtcaacaacgcctgccggattcttgaggtgcggagggacttttgctcgctggacaagtacgtgtgggcgttcgtgaacaacaagccgctgtcgccgagctacaagtacagccggaagatcccggtgaagacgtccaagtcggagtccatcagcaaggacatggtccggcgcggcttccgcttcgtcggccccactgtcatccactccttcatggaggcggtcgggctcaccaacgaccacctcgtctcgtgcccgcgccaccgcgtctgctccgccgccgcccgcgtaaataactgattctgctgacgaccaccaagcaaaacacaagagggaattatctaaggacaaccaagacgagagagagagagagaggtagcagtagtaatatacaaaagagagtgttggcggtttgcatgtgtgtatgatgacccagtgtgcttgtgtagattaattacggcctctgattagcgaatgaatgatcttgcttgctgtgaa

SEQ ID NO: 116510 - DNA, 2323 bp, Zea Mays
cttcctcttccctcggctcttcgcgcctcgcctcgcctcgcctatatataacagtctcgcgccaatcccctcattcatcagacggactcacagctcgcagcacctgcaccacttgacaaccagccagctagctaaccaaccggcggagccaagaacaagcaagagacaacttgccccgtccaggcagcatgtgcaactccaacgtcaagtccgcgggcgtcgcccagatcgacggccgcccggtgctgcagccggcgggcaaccgcgtggcggcgccggacgccgcccgcccgctcaagaagtccctgcacaagtccttctccatgccgccttcctacgacaacaatgccaccgtgcccgcccgtcccgcccctgccgagaacacccgtgcggcgccggcgccgccttctctgctgcctcctacgacgccggccccggccccggccgccgcgagggcgaccaaggcggcgggcgccgtgcccgcggagaagcccaggtccaaggccaggaagcccggcgccgtgctgccggtggcgacgttcgcggcgccagaggcgttcgagccggcggggagcatcgccgcggcgcggcgggagcatgccgcgcaggcgcaggcgcagcgcaagtcgcggatcgcgcactacggccgcaccgcgtccttctcccgggtggagggccgagtcggcgccaccgccacggccgagccggccgtcccagcctcccccaccaccgggctcgacgagaagcgctgtagcttcatcacgccctactctgaccccttgtatgtggcgtaccacgacgaggagtggggagtgcccgtgcacgacgacgagtaagcaagcattaatccctggtccttgcaaacggaagctgctgctgatagtagcaggtagctcacggcagcagttctcacatgtggtggcactgaaatatgacaggttgctgttcgagatgctcacactgtctggcgtgcaagtcggggccgattggacttccatcctcaagaaaagacacgtctacagggaggcgttctccggcttcgacgtggatgcggtcgccaagtacaccgagaagcagatggcgtcgctgagcgccgactacgggctggatttgggcaccgtcagaggaaccgtcaacaacgcctgccggattcttgaggtaccgtcgtcaacttgattgacctcagtcctcagttgaagttggtagtgtttctgataagatactagtagttccagtaccacatctcgcaaccgaagcttaaccgaaagatgaagggaagcggtcaattaatgaagggaaggccttaggcctgtatgaaacgaaaccagtttagcaactgaaagcgaagtcttagctgaatccctgaaccctctccgtctgagccgcgttctgccctttattatttataaaggtgaccaccctggcgatgcgccgcggagcaagtgcgtcgtaaaagcagctgggcacagccaaaaagagtgagcccttgttaatgggcattttggggacggagcaggaaaagatgctggttgtacttgttcgtcacgcctttattagttttaagctttgcttcttcacattctcgcgaacgcaagatgatgtcccgcgcgtctccggcagaggagtaccgtgtgttgcgcaccactctgtcgcggacaaggttccattttccaaaacgggccactgtttagccggttccctctaaccaccaatcaggcagtgctcggtagctgctgccacaccacctaaactaatctatctatcggtcaagtagttactactattggtgtgtatatatatacatatacattagagcatggcatgcaaaaggatgtaattaatctgatggcgttgcaggtgcggagggacttttgctcgctggacaagtacgtgtgggcgttcgtgaacaacaagccgctgtcgccgagctacaagtacagccggaagatcccggtgaagacgtccaagtcggagtccatcagcaaggacatggtccggcgcggcttccgcttcgtcggccccactgtcatccactccttcatggaggcggtcgggctcaccaacgaccacctcgtctcgtgcccgcgccaccgcgtctgctccgccgccgcccgcgtaaataactgattctgctgacgaccaccaagcaaaacacaagagggaattatctaaggacaaccaagacgagagagagagagagaggtagcagtagtaatatacaaaagagagtgttggcggtttgcatgtgtgtatgatgacccagtgtgcttgtgtagattaattacggcctctgattagcgaatgaatgatcttgcttgctgtg

SEQ ID NO: 116511 - DNA, 329 bp, Zea Mays
gcatgcagcacccgcgacgcaaccgccctgctgcccactctctccagctcgcccacgacgcccagaacccggagccgaaaccaccccatggattcgtagcgtgttgaccgagcggccattctcacgatcgttgttaatagggaacacactcacaccctctcctcttcttcgctcgctctctgtcgtcgaaataatctccggctgcacgcaaccaagacctccactcgccggccatggtggacgcaaggtgtcgtcgtcgacgctgttctcttccccggcgcgctcgtcgctcgtacccgcctcgtcggtcgtcctcggcgggtgtaggt

SEQ ID NO: 116512 - DNA, 1271 bp, Zea Mays
cgccttcgcaatactgcgtccgcctttctctaggcgacaggcgagctcccacgcctcaccaaattttggcgggttttcgacctggacattgctcgttgcccgccctcctcagttcctgcatctctcccattccacagctgccgcctgccggcatatcgcataccctagggcgcagggccactggaaatcgctgaagcgcctcggtgcgaatgctcctctccaacatctttgagccgcacgggacagcaggataagcagcataatggcgtcctattattcctcttggaggcaaaggcagacaatccgatttccaaggctgcaaactataaatcacggtcaggtgatttcattccaacatatgctcgggctgcttgttcgtccagatgttggagtaattgtcatccaaggtattgctggctctggaaagacatgggctgcgaaggctgcataccgggcagcaaggacttcgaatctctttcaagagtatgtttgggttcccttgtcaattaactgtagcatgagacagtgtctcaataagattgcagcatctctttcatgtaacaaaggagataacttgtctgtagaaagaaccaaggccataatcaaggaatatctcacagcacggaaattcctcattgttcttgataatgtttattttactgaagagggtatcttagaatacctgggagttcctcgtcctcgacagcaaagtcttggctcaaaaatatttgtgactacacgaactgtgaggggagaatcaatcatggagccagatgtagttataatgccacaacctcttacttatgaagagtcatacgacctgctgcgtgaaaagattggaaaagatatcaactttgcacatgacttaatcagttgctgttttggcatgccgctcacagtcattctattggctggggttctgtatggctcacctacacaagaagcatttgatgagttggtcgcaaaagcgcatgtcactctagaagctcagacatcagcgttaaacaccatgaagcgcctggtgaaatttggataccagcagcttcctaacaataatgtgcgacgatgcttgctgtactgcctactcttcccggaggatcaaggaatttcagtcaaaaatctggcactggaaaacagatggtctactccagaaaactactgattttgatgaggttaaccatattggcaaggaaattcttgatgttctcataaagcatggcatgttatatttggacgtcgatggtgattatatacgtcgatggcatgttata

SEQ ID NO: 116513 - DNA, 125 bp, Zea Mays
ttgtttcctttatgcttgtttctggcctccataaggaggtcctgtattcgggtccttttccgaccctatttcttcttacttaatataatgaggcgcagttctcctgcgtttttcgaaaaaaaata

SEQ ID NO: 116514 - DNA, 1530 bp, Zea Mays
gattgagctgctatgcaaagtcacaattcccggcgcttgtccggagaaacgctgaataattgtctcctgtttagtcgtctctctacaagccacactcctgaggctgaagaggaaggccgacgtcgcgatggccgtggaagtcgtccagtttcttgtgaagaagttcgtggatagcttcaccgaggaggcagcggacgcagaggcggagctccctttccgcgcccaattccacgacatgaggaccgatctggagaaggcggccgtttctcccgccaacgccgatgagctccgggagtgcctctacgaactcaacgacttgctcgccgagtgccgcaggctcgccaaccggcctaatcagcagcgctggtgctttgcccagtccgacgcctggcgcttccccaagaccaagaagagggtgaccgcggtcaggcgcagagtcctcgagtgcgtcgagaacgactccggtggcaacgctgcggcgtcgcaggaggacgccgccgctgggttggaccgctggacgacgtcttggctcgaagggagcaggatccatgggtttgaccagcagctcgcggagctggagtccatggcgttcagggactgcggcgcggggaagcttaacggcgttggcatcgtgggcatgggcggcatcgggaagaccgtgctcgcgcagctcctgttcagcagcccgcgtgcgaaaggccgtttcttccccaggatatggatgtgcatgtcgcgcaccgcctctgctggagcagacagacgcaaggaagttttgcaggggatgctcatggctcttggacacgaggaggatgccatcctgtccatgaacggcagcgatagcctgacagagctgacgatcgccgtccacgaacagctcgaggggaagaggttcctcatagtgttcgacgacgtgtggcacatcgatagctggtactctgacgttgttggcgttggcccccagaacgccatgcggagagccgacgacctgtctgtcttatcagaacgcctcgcgttcgcactgcccaaagggagaggtggcctggtgatcgtcaccagccggctggagcaggcggcagaggcgatggtgaggaagagctgcttgtaccgtgtgcggccattggtggacagcgcgagctgggcaattttcatggatgttgttctttcccagccccaggagaaaaaggctgtcgatcttgtcactgttaaccatatgaaacaggagatccttgagacttgtggcgggttcccatcggcagccaagacaatgggagacatcttcgcaagcagcagcgtttcgccacctgcatcgacatctaccagcgaggaactcggcaagagtgaccatatcatcactgctaggtaacagcggaagcctgaaataggcaacacatatgttgtggtagatccgtttgtagaagcgagtagtgacaagtggcttcgagaatcctcgcctggttggaacaccggacaagtttcctgtttattcctgtgaaattaataaaccgagaaaataagctgattcatgtgaaa

SEQ ID NO: 116515 - DNA, 1884 bp, Zea Mays
gtcgctagggaccccaggtgaaaccatcagctcattctcgcctctcaaagtctcaatcgtgcaatccggccgctggccgcatgccgcgacccgaagtgataagccaccgcccaccgccgctggcatgagcccgatggcgctgctcacaccactgcccattccccttctctcgccgtattgccaacgcgtctcgtctccgtcgcttctggcggccggggcagttatcagacctctcatttgtctttccccccacaatcaccgccaccacgatgcactctacccctctgtccccaatgtgtggccacgccaccggcgccgccgcaggggcgcagttgcttccgtcgaccaggaggagtctagtgcctcggaaaccgcagtcgctcccgaggaagacctggggccaccggtatcctctgatgcggctgccgaggacggggtcgcgacttctgcccagccggcggaggcgagcccggaggacctggagaacatccgcgaaattaaaagggtactggagctgctgaagaagaacagagacatgacctttggcgaggttaagcttaccatcatgattgaggaccctagagatatagaaagaaagagaacactcgggatagaggatcctgatgaaattactagggatgatttagctgacgctttggctgaggttaacgaaggaaagattccagagaatcgtgttgcacttcagttgcttgccaaggagatggcagaatggccagacattgagatagaagctccaaaaaagaagagcaaacctgggaaatctgtctatgcaaaagccacagatactggcatcgatcctgagacagctgctaaaagacttaaccttgactgggactctgctgctgatatagatggcgaagaggaggacgatgatgaaactgaagtgccgtctgcagtgggatatggtgccttgtatttgttgacagcttttccggaaacagctgatcacagttgtgtagacagaatcgcaggctcgctggcccaaccgcccatggctccaagctttcggatacgatcaagtgagaagtcaaccgaacagctcaccgacacagcatggcctggagacaatgtagagagctccggcaagctcacttttccttgtgccatgagccaagaagatgcctcttccttcaagagagaagctgaagctcgagtagcagacgatgaagaggagggccggcgattccgctccggttcgtcggtcaccgacctctcgagcaacgcgtcgtcgattaactaccgcaaggcgcggcagggcaagatcggcggggacggcttctggtgcggcgtcctgtgcatgtacctgccgggcctgtccaggaggcggtcgatgcagcagcagcagtccatgagcctgagcgaggcgaacacggccgggcctgccggggaccgttcgagcacggtgtcgaaggtggcctccatggagaggttcaagtacagctcgtcgtcctcgggcgccgcgttcgagcgcacgggcgcgagcgaggaagaagaggaggtgtcggcgtacttcgacctgccgctggagcttctgaggatcagcagcgttgacacggagtcgccggtcacggcggcgttcgtcttcgacggcaaccgcggccggagcgccaagaagatcgtgcctgagatcccggacctcgattttagcttccccgcgccgccggttttctcgaatccttcgtcgccaaggtcttgaaagttgaaactatcagagaggaggtgctcaatatcctgcaacgcgttgcgctttcggtgttccacttttttcttgctgctgatgtctggtgtctggtgtctggggcacgtaggttaaggtcgtaaaattgtctgctgattaggtcaaattatgcgattctatattcg

SEQ ID NO: 116516 - DNA, 1266 bp, Zea Mays
gtcgctagggaccccaggtgaaaccatcagctcattctcgcctctcaaagtctcaatcgtgcaatccggccgctggccgcatgccgcgacccgaagtgataagccaccgcccaccgccgctggcatgagcccgatggcgctgctcacaccactgcccattccccttctctcgccgtattgccaacgcgtctcgtctccgtcgcttctggcggccggggcagttatcagacctctcatttgtctttccccccacaatcaccgccaccacgatgcactctacccctctgtccccaatgtgtggccacgccaccggcgccgccgcaggggcgcagttgcttccgtcgaccaggaggagtctagtgcctcggaaaccgcagtcgctcccgaggaagacctggggccaccggtatcctctgatgcggctgccgaggacggggtcgcgacttctgcccagccggcggaggcgagcccggaggacctggagaacatccgcgaaattaaaagggtactggagctgctgaagaagaacagagacatgacctttggcgaggttaagcttaccatcatgattgaggaccctagagatatagaaagaaagagaacactcgggatagaggatcctgatgaaattactagggatgatttagctgacgctttggctgaggttaacgaaggaaagattccagagaatcgtgttgcacttcagttgcttgccaaggagatggcagaatggccagacattgagatagaagctccaaaaaagaagagcaaacctgggaaatctgtctatgcaaaagccacagatactggcatcgatcctgagacagctgctaaaagacttaaccttgactgggactctgctgctgatatagatggcgaagaggaggacgatgatgaaactgaagtgccgtctgcagtgggatatggtgccttgtatttgttgacagcttttccggttattattgggatctcagtcgtcctaattcttttctacaattctctgcagtagctcctccccttcttgagtgagaatgtgagatgttgctgcattcttgtaaatctgagttacaaggctagttaatcagtaacattttttacgccagtgttgcaaagatatgacaacttgtatagatgtcaaattccaaattttggaatgtaagatagttttttttaaaaaaatcgtgtgaaatataacttcttgttgtttgccagtaatctaaaccaaggtttttttaaagaagaatatatttgaataaataaagtttt

SEQ ID NO: 116517 - DNA, 1297 bp, Zea Mays
gtcgctagggaccccaggtgaaaccatcagctcattctcgcctctcaaagtctcaatcgtgcaatccggccgctggccgcatgccgcgacccgaagtgataagccaccgcccaccgccgctggcatgagcccgatggcgctgctcacaccactgcccattccccttctctcgccgtattgccaacgcgtctcgtctccgtcgcttctggcggccggggcagttatcagacctctcatttgtctttccccccacaatcaccgccaccacgatgcactctacccctctgtccccaatgtgtggccacgccaccggcgccgccgcaggggcgcagttgcttccgtcgaccaggaggagtctagtgcctcggaaaccgcagtcgctcccgaggaagacctggggccaccggtatcctctgatgcggctgccgaggacggggtcgcgacttctgcccagccggcggaggcgagcccggaggacctggagaacatccgcgaaattaaaagggtccgctgcttccagccttcgttgtctcgttttgcgtcactggaattagtgcatattgactttgctttcgtttgcttccgttgctaggtactggagctgctgaagaagaacagagacatgacctttggcgaggttaagcttaccatcatgattgaggaccctagagatatagaaagaaagagaacactcgggatagaggatcctgatgaaattactagggatgatttagctgacgctttggctgaggttaacgaaggaaagattccagagaatcgtgttgcacttcagttgcttgccaaggagatggcagaatggccagacattgagatagaagctccaaaaaagaagagcaaacctgggaaatctgtctatgcaaaagccacagatactggcatcgatcctgagacagctgctaaaagacttaaccttgactgggactctgctgctgatatagatggcgaagaggaggacgatgatgaaactgaagtgccgtctgcagtgggatatggtgccttgtatttgttgacagcttttccggttattattgggatctcagtcgtcctaattcttttctacaattctctgcagtagctcctccccttcttgagtgagaatgtgagatgttgctgcattcttgtaaatctgagttacaaggctagttaatcagtaacattttttacgccagtgttgcaaagatatgacaacttgtatagatgtcaaattccaaattttggaatgtaagatagttttttttaaaaaaatcgtgtgaaatataacttcttgttgtttgcc

SEQ ID NO: 116518 - DNA, 1153 bp, Zea Mays
ttttgttttgtcgtttcgtttggtcgtcgaggacgtctcacggaagcgtaggcaggcgagctaggctaattaacagcgacgtgacactgtgcgcgcgcagatacccgaggacctgcacttcgtgctgcggatgcgacacacgttcgagtcgctgggctaccagtcgggcttcttcctctcccagctcttctcgtcggcgcggggcgcctcgccgacgccgcctcctccggccgcgcgtcccccgccggcgcagcttttcaactggccgggcgcccaccagccgcagctcttcccgcccggtccgggcgcgttccaccacccgtcggcgcgggcgatgccgccattgttcccaggcggcggcaaggacgagggccacatgttccacattccaccggcacaccatggcagcaagccactgcacatggacgagctccagcaccggcaccagcagacgatgggggccggtggcgaggcgcccgacggtgaactccggtggcccaacgggctgtccttcttcaccgcgctcaccgggcgagacgacgacgcgaagctgctattcggtggccccggcgccgcggacgacgagaaggcggcgccggacgcgcagaccgggcacggcggggctgggaacgtggaggagtacctgagcctggagagccactcggacaaggcgccgagcaaggtggagaacggcgcccagcacagcaccaagtccaagaggagcttcacgttgcccgcgcgggtgagctcgtccacgaccacgtccccgtccgtgtcggcctccacggcgccgcaagggatggagtaccgagggacgcacgagggcggcgtctactcggacctcatggagacgttcttggagtagctagctagatccgtagcatgcatgatcggttggttcaagccttcaaggtcactacaacaacaagtgcacgcttctttttttttcttttcctcaccgccctcccaagtcccaagctttgttttaggtctggagttttaatcgcataatatctttaattagagaattttttccccctcttcttatagttgcattgcagcagctcgatcgtaacgctaaaaaaaacctttgatggatacatgcatgcatgcaagcaagaagggcatgagtttgcttccatgatggctggca

SEQ ID NO: 116519 - DNA, 1761 bp, Zea Mays
ctcaggttctcaagaaagaccctgcagggagagcgatcaaaaaggctgccggcacggccgggtagcagctacaactacaagctggcctatagctagctagctagctatagctgctacagccgccgagctcgatcctcggactcggactgcaacgaggaaggagaggaaatggtgggctccggcgcggatgggggcggcggaggggatgacgcgcggagcaaagaggccgcggggatgatggcgctccacgaggccctccgcaacgtctgcctcgactcggactggacctactccgtcttctggaccatccgtcctcgcccgcgctgccgcggcggcaacgggtgcatggtcggcgacgacaacggcagcctgatgctgatgtgggaggacggcttctgccggccacgggtggcggagtgcctggcggacatgagcggcggcgaggacccggtgcggaaggccttcatcaagatgtccatccaactctacaactacggagaagggctgatgggaaaggtggcctctgataaatgtcacaaatgggtcttcaaggaaccttctgaatgcgagcccaacatctccaactactggcagagctccttcgacgcacttcctccggaatggactgatcagttcgcatcaggcatccagaccatagctgtgatccaagccgggcatggcctcctgcagctgggctcttgcaagattatacccgaggacctgcacttcgtgctgcggatgcgacacacgttcgagtcgctgggctaccagtcgggcttcttcctctcccagctcttctcgtcggcgcggggcgcctcgccgacgccgcctcctccggccgcgcgtcccccgccggcgcagcttttcaactggccgggcgcccaccagccgcagctcttcccgcccggtccgggcgcgttccaccacccgtcggcgcgggcgatgccgccattgttcccaggcggcggcaaggacgagggccacatgttccacattccaccggcacaccatggcagcaagccactgcacatggacgagctccagcaccggcaccagcagacgatgggggccggtggcgaggcgcccgacggtgaactccggtggcccaacgggctgtccttcttcaccgcgctcaccgggcgagacgacgacgcgaagctgctattcggtggccccggcgccgcggacgacgagaaggcggcgccggacgcgcagaccgggcacggcggggctgggaacgtggaggagtacctgagcctggagagccactcggacaaggcgccgagcaaggtggagaacggcgcccagcacagcaccaagtccaagaggagcttcacgttgcccgcgcgggtgagctcgtccacgaccacgtccccgtccgtgtcggcctccacggcgccgcaagggatggagtaccgagggacgcacgagggcggcgtctactcggacctcatggagacgttcttggagtagctagctagatccgtagcatgcatgatcggttggttcaagccttcaaggtcactacaacaacaagtgcacgcttctttttttttcttttcctcaccgccctcccaagtcccaagctttgttttaggtctggagttttaatcgcataatatctttaattagagaattttttccccctcttcttatagttgcattgcagcagctcgatcgtaacgctaaaaaaaacctttgatggatacatgcatgcatgcaagcaagaagggcatgagtttgcttccatgatggctggca

SEQ ID NO: 116520 - DNA, 850 bp, Zea Mays
aggcaggcaggtaccagtgcgcagacagtgctctcccagtctccacctcgtgctcgtggcaaagaccaaacaccacgcacgttgctgtaacccaacaagcccgcccagctctcgatcccagatggatcccacgcttcgggcagtgctgagccgcggcggcggcggcagtggcggggcgaggggcggcggaggaggcggcgcgcactacagaggcgtgaggaagcggccgtggggcaggtacgcgaccgagatccgcgacccgtggaagaagacgcgggtgtggctgggcacgttcgacacccccgtggaggccgccctcgcgtacgactgcgccgcgcgcaccctccgcggcgccaaggccaagaccaacttccctgccgaccacgccgcccaggcccagcagcagcggcagcgcctccgtctggcgccgcttcttcgtcaacccccgccgcggcacgtctcgttcggaggcgtcgacgtccacgtcgactgccctactccgtggcattccgtctgcttgcagacgacccagacagcggccgcggccgcggccccgcttcccacgactgcaccgatgccgctggcatccgagccaccgtcaacggcgctggcgctggagctgggcacgggccgaagccgcgccggtctgcccttcgacctcaacgaggcgccgtcatgctgatgctcgatcggattgtgacgtggctgcagtgtcaatggtgactggcggtgagcaggtgaggactgggcagcgggagttgggaagtagtagagcagtgggtgcacgctgcacggcgcactattccggctagctgtactgtacatacctatttaaggaaagcttagtcct

SEQ ID NO: 116521 - DNA, 1048 bp, Zea Mays
gtcctagacgcaatacacatacagcccctcttgcccacaccacctcgctgaaccggaagacccgcacacacacgccacttgtagaccatggcgccccgggtggcggacaagtcgcctctaccgccggccaccggcctggggctgggcgttggcggaggagtcggaggcgtgggcatgggcccgcactacagaggcgtgaggaagcgtccatggggacgctacgccgccgagatccgcgaccctgccaagaaaagccgtgtgtggctcggcacgtacgacacggccgaggaggccgccaaggcgtacgattccgccgcccgcgagttccgaggcgccaaggccaagacgaacttcccgttcccctcccagtgctccgtcgcctccggtgctgccggtagcgccagtagcaacagcaccgtggattcgagcggtggcggtagcggctgtggcatccaggcgcctatgcaggccatgccgcttcctccggctctcgatctcgacctcttccatcgggcggccgccgtgaacgcagtctccaccggcatgcggtttccgttcaagggctatcctgtcgcctgcccgacgccacagcagtactttttctacgagcaggcggctgccgcggcatccggataccggatgctcaaggtcgctccaccggccgtgactgtggccgcggttgcgcagagcgactccgactcgtcgtctgtggttgatcactccccttcgcctcccgcggtgacggcaaacaaggtgggcttcgaactggatctgaactggcccccgccggcagagaactaggcaggccggagtttttggctgacgacttagtagcttccttttcccttttgccttcatcaggaatgttacttgtggttgttttggtcctgtatggctgtattcttgttctgtagactaagagatggggagtcttgtaaatattttttttccgtcgagacggaaatgaactgagatctgttcgtctgtctgatcaagccggcgttgatatgggcttaagctatggagtattgattagtaattgccaagt

SEQ ID NO: 116522 - DNA, 179 bp, Zea Mays
gcagccgatgtctagatggtttgaacatacgttcgaatgagtttgccttagtggaatctatttcaactggtgagattgacagaaagatgcatcctctgctagacaaagttgaaacgttcaagagcatcagaagtggcatggacactacaatcccattcctatctatttatattggagac

SEQ ID NO: 116523 - DNA, 344 bp, Zea Mays
tcacctgatgggccctctgcagcttgcacatttcatttggttggatgtgtgcctttcagtgattcgggtacttcacagtgccctatgctgatgggcttggaaagaagcgtggagcaggttcatattcatatatggacacaagtcttcatccgtcaagccaaagtcatctctgtaaacatgaaagggggactgttgaacagataaaaccagatgttcctttctgcacatcagagaaaatggagcacaacttaattcagaggcacacaattgggcgcttcgaggcgttcaaattcgcaatggtaggcttcgccgctctatgtataaaagatggttcggtgttttaa

SEQ ID NO: 116524 - DNA, 473 bp, Zea Mays
attcagggagggagaaaaaccagtctccagtattcaccaaggcaggccgccgatcctcgaggaagggtagcagtagcactagcctgggctccagaagaagatggggagaagggtcctgccactgtgcgcgctcgtcgtcgtgctcctctgcgtggccagtctcgtggacgtcgcggaggcgagacgcggaggaggcaggagtggccgcagcatcagccgcgccgccggcgggcccagagcaagccatagcggtggcccgcgcagcctcggcggcggcaccggcacttgggcggcgtgcgtcgggtcctctctgctggctgcggcggccatgctcttgtaggctcgtctcacgctgcgtatatagcgaacgtctacggagtcgtccatagtggggagtacattcttttgttctttttgcagcttatgaaatggttgcggtgttacattacatggtcggccagtagatcgtgcat

SEQ ID NO: 116525 - DNA, 998 bp, Zea Mays
cttagaagaatgtaatgtaagcctcaaattctctaatttgagttgctatccagtttaacacattaatttaactgtctaaatgtatcgtttaaaaaaactcgcgcaaagcgcgagcaagttactagtaataaatgcatgaattgaatggccaggtttaccactctagtttcgctgatgatgatgggatcacaaaagcttgcagctgtcctttgcttccactgaaaactcatatcaagggcccggcaccagcctctgaccctgataaagcggacattgttgatgaagccataactttctttcgagccaatgttttcttcaaaaatttccatgtgaaaagctcagcagacaagttattgatctatctgacgttttatatcaatattgccttaaaaagactagaaggttgccggacactagctgttgggactaaagcaatcattaatctgggattggagaaagttcctgtacctggggaaccagggtttcctttccctggacttttcactcttccccagtcccaggaggaagcagaattgttgaggaattatttgaagcagataagggaggaaacaagtggaagattgctcaactgtgcatacagagctaatggctttccaaacaagtggtggttggcttttgctaagaggaagttcatgaacattgtcatcctttagacttgggctttttgtaccaactgtttcaagctgttttttcactcatgatcgtgtgaagtatccacacacaacaaagatagttatcctacatcccaaagtaacaagccaaagacttcgatgataggatagatgaatgacataagataaattatttgttcccaatttgcgatgtataaccgtgggaacagtaattatcatgttgtattgccttttgtaattctcaccctgctatatcagagagacgaaacctgatacagggtatattctacaatgatgtctaaaacgagacagttcaaatgttcttactattggtatagtattagc

SEQ ID NO: 116526 - DNA, 886 bp, Zea Mays
agaagatgatagtggttgggaaactgtaagccaagttgaggagaatgggtcttgtaattcaccgggcggaagtgaaccgtctgtaaatggcttctgtggagaaaacgatgcttcggcgagtggaaccgactgggatgaaaactgtgacaatgatcaggcacacagtgagatcagtgaagtttgttcaacagcagcaggcaggtctcggaacaaaagatcattcgccggactatggagatcatcaaacgccgttgaccaaaagaagatgggatccaatacactcaacggtaggtcatcaaacgccaggatgtcaaacgtcaccgaatctgctgacctgaagaatagcgaagtgtgtgacagtccgcacatcacagggcagtggaggccggacctgctaaacccggacatcgttcgagctataaaaggatgcatcgactggccccgaggagtgcagaagcagagcttgaggtccaaggttctggaggcaaggattgacggcagtaaggtccagctgcgtcaagcactgaagcagaagatatagcgtggtcagccggtcacattcttgctggtgggggcttccttcagctggaggcctggagcaggcagcgacccgcgagatgaatttctgcagcagtgggtatctcagttgatgcctgacggcccactgacctgctttgcttccgtaatgaaattgttcgctcagtgccccgttgtaatcacgcctgtcctgtgtagaaatactttaatcaataagcaatgaaatcattcgaccacactaaccgatgtcttgtgggctatgtctgtggccctaaattcgttgccgtgttagggaaggtccgtgttcttgaaaggagtgtagaaaatagatactggtgccttgaaagaa

SEQ ID NO: 116527 - DNA, 752 bp, Zea Mays
atcagacggtggagagcaacaccagctcaaaaccctagcgtccaactcatatacctgctgctcgccccgacgcgcatcaactcccgccgccgccccttcctctccgtcgctcgcctcgcgcctacgccaccacctctgccatggccccgaagaaggataaggccccgccgccgtcgtccaagccggccaagtccggaggcgggaagcagaagaagaagaagtggagcaagggtaagcaaaaggagaaggtcaacaacgctgtgctcttcgaccaggccacctatgacaagttgctctccgaggtgcccaagtacaagcagatcaccccatccgtcctctccgagcgtctcaggattaatggatcattggcacggagggcaatcaaggatctgatggcaaggggattcataaggatgatctctgttcattccagccagcagatatacaccagggcaaccaacacatgagggctgttttgcatcttgtcggcgggtctctagacggcttaatgttgctattatatcatgtttatttcaatcatagctcagtcagccttactgttgtgtcggatgttggaatatttttagattactgtactgtttaagctcatgttgctatccaaatatccatcttgaggaataccaatctgtctctgctctaatattacaacaattgttaaagttgcgcgtgttgtcatgaattcagtcctattgacatgcgctcaccgttaccctgagcatttttttggggtc

SEQ ID NO: 116528 - DNA, 1777 bp, Zea Mays
atcagacggtggagagcaacaccagctcaaaaccctagcgtccaactcatatacctgctgctcgccccgacgcgcatcaactcccgccgccgccccttcctctccgtcgctcgcctcgcgcctacgccaccacctctgccatggccccgaagaaggataaggccccgccgccgtcgtccaagccggccaagtccggaggcgggaagcagaagaagaagaagtggagcaagggtaagcaaaaggagaaggtcaacaacgctgtgctcttcgaccaggccacctatgacaagttgctctccgaggtgcccaagtacaagcagatcaccccatccgtcctctccgagcgtctcagggtaatgtacatcgccttctcagcttcacatggagggaactatgtatcggttcctgacgattgagcctcgatgtggtagttttggcctgtatgtttagcatctggtgaatgaactgggcatgatttcccaaatgatatgatactacctccgttctcaaatatttgtcgccagttagtttattttgaactaaaccgtaacaaataaaaaagaacggagagtagtatagtaaatgggtagtgatatatactctagtctcttgtagaattagaccgtcagtttgtgcctcttatgttttgcatggattggtttttttatgttttacatagatttggtttatatttgcttcatacaggtccctagtctgcacattttgcatgcaattaattttctgtgtcgttgaaaacaatccattgtgcttattttgacgagggctgtagaacttgtttagctgtttggatacaattataggaaagcagcatccttgtttgtgacctgccatgtagcatttgttatcctttcttcatttcagttaatgtggctattggttaggctgttggattgtttataaaatggattgtgtagtcacctgggattagggtatatataggatcagtttggggtgtccaatatgtttgtattttgtgtaagatttgatgaggcacctcatgccatgccttgtgcactgccctgcctctcgttgccattcctggccgcttgagcctcttctccactgctggttgtgtgagtgagggaggaggagccacaacttgtcgacctagagcagcagtccatcctgtgtgagaaggggatggtgaaagctacttttttcagctcgcggctctctgttttttagggagattcaccgaggagcttgttgtcatgaacctgtttggtagcatcacgcccaaagcagctcctgaagctggtcaagaatgaccaccaaacgctgtcttaacatgaattgtgatgtggatgaatgattcactcatgtctctatttaccatttgtaagaccccatttccagtcctttgtacatggatgttcatggtagttcctcatgtgatgtaagcatggtagttcaatatatctcattaagcagcatgtgaataaaagcaaagttttgtttcttttgactcatagattaatggatcattggcacggagggcaatcaaggatctgatggcaaggggattcataaggatgatctctgttcattccagccagcagatatacaccagggcaaccaacacatgagggctgttttgcatcttgtcggcgggtctctagacggcttaatgttgctattatatcatgtttatttcaatcatagctcagtcagccttactgttgtgtcggatgttggaatatttttagattactgtactgtttaagctcatgttgctatccaaatatccatcttgagg

SEQ ID NO: 116529 - DNA, 1182 bp, Zea Mays
atggccgccgccgttcgccacatcgtgcgccgccgcctctccacggccgccgccatcactgcaccggtccccactccggcctccatcctcaacccgtcctcgccgagcactcccctcacctcgcgacataagacccgactcgccatctccctcctcaagtcttccccgccgcctccccccgaccagatcctctccatttgccgcgccgcggcactgaccccggagacacacatcgaccgcatcgcgctgtcgctagccgcatcaaagctctcctccgctccggacaccctccgtgacctcgcctccaccgtcctcaccccgcgccacgcaccccacgccatcgcgctcttcggccaggcacacctcctccccgacgccatctccactttccagtcctccccctccacccgctccctcaacgccctcatcttcgcgtgcatcgtctccggtaaccacacggaggccgcccgcgtcttccagacattcccagacgcccatggcgtcaagcccaacactgagaccttcaatgccatcatcaaatcattcgccgagtctggcaccataaggtccttttactcggttttcgatgaaatgtgcaagaagggcttgaagcccaactccatcacatttaccactgcgctcgctggtttctacaaggaggagaagttcgatgacatcaagaaggtattagagctcatgaagaagaatggatgtggtgagtccctgccggtatacaatgtgagggtgcagagtttgtgcaaactcggtcggagtggtgaggcgagggcattagtggacgagatgatgaagaagggcacaaagccaaattgggtgacctacaaccatctgatttatggattctgtaaggagggggatttggaggaagcaaagcgtctgtacaaggagatgggaagaaaggggcttgttggggatagcgatttctattttatgcttatttattacctttgtaagggtgatgatttggacactgcccttggactatacaatgaaatagcagctaagaattgggtgccatgcttctcaaccatgaaaatgcttgtgaatggacttgctgggagctcaaggatcgatgaggcaaagggaatcattgagaagatgaaagagaagttcccagataaaactgaggggtggaaggaggtggaggaagcatttcctcattag

SEQ ID NO: 116530 - DNA, 1865 bp, Zea Mays
acagcaaggatcctctacaccgcacgaaaaaaaccgtcaacattgtgcaatatttagacgacagttttcagcgtaactgacagcgtaagaacactcagcactttgctaaatctggaattcacgtccagaaaaaggaacacggttcccgtccacagaccccacaccatcgttaacgtagaagtatcgcccagaaatctggccaccctcctcgcgcggaacgacccgagggtgccccgtccactctcgtgtcggtcccgcgatgggcatgttcgcatcggccgcaaagagatacagcaacggcaagaattttctccgcagcgcgggcgtgtgctgttgttcgccgtccgcctccgcccagcttggtggtgtgcgcggcaaggaagagacatcgacgtcggcgccagctttcgcgccggatagcaacaagaaaaggtggaggaagaggaggttctggagaaagaagatgaaggccaggaaggagatcggcgggctggtggacctcgtcaacgatatttcggccaagtcagaggagagcctaggggttagcaaccaaaacatgcccagcagggcgctgacgttcagtcagctgagcgccgcaacggacgggttcagttcgcagaacctgctcggagaaggcggctttggacgggtgtacaaagggctcctcgaggacaccggagaggttatcgccgtgaagcagctgaacagggacgggctccagggcaacggcgagttcctcgtcgaggtgctgatgctcagcctcctgcaccacccgaacctcgtcaagctgctgggctacagcaccgactccaaccagcggatcctggtctacgagtacatgcccaggggctcgctggaggaccatctcctggacttgcccccgagctggaagcccctgccgtggcacacgcggatgcggatcgcggtgggcgcggcgaagggcatccagtacctgcacgaggtggcaaacccgccggtgatctaccgcgacctcaaggcctccaacatcctcctggacgcggacttcaacgccaagctctccgacttcggcctcgccaagctgggccccatgggcgaccagagccacgtcagcaccagagtcatgggcacctacggctactgcgcccccgagtacgccatgaccggcaagctcaccaagatgtcggacatctacagcttcggcgtcgtgctgctcgagctcatcaccggccgccgcgccatcgacatggccaggccgtccgaggagcaggtcctacttaactgggcgtcgcctctgctgagagacaagaggaggttcgtgaagctggccgacccgttgctgggcaacaggtacccagtgaaggcgctgtaccaggcgctcgccgtcgcgtccatgtgcctgcaggaggacgctgccagccggccggggatcagcgacgtcgtcgcggcgctctccttcctcgccgacccgcaatactaccctcccggaggcacggaagctgaacacaagagcacgcatagcgggacagacaatgatagcagtcctcctagggccgaaatggtcagggcagacgacgacatgaagcatagatgaccgtagagggggagctaattaacgggaaacatggcaaagggaggatttgcagagctgtctgtctgctctcttcaatcttcctttcgtaaaaggtacaccacgtaggcaggatgtaacatcattcaaggagttattgaccgatgctgatttttagcagcaatgcagcatgaagttgagctaactgtatgacacagattactcaggtgagagataagcgggtatttgtgatgttgtagtttttgctgttagagctgatctcgatctccttaagtctaatgcctgagttctaatt

SEQ ID NO: 116531 - DNA, 1019 bp, Zea Mays
cctgaaccacctggatcgatcgacgcaagccaacgctcgatcgcaaacgcacacgctactctcttttttttttgttggtggtggtgaggggctggctggatctggatggcgcacgggcggatgatgatgggctgcgtgttcctggcgtgcctgctggtggcggcgtcggtgccgtccaccgcgtccgcgttcgtgttcaaggcgggcggcacgggcgagtggcgcgtgcccgccgcggccgctggcagcaacgtcagcgcgtacaacgcgtgggcgcaacgcaaccgttttcgcgtgggtgacgccatcgctttcacgtaccagcccggcaaagactcggtgctcctcgtcgacgagaggtcctacgacgcctgcgacgcgagctcgccgaccgacaccttcgccgacggcagcaccgtcttcaccttcaaccgctccggccccttctacttcatcagcggcaataaaggcaactgcgaccgcggcgagaagctggtcgtcgtcgtcatggccgagcgcgcggccatcggcacgggcggcacggggctggcgccgtcgccgtcgtcgtcgtcgtcccccaacggcccattctccgccttctctccgccgccgccaccctttggcatcgacatctcgccgagtcccacggccgcgtatccgccaccaagtgccgcgccgcccaagatggcaggacttgccggcgcggcggcgtttgccattattggagccttgttctacgcgcttgtttgatgatacgtacgcgtgttttgtttatccactcagatcatatgcatatacatagcgaccatatatgccattgagtgaatttatttttaatgtatagtgtatcaaatgctggtgtgatgcatgtattgttgattaattaattcagtgctgatggaaatgtgttccagtccaaattcatgttaccacggtgacaagtttacatgttgttatatatagacatgcttatttccataataagtcgcgctatatgttgatttgtaacaaaaaaaaaa

SEQ ID NO: 116532 - DNA, 675 bp, Zea Mays
accaggcaccacaaccaaccgaccgatcgaagccggcagacaatcaatggacggccagggcaacagcggcagcgcgggcgcgggcgactgcgacgcggtggcgcgggccttcgtggactactactaccgcacgttcgacgccagccgcgccgcgctggccgtgctctacggccagacttccatgctctccttcgagggccacgccgtcgcaggcgccgaggagatcggccggaagctggcgcagctgcccctggagcaatgccggcacgccgtgtgcacgctcgacagccagccctcgccgtctttccccggcagcgtcctggtgttcgtcagcggcaccctccagctcgccggcgaggagcaccagctgaggttcagccagatgtttcagctggtgcccaacgagcaggggagtttcttcgtgcagaacgacatattccggctcaactacggttgacgcagtagccggtgttcttcgtgtgggtgccgaaaggaaggtcaccatatgctttgatgtcacatggacacgcctcgtgttcgtgtaggatgcagtgcagcagcccaatgtttactttcagaaagcgtagcgtcctaaataaagtttcctattaagaaaaaaattgctttcgtttgagaatggcttacatttagaagaaagtactgttacaatcagct

SEQ ID NO: 116533 - DNA, 1958 bp, Zea Mays
atgctcaacctcaagggcctggcgtacgagtacgcggaggaggacctcggcaacaagagtgcgctcctgctcagctccaacccggtgcacaagaccgtgcttgtgctgctccacgcgggtcgccccgtaaacaagtcccagatcatcctgcagtacatcgacaaggtctgggcggggactaggccgaccgtgctgcgggataacctcccacgggtgacaccatggcggagaagggaaagcagatctgagccagcagatgctgttggccaaaccacccggctctctgcctcagggaaggaggcttcagctcagcctctgtccatgcctgtcttcatgggaccgaggacgaggcaccaaggaagaaggcacgccttggataggggcaagttaccgggccgccatattgttcctcaggcagcaaaagagaagttgaaagagatagataggcttgccagggagcagaaagcagaggagcgtcaaaagcagaggggaaaagaacctgatgtggaggcaaggatagagataccagaagagagaggatcagcactccgccgtatgtacgacgacatgatgaacggaatcatcagggagacgaaggccaccgaggaaggcaaggacctgctcgacatgctgctcgactggatgcgggagcattggccgctagcggaggacgatgacagcaggatcagtgacactgacatcgccgccaaggagtgcgaggtggacaggaattgctttaaagacaagcttatcctccctaagtcgtccctcgataaacataaacataaactgtacagtctatataaacccgtcaccctcctcatagacccagccgcgtcgcgccgcacaagaggtgagggcacgcgcacggcgcataagagctgggggttgccaagtgttcatccacaaccacaaacatcacgaatggatgctcccgcggcggccgagggctgcggcaagcacattgtgctcgtccacggcgcgtgcctgggcggctggtcctggtacaaggtggccaccctactccgcgcggcggggtaccgcgtcgacgcgccggacatggcggcgtcgggcgccgacccgcggccgctgcgggaggtgcccacgttccgggactacaccaggccgctgctggacctcctcgcgtcgctgccagacggggaccgcgtcgtgcttgtcggccacagcctcggcggcgtgaacgtcgcgctggccgccgagacgttcccggacaaggtctccgccgtggtgttcctctgcgccttcatgccggactgcacggcgcggccgtcgcacgtgctggaaaagttcattgaggggaagtggctggactggatggacacggagatgaaaccccaggaccaggatggcgagggcaagctccccacctccatgctgttcggaccccggatcatccgagaaaagttcttccagctctgctcgcccgaggacctgacgctgtcggcgtctctgatgagggtgagctccatgttcgtggaggacctggcgctccggcaaccctacagcaaggaaaggtacggctcggtgcgcagggtctacgtcgtgtgcacggaggactacgccatcgtggaggggttccagcgctggatggtggataacagccccgtggacgaggtgaaggagatcgcggcggaccacgtcgtgatgctctcccggcccgacgagctggtgcgctgcctcactgacatcgccgacaagtacgcttgacggcgccgctgttctagcacgtgtgtgtgtgctgcctctcggtcggtcgagctcgagcctcagcatgcatgtcgatcgccgatcgtggtgtttttaatttgttgcattcggtttgttttttccctgctgttctcgaatcgggatggaccagaattctcgccgcgtggtgtgaatcttgtataattaataatgctattgaggcttgctaataatctgtgttcgccgggggc

SEQ ID NO: 116534 - DNA, 2133 bp, Zea Mays
atgctcaacctcaagggcctggcgtacgagtacgcggaggaggacctcggcaacaagagtgcgctcctgctcagctccaacccggtgcacaagaccgtgcttgtgctgctccacgcgggtcgccccgtaaacaagtcccagatcatcctgcagtacatcgacaaggtctgggcggggactaggccgaccgtgctgcgggataacctcccacgggtgacaccatggcggagaagggaaagcagatctgagccagcagatgctgttggccaaaccacccggctctctgcctcagggaaggaggcttcagctcagcctctgtccatgcctgtcttcatgggaccgaggacgaggcaccaaggaagaaggcacgccttggataggggcaagttaccgggccgccatattgttcctcaggcagcaaaagagaagttgaaagagatagataggcttgccagggagcagaaagcagaggagcgtcaaaagcagaggggaaaagaacctgatgtggaggcaaggatagagataccagaagagagaggatcagcactccgccgtatgtacgacgacatgatgaacggaatcatcagggagacgaaggccaccgaggaaggcaaggacctgctcgacatgctgctcgactggatgcgggagcattggccgctagcggaggacgatgacagcaggatcagtgacactgacatcgccgccaaggagtgcgaggtggacaggaattgctttaaagacaagcttatcctccctaagtcgtccctcgataaacataaacataaactgtacagtctatataaacccgtcaccctcctcatagacccagccgcgtcgcgccgcacaagaggtgagggcacgcgcacggcgcataagagctgggggttgccaagtgttcatccacaaccacaaacatcacgaatggatgctcccgcggcggccgagggctgcggcaagcacattgtgctcgtccacggcgcgtgcctgggcggctggtcctggtacaaggtggccaccctactccgcgcggcggggtaccgcgtcgacgcgccggacatggcggcgtcgggcgccgacccgcggccgctgcgggaggtgcccacgttccgggactacaccaggccgctgctggacctcctcgcgtcgctgccagacggggaccgcgtcgtgcttgtcggccacagcctcggcggcgtgaacgtcgcgctggccgccgagacgttcccggacaaggtctccgccgtggtgttcctctgcgccttcatgccggactgcacggcgcggccgtcgcacgtgctggaaaagttcattgaggggaagtggctggactggatggacacggagatgaaaccccaggaccaggatggcgagggcaagctccccacctccatgctgttcggaccccggatcatccgagaaaagttcttccagctctgctcgcccgaggtacgtacgcgcgcgtcattaaatatgttagacatgttgaggtgctatatttttaacatagatggtcgagtcaaagaatgtcttataaattatagagtagaaacatattctgttgatatataaaattatttctcatactccaccctataaatttaagataaattgaaatctaagctttgaggagcggtgaaatattaaattctaaactaaatagactactttattaaataaattttattttgtctaaaatgaatagatacaaacagacccgttggttcattttgttcggaaacaccgtatcatttctgggttttcatgtcgcccaagtgccccaactaatccactccggctagcactgcacgagatgctgcagagacgtcgatcgggctagctacagggccaattaatcaaggctgctatgtctgatccagcacgtaccagccggtgaccacagcagagccacgctgagcatttgaaaagcaaataaatggttactgtttgctccgatccagacatccagtcgaccagtcctagctcccacacgcagctagctagctaggactaatttgtcatatatagcctcgtgcaaatcacgtctgcatcagcacatgcgcgcgcgccgggcccgggcgggctgatgctgatgcgtcgttctacttctaccgggcggcaggacctgacgct

SEQ ID NO: 116535 - DNA, 277 bp, Zea Mays
gtaggtggtggctgcaggaaggtggttttcagcatcgagtcattggcattgagcgaccggcagccgcccgcgtctttgtcttcgtcgccggcggcacccgccagagtcgtcgcgtccggcttgctgctgctgcatgaagaggctgctggaggaccgggacatcttcatctacctgggtgagaaggccttctacagcgacgagtgcaggaacgggctcatcgaggaggcggcggaggaggaggtcatgattctggatcctgctcgaaatctttgatca

SEQ ID NO: 116536 - DNA, 267 bp, Zea Mays
atggctctcgcggaggtgaacgatatctcgctgaatgactacctggttgtgactgcggcgaagcacgcgacatttctgccgcactccgcggggcgctactccaagaagcgattccgcaaggcgcagtgcgccatcgtcgagcgcctcaccaacttgctcatgatgcacgggcgcaacaacggcaagaaggtcatggccgtctacacatatgtggcctataataattctaaaatctggaaacagaataactgccccattcttggttga

SEQ ID NO: 116537 - DNA, 1251 bp, Zea Mays
tggacaaatccatccgaccttccaaccgataggcgatagctatgccgtgtccgtgttaactacgtacactagagtagcaatcgaaagagaaaagtgggaagagagaagaatgagacggtgtgtttagctagtagtaggctacggtctacagatgacgacgaagcacgggagcagcgccctcgggttcagcaggtacagctcctcgatgttggagtagggtccgaccttgccggcgagcgaatcgaagcccgtctgccccacgaactccttgaggttgtccagcggcttgtgcacgcggccggcgatgaccctgcacaccagcagcgccctgcgcgcggtgcccaggcccagctggcccgctccgtcgtcgtcgccgacgccgatggcggggggcgcctcaacgatggactcgaacgcgcggccgctggtggacgtggtgaacacgcccacgccgcccttgccctccttcctggcggagaagccgtgccggatgatgcggcacacggcgcacttgtcggaggcgcagaggctggaagagccggagccgccgccgagcgcgcacgagagcgtggcgccgtggaagcgcagcagctcgttgccgtcggcgaggcagcgcgggtgcttcttggctagcttgctcgccttgagcttcacggcctcgcggtactcctcgaagcgggacagcgtccgctgcgtgttgtgcaccttgaacacgcgctcgatccggacgcagctgctctccgacttgagcaggctcgtccggcagatgatctccacgatcttccgcgacgagtccccttccaccagctccgtcactgcacgcaataatatacaacaaagcggcccggctcagctactggttctcaagttgcatcgcggaaagaaattgttctgaaaatcttcccgcatgcaattgctacagcctacggaacgcagaatccaccagaatctgatgctatacaggctcgcagttattgaaaaagttgggagccggattcgcgaaaaagcaggcgtttggatgaacatggcggtgaagccggggctctgtatcaggtagttgcaaacttttgcgctaaagatgcagccggcactaactaaaagtgccaccgcccaccgtgcaccgcccaggaggcgtgaagatccacggggggcgggcggtggaggaggacgacgaggactgtgtctgtacgtaccaccaggtaattaaaagctagctgatctgtacggtgggagacgcaaacaacgcggatg

SEQ ID NO: 116538 - DNA, 2243 bp, Zea Mays
gtcaggcgaccaagtagtagtacttcgactgcgctcccccctatcctctctctatataaacccacgcagccgcatttcactcgcacacagcaaacacacgcccactggccaagcaccaaataacacgcctcgtgtcgaccagcgagggccaaaggcacgagcagcggcactagcaatacgcactgcagtgccatgccggaagcaccgactaccaagataaacccgccagccggcggcttcgcccccggggcgcaccgcgaggcactcgagttcatcgagcatgtcacggcgaacgccgggaaggtgcagcggcgcgtcctcgcggagatactgtcgcagaacgcgccagccgagtatctgcgccgctacggcgtcccgggaggatccgccgatgccgtcgaagccttccgccgtgtggtcccgctcgtcacctacgagggcctccagccggacatactccgcattgccaacggcgatgcctcgccgatcctctcaggcaaacccatctccgagttcctcacgagctctggaacatccggaggggagaggaagctgatgccgaccatcgccgacgagctggacaggaggtcgttgctgtatagcctgcagatgccggtgatgagccagtcggtgccggggctggacaagggcaaggcgatgtacctgctattcgtgaaggcggagtcgcgcacaccaggcggactggtggcgcggccggtgctgacgagctactaccggagccggcagttcctggagcggccgcacgacccctacaccgagtacacgagccccaacgaggccatcctgtgcgtggactcgtaccagagcatgtacgcgcagctgctctgcggcctcgtccaccgcgccgacgtgctgcgcgtcggcgccgtgttcgcctcgggcttcctccgcgccatccgcttcctcgagaagcactggccgcgtctgtgccgcgacatccgcacgggcaccctcgacccggagatcacggaccgcgccgtgcgcgacgccgtcgccagggtgctccgcggcgccgacccggcgcttgccgacgagatcgaggccgtgtgcggggggtcgtcatgggagagcatcatccggcgcctgtggccccgcaccaggtacgtcgacgtgattgtgaccggggccatgtcgcagtacatcccgacgctggagttctacggcggtggcctgcccctagcctgcaccatgtacgcctcctccgagtgctacttcggcctcaacctgaaccccatgtgcaagccaggcgacgtggcatacacgctcatccccaccatgtgctacttcgagttccttcctctccagtgcagcaacggcaaggcagagccgagccaccgcgacctggttggcctcgtggatgtgaagctgggtcacgagtatgagctcgtcgtcaccacctactccgggttgtatcggtaccgcgtgggcgacgtgctgagggttgccggcttcaagaacgaggcgccgatgttcaagttcgtcaggcggcagaacgtggcgctgagcgtcgactccgacaagacggacgagacggagctgcacgcagccgtgagcggcgcggtgcagcacctggcgccgttcggcgcgtcgctggtggagtacaccagctacgccgacgcggctaccatcccgggccactacgtgctgttctgggagctgcgcgcgggcagcacggccgtgccggcgtccgtgttcgaggactgctgcctgtcggtggaggaggagctcaacagcgtgtaccggcagtgccgggcctgcgacaagtccatcgggcccctcgagatacgcgtcgtgtccgagggcacgttcgacaagctcatggactacgccatcagccgcggcgcgtccatcaaaccagtacaaggcgccgcgctgcgtgcgccccggccccgtcgtggagctgctcgacgcgagggtgcaggccaagtacttcagccccaagtgccccaaagtggagtccggggaacaagcaatggaacgccagcaacggggacgcctgatcaccttttaattttctcagccggacggagtgacgatggatgctttggttgtatatacaatatgattttcagaggcagcagcgaggaattaatagttatggaatgatgacctaggggtatccacatcttttgatcttattttgaatcccttttttttcttcatctctgtaatatgtcccgtgtttctttgtggtcgtgtattttgcaacgcacttagcttaa

SEQ ID NO: 116539 - DNA, 999 bp, Zea Mays
acaccaccaccaccaagccagcaggtgctgcgatacattgcacacaacaacaaccccagctctgccccagcccgcccacaggagttcccgcatctccctctggtctggtcacaggagttccgagacctctccaatggcggttaagatctacgttgtgtactattccatgtatgggcatgttggcaaactagctgaagagatcaagaaaggtgccttatctgttgaaggtgttgaggctaaaatatggcaggtccctgaaattctctctgaagaagtgcttggaaagatgggcgcgccccctaagcccgacgtgccagtcatcacaccgcaggaacttgcagaggctgacggtatcctctttgggttcccgacaaggttcggaatgatggcagctcagatgaaggcgttcttcgatgccaccggtgggctctggagggagcagagcctcgctggcaagcctgccggcatgttcttcagcactggaacccagggtggtggccaagagactacaccgctgacggcgattacccagttgacgcaccacggcatggtgtttgtgcccgtgggctacaccttcggcgccaagctgttcggcatggaccaggtccagggtggcagcccctacggcgccggcacgttcgccgccgacggctcgaggtggccgagcgaggtggagctggagcacgccttccaccaggggaaatacttcgcgggcatcgccaagaagctcaagggctctgcttgatctgcacatacccctctgtcagatatcataaaacatttacagattcgtcatacccgtcaccgtcaatagattggtctgtgttctctcgtggtgcctcgatgctatgtagttcattggtactgctgccgtatgaatttcgatgattgctctggtgacttggtttgtaatttggagttggactatcgttgtttctgccgcataaatttcgatgatttggtcaagtaaacgacttgcaggcttgcagctggttgatc

SEQ ID NO: 116540 - DNA, 3377 bp, Zea Mays
tgaaacaattttttcttcgtatttacccgcacagggaatatacctacatctgttccgcaagttcggcaatcaggaattcgtcgacggcgaaagggtatcgagcacattgacatctctatatggcaggcgtgtgcggcggcggaggaggaaacctgtgcgcacgcgtgtgtttggttttgtagttcgcatgcggatcaaactcgttctccaaatgccaaccaacccgcgtggaaacagctcgccgttccagcctcccaagtctccaactctgactcgcccggcttcttatactccagttctccaaatgccaaccaacccgcacagggctgggatcttgtcttgttaaaagcctgttgataaaaaaaaagaactcaaacgtggccactgccccatgtgagtatgtgactgactagaataacaaattctcggccgcaccgtcgcactggttgattacccggtacaagacaacgtcctctccctcccgctgatccgaagcctccctcgaggtttgcaggcgcagcgcaggcaccgtcacaaggcaactgggggcgcaatgtcctgagagttagcagtagtccgttttgccctggcgcggggtgtgcgattcaggcgagatcgagcatgagggcgtgcgcgctccccctcgtcctcctcgccaccgccgcgttcttcccactctccacctccaccgacaccctcggcacgtccgcctccatcgccggcaataaccagacgctcgtctcggccggcgacgtcttccagctcggcttcttcagcccggatggcgccaggacgtacctcgggatttggtactacaacatcacggtgcgcaccatcgtgtgggtcgccaaccgccagagcccggtcctcagctctccagccgtcctccggctctccggcgccgacggccgcctcctcgtcctcgacggccagaacggcacggtgtgggcctcggcggcgccgaccaggaacgtgaccgccggcgccaccgcgcggctgctggacagcggcaacctcgtgctcagctcggacgggagcggctccgaccagagcgtggcgtggcagagcttcgactacccgacggacacgctgctcccgggcatgaagctcggggtggacgccagggccggcatcacccggaacatcacggcgtggcgcagcgcgtccgacccgtcgccgggcgacgtcaccttcaagctgatcaccggcgggctgccgcagttcttcctcctccggggcaaggcgaggctgtacacgagcgggccgtggaacggcgagatcctcaccggcgtgccgtacctcagctcgaacgacttcaccttcagggtcgtgtggagccccgacgagacgtactacacctactccatcggcgtcgacgcgctgctgtcgcggctcgtcgtggacgaggcggcggggcaggtgcagcgcttcgtgatgctcaacggcgggtggagcaacttctggtactaccccaccgacccgtgcgacacctacgccaagtgcgggccgttcgggtactgcgacggcaccggccagtccccggcctgcttctgcctcccggggttcgagccacggtccccgcagcagtggaacctccgcgacgggtcggccggctgcgtgaggaggaccagcctcggctgcggcggcggcgccaacgccagcagcgacgggttctgggtcgtcgaccagatgaagctgccggaggccaccaacgcgacggtgtacgccggcctgacgctggagcagtgcaggcaggcgtgcctcagcaactgcagctgccgggcgtacgcggcggcgaacgtcagcgggggtgtcgaccgcggctgcgtcatctgggccgtcgatctgctggacatgcggctctacaccacggacgttgaggacgtgtacatacggctcgcgcagtcggagatagacgcgctcaacgccgcagcaaaccgccgggccccgagcaagcgcgtggtggtgatcgctgtcgtggcgacagttaccggcgtgctccttcttctgctgtcggccggctgctgctgcgtctggaggagaaagaggagggagcgccacggcgagacggatccctgcccggcgccgccgagcggcggcggagacgacgcgctcccgttcagggcaaggaagcagcaggcgctggacgaggactggaggagcgccgagaaagacgttgacctgccgttgttcgatctggcggcggtcctggcagctacgggcagcttctccgcgagcaacaagatcggcgaaggcgggtttggtcctgtctacatgggaaagctggaggatgggcaggaagtagccgtcaagaggctgtcccggaggtcgatgcagggggcggtggagttcaagaacgaggtgaagctgatcgccaagctccagcaccggaacctcgtcaggctgctcggctgctgcatagacgaggacgagaggatgctcctgtacgagtacatgcacaaccagagcctcgacacgttcatattcgatgaaggcaagcggaggctgctagggtggcagaaacgcttcgatatcattctgggggtcgcgcggggtctgcagtacctgcacgaggattcgaggttcaggatcgtccacagggatctcaaggcgagcaacgtgttgctggacacgaacatggtccccaaaatttcggacttcggcatcgcaaggatgttcggaggtgaccagaccacggcatacacactgaaggtcattgggacatacggctacatgtccccggagtatgcgatggacggcgtgttttccatgaagtccgacgtctacagcttcggcgtgctggttctagagatcatcaccggcaagagaaaccgaggcttctacgaagaagagctcgacctcaacctcctccgatatgcatggatgatgtggaaagaaggcagaggcgctgatctgctggacccggtcatggacggcggcggcagcgtcaaccacagcgaggtgctgcggtgcgtccaggtcgccctgctgtgcgtcgaagtgctgcccaggaacaggcccctcatgtcgtcggcggtcatgatgctggccagcgagaacgcgacggtcgccgagccgaacgagcccggggtcaacgtcgggaagaacacgtcggacacggagtcgtctcacggcttcacggccaacagcgtcaccataaccgccattgacgctaggtagcttttggatagatttgccctcaccagagcgcgaccaccggcaggtgattattctaatgacgacgcagtctgttgtcttgtattaactgtgtactccctccggtttcctattagttgtcgtttaggacaacgacacggtctccaaaatataactttgaccaatgttttttgttaaaatacaaatgaactcttaataca

SEQ ID NO: 116541 - DNA, 372 bp, Zea Mays
atgggcgtggagagccctccagcggtggagatctccttccacacccccgacattcgctggaccgcaacatccaagtctacctgggaaggatccgccgctattcctaaattgcgcgaggttcgaggacgagccgacctcgtgtgctgctgcggggacgacgacgccatcacctatgatgaggcggaagcgacagagagcgatgcacgggttgggcgggcacacgccgcagcgagagtgtgtggggagcatgttgagcgcaagcagttgagatccaggtggcacaggaatgagagcaggctggtggtgacgagggcttggaaggagaggagcggtgtggtcggggaggaagaagactcctatctggttcactaa

SEQ ID NO: 116542 - DNA, 159 bp, Zea Mays
atgaccaggagaaatcaccaagctgtttgtaggtatagtatcatatccaacaaggttgtctatcaaaagttgctgccacctgaaaaagaaaacatagaaaaaattgagttgacattcttttgccacctgattatcatgtacagcttgaagtatatataa

SEQ ID NO: 116543 - DNA, 2655 bp, Zea Mays
atgagggcgcgcacgctctccctcctccttcatctgctcgccgccgccgccagttccttcactccctcggcatccaccgacacaatttaccggaacacgaccctcaccggcaaccagacgctcgtctcggccggcggcatctacgcgctgggcttcttcagcccggccggcgccgacggcaggacgtacctcgggatctggtacgccagcatcccgggcccgacgaccgtggtgtgggtcgccaaccgcagggacccggtggccaacgccccggccgctctccagctctcggccggcggccggctcgtcatcctcgacggcaacaacgacaccgtgtggtccaccgcggcgcccaccgtcgggaacgtcaccgccgcgcagctcctggacagcggcaacctggtgctcagcgccgatggcggcgggcagagcgtggcgtggcagagcttcgactacccgacggacacgctgctcccgggcatgaagctcggggtggacatcagggccggcatcacccggaacatcacggcgtggcgcagcccgtccgacccgtcgccgggagacgtcacgttcaagctggtcatcggcgggctgccccagttcttcctcctccggggcgccacgagggtgtacacgagcgggccgtggaacggcgaaatactcaccggcgtgccgtacctcaaggcgcaggccttcaccttcgaggtggtgtacagccccgacgagacgtactacagctacttcatccgcgagccgtccctgctgtcgcggctggtcgtggacggcgcggccacgcagctgaagcgcttctcgctcaacaacggcgcgtggaacagcttctggtactacccgaccgaccagtgcgactactacgccaagtgcgggccgttcgggttctgcgacaccgaccgctccccgccgtgtagctgcctgccggggttcgtgccgcgctcgccggaccagtggggccggagggagtggtcgggcggctgtgtcaggagcacgagcctcagctgcgacggcggcgacggcttctgggtcgtgaaccggatgaagctgccgcaggccacggacgccacggtgtacgccggcatgacgctggaccagtgcaggcaggcgtgcctcggcaactgcagctgcggggcgtacgccgccgcgaacaacagcggcgggatcggcgtcggatgcgtcatctggaccgtcgacctgctggacatgcggcagtacccgatcgtcgttcaggacgtgtacatacggctcgcgcagtccgagattgacgccctcaaagctgcagcgacaggagaccaccagcatttacacaagagcaagctgatcgtcgtcattgtcgccactatttccgctgtactttttctgctagcggctgctgggtgctgctttttctggacgaagaagaagaaggcgagcaagaaaggtgaaggtgaggacatgacctccttgcctccgagtactgcagatttcgcgctcccgtacagggtgaggagccagccttcgttgagcccagtacgggatcacaaacagcttcttgacgcctcggaggaaacaagatacgccacggacaaagatgttgacctcccattgtttgagctggaggtgattctggccgccacggacaacttcgcgggccgcaaaaggatcggagcaggcggatttggcccagtttatatggaatttagccgacgaatcaatgcctggcagggagttcttgaggatggacagcaagtagcagtgaagaggttgagccagggatcaactcaaggggtgagcgaattcatgaacgaggtgagactgatcgcgaagctgcagcacagaaaccttgtgcggctgctcggctgctgcatcgagaacgacgagaggatgcttgtgtacgagtacatgcacaaccagagcttggacacgttcatattcgacgaagggaagcgcaggctgctaagatggcagaagcggtttgagatcattctggggattgcacggggtctgcagtacctacatgaggactcgaggttcaggatcatccacagggacctgaaggctagcaacgtattgctggacaggaacatggtccccaagatctcggattttggcatcgcaagaatgttcggaggcgaccagaccaccgcgtacacccggaaggtcgtcgggacatatggctacatggctccagaatacgccatggacggccagatctcgataaaatccgacgtcttcagcttcggcgtgctggtgctggagatcatcaccggcaggaggaaccggggctcctatgaacccgacctcgacgtcaacctcctaggatatgcatggatgctgtggagagaagggcggagcatggagctactggacgaggcgttgggcggcagcttccaccacagcagggcgctgcgctgcatccagctcgcgctcctgtgcgtcgaagcgcagccgaggaaccgcccgctcatgtcgtcggtggtcaccatgctggccagcgacaacgccgtgctccccgagcccagcgagcccggggtcaacccagggatcatgagcgcgtcgtcggacacggagtcgtctcggacccggagcgccaccgccaactacgtcacggtcaccagattagaggcgaggtccaccacgtccactggccactcttccctgtaa

SEQ ID NO: 116544 - DNA, 639 bp, Zea Mays
aggcatgggaactatggaacgaaggcaggtgccatgagctcatcgataaaccattacgcggcaggtgtcctgagaacgtagcgttaagatgcatccatgtcagcttgctgtgtgttcaggagcaagctgcggatcggccctccatgactgaggtcatttcaatgattaccaacggaagtgccacgttaccagacccaaagcagcccggtttcctctccatgttggtcccaaacgaaaccgatgtcgctgaagaaacatgctccctgaatggtctctcagtcaccatccttgacggaagatagcactagttcaaatcgccgcctttctttgcttggtccatgcatgcgcgttaccattgcatcactttgcatggtatttcccaaaagttatattacgggagcctgaaagttttgttctcatgcatccaggctaatggtatataagcatcgccgcatcattgagtccttgtccttagaggaacgtatggttgttgatggtgccaacctggcattatgactttctgatttcatcacatattttcatccaggctatatatatgctcgcttttattctgttcggtcaagattcaacacgaggatttaaacgacaatgcaaatgaactggcataaacatttcatc

SEQ ID NO: 116545 - DNA, 724 bp, Zea Mays
cgagggtcttcgccctagtcgcctgtgcgcagcgggcctagaggcagcgactgagatatccattccactcccgtcaataattcgtcatgaccactgaccaggttgccttcacggagccgagctcatctatgacgttactgaaattgaaacttgaacggggatggggatccaaggaagaagatgacggatcgtgcaaataaggagccgctatgcccgcggaagaggaagaagcgaataagcgatatatctgcttccaaaaggctagaagctggaattccattcagacacatgtcacaagcaacatgatttggacatttcaacgaacacgtcgttggacgtagcagcagcagcaggaaaaggaaaacaggatggtcatcactccataatgacttcggatgctatcaaactctgggagggtgagaaaacaagcacttattttgcggtgttttccttttcacaaataagaaatggtacagacaaattttcaacagaaaacatgcttggagaaggggggtttggcccagtgtacaagggccacttaccggatgggcaagagattgctgttaagagactggcagcaaattcagggcaagggttaactgagtttaaaaacgaagtcctcctcatagctaaacttcagcacagcaatttagtccggctgttaggttgctgcattgaagaggaagagatgctattagtgtatgagtacatgccaaacaaaagc

SEQ ID NO: 116546 - DNA, 610 bp, Zea Mays
atgcactctgggtagtttggaaagctttcaagtgcgaatgggtccaatggcgaaactggatacatcatacatgtcgataatgcaagaggatgaatttcacaaattagcagatgagacaattcatgatttgcttgaaacacttgaggaatatggtgactccattcagatggatggtttcgacatagactatgggaaccaggttttgacattgaggcttggggatttggggacatatgttgtgaacaagcaatcaccaaacagacaaatctggctttcttcacctgtaagtgggccttctaggtttgactgggatgcagcaactaatggttggatatacaagcgaactggatcgaatcttgtgcaacttcttgagaaggagattggtgagctctgtggtactccagtacaactttcataatagtacaggaaatgccacacaactaggttggatggagagcagtgcacttgaggtacagtatgaatgagagtatgagacaaccctcctgtaatatggttattcacaagattttcttctggacatttgcacactgtttgggataaataatttcattcgctgataacaggacaaagtaaacatcagacatatatc

SEQ ID NO: 116547 - DNA, 1011 bp, Zea Mays
cacgctaggcttctactctagtccagtggatgccgacctaccgtctcgttacgtgatccaattgcagcctttacgggcccagtacggggccatcgccgttccagttccagcaccaccgcccgtggccgttgtagcagggctgcgccgccgctctgactgccgtaggctgctgcgtgggcctcctaggcacacacacgggcgtcggcgctggccatggcgtcgccgtcgcgtaaggttctcctaggcgtaaccttcgagaggcggctccggtctcgcactcggcaactcttctgggccgccgatctccctgtagctaccacctctcgctctctcgcggccgccgctgccacgacgctgccgtcgggcgggtctccagcggctcttctgttctctttgaggaccatctcgtcaacgcgcctctcgaaactgtccgccttcagtgacgcgcccggcccatctgtggtggaccacaagtcgataatgcaagaggatgaatttcacaaattagcagatgagacaattcatgatttgcttgaaacacttgaggaatatggtgactccattcagatggatggtttcgacatagactatgggaaccaggttttgacattgaggcttggggatttggggacatatgttgtgaacaagcaatcaccaaacagacaaatctggctttcttcacctgtaagtgggccttctaggtttgactgggatgcagcaactaatggttggatatacaagcgaactggatcgaatcttgtgcaacttcttgagaaggagattggtgagctctgtggtactccagtacaactttcataatagtacaggaaatgccacacaactaggttggatggagagcagtgcacttgaggtacagtatgaatgagagtatgagacaaccctcctgtaatatggttattcacaagattttcttctggacatttgcacactgtttgggataaataatttcattcgctgataacaggacaaagtaaacatcagacatatatc

SEQ ID NO: 116548 - DNA, 938 bp, Zea Mays
cacgctaggcttctactctagtccagtggatgccgacctaccgtctcgttacgtgatccaattgcagcctttacgggcccagtacggggccatcgccgttccagttccagcaccaccgcccgtggccgttgtagcagggctgcgccgccgctctgactgccgtaggctgctgcgtgggcctcctaggcacacacacgggcgtcggcgctggccatggcgtcgccgtcgcgtaaggttctcctaggcgtaaccttcgagaggcggctccggtctcgcactcggcaactcttctgggccgccgatctccctgtagctaccacctctcgctctctcgcggccgccgctgccacgacgctgccgtcgggcgggtctccagcggctcttctgttctctttgaggaccatctcgtcaacgcgcctctcgaaactgtccgccttcagtgacgcgcccggcccatctgtggtggaccacaagaatatggtgactccattcagatggatggtttcgacatagactatgggaaccaggttttgacattgaggcttggggatttggggacatatgttgtgaacaagcaatcaccaaacagacaaatctggctttcttcacctgtaagtgggccttctaggtttgactgggatgcagcaactaatggttggatatacaagcgaactggatcgaatcttgtgcaacttcttgagaaggagattggtgagctctgtggtactccagtacaactttcataatagtacaggaaatgccacacaactaggttggatggagagcagtgcacttgaggtacagtatgaatgagagtatgagacaaccctcctgtaatatggttattcacaagattttcttctggacatttgcacactgtttgggataaataatttcattcgctgataacaggacaaagtaaacatcagacatatatc

SEQ ID NO: 116549 - DNA, 1065 bp, Zea Mays
tagcgaagcaagtaaaagagtgtgctataagttgtacatcggaaaaacaacatgtaaatctatagaatcaatttccatctctcacctcatgaatttgagatagtcttatataataactttggaaagtggtggaatgtcacattctaaaaaaatagtctattccattagtaagattccaattcctcaaaatgaaaggaaacaaacggggcctaagagtatttgagaatcctcttggactggatttagatacaactaatagacaaacaacagtgttgtccgcgttaggacattcatctagcaattcattagaatcagatgactggattgaacctactgcctatgttcttaactcaactgctcttctttcaagggaacataggaatgttttggattctttccgtctgttgcaaaatgatcccaccgttcacaagcagagagcagttatagttgttgggtttgaactctgaacacatatttttgaccaaatacaccatcatatgtagttttactattgtaattaagttgtatcacaaattcacggtagtattctcgtgaagacctccattatgaccttggaacagattcttgaagctagcaattatttcttccggtatgtctcattctggtgtgtaaggtgagatgtagcactgtagctcctcccacctcggtgcaagtgtaaacataagatgacatctgcacttttagcttggaactagacgataagttgaattgtagataagttgaattgtacgtacaatcttgttcttcatgtgcctatttcttattctcaaaattactttacattaccttatttacatatttcttgtatttacgtgttttaatttttcagtaggttctacttctgcacttggaaccatcaacaaagagtcaaagagtaaagatgttattccacgatgacgtgtttcatacattatttatctttacgttatgttttgttgtagatttttaattgttattttctattttagtattgcattgtatggttgtttccttgaaaccacattcacactcatctctatagcaatgaacggacactttgttata

SEQ ID NO: 116550 - DNA, 715 bp, Zea Mays
cttaaaatcgtcttgccaaagagtactacaatttagaatataacatcatctagatgccttttttggctttataaacaagatggtgtgctttaccatcttcatcaccaagaaagaatgtctatgcttggtggctgattatcaactttggtggagatgttacaagtacgacactaatcaacaattcaagatgaaacaaacccaatgaaatcatgatgtgcaataacctttcctccaggttagggcattcaggtatgcggtaagcttttatccttccatatcagtgcagacttaaattggttggtaaactattaaactgcatgagatgctgagctgaagaaatatcattgctcagatagtaagaatcaaatgtctgatctaggacgtgttgggggcatgagtatcaatgccgtgattttcagataagctgggttctggcccttctggatgtacaccggctttgacaaaattttcagtactgtcccaggaagagtgacaagtggcttatgacttggtcaagcatggcatggctctagagacaggcgatgagagtacctggaatagtatttgtagggtttgtacagaacctggtggctagatattttcctagtacaccagtggaatgaaaattcactttcatttacattccttttagaaaatagtcaaaccattatatattgttacttcctcctatcgtaagacaagtccatctcaattt

SEQ ID NO: 116551 - DNA, 262 bp, Zea Mays
accaaatgatcaaatggagagcagtggaggtggaggatggctggctgctagtgctggtcttgggcgctggcagagtggagccgcagaggatggctggctggttgctggtcttgggtgcagatctgctgtggggtaggcggccagcggtggtgcaggtctgctgtgcctccacggccggcggtcagctgtgcctccacggtcagcggccggctttgcctccgcggctgaggagaggagagacgcgccggagatgttggaggat

SEQ ID NO: 116552 - DNA, 2039 bp, Zea Mays
atgcccgcgctcctcccgtcgtctttgactctttcccctttcctcaagcctccttccccaacccgaagccccaccgcctcgccgcagccgccaccacgagtcccgagtcacccaacgcggcccccaatcccggcagcgtccgcctccgccgcctcattgcccgtgaggacctcgccggtgtcgcgcacctcgtagagcgctccgtctcccgcgacgggaggcccccgacgtctacctctgcaccaagctcatccgcaacctctgccgccggggccgcactcccgacgccgcccgcgtgctcctcaccgccgagggctccgggtcccccgtcgacgtcttcgcctacaacaccctcgtcacgggttactgtcggtacgaccacctcgacaccgcgcgcaggctcatagggtccgtgcccgtcgcgccagatgcctaaacgtacacgccactgatccgtgggctatgcgacagcggcagaccggtagggtcgccgacgcgctcagcctgctcgacgatatgctcctctgcgggtaccagcccaacgtcgtacgctacattgtgctccaggaggccatgtgcaagaacagtgggttcgagcaggccatggcagtccttgacgagttgcttgcgaagggatgcacacccaacatcgtcatgtacaatgtcatcaccaatgacgtgttcagggaaggctgcgttgatgatgccagggagatcttgaatagattgtcctcttacggttacgggttccagaccaacactgttagctataccaccctcctgaagggcttatgcgcttctaagcggtgggatgacattttggagttctttgtcgagatgatggagaagaactgcatgccaaacgaggtgacatttgacatgctaatcatattcttttgtcgagtaggtatgttcttgaacgaatgacggagcattggtgtgtaccttgtgcaatattgttataaactcaatttgcaaataaggccgggttgacgaggtctttaaattcttaaacaatataggttcctacgggtgcaatccagataccattagctataccacggtcctaaagggctggtgtcatgctgagcgatggaatgatgccaacgaacttttgtaagagatggcatgtaacaattactaccctccaaacgaggtaacattcaatacatttatctgcatcttgtgccaaaaggggttgatcgagcaagctattatggttactgagaaaatgtccgagcatggctatatagtgggtgttgtcacatacaatgctcttgtaaatggattctgtgagcaaggtcatattgacagtgccctagaactgtttcgcagcatgctctgcaaacccaataccatcacacactactttgctgacaggcttgtgcaatgctaaatagttagatgctgctgcagatctcgtagctgaaatgcttcgtaggtattaccctccgagtgactttcaatatgatgtacttgcgagttttttctgccaaaaaggatttcttgagcaagcatttgagctcgttgagcagatgatggagcatggtcgcaccccctaacctgatcagatataatacatcacttgatgggattaccaagggttgtagttcagaagataccttggagttgttgcatggcttggtcatcaagggagtatcgccagataagatagagtggaagaggtcattcaaatgttatctctcaaaagaagatagagtcgaagaggtcattcaaatgtttcacgtagtgcaagatattggaatgagacacaaagttgtggtgtataacaggatactacatggtctctatagaagatgtgaaatagataatgctatcaacttttttcctatatggtattcaatggatgcatgcccaatgaatcaacctatattatacttattgaaggccttgatcatgagggtttgttgaaggaggcccaagatctactgagcgtgttgtgttcaagaggagttgtaagcaaagacttaatagaagagtaacactaaggttgacgaccaaactgtgcataccctttg

SEQ ID NO: 116553 - DNA, 2394 bp, Zea Mays
atggatgcaaacatacttgatgtgtttgtccccagggtgcgacaaatatttgatacaagggaagaagcctacctcttttaccttgactatgcaaagttagttggttttagtgtcaggacaaagaggtgtaattgcaactactggtgtggaacattatacatgaagaacgtagaccgacctccatctaatccaaaacggattataattcagtctactcaagagtgctttagtgtcgacataccccatgttccggcggaaactgttagacacaaaacaaggcaggctgctgatgaggacgatgactttatgccattatcgaagaagcgtaactttgatgacagtcctccaaaagtcttgaagaagatagttacaaagcagagaaaacagaggcttaatgtgagatgcaatccccaagacgtattagtaagcatccagatattaaatgacagacagcgccaagctattgcacggagggggttctccagtattcttgatatgagagttgacgcactcggtagtagatttcatttagcttggctgatggaaaagcttgaccataatgacatgacaattcgagccggcgcaaggaaggagctcaaaattacaaaggatacggtgcaccttattttggggttaccaaatgctggtggaggaacgacattgggcattgatgaagctgttgctgccaacaatttaagggctgaacttggtttatcgaaagaagattttggggttgtagctcttcaagatcgtctgaggaaagggtctgacgatgatctaagcatcagatccttcttcctgatactgttcaataagttgttgttccctactgccagctggggaataaccaaccatgaggttcttttaactgaggagatggatcgtttccaccagatggactggtgccagcttattttcaatgatttatgccaagctgccaagaagtggcatactaggagcgttacaaacgtttctacaaccatttacggatgttccatcatcattcttctgtattatttggatcatcttcatgactcagcggcacctcagaataaacgtggaacaccacgcatcaaatattttgataggaatattattcaagcactgacaagagctgacaagggcaagatacacaaaggacaagaaccatttggacattgttcgcataagaccagaacaaacacttttgatgtacctcgtcctgacccatctggacagcacacaattcacatcgaactcccgctcatcagggatttgatatcaagcaagctgaatcagcttccatcccgccaccgcctgggtttcatagagaagttgtcacattatgatacggagggtaaacatggtgacggtggcaagaacatgccgaccaacacaaacgtcactcctaaagcaacaccacatacggaatcttccgtgccgatatttgatgtgacgccgcaaataaagtctactggtggcgtccaacaagcggcagaaatagatatccccgacaatggtccatgcttagatcagactccatctgaacatgtttctgttgaaaccgatccagctacaaacactcctcaggttgaccaggcttcactggattcggagatgcaaactatgttagctctacgcgaatatttgtgtggtacgcaatctgacaccagcaggaccataatagattatggtgaatattcttcaacatgttctgatatatatgaatcttttgccgatgggaagtgtctcgacaatgtgttcatgcagtgcttcatccaatttgttgatggtgatgccaaaaatcagcagccctccatgagttcgaacagattaattcttgatgttaatgttaggtcactactcaactttgaggaacaggaacgacacagtcggaaccctcaaccttttgatgaatctgtactgcacacacttctagacaatgcattgcccgagacagatgaaatggataaatgcaaagcgatcatggttcccatggtaagcagggggcactggacattgtatgttgtcaatacagtgaagaagtgcattcacattttagattccattccatatggggcaacacttggtggtactacatggaaggactatcattttgctggattggacttagggggcagaaatttaccatgggctaaggttattatgagtagattaaacaaagccatacaacatgtacggcccaggacatgctttcccaaatttggcaacttcacaattggcttgtgcccaaattgtcctaacatggcagaaggatccaatgattgtgggttttatgttatgggatacattctcttttatgactgcgtcgaaggatctctgcggttagacatagaagcaggcaacactagtgagatacggtctcttgcgctgcatttttcgcattccatctga

SEQ ID NO: 116554 - DNA, 501 bp, Zea Mays
gctggtggaagggagttgcaatcgcacctgcccaagtttctatttccaaagtttggtggggaggatcccgcgctatgggtgatcaggtgtgaggactattttcgtatgtaccaggtgtctgagtgcatgacggtgctttcaggttccatgcacatggaaggaaatgctgctagatggatgcaaattcaaagactgaaaggggatttgggaaattggaggcacttctcgaagactgtgattgacaagtttgggatagatgtgtttccccgagtcatgaacagaatactgtatttacagcagaagggaagtgtggaggaatatgttcaggagtttgaggaactcagatatgcagtttcagtgcataatccaagcctgagtgaagttttttttgtggctcaattcatgaaaggtttgaagcatgagattcaagggccagtgatgtctcaaatacctactaccattgatagaacaatcagacttgctgtggtgcagcaggaggtt

SEQ ID NO: 116555 - DNA, 2536 bp, Zea Mays
ggcacgacgaggcagggaaagccttcgtgctgcgtactcctatattaggctcgctccggaaggcgagcaggcccctcccctcgccctcgccctcgcccccgtccgccgccgagtgtttgggaagcgagcaagccgctcctccccatccttgttctacgattgccccgcgcgcatcccattcccacgtcgaagcggccgaggtagtcccggctgttgccagcgagcgatggcgagcaacggcatgtcgcttgtgcatcgagccgccgaggcggtgcgccgcacgccgcgatggaagaagaggctcgtcttattcgccgtcggagctagcaccttaacttacgcttgtcaagacaatcgagttcttcaaatttgtgatgggactggaaacaagaagaaggtggttatccttggtacaggatgggcaggtgcaagtttcttgagaaatatcgacacatctttgtatgatgtccatgtggtatcacctcgcaattacttcaccttcactcctttgttgccaagtgtgacatgtggcacagttgaagcacgtagtattgtggagccaattcgcaatattgtgagaaagagaaatggttcatttcgattttgggaggctgaatgcatcaagattgatccaagaaacaaaaaagtccattgcagatcagatgttgggacaaacattaatggaaacggtgaatttgttgtggattatgattacctgattgtcagtattggggctagacctaatactttcaacacacctggtgttactgagaattgccatttcctaaaggaagtagaggatgctcaaaagatcaggaagagtgtcatgaaatgttttgaaagagctgcccttccaaatctttctgaggaagagcgaaagaagaaccttcattttgttgttattggtggtggcccaactggggtagaatttgctgcagagttgcacgattttgtgaatgcggacttggcaaagctgtatcctgatgtaaagaagtatgtaaacatttcagtaattgaagcaggaggtcatatccttacaatgtaagttcgttcgatgctttgtaacccattagatatctacttcggttaatctaattaaccgacagctatattgtggagacaccaaatgaaatggttagatgtgactttgctctcttctcttttttgcgaaaaacaaagtattatgtgatgtttcttatgtttatgcagctaatatgagaggttcgtgaaatatctcctgaatcagcttatatgtttaatacacctgttgccttctgatatcttagatctgttgcgatctttttataatattccatggtttatttaggtttgacaaaagaatcaccgaatttgctgaagagaagttcaagagggatggcatagatttgaaaacaaattttaaagtcgtgaaggtgtctgataaggatattaccatgaccaatcctgctacaggagaggtcgctgttccttatgggatggcagtttggtcaactggaattggaacccgtcccatcatcttggatttcatgaagcaagttggtcaggagaaccggcgtgtgctagctactgacgagtggcttagggttcaagggtgtgaggatgtatatgctcttggtgattgtgcaacgattgctcaaagaaaagttatggaagatgttgcttccatattccgagtagcagacaaggataactctggcactttaaccgtgaagaaaataaaagatgtccttggggacatatatgagagatacccacaagtggaattgtatcttaaatccaaccaaatgaagagcttccacgagctacttaaagactcagatggtaactccaaggagttgaaagaactgaacatcgaacagttcaaaaaggcccttgctcaagtggactctcaagtcaagatgctcccagcaacggctcaggttgctgcacaagagggaagttacctagccgactgcttcaacagaatgaagacgtgtgaacaatatcctgagggtcctataaggatcagaggtgcagggcgccatcggttcaaacctttcaggtacaggcatctcgggcaattcgctccactgggtggagagcaaactgcttatcaattgccaggtgactgggtgcatgttggacacagcacccaatggctgtggtattctgtctatgcaagcaaacaattcagttggcgcacgaggatgctagtcatatcagactgggggaggcggttcatctttggaagggactccagtagcatatgaattcaaatctcccgattttgtagttcacctgcgttctagatactacttgcatcagttttgctgtcccactatttccgaagcttagcctcgcaaggtttctgataccaaattttgaccttgccaaatgttttgttacctcgtcatgcacactgagtgattcagatgttatatacgtcttatcggatatttgcttttttatgtagggcactatgatatctagctataccgatactaattgtaagtttgagttattttggtcattggcaatcaagtatctatttttgcta

SEQ ID NO: 116556 - DNA, 2250 bp, Zea Mays
ggcacgacgaggcagggaaagccttcgtgctgcgtactcctatattaggctcgctccggaaggcgagcaggcccctcccctcgccctcgccctcgcccccgtccgccgccgagtgtttgggaagcgagcaagccgctcctccccatccttgttctacgattgccccgcgcgcatcccattcccacgtcgaagcggccgaggtagtcccggctgttgccagcgagcgatggcgagcaacggcatgtcgcttgtgcatcgagccgccgaggcggtgcgccgcacgccgcgatggaagaagaggctcgtcttattcgccgtcggagctagcaccttaacttacgcttgtcaagacaatcgagttcttcaaatttgtgatgggactggaaacaagaagaaggtggttatccttggtacaggatgggcaggtgcaagtttcttgagaaatatcgacacatctttgtatgatgtccatgtggtatcacctcgcaattacttcaccttcactcctttgttgccaagtgtgacatgtggcacagttgaagcacgtagtattgtggagccaattcgcaatattgtgagaaagagaaatggttcatttcgattttgggaggctgaatgcatcaagattgatccaagaaacaaaaaagtccattgcagatcagatgttgggacaaacattaatggaaacggtgaatttgttgtggattatgattacctgattgtcagtattggggctagacctaatactttcaacacacctggtgttactgagaattgccatttcctaaaggaagtagaggatgctcaaaagatcaggaagagtgtcatgaaatgttttgaaagagctgcccttccaaatctttctgaggaagagcgaaagaagaaccttcattttgttgttattggtggtggcccaactggggtagaatttgctgcagagttgcacgattttgtgaatgcggacttggcaaagctgtatcctgatgtaaagaagtatgtaaacatttcagtaattgaagcaggaggtcatatccttacaatgtttgacaaaagaatcaccgaatttgctgaagagaagttcaagagggatggcatagatttgaaaacaaattttaaagtcgtgaaggtgtctgataaggatattaccatgaccaatcctgctacaggagaggtcgctgttccttatgggatggcagtttggtcaactggaattggaacccgtcccatcatcttggatttcatgaagcaagttggtcaggagaaccggcgtgtgctagctactgacgagtggcttagggttcaagggtgtgaggatgtatatgctcttggtgattgtgcaacgattgctcaaagaaaagttatggaagatgttgcttccatattccgagtagcagacaaggataactctggcactttaaccgtgaagaaaataaaagatgtccttggggacatatatgagagatacccacaagtggaattgtatcttaaatccaaccaaatgaagagcttccacgagctacttaaagactcagatggtaactccaaggagttgaaagaactgaacatcgaacagttcaaaaaggcccttgctcaagtggactctcaagtcaagatgctcccagcaacggctcaggttgctgcacaagagggaagttacctagccgactgcttcaacagaatgaagacgtgtgaacaatatcctgagggtcctataaggatcagaggtgcagggcgccatcggttcaaacctttcaggtacaggcatctcgggcaattcgctccactgggtggagagcaaactgcttatcaattgccaggtgactgggtgcatgttggacacagcacccaatggctgtggtattctgtctatgcaagcaaacaattcagttggcgcacgaggatgctagtcatatcagactgggggaggcggttcatctttggaagggactccagtagcatatgaattcaaatctcccgattttgtagttcacctgcgttctagatactacttgcatcagttttgctgtcccactatttccgaagcttagcctcgcaaggtttctgataccaaattttgaccttgccaaatgttttgttacctcgtcatgcacactgagtgattcagatgttatatacgtcttatcggatatttgcttttttatgtagggcactatgatatctagctataccgatactaattgtaagtttgagttattttggtcattggcaatcaagtatctatttttgcta

SEQ ID NO: 116557 - DNA, 2991 bp, Zea Mays
agtgaacgcagaacaatcgcgtcgttgtcgtccagtttacacgtaacccctcgcgcttattcagaattctgaaattccaagcccgatctcctctcctcttccccgaatctcgggcgccgccgtaaccctagcccccgcgatccgctcgccggagggaaggagggatctccgcaggcgcccatggaggtgaagttgtggaacgacaagcgcgagcgggagctcctggagagctacgcggacctgtacgcgatcatcaaggccgtggagaagctggaacgggcctacgtccgggacctcgtctcagccgccgactacgaggcggagtgcctcaagcttatctcccagttcaactccctctcctcctcgctcgccggcgccgtcaccgtccctcgcttcgtccaggcgtaccgcctcgattgccccgccgcgctcaaccgcctcctccagtcgggcgtcccggccaccgtcgagctccgcgccgcgtccgcctcatccgcgccggccgccaccgccgcctccgcgtcagccatcgcgcactgcgtgcagaccttcatcaccgccatggacgccgtcaagctcaacatgcttgccaacgatcaggtccgccccctgctgcaggacgtcgccacatccatggccaggctcggttccttgctgccgcccgactttgaggggaaggtcaaggttaacgagtggcttgccaagctgcataaaatgggcgccgcggatgaactcaccgagcagcaggccaggcagctcaacttcgacctcgactcggcctacagtgcctttttggctgcgctgcccgccgctggtctgtaaccgggcgtggacctggttcgttctttacttctattacagtactatagatatctgtaatttcggtactgctattttattgttaataagaaagttctgttttctttatatactgtaaatatgtttatcgcatgatatacattcacatgacaacgcttgcaaatggcctgtagcctgtttacttgggtacatttattccactattctctatggaacatatgaagcaataataactgtataatgtattgttctctcccatttaggggtgttaatagatcacggtccaaatgtttcttcacaataagttagggtccttaaataattctagttcaaaaatgaatagaaatagagcccaattctaatccgatccttaagttttatagtataaaatctagaaaccattaccacccctactcccattacatttgattatctttctacttgcatggagctataaatgatctattttcttctttgggttatagacaatctaaatgaagaatgacttagttgacaacttggggtgtcctttgagtagtcgaggttcgttaacttggggtgttctttgagtagttgaggtccaggtccatttgatttgggaatcagtagttcataaacagcgggtacgttatgttcagtaccttgtacttcacttgctgtgccaccttatttgggaatcatgtgtagcataccaccttatctgttaccccattatattgatcttgttgggaataaacaaattttgattccatttactattatttcagtttctgacacataacttcataacagcaaaatgttgtgatgcttttgttactgcagatcagtactctagacatgaactttttgtggtattttgtctgctgacgagaaagtgctgagcttatactgacctgatctcttgtcaatgagttctgcaatatttgtatgttacatgcattaccacataatttatgcatgatgccgtatacggtagaatgcttgcatatggcctgttcatttggatatatttcttaccattgggttatacgaagcagtaagtggaacttatatagtttcctgtagacctcatgatctttctatttataagaatgcgcagttggaattgttgatatgtgctattggttttgtcgattccttttttgttctcaagatcaattgtaatgcaaacagagaacatatacctgcagtgcactcaattttagtatggtttgtcatcttggaattttctttgcaatagctgacctgcatgcttttgtcagaaaaatcatattcattgtcttctagggttgttaacccctgcagtttgcaaaaccagtatgttttgttccaacattgatacagcgctaacagatgctcccttttactcattatatgttgtgacatactggcagttagtcaacttgttttattgtaggatgttatcgaaccacttggaactgttccacgaaattttgttagacttgcatggaagaatatgaagtaggcactgttgccaatcagtttactttgaatctttatgattaatataatttgctactgtcctctggtgttccttttggtacagttgaaaacttgagaaaaacaattggtttaaggttttctttgggcatcagaatggctcgagtttattttttgtgttattacttcgaggtttcttcaagcaccgttgtgtttttggaaccgtatcgtcaaaatctgatattatccatgtactcttgttcaacttatgctgtccttgaaataccggttttagatgggctttcttatcttgccttgctagaaaggctttagttctgcagcccctccttgaagttgatgactgcctgtactttcatctgaactcagcatcaccattcatgaatatggggagtattatacttttagaattattgggaagactttgctctgacctttatctttgtttcatgttttgagtctcaccgcgctctgacatcctctccagaattgttgtagttcaagaaatactttcatccagaccatgtaatatgtgagcacaggaggaaaatcattttacccaattagggctagactgagaatcctattttccggtcccgtttgtttcccaattggattctaactaatggagtaggctattttttagaatgtgacattttataactttccaaagtttatatataagtctatctc

SEQ ID NO: 116558 - DNA, 856 bp, Zea Mays
atggaggtgaagttgtggaacgacaagcgcgagcgggagctcctggagagctacgcggacctgtacgcgatcatcaaggccgtggagaagctggaacgggcctacgtccgggacctcgtctcagccgccgactacgaggcggagtgcctcaagcttatctcccagttcaactccctctcctcctcgctcgccggcgccgtcaccgtccctcgcttcgtccaggcgtaccgcctcgattgccccgccgcgctcaaccgcctcctccagtcgggcgtcccggccaccgtcgagctccgcgccgcgtccgcctcatccgcgccggccgccaccgccgcctccgcgtcagccatcgcgcactgcgtgcagaccttcatcaccgccatggacgccgtcaagctcaacatgcttgccaacgatcaggtccgccccctgctgcaggacgtcgccacatccatggccaggctcggttccttgctgccgcccgactttgaggggaaggtcaaggttaacgagtggcttgccaagctgcataaaatgggcgccgcggatgaactcaccgagcagcaggccaggcagctcaacttcgacctcgactcggcctacagtgcctttttggctgcgctgcccgccgctggtctgtaaccgggcgtggacctgatcagtactctagacatgaactttttgtggtattttgtctgctgacgagaaagtgctgagcttatactgacctgatctcttgtcaatgagttctgcaatatttgtatgttacatgcattaccacataatttatgcatgatgccgtatacggtagaatgcttgcatatggcctgttcatttggatatatttcttaccatt

SEQ ID NO: 116559 - DNA, 2353 bp, Zea Mays
gaaaactggcaagagaattgcctgttatattaaaaagaaggtgagagccagcgagggctaaaatatacaagtacatcacactagggaatgagacattaagtatggtgacacaaatgttccaaaaccaacccctctccttccccaaaacctacaccagccttgctaagtgttttgctcctcctagaatccacaggcgaatttgctccttaatcatcgctatagtctgtgtcacggtcttctctttgtgctcaaagattcgcgagtttctctcacaccaaattgtccaagacacgaggatgatgagggttcgcaatcccttcacgcttctcactgcggatgctgcaagattcgaccaccattggtgcaccgaatctacaggttgccaagaagaatggtggatctccgtaattgcagcccaaatactcaaatcagcccaaatatgtctggtgaagcaacattcagcaaaaagatgtagtccagattctgggcatgaggcgcataggacacagcgcggattatgaggccatccccttcttgccaacctgtctgctgtccaaactctattttgaacagcaagccaactgaagaatttgcactttggtggcgcccaagctttccaaattatactattaaaattcctgcatgccaatgtatatggtatgcagtaaaactcacagataacttatgctatctatgtcagtatgtcacctacagtagtactctaggcacacactgatacacggatattgcaagatagacactgcagattagaagtagaaaaatgtcatcgacgatatcagagatgaactattaaggctaccaggtactattacagagcagagacaagtgtcttcacaacccactcgtagcaaacaagtatccgatgtttaagatcaaaagggccacttccgctttacctatctacaaaagacagcagcatgcaactctaaacgggaacaggtcctaatccatgcaaacgaaggcctgaacatgaacagagacgttataatttgttgtactgctggatggacaccacgactgaacagagggaggggcaaatcccacgaccaccagcatgcaaaaaggactcacagaatgaatcgacgtgcattaggtatctaggacaaaatgcttgcatgtgctagtgctagaggggtgtgccaagacaacaacatgaaaggtcagttatgcataatgaatgatacaagtgatattaattactcccagggggggcgcatgaccaccaacccaacaagtttggcccatccaaacattcagattgcagagaaggcattggcaaaaatcaacaggcaacagacacaagctaggccagagcagggatgcatgggatgcagcatggtgccaagcactagaagcaggccatgccggccacaagaggcgccgtggcgcgtgcactgacattgcatgcatgttcatctgcggggtcaagacatcgtgacccagagaccagacaccataagcacatcgatgcacggacatgaaatcaagagcgaagagagaagcaaagggatggaagtggtggctgggcctgggacggaccttcgcggcagccgggcgtgcactcgcagttgatctccaggtcgcctgacgcaaagacgcggaggcggccgacggcgtcgccgtagcggtggctggtgcatccgcacgtcacctccacgaagtcctctccccagcgcaccccactcacctccctcaggtcctcctcgctgaacagcaccgcaccggcagctccgttcgccgccgccatgtcttcggccgagaagaagacaaacctcaacagctccgatggaaacaacggccacagattgatctggtttgcgtcaaagcaagaaacggtagatgaacaagagattgagatatagagagttgggagctgtggggaaacaggaaccaaagcggcgcctttccacagggaatcccagcgaattgggttcccaccaaatcttgacgagggcgatctccgaaggggccaaagaataaatgcaaagtgccccttttcctagctggatatatatgatccgaaggccggggccaggaacgacgaacgcaacaggtacactgacgcaggagcgacgcaaaagccgctgctttctgtaacaaactacttgggggcttcgctccaaatcgcccagaaagacggatctgccgatctggagaagtcgccacagagtcttcacgaatgcttcctccaaactctaacccccgagcccaaactccaacccccgagccctacgccaacgaagatggggtttcgaaagggagaggagggaggaggcggagaggagagtgaggaccgggagcgagatggaggggagttggtgatgagggtctg

SEQ ID NO: 116560 - DNA, 2896 bp, Zea Mays
gaagctgaagttacgtttattatcatcccgtgcaaaccatccgcacgtaattattgcataacactaggagctagggctagattaggaactgttactgtagcaaatagatgataagactccttagggaatgcaatcgaggctcctgcctaataaacaaatgaagtgggaaaataatctatttgccgctcatggcagtctgcgcttgttgcaccttggccccaaaaccgcacttccttgtgaggaggctccaggaccgccggggcttcccgagccgccggatctcctgcttcatgctcttgcactccttctccaggtccgacacccgcgctttcacgtcggtgatggtctccttcccatcgggtgcgtcgccctctacgtcactgtcggcgtctgcttgcgggcagcctgcgatggccgcggtgcccttggggacgatggcgccgccggcgtgtgggcgcgcgccgtcgccccctgccgcgttgtctgacacgaagaaccacccggctatggacgttcgcaggcggagctgctcgaagaagagcacctgcaccaccacccgaagcggcagccgctcgttctgcgccgcgtgcgtgcacgcctccagcgacagcttctggcagttcagcagccggcacagctgctccctctccgattctgacagccacgggtgcgactgcaatacatacaggtgcatggcatggcgacaagatcacgaagggaaacgtgaatgcccacggttcgcgatgtgtaccttgaggtatatatcgatggcgcggtagatgccgtcgtcgacggggcgcgcgtagtcgggcaccacggccgcgagcgcctggaacttgggcagcttcaggttggtgtccggcgccacctccgcgaggaaaccgtccatgagcttggccaccatggtgatcggcgacagcgacgacgacggcgtcgcgccttggggtatcccgaggctgccgccaccctcctctgccagcgccggcgacgtgtacccggtcccgatcccgtccgtggacgacatgaagtagtccaggatccgctgcacgcagtcgatgtcatagagcgtctcgacgtggtagccgaggttgggcacgagcaggtcgtccagcgacgcgtcctccagctgcgcgccgatccgccgctccagattctcccggcacagtgggctggcgtggaggagcatcgccgtgcgcagcattcccagcaggaacttggtggaggccacgcccttcttggtcggcagcagcgccacgatctcctccaggaagtacctctggtcgccctccgacggagcggacacgctggcggcgcgcggggtgatgttgcggctgctcatgccaccgccggcgccgccgctgccgtcggcgccgtagctggccagcgcgttgctgaagctggtgttgcgcttcagccccgggaggaaccgcccggcgtagaacatgatggcgccggcgatgctctcgtcgcgcatgcccttggcctccatcgcctggatgaggcgcttgaacatgggcaggctgaggaaggacacgtcctcgtaccaccagtccatcccggccgccgccgccgccgcggcggcggaggacgtcgtgtcgcccgaccggatgccgttccagagcgcgtccttgtcgacgctggcgttcctgaccactggcgcggcagcgtcggagccgcaggccttggaggccagcgccgtgatgcagcgcgagacgaggtgcaggtcctcggcagtggggagcacgccctcgcaggtctcgagcgccttgatggagtccttccagttggcgagcacgtcgacgaggaagcactcggcctgcgtgatgaggttgccctcggcgtagtcgtccgtcatgcgcaggtactcggcggcgcagcggaggcacaccacgttgagcgcgttgagctcgatcttgacgtcgtagcagaacttggccgccagctcgaaggccttggcgcctccggggatgtcgtccagctgcagcgtgcacatgccgccgccatccgccggagcctggtactcgctgatcatccgctgcagcacgccgctccggctcagcagcgggaactgcgcgcgtacccaagagaggcgcggcggttcacttcagattcggagcaagccgagatcagcactcgagaacaatgcggcactaaccttgtggaggtaaaaggacatctctccgacttcgacaactacatcactctcgagctcggtcgtgcatctcctgggaagataatgagatcaaggtgaaagtgtgaaattttggaacaccaaggactcctttggattggagagaaaaaaaactatttttcaaaggagtactgtgacatctgcagtaaaattcgcttttggaccgaatggcaagaaggacagacatgctattacaataatttagggtttactgtgccaaagagaccggcatatttctcgtagaaatccggcttaatatattacatagtatcccagtaatttgaaagaaggcagaacgtatcgtgaatcatcaacacacaagcgaaagaaatcgagataaccatgtgaggtcttggaggacgaaaatctccggcttggaacccagcttcatggtggccattattggcctcctgctgcgccagttcgttattccagtcgacgactccggaacgacgatctaccagccggccggggccaagcaggatgatggagtggtatccactgatctatgcttgcgttttttttgggaaatggaaggccaggaaagatggtggccaagtatttatgggtgggacgtgggagtgggagagatcagagatggaaggaattcgatgtgctcatgcagacaatggcgagagagcacgcggccagtcaaagctaggcccgggtccaagggagctgggagcgggcactgctatcgttcgg

SEQ ID NO: 116561 - DNA, 1444 bp, Zea Mays
aaatgcaacgcaacaagcacacctgcaccgcatgagcagcacccgaaattccaaacccacttcgtcaagcaacaacaccggctaaaaattaaaggaggcagcgcgtagcagttggtcgccaccgtcacgtacacacgctcacgttggaggctggactccgcccccgtgctgctcttcgccttgcctttctccgccggagaccccgccgcctcagctgccacaggaggaggaggcaaccatggcggggaggtacgaccgcaatccgttcgaggaggatgacgtcaacccctttgcgggaggaagtgtacctcctgcttctaattctcggatgtcagcacttcctcatgaaccagctggcttctacaatgatcgtggtgcaacagtggacatacctcttgattcaacgaaggacctaagtaaaaaggagaaagaactgcaggcaaaggaagctgagctaaacaaacgggaaagggagctgaaaagaaaggaggaagctgcagccagagctggtattgtcattgaagataagaattggccaccctttatgcccattattcatcatgacatttcgaacgagataccaattcacctgcaaaggatgcagtacctggcgttttcttcactattgggattgacagcttgcctcttttggaacatcattgcaactacagcagcatggattaaatcagaaggtgtcatgatctggttgctagcaatcatctacttcatctctggtgtccctggggcctatgtgctttggtatcgcccgctttacaatgcgatgaggactgaaagtgctttgaagtttgggtggtttttcttgttttaccttctccatatcttattctgtgtctggtcagctgtggctcctccatttccattcaaaggaaaatccttggctgggattttgccggctattgatatcataggcaggagtgctattgtggggatattttacttcattggatttggaatgttctgccttgaatcactgctcagcatcgttgtcattcagcaagtatacatgtacttccgtggaagtggaaaagctgcagagatgaagcgagaggcggcccgtggtgctatgaggaatgccttttgatagagcgacctaggcgactggaagagacacggtgtgacaatgggtaactacgttatgtacatatgctgttcgtctctgagattacttatactagcttatagccttcttgccttcatgcaatgtataccacctaccaccggagcttgatctcttacctaggttcagatgtgcttataggtaactagttttttttatacatttcctacatgatttgtactcttaactcgcgagacaattgttgttgttctttggatctcgagtgattctttgcacggcctgaaaccacttggtcttgaactttgtcagattcttgctgaagtggatattcaggtcatctttttt

SEQ ID NO: 116562 - DNA, 1398 bp, Zea Mays
cgcaaatgcaacgcaacaagcacacctgcaccgcatgagcagcacccgaaattccaaacccacttcgtcaagcaacaacaccggctaaaaattaaaggaggcagcgcgtagcagttggtcgccaccgtcacgtacacacgctcacgttggaggctggactccgcccccgtgctgctcttcgccttgcctttctccgccggagaccccgccgcctcagctgccacaggaggaggaggcaaccatggcggggaggtacgaccgcaatccgttcgaggaggatgacgtcaacccctttgcgggaggaagtgtacctcctgcttctaattctcggatgtcagcacttcctcatgaaccagctggcttctacaatgatcgtggtgcaacagtggacatacctcttgattcaacgaaggacctaagtaaaaaggagaaagaactgcaggcaaaggaagctgagctaaacaaacgggaaagggagctgaaaagaaaggaggaagctgcagccagagctggtattgtcattgaagataagaattggccaccctttatgcccattattcatcatgacatttcgaacgagataccaattcacctgcaaaggatgcagtacctggcgttttcttcactattgggattgacagcttgcctcttttggaacatcattgcaactacagcagcatggattaaatcagaaggtgtcatgatctggttgctagcaatcatctacttcatctctggtgtccctggggcctatgtgctttggtatcgcccgctttacaatgcgatgaggactgaaagtgctttgaagtttgggtggtttttcttgttttaccttctccatatcttattctgtgtctggtcagctgtggctcctccatttccattcaaaggaaaatccttggcatattttacttcattggatttggaatgttctgccttgaatcactgctcagcatcgttgtcattcagcaagtatacatgtacttccgtggaagtggaaaagctgcagagatgaagcgagaggcggcccgtggtgctatgaggaatgccttttgatagagcgacctaggcgactggaagagacacggtgtgacaatgggtaactacgttatgtacatatgctgttcgtctctgagattacttatactagcttatagccttcttgccttcatgcaatgtataccacctaccaccggagcttgatctcttacctaggttcagatgtgcttataggtaactagttttttttatacatttcctacatgatttgtactcttaactcgcgagacaattgttgttgttctttggatctcgagtgattctttgcacggcctgaaaccacttggtcttgaactttgtcagattcttgctgaagtggatattcaggtcatctttttt

SEQ ID NO: 116563 - DNA, 3778 bp, Zea Mays
agttcgttggtgcctgagaatccatggtcgatcgtctccagtcgaagcgaaaagcgaaaaggagaaggggcgggggattgcgagcctgtgctgatggcggcggcggcggtggccgcggcggggagcagcaatgtcgagttcatccgcgcgcgcagcgacaagcgggagtaccgccgcgtggtgctcgccaacgcgctcgagatcctactaatcagcgaccccgacaccgacaaggcggcggcgtgcatggaggtcgaggtgggctcgttcagcgatccggagggacttgagggcctcgcgcacttcctcgagcacatgctattttatgccagcgagaagtatcctggagaacatgaatatacgaaatatatcatagagcatggtggctcttacaatgcatatacaagctccgagacaacgaatttctttttcgatgtcaatgtggacaattttgaagaagccttagatagatttgctcagttcttcattaagccattgatgtcacaggatgctgttcttagagagataaaagctgtggattctgaacacaagaaaaatttgttgtctgatggctggaggatgtatcagcttcaaaagcattttgcttcaaaggatcacccttaccacaaattcagtacaggaagttgggaaacactagaaactaaaccaaaagcgaggggcctggatatcagacttgaacttctgaagttttacaagaattattcagcaaacgttatgcaccttgttgtttatggaaaggagaacctcgattgcattcagggcttggttgagcgtatgtttagtgacataaaaaacactgatcagagaagcttgaaatgtccaagtcatcctctttcagaggaacatttacagcttcttgtcaaagcactgccaatagtagaaggggactatctaagaattatatggccaataacacctagcatccagttttacaaagaagctccttgccattatctgagtcacctcattggacatgaaggcgaggggtccatcttccatattataaaggaactaggatgggccatgaacttaatggctggagagtgcagtgacagtaatgagtattcctttttctcagtaagcatgaggctcactgatgctggccatgaacgcatggaggatattgttgggttgatcttcaaatatcttcatctattaaaagaagacggagtccatgagtggatatttaatgagcttgcggcgataaatgaaatggagttccattatcaagacaaagtccgcccaatcaactatgtgatgcgcactgtctcaactatgcggttgttcccaccagaagaatggttggttggagcagcattaccatcaaagtatgcatcacagagaataaatatgatactcaatcaactaatacctgaaacagtaagaatattctgggagtccaaaaaatttgaaggatctacgagttctgctgagccctggtataacacaccattttcagttgaaaatgtcactccttcagttatacaggaatggattgaaaaagctcctactgaaaaactccatcttccaaaacctaatattttcataccaaaggatttatctcttaaagaagtgcatgaaaaggttacttttccaacagtgttaaggaagagcccactttcacagttgtggtataagcctgatatgctgttctccacaccaaaggttcacattatcattgatttccactgtccattatccagccactcccctgaagcagttgttgctactgagctctttgttgatttgttagtagattatttgaatgcttatgcttatgatgctcaaattgctggtttattctattcaatatatgttacttcagctggattccaggtttctttaggtggttacaatgacaagatgagagttctcttaaatgccatactagtgcaaattgtgaaatttgaagttaagccaaacagattttctgcactgaaggaaacttctgtcaaggactaccagaatttcaatttccgacaaccttattctcaagcgtcatactatgtctctttgatattgggagataaaaaatggcctgtagctgagaaacttgaagctctttctaagcttgaatcagattattttgcaaagttcgtaccacacctactgtcaaaaacatttttggaatgttatgttcaagggaacattgaaccaagtgaagcaaaatctatcgtagaagaaatcgaaaacactatatttactacgcccaattctttgttcaaatccatgtctccatcagaatatctgattaaaagggtcatcatgcttgaaaatgacttgaaatgctactaccaaactgagggattaaaccagaagaatgagaattcatcagttatccaatatattcaggtgcatcaagatgacgccattttgaatatcaaacttgagctgttctctctaatagcaaaacagccagccttcaaccagctacgaactgttgaacaacttgggtatataacaagtctttctctgagatccgactatggagtcctggcactccaggttgttatccagtccacagtaaaggatccttcatacctcgatgttagagttgatgagttctttaagatgtttgaaagcaaaatctatgaactctccgacaaggatttcaagagaaatgtgaaatcattaattgattctaaactggagaagtttaaaaacttatgggaggaatctcatttctactggggagagattgaggcaggaactctgaagtttgatagggtcgagtctgaggtcgctatgctaagagagctcaagaaagaagaattcatcgagtacttcaaccagtatataaaagtggacgcgcctcaaaggaggacactaagcgtgcaagtcttcggcggcaaccatttggtagagttcaagaaggcaatcaacgaagccaacccgcccaaaatgtacagaattacagacatattcggcttcaaacgatcgaggccgctgtacagctcactcaagggaggtccgggcaggatcaccatggactgacagccggcaatagcatgccttgtttttcatgtatgtagtgtaatggccagtgcatacgaatgatgaattcgattctgaatcctgctcctgcatcagattcggttgcatgattgatctatacttcactgtgggtttcacgaccagcgtgtcactttctgggcaaaatctagggagctgtataaagtcatgtatgttcacatgtttgtttgcgtttcttctcacagctatgcagtttgtacagttacatatccacagtgaactagaactagaagcgcgtcttctacacaccaatatacagcttgagcctggctgaccgtgcccgacgccggccgagaaccgtcaaggtgccgtcatgcgcacatgcaccaccggccgtccggtttcagcacgccccggcgtgttcgcaaacgcccgccggcgcccccactcgaagccgttgcggtgccaccggcacctgaacgagccccggtgcgtcgtgggcgagcacacgcagtagtagtgcggcgacgcctggcgcgcccgtggcacagatggtgggggcgacggtgccacggtcgcctgctgctcccgccgcctgactgcgcagtccggcggcagaggcggcagccctggatggcacatgcttctaggctacaaaagggtgatgcgatcggcagctccaccagctataaaacagatggcgccgaagaatggaatcgggttctggcgttttcggatggtgggagatgactagacgtggggaaagggcggggaatatgtgtgg

SEQ ID NO: 116564 - DNA, 1960 bp, Zea Mays
ggttggtttttgtttcctccccgcacccgcaacaacggaaacaacggccccgtggtagcgaggagatcaggaattcaggagagcaaaaggggagagagaatgaattgaaacgaaggcccgcgacgcgaggagcgagggaactaccaccggtgaccggtctcggcgcctccgcgacgatagcctctccgacctcgagcgcggtccggttcctccctgcgtcagcacgcgagcccttggagcttcgagtcagatcccggcgggcgcccatggtggctctggtgccgttgagccgcgcgatgtagggttttcgcgcgccgcagagtaggagcgatggggcgccggaagatgtccgcggcggcaccgccgtctcggagctggtccaacgttggcggaagcgtcatcccggaacttcgagctaaacacaaaacagacttgcagaatttgacgctgaccaaacagccactcagaacattgcattttttcctgttagccatgttacaatacttgaaaagattagcaacatatatcctgagtaagggtggtttcttctttctcctaattgttttattggtagcttctggaatcttgctcgtcgtttcggatggtctgcataagaaggttctggtttgcatacatttgtgctgtatctgggtcctcatattgctctgttcactattaaggctgttcaatgtggtcgaattgatctaaaaattgctccatatgataccatacagctaaaggttgggccatcatggcttgacaagaaatgttcagaatttggaccacctgtgtatccagcatcagctcattcagttaggatcccagtcttcgacctactacctcagatacagctggaggcagttctttggggaattgggactgcgcttggtgagctccctccttattttatatcacgagcagctcgcttatcaggaagcgagtcaaaagctgttcaggagcttgatgcagctacttccaaagaagatgggccagtagcatcatcccttaatcgaaccaagcgttggcttctctctcactcccaacatctcaacttcttctctatcttgattcttgcttcggttccaaatccactctttgaccttgctggtattatgtgtgggcaatttggtgtgcctttctgggagttcttgtttgctactttgattgggaaagccatcatcaagactcatattcagacactatttatcgtgtccctgtgcaacaatcagctcttgtatcttattgaaaaggagttaatctggatatttggtcacgttcctgggttttctgccacccttccgtctgtgattgccagactccatgctgccaaggacaagtatctatcaccaccagccccagtctcaccgtcatcacaaatgggggagaaacagtggaatttctcttttacatctgtctggaactctatagtgtggcttgtgcttttgaacttcttcattaagatagtcacgtcaacagcacaggattatctcaaaaagcagcaggatacggagatggaacttatttcggattccccgatccaggaccattctaaaactaactagtggcgcagctagtggtgtttatacacagctgctagcagcaaagattctcctctgtagcttaagcccctgcagatgatttcaagttccaacaattagtattagtagttattcatctgcgcagtggacaaaaacatggacacatggtcttggttaacttgtcagttgacgaccttttgtcattgagcctgtacctgtactggcagctcctgttggagtcattctgtttattttcggacatctacacggataaacagtaggaattgtttatggagcacggttggctttttttgaagtgaagagcacggttggctttgtgagatgtatcattcatacctgttcctatgtattctgggaacttgaaatgcaatagaaacctgggaggatttaacaaggataca

SEQ ID NO: 116565 - DNA, 2039 bp, Zea Mays
ggttggtttttgtttcctccccgcacccgcaacaacggaaacaacggccccgtggtagcgaggagatcaggaattcaggagagcaaaaggggagagagaatgaattgaaacgaaggcccgcgacgcgaggagcgagggaactaccaccggtgaccggtctcggcgcctccgcgacgatagcctctccgacctcgagcgcggtccggttcctccctgcgtcagcacgcgagcccttggagcttcgagtcagatcccggcgggcgcccatggtggctctggtgccgttgagccgcgcgatgtagggttttcgcgcgccgcagagtaggagcgatggggcgccggaagatgtccgcggcggcaccgccgtctcggagctggtccaacgttggcggaagcgtcatcccggaacttcgagctaaacacaaaacagacttgcagaatttgacgctgaccaaacagccactcagaacattgcattttttcctgttagccatgttacaatacttgaaaagattagcaacatatatcctgagtaagggtggtttcttctttctcctaattgttttattggtagcttctggaatcttgctcgtcgtttcggatggtctgcataagaagcatgtgcaggaattccttaattatgctaaatttgtgtcgtggtgggtttcattaggtgtggcttcatcaattggactaggttctggtttgcatacatttgtgctgtatctgggtcctcatattgctctgttcactattaaggctgttcaatgtggtcgaattgatctaaaaattgctccatatgataccatacagctaaaggttgggccatcatggcttgacaagaaatgttcagaatttggaccacctgtgtatccagcatcagctcattcagttaggatcccagtcttcgacctactacctcagatacagctggaggcagttctttggggaattgggactgcgcttggtgagctccctccttattttatatcacgagcagctcgcttatcaggaagcgagtcaaaagctgttcaggagcttgatgcagctacttccaaagaagatgggccagtagcatcatcccttaatcgaaccaagcgttggcttctctctcactcccaacatctcaacttcttctctatcttgattcttgcttcggttccaaatccactctttgaccttgctggtattatgtgtgggcaatttggtgtgcctttctgggagttcttgtttgctactttgattgggaaagccatcatcaagactcatattcagacactatttatcgtgtccctgtgcaacaatcagctcttgtatcttattgaaaaggagttaatctggatatttggtcacgttcctgggttttctgccacccttccgtctgtgattgccagactccatgctgccaaggacaagtatctatcaccaccagccccagtctcaccgtcatcacaaatgggggagaaacagtggaatttctcttttacatctgtctggaactctatagtgtggcttgtgcttttgaacttcttcattaagatagtcacgtcaacagcacaggattatctcaaaaagcagcaggatacggagatggaacttatttcggattccccgatccaggaccattctaaaactaactagtggcgcagctagtggtgtttatacacagctgctagcagcaaagattctcctctgtagcttaagcccctgcagatgatttcaagttccaacaattagtattagtagttattcatctgcgcagtggacaaaaacatggacacatggtcttggttaacttgtcagttgacgaccttttgtcattgagcctgtacctgtactggcagctcctgttggagtcattctgtttattttcggacatctacacggataaacagtaggaattgtttatggagcacggttggctttttttgaagtgaagagcacggttggctttgtgagatgtatcattcatacctgttcctatgtattctgggaacttgaaatgcaatagaaacctgggaggatttaacaaggataca

SEQ ID NO: 116566 - DNA, 2555 bp, Zea Mays
tatggcggacccacttatcaatcgatttatgggccccgcgtggcagagtcaaaagactcggaagggagttggttggtttttgtttcctccccgcacccgcaacaacggaaacaacggccccgtggtagcgaggagatcaggaattcaggagagcaaaaggggagagagaatgaattgaaacgaaggcccgcgacgcgaggagcgagggaactaccaccggtgaccggtctcggcgcctccgcgacgatagcctctccgacctcgagcgcggtccggttcctccctgcgtcagcacgcgagcccttggagcttcgagtcagatcccggcgggcgcccatggtggctctggtgccgttgagccgcgcgatgtagggttttcgcgcgccgcagagtaggagcgatggggcgccggaagatgtccgcggcggcaccgccgtctcggagctggtccaacgttggcggaagcgtcatcccgggtaagatctgtggctttgttccatgtgtggcgttaaggcgctgtgaggtgttgtggatcggattgatttcatgtcgagctaatttaagggtgtttgttttaccattctaaatgaggtggtgcaatcagtccatttctcaaatttggtggagtgattctattcctggtactaatttggtggaacgacttcatttgctgtactaattattagtccgcgaggctgaattattagcttgcaaggaatgaattattaacttgtaaggattgaagcgatgatgaatagcgcattctattccacaaatcaaacaaaataagaggagtgagaagatgatggactaactcattcctcaaaccaaacagcctgttagcttttggtttaggctctagctgatgactggtgctgttggtctgttttctttttatctcatgtatctacttattttgcagaacttcgagctaaacacaaaacagacttgcagaatttgacgctgaccaaacagccactcagaacattgcattttttcctgttagccatgttacaatacttgaaaagattagcaacatatatcctgagtaagggtggtttcttctttctcctaattgttttattggtagcttctggaatcttgctcgtcgtttcggatggtctgcataagaagcatgtgcaggaattccttaattatgctaaatttgtgtcgtggtgggtttcattaggtgtggcttcatcaattggactaggttctggtttgcatacatttgtgctgtatctgggtcctcatattgctctgttcactattaaggctgttcaatgtggtcgaattgatctaaaaattgctccatatgataccatacagctaaaggttgggccatcatggcttgacaagaaatgttcagaatttggaccacctgtgtatccagcatcagctcattcagttaggatcccagtcttcgacctactacctcagatacagctggaggcagttctttggggaattgggactgcgcttggtgagctccctccttattttatatcacgagcagctcgcttatcaggaagcgagtcaaaagctgttcaggagcttgatgcagctacttccaaagaagatgggccagtagcatcatcccttaatcgaaccaagcgttggcttctctctcactcccaacatctcaacttcttctctatcttgattcttgcttcggttccaaatccactctttgaccttgctggtattatgtgtgggcaatttggtgtgcctttctgggagttcttgtttgctactttgattgggaaagccatcatcaagactcatattcagacactatttatcgtgtccctgtgcaacaatcagctcttgtatcttattgaaaaggagttaatctggatatttggtcacgttcctgggttttctgccacccttccgtctgtgattgccagactccatgctgccaaggacaagtatctatcaccaccagccccagtctcaccgtcatcacaaatgggggagaaacagtggaatttctcttttacatctgtctggaactctatagtgtggcttgtgcttttgaacttcttcattaagatagtcacgtcaacagcacaggattatctcaaaaagcagcaggatacggagatggaacttatttcggattccccgatccaggaccattctaaaactaactagtggcgcagctagtggtgtttatacacagctgctagcagcaaagattctcctctgtagcttaagcccctgcagatgatttcaagttccaacaattagtattagtagttattcatctgcgcagtggacaaaaacatggacacatggtcttggttaacttgtcagttgacgaccttttgtcattgagcctgtacctgtactggcagctcctgttggagtcattctgtttattttcggacatctacacggataaacagtaggaattgtttatggagcacggttggctttttttgaagtgaagagcacggttggctttgtgagatgtatcattcatacctgttcctatgtattctgggaacttgaaatgcaatagaaacctgggaggatttaacaaggataca

SEQ ID NO: 116567 - DNA, 348 bp, Zea Mays
ttcagaaaatcggtgaggattcaatttctgttcctgctattcccttccaaactccaatagagatgggctgaaggaccgcatccagatgcagtcttacacgtacgtaaactgtagaagtcaaacgaacgaggggtgcgctccaactccaagaagctcatcaccacactcgtcaacaaagcgacacgcgcggcagctgcattcctccgcagctgcacgaccactctcgtctcggcagcctccaacagaggcaccaatccaggccggcagcagagcagcacaccggcgacacaacacacatcggttgatccctatgtacatcagaattcagaatcgctactacttgaattc

SEQ ID NO: 116568 - DNA, 357 bp, Zea Mays
gataccagattcagaaaatcggtgaggattcaatttctgttcctgctattcccttccaaactccaatagagatgggctgaaggaccgcatccagatgcagtcttacacgtacgtaaactgtagaagtcaaacgaacgaggggtgcgctccaactccaagaagctcatcaccacactcgtcaacaaagcgacacgcgcggcagctgcattcctccgcagctgcacgaccactctcgtctcggcagcctccaacagaggcaccaatccaggccggcagcagagcagcacaccggcgacacaacacacatcggttgatccctatgtacatcagaattcagaatcgctactacttgaattc

SEQ ID NO: 116569 - DNA, 556 bp, Zea Mays
attccaacaccgcccggctcgctagcttcctgctcctcctctcctcccctccatctctcgagcaccgaccgagaaggtagctagctagcgagatggcggccaccctcaggctcaggatcctcgccgcggccgccaccgccgccgtcgtggcctcgtcgctcgtcggcgtggccaccgcgtccgaggcaccgggcccatcccccgccagctccaccggggccgccgccgccgccgtcaccggcccggcgctcgctgccggcacgctcgctgtggccgccgttgggtacctcttcagctgagctcctccggctgcagggccggccgcgcgcgtgttgccgcccccggtcccggagtgatacataataatatataccagttcatcgcttcttgtacttgaattttaccagtattttcatcttgggtgtgttttgatcgcttcacgcacgcgagtcgccagttgggagagtgtgtgtgtgtgtcttgggttgttgattcatgtgtactctccaacgatcaacctgtttacaccgctatatatattaatgcagtgagtata

SEQ ID NO: 116570 - DNA, 1885 bp, Zea Mays
gtattattataatccccagccctcggtttcggtagattcccaaccctacgccaggcggagagagagaggaggggcctgcaggctgcagcagctggagcgccggcggcctccctcttgcgtacggagtagtaaaataagaattccggtcgcacctccgatccggccgtctctccatgagcggccggtttaaataggccggggacaaagatcgggcgcaggtgctggctggcacgcatcaggtttggcttttttttggtgctatctatctccttgttccctcggattgtccttgtcgttgtcgccgtcgacggcacggcgatatccaagggagggaggaagggcagcatatcatggactcgcacaagggggcagtagtttggggcgggggcgaggtgaggcggatcaacgtggtctacttcctgagccgcggcggccggtccgaccacccgcacctcttccgcgtcaaccacctcagccgcgccggcgtccgcctccgcgatgtgaagaggtggctctccgacctgcgcggcaaggacatgccggacaattactcctggtcctacaaaaggaagtacaaggccggttacgtgtggcaggacctgaaggacgacgacctcgtcacgcccgtctccgacaacgagtacgtgctcaagggctgcgacgtccgaggaacacctcctccccgcagccaaacgccgaaaagaacttgttcgttaggcgagaacgatcagaaccaccccgtggaggtggtgctgacgccggactccgacgagagctcgccgaagccgccgccgcacgcggaccaggactcgcccggaggctgcgagtcggggcgccgcagcacggtgccgttcaaggtcgagaagccgcagggccttaataacgagcaaaagcaggaggaggagcaagtggtgatcaagatcgaggtgtcgcggtcacagaaccaccagcagcacaaacacgaggaggaggagaacaacgacgaagaagaagaggaagaagaagcggcgaccaagaaggccgacgacaccaaggctgctgcggaggagcagcagcagccgcagggagcggggggcgtcaggagcagccacgcgcacgcggtggggaagcaggcgcggaggatgcgcgtggcgcgggcgctccacaacatgctgacgtgcgcgcgcgctgacgccgtcgacgacgccgcgctccgccccctggcgcggcggcaggccggtggcggcgacggctgtccaccgccgcccacgccgacgtgccccggcatggaaggctgcggcctaggcgtgagccggaagaagacgtcgaggccgcggaggggcggcggcggcaaggacaagcagcgcaagcgagacggggagaagaagcacgacgcgcacaggccggccaccctgccgcgttgctcgcagtgcgggaaggagttcaagccgcaggagctgcactcgcacatgcagtcgtgccggggcttcaaggaacggatgaggaggagcaccagcgcggacaggaggcgcaactggaccgccgccggccgctaccccgcggagtcggagcggccgtcctcagcctccgccgtgttcctgctcacggaatcctgacgggatcgtcgactgcttgctctagcctctagcccatataaaaatatgaattaattaaacacactaatgtcgcgggatcggatgtacatcgtgcgtgatgatcaaaagcaacgttgggatcgttttgcctatagtcgggcaatcatgccggaatatgtacgtacctgcgcctgtctcgatattttgctttgcttcatctgtgaataatagatgggttgctgtgttggatcgattctgtgcatcgcgtttttttgtcttaatactagcaaatatgtctatgtgttgaaacg

SEQ ID NO: 116571 - DNA, 2033 bp, Zea Mays
gtattattataatccccagccctcggtttcggtagattcccaaccctacgccaggcggagagagagaggaggggcctgcaggctgcagcagctggaggtaccctcttctcctcctcctcctctagtttattctgcgtgccacgccctccaatccctcgccaacattttgagccacgcgcgacgctgcctcttggcttggatccgcccgtgaaattcatccctgcgtcggctcacccacgcagcgccggcggcctccctcttgcgtacggagtagtaaaataagaattccggtcgcacctccgatccggccgtctctccatgagcggccggtttaaataggccggggacaaagatcgggcgcaggtgctggctggcacgcatcaggtttggcttttttttggtgctatctatctccttgttccctcggattgtccttgtcgttgtcgccgtcgacggcacggcgatatccaagggagggaggaagggcagcatatcatggactcgcacaagggggcagtagtttggggcgggggcgaggtgaggcggatcaacgtggtctacttcctgagccgcggcggccggtccgaccacccgcacctcttccgcgtcaaccacctcagccgcgccggcgtccgcctccgcgatgtgaagaggtggctctccgacctgcgcggcaaggacatgccggacaattactcctggtcctacaaaaggaagtacaaggccggttacgtgtggcaggacctgaaggacgacgacctcgtcacgcccgtctccgacaacgagtacgtgctcaagggctgcgacgtccgaggaacacctcctccccgcagccaaacgccgaaaagaacttgttcgttagcaggcgagaacgatcagaaccaccccgtggaggtggtgctgacgccggactccgacgagagctcgccgaagccgccgccgcacgcggaccaggactcgcccggaggctgcgagtcggggcgccgcagcacggtgccgttcaaggtcgagaagccgcagggccttaataacgagcaaaagcaggaggaggagcaagtggtgatcaagatcgaggtgtcgcggtcacagaaccaccagcagcacaaacacgaggaggaggagaacaacgacgaagaagaagaggaagaagaagcggcgaccaagaaggccgacgacaccaaggctgctgcggaggagcagcagcagccgcagggagcggggggcgtcaggagcagccacgcgcacgcggtggggaagcaggcgcggaggatgcgcgtggcgcgggcgctccacaacatgctgacgtgcgcgcgcgctgacgccgtcgacgacgccgcgctccgccccctggcgcggcggcaggccggtggcggcgacggctgtccaccgccgcccacgccgacgtgccccggcatggaaggctgcggcctaggcgtgagccggaagaagacgtcgaggccgcggaggggcggcggcggcaaggacaagcagcgcaagcgagacggggagaagaagcacgacgcgcacaggccggccaccctgccgcgttgctcgcagtgcgggaaggagttcaagccgcaggagctgcactcgcacatgcagtcgtgccggggcttcaaggaacggatgaggaggagcaccagcgcggacaggaggcgcaactggaccgccgccggccgctaccccgcggagtcggagcggccgtcctcagcctccgccgtgttcctgctcacggaatcctgacgggatcgtcgactgcttgctctagcctctagcccatataaaaatatgaattaattaaacacactaatgtcgcgggatcggatgtacatcgtgcgtgatgatcaaaagcaacgttgggatcgttttgcctatagtcgggcaatcatgccggaatatgtacgtacctgcgcctgtctcgatattttgctttgcttcatctgtgaataatagatgggttgctgtgttggatcgattctgtgcatcgcgtttttttgtcttaatactagcaaatatgtctatgtgttgaaacg

SEQ ID NO: 116572 - DNA, 2138 bp, Zea Mays
gtattattataatccccagccctcggtttcggtagattcccaaccctacgccaggcggagagagagaggaggggcctgcaggctgcagcagctggaggtaccctcttctcctcctcctcctctagtttattctgcgtgccacgccctccaatccctcgccaacattttgagccacgcgcgacgctgcctcttggcttggatccgcccgtgaaattcatccctgcgtcggctcacccacgcagcgccggcggcctccctcttgcgtacggagtagtaaaataagaattccggtcgcacctccgatccggccgtctctccatgagcggccggtttaaataggccggggacaaagatcgggcgcaggtgctggctggcacgcatcaggtttggcttttttttggtgctatctatctccttgttccctcggattgtccttgtcgttgtcgccgtcgacggcacggcgatatccaagggagggaggaagggcagcatatcatggactcgcacaagggggcagtagtttggggcgggggcgaggtgaggcggatcaacgtggtctacttcctgagccgcggcggccggtccgaccacccgcacctcttccgcgtcaaccacctcagccgcgccggcgtccgcctccgcggtacgtccgtctgtcttcccctccatctgcggatccgtctgcttcattctgcgatcgtcgtcggctcattgttcttcccgtctgtgctggaaccgttccgttcagatgtgaagaggtggctctccgacctgcgcggcaaggacatgccggacaattactcctggtcctacaaaaggaagtacaaggccggttacgtgtggcaggacctgaaggacgacgacctcgtcacgcccgtctccgacaacgagtacgtgctcaagggctgcgacgtccgaggaacacctcctccccgcagccaaacgccgaaaagaacttgttcgttagcaggcgagaacgatcagaaccaccccgtggaggtggtgctgacgccggactccgacgagagctcgccgaagccgccgccgcacgcggaccaggactcgcccggaggctgcgagtcggggcgccgcagcacggtgccgttcaaggtcgagaagccgcagggccttaataacgagcaaaagcaggaggaggagcaagtggtgatcaagatcgaggtgtcgcggtcacagaaccaccagcagcacaaacacgaggaggaggagaacaacgacgaagaagaagaggaagaagaagcggcgaccaagaaggccgacgacaccaaggctgctgcggaggagcagcagcagccgcagggagcggggggcgtcaggagcagccacgcgcacgcggtggggaagcaggcgcggaggatgcgcgtggcgcgggcgctccacaacatgctgacgtgcgcgcgcgctgacgccgtcgacgacgccgcgctccgccccctggcgcggcggcaggccggtggcggcgacggctgtccaccgccgcccacgccgacgtgccccggcatggaaggctgcggcctaggcgtgagccggaagaagacgtcgaggccgcggaggggcggcggcggcaaggacaagcagcgcaagcgagacggggagaagaagcacgacgcgcacaggccggccaccctgccgcgttgctcgcagtgcgggaaggagttcaagccgcaggagctgcactcgcacatgcagtcgtgccggggcttcaaggaacggatgaggaggagcaccagcgcggacaggaggcgcaactggaccgccgccggccgctaccccgcggagtcggagcggccgtcctcagcctccgccgtgttcctgctcacggaatcctgacgggatcgtcgactgcttgctctagcctctagcccatataaaaatatgaattaattaaacacactaatgtcgcgggatcggatgtacatcgtgcgtgatgatcaaaagcaacgttgggatcgttttgcctatagtcgggcaatcatgccggaatatgtacgtacctgcgcctgtctcgatattttgctttgcttcatctgtgaataatagatgggttgctgtgttggatcgattctgtgcatcgcgtttttttgtcttaatactagcaaatatgtctatgtgttgaaacg

SEQ ID NO: 116573 - DNA, 450 bp, Zea Mays
atgatccgaggaggctacctgtctgtgctaaaagaaataggagtgccgagaaagaaagatgctaggagccccgtggtgcgctctgggttctacgccttcatcagggccttcctcgtcgtctccctgctcctgctggtcgtcaaggtcgcggcgtacatcaacggctgggacctcgccgcctccgcgctcgccctccccgccctcggcctcgagtcgctgtacgcctcctggctgcgcttccacgccgcctacgttgcgccggggatacagttcctcaccgatgcatgcgtcgtgctcttcctcgtccagagcgccgaccgcctcatcctgtgccttggctgcttctacatccgcgtcaagcgcatcaagcccgagccaaaatccccggcattgccggatgcggagcgcaccacggggctcttgcagaggtcgaagagacgacgatcctga

SEQ ID NO: 116574 - DNA, 471 bp, Zea Mays
actgcctacagttgtgaacaacaaacgcctacaacatctccctcatgtgcatcaccaaagcagaatgctgaaccattgatcctacgatctaacaactctaacatctacatatgcatcgtttactactgtgctgcatgaaaagaacaactaacagcttcgattcatgccactgctttatgtggcctttggcaggcatagcattagctcacttccaccttgatgagctcattgagatcttttattcgcaaggagggacgacacccatataatgtagtgcacctcccaatggatgccaaagagcttccacttccttcgatctaatgtaacgtgaaagataataccaatgtggggttgggaataatttctctcaactctcaagaacaatagaactctagatatgctttatgattgaaacagtgtagatctatggcattatcatggatttgaggaaatgctgaaatgagtatttct

SEQ ID NO: 116575 - DNA, 4087 bp, Zea Mays
gctaacccaaacgaacgtgcctctcactagtcagtctctcccccacccgtccctcccgatcctctcttggatctcgccgcgcgcccgaaggcgagcggggccgcgatgcctgcggcggccgttcccggaggcggtggcgccgccgacgccgaggagctgttccgcaccaagcgcatcccggagattcgtgcggctgagggcgccacccgacgcgagatctccgccaaggaggaggagctcagacagctcgtcgggcgcagctaccgcgacctgctcgactccgcggactccatcctcctcatcaagcagtcctccgatgtcatatccgacaacctcgcccgcatctctggctccttgtcgtcgctctcgccgccccatgaaccctctcccgccgtaagcgccgcctcgccgtctccgtctgctggagggcgcgcgaggctgtactcgctggccgcgcgcgccaagtaccttgttgacacgccggagcacatatggggtcggctcgatgagggcctgctccttgaggcggcggggcggtaccttcgggcgcaggtcgtacacgggcggctctcccgcgacgccacggccgccgcgcggttccctctcctcgcgcaccaggcgcagctcgtggaggcgttccggccgcagatctcccagcgcgcgcgcgagcgcctcgccgaccgccgcctccccgtagcggcccacgctgacgcgcttgccgccgtggccgctattgactccccctcgcttgccccggcccaggctctcctcctcttcctcacctcgcgccgcgcttggatctcccaagccctagctgggctcgcctcggatctgtcatcatacacctctgtgctgtgcgatatcgcgaggatcgtgcggatcacgcttggccacgttggacagttgtttgtgcctgcactcagtgatatgccgttgttcttcaagacggtgcttgagaagacgccgcctgagcagttgttcggtggcattccggaccctgatgatgaagcacggttgtggaaggagcacatgaaccagcttgaggctacaatggtgctgctcgaggcagatgccattgcaggggcctgtacggattggctcaaggaatgttgcactaaaatttttggtgtgattgctggtgagcagaagttggttgatgccattgggagtggggagctgcttggatcagtgcaaaggcttgtacgtgaagcactagatgggagggacggattggagggaagtttggagcagtggctgaagagcgtctttgggtcagatattgagtcgccatgggatcagatccatgggttgatcttgaaggacggcaaagatatttttgaggattggatggaggaagcatttgtgcgacggatgaaggacattgtgcattcagagcttgatagattgggtgctagtgttaacgtgaaggaattagttcatgctattggtgccaatgctgatccaaaggatgctggagattttcttgcctacctgcggaaatcttctaagggtggtggtttctggttctcagagtctaagataaagaaaggcggagttttggcacacttgaaaccaattgctgatgaaaatgatttccatagttgcctaacattgtattttgggccagaagttagtcggatcaggagtgcaattgacagtaaatgcaagaatatcctggatgatctgttaagctttgtggagtcacataattcagccccaaggctgaaggagttggtgccatacctccaggagaaatgctacaggaccatctcgggagtattgaaagaattagaagctgagctcagaaagctttctgctctgttgggaaccaaaaaggagggtaacgacatacctgcagcttctattatagcggagaggtctctcttcattggtcgaatcttgtttgccctgagatactattcaagtcatgtacccctgatactaggttccccaagggagtgggtaaaggaggctggtggtgcagcatttgccaggctatcatcacctacaccaagacattcaagggcatctttcgattctttagtaccttttacatcgagaaggcgcacatttgacagtcccaagagtcctggaaggcaattctcggatagccccagaagacaaactattgctgctgcagtatctttgtttggagctgatgatagatccaatcctagacttgatgaactcaataagaccatgcagtcactttgcatcatggctcataatgtatggataacatgggtgtccaccgaattatctcacattctttcatatgatatcagcaaagatgattcactatcctcttcgactcctttgaggggctgggaagtcactgtaattaaacaagatgaaacaactgagggtcccttggagatgcaaatagctcttccatcgatgccttcattgtacatcatatcatttctttatcaagcatgtttggagattcataaggttggagggcacatcctgtacaggattattttgcacaattttgcatgggagctactgcagaagagaaaggaattctgcaaatactgctagacttgcgtttcgttggtgatgtcctatcaggaggtaaaagttcttccaccaacagtcctgaaatgcagacaaaacaggattttttgccaagcgccgtcaccaagacttccttcaggagaaaacagtcacaattacaggcagactcagctgtcatagagcctataaacaagttagtcaacaggctctcacagagattggatcctatagactgggccacgtatgaaccttacctgtgggagaatgagaagcaatcttacaagcgttatgttgttctttttggttttttggtccaattgaatcacaagtacactagtactgtacaaaaattaccaacaaaatcaaatacagattcaaatatcatgaggtgctctcaggttccaagattcaagtacctaccaatcagtgccccggttatatcatcaagatcacacaaatcgtcactacagtcgccgtctagtgactccacatcgaaaaatacttggaaatcctattcaaatggagatggatctagtacaccagattttgatgataatgcaagtcttgttggtgctgctccgttgcttaagtcatttgttacccaggtggggagcaaatttggggagaacacatcgagatgggggtccatgctctctgacgggcaggttggtaagctaagtgacatccttcctggaccagcagctgggtttttctcttctttcacatctggagctcgatatgattcatagtaattgcaccatgacccttgatctttaacccttactatgcgtcgtatggaaacccacatgtgtcatcaagagaacagaagaactgttggcaggtgtagtatgcctttggaaatctgttgctcacagaatgattccacaatgctggtcccgtgttgcttggcatatcctgccgcgcttcttcacatcttattgtgactagacagtgtcatggagaaattcaggaaattatgatggaaaagatgagatttattctgtatcggctgcccacaggtgaatgagtggttagggaaatcaaaagtttggtttcaccgtatttcctgcttgcaaattgacttggtacataggacagagaagtgcaactcgccgcggatgcctgcctcacttttttggggggaatcatgttgtggatacacggcacttgaagttgtgaaaagaattttgaggttccattctttctttcttatctttggctcggcgagttgactgattttctcatcggaacattgccggaactgtgaggttgcggttttaccatgtagggaaatttgcagaatgtgtacactggaaatataggaataataaaagtctgtatcatgcattcagaaaacctgcgttcatgtccattcagcacaatgcagcgctcaagggcctgtttggttggcatgctgcttgccatggcctttctgtatttgtttacatgtgtgggtttaagttgttacagcaggtatagttgctgattttatacgtgcctcattagagcagaaattattatagcaaaacaagcatctaagcaggaccgcagaaaatttggctggcat

SEQ ID NO: 116576 - DNA, 4071 bp, Zea Mays
gctaacccaaacgaacgtgcctctcactagtcagtctctcccccacccgtccctcccgatcctctcttggatctcgccgcgcgcccgaaggcgagcggggccgcgatgcctgcggcggccgttcccggaggcggtggcgccgccgacgccgaggagctgttccgcaccaagcgcatcccggagattcgtgcggctgagggcgccacccgacgcgagatctccgccaaggaggaggagctcagacagctcgtcgggcgcagctaccgcgacctgctcgactccgcggactccatcctcctcatcaagcagtcctccgatgtcatatccgacaacctcgcccgcatctctggctccttgtcgtcgctctcgccgccccatgaaccctctcccgccgtaagcgccgcctcgccgtctccgtctgctggagggcgcgcgaggctgtactcgctggccgcgcgcgccaagtaccttgttgacacgccggagcacatatggggtcggctcgatgagggcctgctccttgaggcggcggggcggtaccttcgggcgcaggtcgtacacgggcggctctcccgcgacgccacggccgccgcgcggttccctctcctcgcgcaccaggcgcagctcgtggaggcgttccggccgcagatctcccagcgcgcgcgcgagcgcctcgccgaccgccgcctccccgtagcggcccacgctgacgcgcttgccgccgtggccgctattgactccccctcgcttgccccggcccaggctctcctcctcttcctcacctcgcgccgcgcttggatctcccaagccctagctgggctcgcctcggatctgtcatcatacacctctgtgctgtgcgatatcgcgaggatcgtgcggatcacgcttggccacgttggacagttgtttgtgcctgcactcagtgatatgccgttgttcttcaagacggtgcttgagaagacgccgcctgagcagttgttcggtggcattccggaccctgatgatgaagcacggttgtggaaggagcacatgaaccagcttgaggctacaatggtgctgctcgaggcagatgccattgcaggggcctgtacggattggctcaaggaatgttgcactaaaatttttggtgtgattgctggtgagcagaagttggttgatgccattgggagtggggagctgcttggatcagtgcaaaggcttgtacgtgaagcactagatgggagggacggattggagggaagtttggagcagtggctgaagagcgtctttgggtcagatattgagtcgccatgggatcagatccatgggttgatcttgaaggacggcaaagatatttttgaggattggatggaggaagcatttgtgcgacggatgaaggacattgtgcattcagagcttgatagattgggtgctagtgttaacgtgaaggaattagttcatgctattggtgccaatgctgatccaaaggatgctggagattttcttgcctacctgcggaaatcttctaagggtggtggtttctggttctcagagtctaagataaagaaaggcggagttttggcacacttgaaaccaattgctgatgaaaatgatttccatagttgcctaacattgtattttgggccagaagttagtcggatcaggagtgcaattgacagtaaatgcaagaatatcctggatgatctgttaagctttgtggagtcacataattcagccccaaggctgaaggagttggtgccatacctccaggagaaatgctacaggaccatctcgggagtattgaaagaattagaagctgagctcagaaagctttctgctctgttgggaaccaaaaaggagggtaacgacatacctgcagcttctattatagcggagaggtctctcttcattggtcgaatcttgtttgccctgagatactattcaagtcatgtacccctgatactaggttccccaagggagtgggtaaaggaggctggtggtgcagcatttgccaggctatcatcacctacaccaagacattcaagggcatctttcgattctttagtaccttttacatcgagaaggcgcacatttgacagtcccaagagtcctggaaggcaattctcggatagccccagaagacaaactattgctgctgcagtatctttgtttggagctgatgatagatccaatcctagacttgatgaactcaataagaccatgcagtcactttgcatcatggctcataatgtatggataacatgggtgtccaccgaattatctcacattctttcatatgatatcagcaaagatgattcactatcctcttcgactcctttgaggggctgggaagtcactgtaattaaacaagatgaaacaactgagggtcccttggagatgcaaatagctcttccatcgatgccttcattgtacatcatatcatttctttatcaagcatgtttggagattcataaggttggagggcacatcctgtacaggattattttgcacaattttgcatgggagctactgcagaaggttgtcaacatttatgaaaaatttctttcatgtgttgaatctgggaattctacggtttcagagaaaggaattctgcaaatactgctagacttgcgtttcgttggtgatgtcctatcaggaggtaaaagttcttccaccaacagtcctgaaatgcagacaaaacaggattttttgccaagcgccgtcaccaagacttccttcaggagaaaacagtcacaattacaggcagactcagctgtcatagagcctataaacaagttagtcaacaggctctcacagagattggatcctatagactgggccacgtatgaaccttacctgtgggagaatgagaagcaatcttacaagcgttatgttgttctttttggttttttggtccaattgaatcacaagtacactagtactgtacaaaaattaccaacaaaatcaaatacagattcaaatatcatgaggtgctctcaggttccaagattcaagtacctaccaatcagtgccccggttatatcatcaagatcacacaaatcgtcactacagtcgccgtctagtgactccacatcgaaaaatacttggaaatcctattcaaatggagatggatctagtacaccagattttgatgataatgcaagtcttgttggtgctgctccgttgcttaagtcatttgttacccaggtggggagcaaatttggggagaacacatcgagatgggggtccatgctctctgacgggcaggttggtaagctaagtgacatccttcctggaccagcagctgggtttttctcttctttcacatctggagctcgatatgattcatagtaattgcaccatgacccttgatctttaacccttactatgcgtcgtatggaaacccacatgtgtcatcaagagaacagaagaactgttggcaggtgtagtatgcctttggaaatctgttgctcacagaatgattccacaatgctggtcccgtgttgcttggcatatcctgccgcgcttcttcacatcttattgtgactagacagtgtcatggagaaattcaggaaattatgatggaaaagatgagatttattctgtatcggctgcccacaggtgaatgagtggttagggaaatcaaaagtttggtttcaccgtatttcctgcttgcaaattgacttggtacataggacagagaagtgcaactcgccgcggatgcctgcctcacttttttggggggaatcatgttgtggatacacggcacttgaagttgtgaaaagaattttgaggttccattctttctttcttatctttggctcggcgagttgactgattttctcatcggaacattgccggaactgtgaggttgcggttttaccatgtagggaaatttgcagaatgtgtacactggaaatataggaataataaaagtctgtatcatgcattcagaaaacctgcgttcatgtccattcagcacaatgcagcgctcaagggcctgtttggttggcatgctgcttgccatggcctttctgtatttgtttacatgtgtgggtttaagttgttacagcaggtatagttgctgatttt

SEQ ID NO: 116577 - DNA, 281 bp, Zea Mays
atggacataaaaaaatgtataacacgtagagcacttatactggcagaggctgcacccaggctcaatacaggaccactcactaatcgttactgcactcccgatgtcatattttgttcgtcaggtgacggtgagcaagatacgcaaaagaatgtggcttctctccaatgtctcttctatttttcaggtcttgtaacttcaggaagcaggtggatacaacaacagctgtattgggcggaactgatgtgccatgtgcctacttgtttgccatagatgagtccata

SEQ ID NO: 116578 - DNA, 270 bp, Zea Mays
atggacataaaaaaatgtataacacgtagagcacttatactggcagaggctgcacccaggctcaatacaggaccactcactaatcgttactgcactcccgatgtcatattttgttcgtcaggtgacggtgagcaagatacgcaaaagaatgtggcttctctccaatgtctcttctatttttcaggtcttgtaacttcaggaagcaggtggatacaacaacagctgtattgggcggaactgatgtgccatgtgcctacttgtttgccatag

SEQ ID NO: 116579 - DNA, 421 bp, Zea Mays
tacccaaacccgtgaacccgtgggttttttaaacccggccaaacctagtgcatattgtcattttattttataaacgaacaacaaacttgttattcctaatttacttcataatttttatcaattggtaaatgtatcagtagttggtgagagtgttgtttgcttgctattatagtttttactaacgttatagatgtggtggatggataacttagtgcaaggtcacttaattatacaactcattatttgtatttcattctctctactaataatttttataccaaatcatgaactcgttgatcgttacatagattttggatcattatatcattaatcattacgataattattgattatgagaagaacacgtatattggtgatgaaacccgcgggtaacccatgggtacccgctaacccgatgggt

SEQ ID NO: 116580 - DNA, 3291 bp, Zea Mays
ccatcgtgcagccatcgcagatcgggatctcgcggagctgcgattcattcgccagccatcctactcaaacgccacccatctctgagtctttgaccaactgttctgaagatttgagacactgttggagatgggtacaaggatgccaatctttccccgactatcgagcgcactgtccacggcgttgctggagtggatcttgatgctcctgctgttcatcgatgcggtttacagcttcctggtcactagattcgcccgtctctgcagattaccggcgccatgccctttctgctcaaggctcgatcacttcctgggcaacgagaaaccgtgcttctatagggacctgatctgcaaaacccacaagtcggagatttcgtccttggccttctgcagcctccaccagaagctcgcgggagcccgaaatatgtgtgaagggtgctgtggggaagtcgccggtgatgataagacagatgagactgatagcaatcaaagaattggtgatgctttcaattctcctcgtgaaaaagtctgctcgtgctgtggacagcattttaagcgacggagtgtagctttgtcctctagagagactgcagaactagaacctactcgagcgtttggctcaccaaaaacttacacggagtactctgtagtatgtcaagtggatgagcctttggagcctaaagatatataccaccaaagtgactacaggtctaatgagccagacggtctgctacagatgacatctgactctgagactgaggtcccttgtgccattgatgtgagaagttcacaatctcgtgaagccgatgttaagggcgaagacttgcaagaagatccagcttgtgagcaacccgttcttccttcccctgtggtgatcaagaaatctgaaatagtcgtcaggaaggagcctagtgttgaagacacctgcattacatcttcagcgtgtcctgctgtggatgatcatcctaatagcggaggtggtgtggaccagatggaagaaaaagaaagcctatccagaaaatgggcaccccagcacgatcctgtacttgttatagaaaattcaggtttacaagatgctggtatttcacaaattatgccaagtgatgagctaccacaggtttctggtgagactgaaccatctcagagcacaaatgaaggcaacacggatccatataaatctcagttcacaatactagaggagcactatgctgtttcggaagaaggaaatataaaatgtattctggaacaatttgacgtgacagaaattactagcagatcaggtggtgagtttcgtcaaagaagtgcgtcagcagctgattcacatacaaatgcactggtactagagaatactcatcatggtgcttcagaagatgcagaacagaaagataattgtggggatatccgtgtttcacaagtaggtgctggatccaaaacgagtggtgaagttgaagattatactaagaaaattgaacccactggtgacatgggagaacatgaactggtagtacaagatccttctggtagtgctcccaaagatttaatagttaaagattatgtggacgaacctcatgtatcaacaactaccatgagatcgagcggtgaagtacctcaagatcatagtgccaccgaggaaaacccaaaaacaattgacagcattgttgaaaggagaccatctctaagcagtcagattagcattaccctaagatcaagtggtgaagtacttcaagatcatagtgccaccgaggaaaacccaaaaacaagtgaaagtattgttgaaaggagaccatctctaagcagtcagattagcattaccctaagatcgagtggtgaagtacttcaagatcatagtgccaccgaggaaaactcaaaaacaagtgaaagtattgttgaaaggagaccatctctaagcagtcagattagcatgaatgaagcctatagacttgccattggcaacaagggtagcttgacatcccctacattgacggatgtaatccttggaaaggactctacttctagcataaacgaagaactgaggctactgttatcacagatctcagcttccagggggcttgaggcaccatgggccgatccaggccctagcccacgtgcatatggacgtggtgatgagttggtggtgcagaacattaccaatagattatcacttgagaggaatgcttccggtttggagtctctagacggaagcattgttagtgagatggaaggtgaaagcaccattgaccggttgagacggcagattgatcttgatcggaaatcaatacacctactctgcagggaactggaagaagagaggaatgcctcagccattgctgcaagtcaagctctggctatgatcaccaagttgcaggatgagaaggccgcaatgcagatggaagcttcgcattaccaaaggatgatggaagagcaagctgaatatgacagtgaagcggtagcgaaagctaacgagttactcactgaaagagaacagctaattgaagaactggaagttgagctcgaaaactataggagacagtatggaggtggatcaacacagagacgaggcaatcgagtggcttttaaacaagaaaatagggatacaactatgcttgacggtggtggtcttgaagatcctctgattaacacacaacagggcataaattccttggtgggtttggaagaggagagggcatatatagcgactggtttgagaaaattggaacagaagctccaattctactccaacaacagtgtttccgttgagttacccagtccagatgttaaggatgacctctccgacaaagtatatgtcacagaagacttctcgttacactgccaggaaagctcgatggagagcaaggaagctggctcatcgacaactagtggggaggttgatctagttgcagtgcaggaagaaattgcaaagttgaacagaagactgaagacactagaaggagatcgcagttttcttgagcatagcatcaactccctcaggaatggcgacgaaggtttgatgtttatacaggaaattgcttgcaatctgagagaactgcgagcaattgctattggcaaaaaataaaatgcaccaaaatgtgtataatagtcattttctcgaaacttatttgtgcaatagacgccgaatcaacatatgaatcgtgcatcatgtttgtcatataaatgaaaagaaattcttgtaattagacaccagatgttgctgtaattatctttaaattcgtagggttgagatgtaaattggttctatatattatcatgttattatgttaagtttttgctatgaaa

SEQ ID NO: 116581 - DNA, 306 bp, Zea Mays
atgaagctctgcagaagaaggggaaagatcgaatctgagagccccgacccacatgtcactgttgtctccgtatgcgtgcgacatggtaagctttggcttggaagggagcctaggaggcaacgaattcgatcaccccataggccactaaccaccgaggaaggtagacacgacaaagccgccaacgacaaggtagccaccataggaaaacgcaaatccagtaatgaggaggacatatccggcctcaaaggcccagtctgcgatctcgtagcgctcgagtccgacaaacaaggaaagaacagagaataa

SEQ ID NO: 116582 - DNA, 114 bp, Zea Mays
cagttgtacatttgtcgagatctgctagtgccttcctatttacagataggatatcacgcaggacctcatcccatctgaaaaaaaatattaaaccatatgctaatacaagaagct

SEQ ID NO: 116583 - DNA, 242 bp, Zea Mays
aatagttcatcttcctacatggtatcagaggattaggtttagggtttgctcccaccttccactgcagccgccggcggctcctacccaccccacagccgccgccagccctaggaccagccgccgccccccgggaggctcatccttccctcccgggggcggccttcttcctcccagccgagctctcctcctccagcagcacccccatggcgcccagttcgcagaccgacgctccctgcccttcc

SEQ ID NO: 116584 - DNA, 664 bp, Zea Mays
ctgatttgtcataactgtttttgtgtatttacaattcacagattctccttcaatcccagcgccataaatctcttccctgtggagattcaccttgaagatgcaccggccggtgaacaaaaggtttaggaagaatggtccgaaccagagttctgacaaggaacataaaggcatatttttgttccattgtggcaaagagcataatgtaaataggcggcatataccaggtagtagtcgaatgtactcattcttttgtattaaaatagttctgttgtttcataatatgtgtaagagggggaagagggtggacgaattgtgcaagggttcagagattgtgctattataggtggtagattactatgtaggctatacacaattctttcataagttattgttgtattgtacccttaagctgcaaggccttgtggccacgctggccactcttatgcagttgtaaactctgcgatcttgtctttatccgttctgtgaagtgtgaagtgctgactctgctcgcaaagcttccccgacgcgcaccaggatggcgtcctgcctcatcatctaccactccagcgagcctccatgctatagagtagcagctgttaaggactcttgtagtccaagggtctcaactataatattaacaaacaagtagacaagaatatgaagt

SEQ ID NO: 116585 - DNA, 2921 bp, Zea Mays
gtagtccgatcaaaacctcctcaaacccaacgcaccgactagtcgctacgctcgcacgtcgtacccgacctcattcccttcccttcccttccgcccgaagtctccacgctccctttctcccgtttaaaaccttcgcttcgtctcgactctacttggccggccatttcctctcgcccagtcctcgctcacgtcaaaccctagggcccggggcctcctactcgtaggctcagatccaatgggcgcggcgccgtcgacgccgaggctgggcgcggcaggcgcggcgccgtcgcccagcgcggcggagcagatgttcacggcgctggtcggcgagaaggcctacccaatctcctccgagttctggaagcagctgctcgagctgcccctcaccctgcagtggccgcgcgaccgcgtgctgcaggcgtgccacgccttcgccgagaataactaccaaacaaagcatcttgcaaagattttgatccatttggtttggtgcttgcaagagtgcacatcaacaacttctgtatcttctgtcgtatatcggagggcgatcaatgcggcatacatatcatccatatttctcaagttcatcattgaaaacgcaaaaaccgacagttggcaagagctatgccttgtcattgacaggagtgagaaggggttggaaaactttcctgcagaaaacactgtggagtattttctgataagaggtgtgctggaatatattggtagtgtgggtgtaagtccggagtcatgctacctacatcatgaactcctgaacttgatgctagttcttatgtcaactcagttatgttctggaccatctccagaaccaaaggatgtgcatcctttcattgatgcagctatgcttcaggacagctccatagtggcttcagtagtgcagaaattgttgctcaattttgtaacacgaccgaaacttcctctaaatgcttcgcaccctgttttctctgatgatgctaggcctggtgttctgcagcgagttggctcagcagctgcaaatgtcgtcttattgccatattatactttcaactaccttgtaagctcaactcctgagggtgcgacaagtcaattggcagataacagtttacttgttctgcttatcatgatccactaccgaaagtgcttttcaactaatgagtccattccaaccaacaacgtatacacgatggactcaaataccaatgacaaggatgctccagtttttcatgataacccttattgcaaggcattaaacagtgctaaggacattcaatatgatcgtgctgatgttgaaggaaatgctcaaaatggacctgttgtcaggttgtcttttgcattgttgtttgatgctcttggaagattcttaaatgatgagatcccagttctgttgctctattctttggtccatgggaactgtgactttcaggaatacgtcttggttcgaacagacttggatactttgttgatgcctatcttggaaacgctatataatgcatcaaggaagacttcaaatcagatttacatgctgttgattattctcctgatcctcagtcaagattcaaccttcaatgctagtgtgcacaaattggtgcttcctggtgttccttggtaccatgaacgcctgatgcatcaaacttctatgggatctttgatggttgtaatactaattcagaccatcaagtacaacctctccaagctaagagatgtctaccttcacacaaactgtcttgcaattttagcaaatatggctccgcatgtgcataggctgagtgcttatgcatcacaaaggctagttagtctctttgacatgctttctcgcaagtatgccaaactagctgagttgaaaaatgacaagtctctgaaagttatatctgatcagatggaagcagacaacatcgcagatgatatgtctacagagcttcacatatatacagatttcttgagaattgttctggaaataatcaatgcaatccttacatatgcattgcccagaaatcccgaggttgtatatgctgtattgcatcgacaagaggtttttgagccatttaaaaatcatccacgttttaatgaactgcttgagaacatatacactgtattggatttcttcaatagtcgaatggacatgcaacaattagatggggaatggtccgtggataaagtgcttgaagtcatcaataaaacttgccgttcatggcgcggagaagggatgaagatgtttactcagttgcggtttacatatgagcaagaaagccaccctgaggaattctttatcccatatgcatggcgccttgtcctgtcacggggattctccttcaatcccagcgccataaatctcttccctgtggagattcaccttgaagatgcaccggccggtgaacaaaaggtttaggaagaatggtccgaaccagagttctgacaaggaacataaaggcatatttttgttccattgtggcaaagagcataatgtaaataggcggcatataccaggtagtagtcgaatgtactcattcttttgtattaaaatagttctgttgtttcataatatgtgtaagagggggaagagggtggacgaattgtgcaagggttcagagattgtgctattataggtggtagattactatgtaggctatacacaattctttcataagttattgttgtattgtacccttaagctgcaaggccttgtggccacgctggccactcttatgcagttgtaaactctgcgatcttgtctttatccgttctgtgaagtgtgaagtgctgactctgctcgcaaagcttccccgacgcgcaccaggatggcgtcctgcctcatcatctaccactccagcgagcctccatgctatagagtagcagctgttaaggactcttgtagtccaagggtctcaactataatattaacaaacaagtagacaagaatatgaagt

SEQ ID NO: 116586 - DNA, 2705 bp, Zea Mays
tctcgcccagtcctcgctcacgtcaaaccctagggcccggggcctcctactcgtaggctcagatccaatgggcgcggcgccgtcgacgccgaggctgggcgcggcaggcgcggcgccgtcgcccagcgcggcggagcagatgttcacggcgctggtcggcgagaaggcctacccaatctcctccgagttctggaagcagctgctcgagctgcccctcaccctgcagtggccgcgcgaccgcgtgctgcaggcgtgccacgccttcggtgagtaccatccctcgagatccacgtccaacctgaggaaatttcgcggctgtgctgattgcttccttgtgctgtcgcgtcagatgtttttactccccccttcctttgagtgttttgatctgtggggtaatgcggatcatgatcatgtgttatgtgcatctgcagccgagaataactaccaaacaaagcatcttgcaaagattttgatccatttggtttggtgcttgcaagagtgcacatcaacaacttctgtatcttctgtcgtatatcggagggcgatcaatgcggcatacatatcatccatatttctcaagttcatcattgaaaacgcaaaaaccgacagttggcaagagctatgccttgtcattgacaggagtgagaaggggttggaaaactttcctgcagaaaacactgtggagtattttctgataagaggtgtgctggaatatattggtagtgtgggtgtaagtccggagtcatgctacctacatcatgaactcctgaacttgatgctagttcttatgtcaactcagttatgttctggaccatctccagaaccaaaggatgtgcatcctttcattgatgcagctatgcttcaggacagctccatagtggcttcagtagtgcagaaattgttgctcaattttgtaacacgaccgaaacttcctctaaatgcttcgcaccctgttttctctgatgatgctaggcctggtgttctgcagcgagttggctcagcagctgcaaatgtcgtcttattgccatattatactttcaactaccttgtaagctcaactcctgagggtgcgacaagtcaattggcagataacagtttacttgttctgcttatcatgatccactaccgaaagtgcttttcaactaatgagtccattccaaccaacaacgtatacacgatggactcaaataccaatgacaaggatgctccagtttttcatgataacccttattgcaaggcattaaacagtgctaaggacattcaatatgatcgtgctgatgttgaaggaaatgctcaaaatggacctgttgtcaggttgtcttttgcattgttgtttgatgctcttggaagattcttaaatgatgagatcccagttctgttgctctattctttggtccatgggaactgtgactttcaggaatacgtcttggttcgaacagacttggatactttgttgatgcctatcttggaaacgctatataatgcatcaaggaagacttcaaatcagatttacatgctgttgattattctcctgatcctcagtcaagattcaaccttcaatgctagtgtgcacaaattggtgcttcctggtgttccttggtaccatgaacgcctgatgcatcaaacttctatgggatctttgatggttgtaatactaattcagaccatcaagtacaacctctccaagctaagagatgtctaccttcacacaaactgtcttgcaattttagcaaatatggctccgcatgtgcataggctgagtgcttatgcatcacaaaggctagttagtctctttgacatgctttctcgcaagtatgccaaactagctgagttgaaaaatgacaagtctctgaaagttatatctgatcagatggaagcagacaacatcgcagatgatatgtctacagagcttcacatatatacagatttcttgagaattgttctggaaataatcaatgcaatccttacatatgcattgcccagaaatcccgaggttgtatatgctgtattgcatcgacaagaggtttttgagccatttaaaaatcatccacgttttaatgaactgcttgagaacatatacactgtattggatttcttcaatagtcgaatggacatgcaacaattagatggggaatggtccgtggataaagtgcttgaagtcatcaataaaacttgccgttcatggcgcggagaagggatgaagatgtttactcagttgcggtttacatatgagcaagaaagccaccctgaggaattctttatcccatatgcatggcgccttgtcctgtcacggggattctccttcaatcccagcgccataaatctcttccctgtggagattcaccttgaagatgcaccggccggtgaacaaaaggtttaggaagaatggtccgaaccagagttctgacaaggaacataaaggcatatttttgttccattgtggcaaagagcataatgtaaataggcggcatataccaggtagtagtcgaatgtactcattcttttgtattaaaatagttctgttgtttcataatatgtgtaagagggggaagagggtggacgaattgtgcaagggttcagagattgtgctattataggtggtagattactatgtaggctatacacaattctttcataagttattgttgtattgtacccttaagctgcaaggccttgtggccacgctggccactcttatgcagttg

SEQ ID NO: 116587 - DNA, 2861 bp, Zea Mays
gtagtccgatcaaaacctcctcaaacccaacgcaccgactagtcgctacgctcgcacgtcgtacccgacctcattcccttcccttcccttccgcccgaagtctccacgctccctttctcccgtttaaaaccttcgcttcgtctcgactctacttggccggccatttcctctcgcccagtcctcgctcacgtcaaaccctagggcccggggcctcctactcgtaggctcagatccaatgggcgcggcgccgtcgacgccgaggctgggcgcggcaggcgcggcgccgtcgcccagcgcggcggagcagatgttcacggcgctggtcggcgagaaggcctacccaatctcctccgagttctggaagcagctgctcgagctgcccctcaccctgcagtggccgcgcgaccgcgtgctgcaggcgtgccacgccttcgccgagaataactaccaaacaaagcatcttgcaaagattttgatccatttggtttggtgcttgcaagagtgcacatcaacaacttctgtatcttctgtcgtatatcggagggcgatcaatgcggcatacatatcatccatatttctcaagttcatcattgaaaacgcaaaaaccgacagttggcaagagctatgccttgtcattgacaggagtgagaaggggttggaaaactttcctgcaggtaattgatgatccacatccagtaaggttttctgtgtccggtctgttgcaaagcgtgcttcttctgtaagctccaatatctatattgatatacgaatgaattggccataactcttatgatctttgatgttccaacttccgttgacccttgaagaaaacactgtggagtattttctgataagaggtgtgctggaatatattggtagtgtgggtgtaagtccggagtcatgctacctacatcatgaactcctgaacttgatgctagttcttatgtcaactcagttatgttctggaccatctccagaaccaaaggatgtgcatcctttcattgatgcagctatgcttcaggacagctccatagtggcttcagtagtgcagaaattgttgctcaattttgtaacacgaccgaaacttcctctaaatgcttcgcaccctgttttctctgatgatgctaggcctggtgttctgcagcgagttggctcagcagctgcaaatgtcgtcttattgccatattatactttcaactaccttgtaagctcaactcctgagggtgcgacaagtcaattggcagataacagtttacttgttctgcttatcatgatccactaccgaaagtgcttttcaactaatgagtccattccaaccaacaacgtatacacgatggactcaaataccaatgacaaggatgctccagtttttcatgataacccttattgcaaggcattaaacagtgctaaggacattcaatatgatcgtgctgatgttgaaggaaatgctcaaaatggacctgttgtcaggttgtcttttgcattgttgtttgatgctcttggaagattcttaaatgatgagatcccagttctgttgctctattctttggtccatgggaactgtgactttcaggaatacgtcttggttcgaacagacttggatactttgttgatgcctatcttggaaacgctatataatgcatcaaggaagacttcaaatcagatttacatgctgttgattattctcctgatcctcagtcaagattcaaccttcaatgctagtgtgcacaaattggtgcttcctggtgttccttggtaccatgaacgcctgatgcatcaaacttctatgggatctttgatggttgtaatactaattcagaccatcaagtacaacctctccaagctaagagatgtctaccttcacacaaactgtcttgcaattttagcaaatatggctccgcatgtgcataggctgagtgcttatgcatcacaaaggctagttagtctctttgacatgctttctcgcaagtatgccaaactagctgagttgaaaaatgacaagtctctgaaagttatatctgatcagatggaagcagacaacatcgcagatgatatgtctacagagcttcacatatatacagatttcttgagaattgttctggaaataatcaatgcaatccttacatatgcattgcccagaaatcccgaggttgtatatgctgtattgcatcgacaagaggtttttgagccatttaaaaatcatccacgttttaatgaactgcttgagaacatatacactgtattggatttcttcaatagtcgaatggacatgcaacaattagatggggaatggtccgtggataaagtgcttgaagtcatcaataaaacttgccgttcatggcgcggagaagggatgaagatgtttactcagttgcggtttacatatgagcaagaaagccaccctgaggaattctttatcccatatgcatggcgccttgtcctgtcacggggattctccttcaatcccagcgccataaatctcttccctgtggagattcaccttgaagatgcaccggccggtgaacaaaaggtttaggaagaatggtccgaaccagagttctgacaaggaacataaaggcatatttttgttccattgtggcaaagagcataatgtaaataggcggcatataccaggtagtagtcgaatgtactcattcttttgtattaaaatagttctgttgtttcataatatgtgtaagagggggaagagggtggacgaattgtgcaagggttcagagattgtgctattataggtggtagattactatgtaggctatacacaattctttcataagttattgttgtattgtacccttaagctgcaaggccttgtggccacgctggccactcttatgcagttg

SEQ ID NO: 116588 - DNA, 2332 bp, Zea Mays
tataaagacacgaagtgattcagtgcaatataagtctattgtttggaacacattaatatagatttatgctaagttgataattggtttgttgttagttaatatgaagacatgatgtgatttgaagaatgattatttatttctatagatgctactagaattatttcaaaatgattggttttatcagttttgggtaaatctggtaaaactcgaccccgaatccgaattattggatatccaaaatttcggataatattttgtcgaaacagaattaggttaggaatttttaatacccggttttttatttatccaaattacgcgacccgattatttcagctaaccagaatgggaggcctctccggttgcctctttctttctcagttctcacctcaacgtcaccgcaactccgcaagtccgcaacctcctccttcccaccccttctcacgcgattcaagcgtttcccattcggagccctaatcctctctttccatactcgcggaagccaccaccaccggcaggggaagcggaaggggagcacctcgggccaggcaagatggtgctcgcgcagctgggcgggagcatctcccgcgccctggcgcagatgagcaacgccacggtgatcgatgagaaggtgctcaacgactgcctcaacgagatctcgcgcgctctcctacaggccgatgtccagttcaagatggtccgcgacatgcaggccaacatcaagcgcatcgtcaacctcgaggcgcttgccgcaggcaccaacaagcgccgtatcatgcagcaggctgtcttcacggaactctgcaacatgttagatcccgggaagccttctttcactcccaaaaagggcaagccaagcgtagtcatgtttgttggtctgcaaggttcgggtaaaactaccacttgttcaaaatatgcttattatcatcagaagaaaggattcaaaccagcgctggtttgtgccgatacatttagagctggtgcttttgatcagttaaagcaaaatgcaacgaaggccaagattcccttttacggaagttacatggaatctgatccagtgaaaattgctgttgagggtgtggagaggttcaagaaagaaaactgtgatctcatcattgtggatacaagtggaaggcacaaacaagaagcagcactctttgaagaaatgcggcaagtttcggaagcaacaaaaccagacttggtgatttttgtgatggacagtagtataggtcaggctgcatttgatcaagcacaggcatttaaacaaagtgtttctgttggtgctgtgattattacaaaaatggatggtcacgcaaaaggtggcggcgcccttagcgcggtcgcagcaacaaaaagtcctgttatattcattggaactggagagcacattgatgattttgaagtttttgatgtgaagccatttgttagtcgcctgttaggtatgggagattggtcaggctttatggacaagattcatgaagtgatacctacagatcaacagcctgaccttctgcagaaactgtctgaaggaagctttagtctcaggcttatgtatgagcagttccagaaccttcttaaaatgggtcctattggccaggtcttctctatgttgccagggtttagcgctgaactaatgccaaaaggacatgagaaggaaagccaggctaagattaagcgctacatgacaatgatggattccatgactgatgcagagcttgacagcacaaatcctaagttgatgactgaatcacggatcattcggattgcacgggggtctgggcggcctgtcagggatgtcatggacatgctggaagagtacaagcgacttgctaaaatctggggcaagatgaagggtctcaagctccaaaagaaaggggacatgagtgcactgacccgcaacatgaatgttcagcagatgagcaaggcccttcctccgcagatgcttaaacagattggtggcatgggcggtctgcagtctctgatgaaacagatgggatcgaaggagatgagcggaatgtttggaggcatgggtggttgacttgtttttggtggatcgtcgctgtgatgctaaattgagagcgtttaatgctgcggtctgatcaccatcagagcattccctgaagatcagcctgcgctatgttttggatcaggcttagcgtagctccccatgcctgcaaatttaacctatatgaacagtacgtttgtcctctgaaaaaacggataaggtatatattacaaagcgaatatgcttatgtagatggttactccaaacattagtcttccagtggtggtgtcgttgggttggcaaaggatgcgccatggaactttcttgcca

SEQ ID NO: 116589 - DNA, 2265 bp, Zea Mays
tataaagacacgaagtgattcagtgcaatataagtctattgtttggaacacattaatatagatttatgctaagttgataattggtttgttgttagttaatatgaagacatgatgtgatttgaagaatgattatttatttctatagatgctactagaattatttcaaaatgattggttttatcagttttgggtaaatctggtaaaactcgaccccgaatccgaattattggatatccaaaatttcggataatattttgtcgaaacagaattaggttaggaatttttaatacccggttttttatttatccaaattacgcgacccgattatttcagctaaccagaatgggaggcctctccggttgcctctttctttctcagttctcacctcaacgtcaccgcaactccgcaagtccgcaacctcctccttcccaccccttctcacgcgattcaagcgtttcccattcggagccctaatcctctctttccatactcgcggaagccaccaccaccggcaggggaagcggaaggggagcacctcgggccaggcaagatggtgctcgcgcagctgggcgggagcatctcccgcgccctggcgcagatgagcaacgccacggtgatcgatgagaaggtgctcaacgactgcctcaacgagatctcgcgcgctctcctacaggccgatgtccagttcaagatggtccgcgacatgcaggccaacatcaagcgcatcgtcaacctcgaggcgcttgccgcaggcaccaacaagcgccgtatcatgcagcaggctgtcttcacggaactctgcaacatgttagatcccgggaagccttctttcactcccaaaaagggcaagccaagcgtagtcatgtttgttggtctgcaaggttcgggtaaaactaccacttgttcaaaatatgcttattatcatcagaagaaaggattcaaaccagcgctggtttgtgccgatacatttagagctggtgcttttgatcagttaaagcaaaatgcaacgaaggccaagattcccttttacggaagttacatggaatctgatccagtgaaaattgctgttgagggtgtggagaggttcaagaaagaaaactgtgatctcatcattgtggatacaagtggaaggcacaaacaagaagcagcactctttgaagaaatgcggcaagtttcggaagcaacaaaaccagacttggtgatttttgtgatggacagtagtataggtcaggctgcatttgatcaagcacaggcatttaaacaaagtgtttctgttggtgctgtgattattacaaaaatggatggtcacgcaaaaggtggcggcgcccttagcgcggtcgcagcaacaaaaagtcctgttatattcattggaactggagagcacattgatgattttgaagtttttgatgtgaagccatttgttagtcgcctgttaggtatgggagattggtcaggctttatggacaagattcatgaagtgatacctacagatcaacagcctgaccttctgcagaaactgtctgaaggaagctttagtctcaggcttatgtatgagcagttccagaaccttcttaaaatgggtcctattggccaggctaagattaagcgctacatgacaatgatggattccatgactgatgcagagcttgacagcacaaatcctaagttgatgactgaatcacggatcattcggattgcacgggggtctgggcggcctgtcagggatgtcatggacatgctggaagagtacaagcgacttgctaaaatctggggcaagatgaagggtctcaagctccaaaagaaaggggacatgagtgcactgacccgcaacatgaatgttcagcagatgagcaaggcccttcctccgcagatgcttaaacagattggtggcatgggcggtctgcagtctctgatgaaacagatgggatcgaaggagatgagcggaatgtttggaggcatgggtggttgacttgtttttggtggatcgtcgctgtgatgctaaattgagagcgtttaatgctgcggtctgatcaccatcagagcattccctgaagatcagcctgcgctatgttttggatcaggcttagcgtagctccccatgcctgcaaatttaacctatatgaacagtacgtttgtcctctgaaaaaacggataaggtatatattacaaagcgaatatgcttatgtagatggttactccaaacattagtcttccagtggtggtgtcgttgggttggcaaaggatgcgccatggaactttcttgcc

SEQ ID NO: 116590 - DNA, 132 bp, Zea Mays
gaatgggaagacttttttctcgaaagcgcaggagaactgcgcatcattatattaagtagaaggaaaagtgggtccaaaatagaccatagtacaaaagacctccccagaggggataaaaaaccaaagaaaaaa

SEQ ID NO: 116591 - DNA, 447 bp, Zea Mays
atgggcaatgttgagggatgttgcatagggaacgcaaccttgtgtgctgcagcatcagaaaccagcaaagtttcaatttccattctaatgaagcgatgtgaggttatattgggtcaatttttggccgatgaaaatgatctaggagaacatcctttgcctagtgtgagggttgaagaaacgatctgtgttcttcaagagcttgctagactaattatagacattgatgcagcgaatactctcaacatacctccatatctgaagcaagctttgggggaaaacaaatcccatggacgggctcatttattgtctttgcttcccactttttctgagcttgttgtctcaaggccgtttatcatagccagcaacttgtgtttccccatgctggattgggaaaccctaagcatgtgtcatgatggagggcaaaacttcccatctgccaaattttga

SEQ ID NO: 116592 - DNA, 552 bp, Zea Mays
ctaattttaagaatgactccactgataaagtgaagcaagaggttctccgtggtcttggtgatctttatgtccaagcacaatctctgtttactggtgacatgtatctaaggcttatggcaattatgcatctgatgatcaagactaccttgaatcctactgattatgatagtgaactgggtagtattcctgctgtacaacgaggtatattggaaatcattcctatgctacgcccaacagttgtattgtctcccatgtggacacatctgcttcttgagctgctatgctatcttaatgggcacgaaggccccctccagaaaaataatgaacaaacgcccgatcataattctcaagcactggtagacggtgcaaagcatgctcttgttgaaagaagcaatctcaatggcgggggtacaaaactggatatggtgggatctggttggggcattctatttgtagaaaaacttgtaccaatcattgccaaccttttcttggaggctccaccaaatgaaaggtttagtgtctctcctgaagtcattcaaggtcttggaaggt

SEQ ID NO: 116593 - DNA, 512 bp, Zea Mays
actcagaaaactgatataaacataagtttaacatcagttggacttttgtggactgctactgattttattgtgaagggattagtcagcaagcctattgagcaagctagtcacatgaatgatgatgttcaatcatgtgaaatgactgaagaggcaaacagcaagcaagttcctccaaaactagttgattatagtatacttttcttttcagttttctctgtcctccagaaattgggttcagatgatcgtcctgaggttcgaaattcagctgttaggactctcttccagactctcagcatccatggccaaaagctttctaaaagtatgtgggaggattgtctttggttatatgttttccctatgttagagcatgtttcccacttggcatctacctcatctcgagatgagtggcaagggaaggaacttggaactcgggctggcaaagctgttcatatgcttatccatcacagtcgaaatacagcacaaaagcaatgggatgaaaccattgttcttgt

SEQ ID NO: 116594 - DNA, 384 bp, Zea Mays
atggtaggcagtggtgaatctgtgaagttctggtctgatcgttggctccttggtaaaactgtggctgaacactctccaacccttatccaagtgatttctagaagggctttaaagcgaagaacaatagccgaggggctcacaaatcgtcaatgggtgttagatattcggggaggattgtttgtaacggtcctagtggagtatctgcagctatggaacttggttgatggggtagttctgcaacctgacatcgcagaccaacacatctagcgcctctctgctcatggtacttattatagcaaatcggcctatgatgctctctttgttggctctatcccttttggcccttggcgacgtgtctgggagacctaggcccccttaagatgc

SEQ ID NO: 116595 - DNA, 118 bp, Zea Mays
ttttttttattgtgatgtaatctacaattttgtttcggttgttagtgtgtgcgtgtgggtgcaggtgttcctaacctgtacctatattgtaagacccaaataatgtccagaagagcaa

SEQ ID NO: 116596 - DNA, 928 bp, Zea Mays
gtccccgtctcttctcagatctcacttgtcccgtgccgcgcgccctcccgcttccgatccccgcgtgagcgcaggccaaaaacctaacccctggtctcaccatcgcttcctccgcctgaggaggagcaggccggcggaggaggagatggtcttcatggcggcgctggaggccgatctgcgcgctctctccgctgaggcacgccgccgccaccccgctgtcaaagacgccgccgagcacgctatactcaagctccgatctctatctgccccaagtgaaatagctcaaaatgaagatatactgcggatgtttctgatggcatgtaatgtcaaatcagtgaagttgagtgtcataggactatcctgtttgcaaaagcttatatcacacgctgctgttgcatcatctgcgctgaaggatatactagcgactttgaaggatcacgcagagatgactgatgagattgttcaactaaagactttgcaaacgatgttgattctctttcaatcacatctacatcctgaaagtgaggagagcatgtcacaagctcttggaatatgcctttacctacttgaaagcaatcgatcttctgacagtgtccgcaatacggcagcagctacgtttagacaagcagtggcattggtcttcgataatgttattcgtgctgaatcacttccctccggtaaagcttcttcagcaagacttggttcccgtgttagcgctgttgctgataacgtcactcatagcttcagtcacacactatcgctaccaagcaactctggggatcctaccatcatgcagaatttgagtgatgttggaaagcttgggctccgtctgctcgaagacctgacagctattgctgcaggtggatctgctatgtggctccgtgtttattcactgcataggacatttgcccttgacatacttgagtaa

SEQ ID NO: 116597 - DNA, 1419 bp, Zea Mays
cgtggatgcgcttccacgccacgcgtcctcaatcaggattcgggacaggtgccgcagcgcatgcgcagcccctgtgcggcacgccggcactgccgtgcagattttttttcttccaaactcggcttcccccaccgcaaaccaagagctccaattcctcgtgcctctgccaatccctccggccctccttccaggcttcaggaccttctcctgcgacgccagcaccgccccgagccgcggcccgaatctagggttcccctctcccgccgtcgacagccggatcgcacatagtgcacctccacgatgctgccgtgcgcgaggtcggtgcttcgaaggagggggctggcatcttccgtcccgcggaggtgcggcggggagggcgagtgctccacttgcgcgggggagctggtcgccaatgccaggtgttcgagcacgctggctgcgctcggcggcggcgggcgcgtgctcgagcatggcggccggtgggcatatccgcagaccggcgtgattggcgcggggcggatgacgcgcacgcagacgaggtgtttcttcgggtgcggcgacggggaggaggggggcgtgctctccaaggtctatgaggagaggcgcgtgattgggtatgcggtcaatcgagagttgccttatggtagttctggagattgatttataataacgtggaaatcgttggggattgtggcgttattgtgactgctttggtgaaatcaggtactcaccagaccagatgtttgctgttgtcgcgtcagtggacctctacgaggactttgtgccatggtgccagcggtccaggattattaggtgccatgaagatggctcatttgatgcagagctcgagattggattcaagttccttgttgaaagttatgtctcccgtgtggagatggagaagcccaggtatatcaagactacagcatctgaaagtggactttttgatcatttggtaaacgtttgggagtttaagcctggtcctgttccagggacatgtgacatctatttcttagtcaattttaagtttcaatcaccactgtatcgtcaggttgcatcaatgttcttcaaggaagttgtttctcgactagtgagctcatttagtgaccgttgttttagaatatatggccctgctgttccagtgctggaaaatagttatggacaaagaagatgaagccgttatggttcaattttgaaggttgtatctttcatggatctctagggattacttgtagtcaaggcataatccttccttttgtaatcggtggtagtgccatttagaacaccatcgtgcaagaggtcgtctataaggaaatcagtcagtattgagttttcatcattggctatttctgaggttatattttcatctatttcaaaattcgtttcacgtgcatacaacgaaatggttatgttttcatc

SEQ ID NO: 116598 - DNA, 1300 bp, Zea Mays
cgtggatgcgcttccacgccacgcgtcctcaatcaggattcgggacaggtgccgcagcgcatgcgcagcccctgtgcggcacgccggcactgccgtgcagattttttttcttccaaactcggcttcccccaccgcaaaccaagagctccaattcctcgtgcctctgccaatccctccggccctccttccaggcttcaggaccttctcctgcgacgccagcaccgccccgagccgcggcccgaatctagggttcccctctcccgccgtcgacagccggatcgcacatagtgcacctccacgatgctgccgtgcgcgaggtcggtgcttcgaaggagggggctggcatcttccgtcccgcggaggtgcggcggggagggcgagtgctccacttgcgcgggggagctggtcgccaatgccaggtgttcgagcacgctggctgcgctcggcggcggcgggcgcgtgctcgagcatggcggccggtgggcatatccgcagaccggcgtgattggcgcggggcggatgacgcgcacgcagacgaggtgtttcttcgggtgcggcgacggggaggaggggggcgtgctctccaaggtctatgaggagaggcgcgtgattgggtactcaccagaccagatgtttgctgttgtcgcgtcagtggacctctacgaggactttgtgccatggtgccagcggtccaggattattaggtgccatgaagatggctcatttgatgcagagctcgagattggattcaagttccttgttgaaagttatgtctcccgtgtggagatggagaagcccagactacagcatctgaaagtggactttttgatcatttggtaaacgtttgggagtttaagcctggtcctgttccagggacatgtgacatctatttcttagtcaattttaagtttcaatcaccactgtatcgtcaggttgcatcaatgttcttcaaggaagttgtttctcgactagtgagctcatttagtgaccgttgttttagaatatatggccctgctgttccagtgctggaaaatagttatggacaaagaagatgaagccgttatggttcaattttgaaggttgtatctttcatggatctctagggattacttgtagtcaaggcataatccttccttttgtaatcggtggtagtgccatttagaacaccatcgtgcaagaggtcgtctataaggaaatcagtcagtattgagttttcatcattggctatttctgaggttatattttcatctatttcaaaattcgtttcacgtgcatacaacgaaatggttatgttttcatc

SEQ ID NO: 116599 - DNA, 1310 bp, Zea Mays
cgtggatgcgcttccacgccacgcgtcctcaatcaggattcgggacaggtgccgcagcgcatgcgcagcccctgtgcggcacgccggcactgccgtgcagattttttttcttccaaactcggcttcccccaccgcaaaccaagagctccaattcctcgtgcctctgccaatccctccggccctccttccaggcttcaggaccttctcctgcgacgccagcaccgccccgagccgcggcccgaatctagggttcccctctcccgccgtcgacagccggatcgcacatagtgcacctccacgatgctgccgtgcgcgaggtcggtgcttcgaaggagggggctggcatcttccgtcccgcggaggtgcggcggggagggcgagtgctccacttgcgcgggggagctggtcgccaatgccaggtgttcgagcacgctggctgcgctcggcggcggcgggcgcgtgctcgagcatggcggccggtgggcatatccgcagaccggcgtgattggcgcggggcggatgacgcgcacgcagacgaggtgtttcttcgggtgcggcgacggggaggaggggggcgtgctctccaaggtctatgaggagaggcgcgtgattgggtactcaccagaccagatgtttgctgttgtcgcgtcagtggacctctacgaggactttgtgccatggtgccagcggtccaggattattaggtgccatgaagatggctcatttgatgcagagctcgagattggattcaagttccttgttgaaagttatgtctcccgtgtggagatggagaagcccaggtatatcaagactacagcatctgaaagtggactttttgatcatttggtaaacgtttgggagtttaagcctggtcctgttccagggacatgtgacatctatttcttagtcaattttaagtttcaatcaccactgtatcgtcaggttgcatcaatgttcttcaaggaagttgtttctcgactagtgagctcatttagtgaccgttgttttagaatatatggccctgctgttccagtgctggaaaatagttatggacaaagaagatgaagccgttatggttcaattttgaaggttgtatctttcatggatctctagggattacttgtagtcaaggcataatccttccttttgtaatcggtggtagtgccatttagaacaccatcgtgcaagaggtcgtctataaggaaatcagtcagtattgagttttcatcattggctatttctgaggttatattttcatctatttcaaaattcgtttcacgtgcatacaacgaaatggttatgttttcatc

SEQ ID NO: 116600 - DNA, 955 bp, Zea Mays
cttcctagagtggtgctttcttttgaatagcttggatgagctgtggtatttgataataaactgcaatttaggttgaaacttttttaaccaagatgttctatagtatcagttactgcatgatattttgatgtgtgtgctgattgtaccacagaaaatgctgttctaggccgctaggaatatgaatttgttgtacttgtagtgttctttagtacaactattttgcaaattatggtctgtggtaatatcagagtggcactttttcttgaaagaagctgatgttgtagttttttctctctctctattctgcatttaccattttgtttatgcttgagaaaattgcattatgttgttttatgtttcttactagcaatgactacatgcagactacagcatctgaaagtggactttttgatcatttggtaaacgtttgggagtttaagcctggtcctgttccagggacatgtgacatctatttcttagtcaattttaagtttcaatcaccactgtatcgtcaggtaaatcatgcttttaatgatactgcacatatattaacttgtcatatgcccgttatgtctcttagagtacggatctttctcatctcaggttgcatcaatgttcttcaaggaagttgtttctcgactagtgagctcatttagtgaccgttgttttagaatatatggccctgctgttccagtgctggaaaatagttatggacaaagaagatgaagccgttatggttcaattttgaaggttgtatctttcatggatctctagggattacttgtagtcaaggcataatccttccttttgtaatcggtggtagtgccatttagaacaccatcgtgcaagaggtcgtctataaggaaatcagtcagtattgagttttcatcattggctatttctgaggttatattttcatctatttcaaaattcgtttcacgtgcatacaacgaaa

SEQ ID NO: 116601 - DNA, 1818 bp, Zea Mays
gcagagtacatgaagtacaaggatccaaagcaacctattaactctagaatcagggatcttatcggtaggatgacccttgctgaaaaaattggccaaatgacacagatagaacgccaggttgcatctgcaaatgtcatgaaacagtactttataggaagcatcttaagtggtggtggaagtgttccttctccccaggccagtcctgcaatttgggtgaacatggtcaatgaatttcagaaaggtgccttgtcaacgcgtctaggaattccattgatttatggaattgatgctgttcatggtaataacaatgtctacaacgccactttattccctcataacattggacttggagctacaagggatcctggcctcataaaaagaattggtgaagcaactgctcttgaagtgcgtgcgacaggcattcaatatacttttgctccatgtattgcagtttgcagagatccaagatggggtcggtgctatgagagctacagtgaggatcacaaggttgtgcagcagatgacagatattatccttggtttgcagggtgagatcccagtcaatcataccaagggagttccatatgtagctgggaaggataaggttgctgcttgtgctaaacactatgttggtgatggtggaactcataatggaatcaatgagaataatacaatcattgatgagcatgggctgctaagcattcacatgccaccatattatgactctatcataaagggtgttgctactgttatgggtttcgtgatatctgactggctaggagtggaccgtatcacctcacctcctggcgcaaactatacttattctgtgcaagctggaattaatgctggcattgatatggtgatggtgccatacaattacactgattacattaatgatctcacttctctcgttcacaagggtgtcatcaatataagcagaattgatgatgctgtgaagcggatccttcgagtcaaatttacaatgggcctgtttgagaaccctttagctgatcttagttttgcagagcagcttggaaagaaggagcatagggaactggctagagaagctgtcaggaaatcacttgttctgttaaaaaatgggaactctcccgatcagcaattcctacctctccctaagagagctagaagtatcctggtagctggaagtcatgctagcaatttggggtaccagtgtggtggatggtcaatccaatggatgggggacagtggtaatatcacaactgggacaacaattcttgatgcgataaagtctaccgttgctgactcgacgtctgttgtctactctgagaaccccgatgacagtttcatgaagcacaatgacttctcattcgctatcgtcgttgttggcgagccaccatacgctgaaacagttggcgatagcaccgacctcactatgctagaccctggtccagacacgatcagaactgtgtgtgctgcagttaaatgtgcagtagtcatcatttctggtcgtcccattgtgattgagccgtatgttccattagtggaagcgcttgttgcagcttggcttccgggaaccgaaggtcagggtgtcgcagatgtactctttggagactacggtttcacaggcaagctcccgcacacctggttcaagtctgtcgaccaactgcccatgaatgtgggagacctacagtacgatccactctaccctttcggcttcggtttgatgataaattcatcattgccagggttctctggtgttgacaatctgggatataggaagcaaagagtgctatttgctgtgctgtgttctctactgtcattggttctaatcagttaa

SEQ ID NO: 116602 - DNA, 1911 bp, Zea Mays
gggcgtattcctctctctttcctcaacctcatccgagtggctctccgtgtgctgtggcggcggcggcgcccggctctgctcggacggactccaccgaaggctcggctcccctcggactccacctgcgacggccggccctctgcctgcaccgacggtgcccggctccctcggcatccaccagcggtgcccgactccaagaaatgtacaagtcacggctgcaggagctgtgccagaagcggcgatgggcgccgccgttgtacgagcctacccgagagggtcctgcccacgcgcccctcttccgcgccactgtcgtcgtgaatggcgagaggttcagttcccgggatgaaggggagaagtcactcaaggaggcgtacaacctcgcggcgatggccgccttcgacaacctcatcgcgctcccggccgcggcccttgcccctgccccggctgctccagcgccgccctcatccgagacccagcttccttacaagagtcagttacaaatttatgctcagaagcgaggcaaactcctgccttcatatcgtcccattcatggaggttctcttcatgcacctctatttaagtcagaagtaaccatagatggtcaaacatttgagagcccagagtactgtcacacaatgaaggaagctgaaacagttgctgcaaaagttgctctgatgtccttacctcaagaagcaaacccaacacagcaattactgcttccatctgtaaactataagaatcttctacaagaactagttcagaaggaaggctttcccttgcctatctataatacagcctcggatgtctcgaactattctgctgccttcgtatcaactgtggaaatccatggtgtaacttttcatggaaagccagggaacaccaaaaagcaagcagagatgaatgctgcaaagtctgcttttgaacatttcaaaaacataaatcatgatgctggatcatctggctctgctaacccacttcctgttgccgctacaaaacagtctgttgatggaaacactctacgtgcaaagctggaagttaacaaatcacaccttgcagagccaagcacagaagttgaagcaatatattcatctacagaagttgacaaactgccacttccagggccaagcatggatatcgaagtaatggactcaactcttgaagttgacaaactgccccttccagagcgaagcatggatgttaaagttgtgaattcgtctctgaaagttgacaaactgcactttgcagagccaatcacagaagctgaagtgatccactcatctctgcaagttgatgaaccgctcattccaaagccaggcatgagctcatctctagagaacacacctgctgtgaatggccactcagcccccatatccccaaccattactcctactctaataagcgtgccaacagcaaccatgcctgtcagcaatgacagatgcggttgctacatgtcaaccaacagaatccaagtctaccctcgccacactgatatggttatcccggaaggcgcggccgtgcttcccatcagcgataatcagtgggtagctgtcagcctaccttattccatggaacaaagggatttctgttgccgtaatccggactgccacttaggaagataaaagcagacaaaaggatggatgctttgtgatgattatatagcttgtgatgctgagcattgcccgtgatgtactaaaatctagtgtaacaagactgccttgcgctggactacgattagtgtccctaatgcggagacttgtgtgactcctattgtatctagattaagctgtacttgtttgactatgtgcggaagtcttgagttacactcctatagtagaggacttgaactctggatggaccatccgcaacatttatcatgatcagacttttttcatacttcctacttgagcttgt

SEQ ID NO: 116603 - DNA, 2037 bp, Zea Mays
gggcgtattcctctctctttcctcaacctcatccgagtggctctccgtgtgctgtggcggcggcggcgcccggctctgctcggacggactccaccgaaggctcggctcccctcggactccacctgcgacggccggccctctgcctgcaccgacggtgcccggctccctcggcatccaccagcggtgcccgactccaagaaatgtacaagtcacggctgcaggagctgtgccagaagcggcgatgggcgccgccgttgtacgagcctacccgagagggtcctgcccacgcgcccctcttccgcgccactgtcgtcgtgaatggcgagaggttcagttcccgggatgaaggggagaagtcactcaaggaggcgtacaacctcgcggcgatggccgccttcgacaacctcatcgcgctcccggccgcggcccttgcccctgccccggctgctccagcgccgccctcatccgagacccagcttccttacaagagtcagttacaaatttatgctcagaagcgaggcaaactcctgccttcatatcgtcccattcatggaggttctcttcatgcacctctatttaagtcagaagtaaccatagatggtcaaacatttgagagcccagagtactgtcacacaatgaaggaagctgaaacagttgctgcaaaagttgctctgatgtccttacctcaagaagcaaacccaacacagcaattactgcttccatctgtaaactataagaatcttctacaagaactagttcagaaggaaggctttcccttgcctatctataatacagcctcggatgtctcgaactattctgctgccttcgtatcaactgtggaaatccatggtgtaacttttcatggaaagccagggaacaccaaaaagcaagcagagatgaatgctgcaaagtctgcttttgaacatttcaaaaacataaatcatgatgctggatcatctggctctgctaacccacttcctgttgccgctacaaaacagtctgttgatggaaacactctacgtgcaaagctggaagttaacaaatcacaccttgcagagccaagcacagaagttgaagcaatatattcatctacagaagttgacaaactgccacttccagggccaagcatggatatcgaagtaatggactcaactcttgaagttgacaaactgccccttccagagcgaagcatggatgttaaagttgtgaattcgtctctgaaagttgacaaactgcactttgcagagccaatcacagaagctgaagtgatccactcatctctgcaagttgatgaaccgctcattccaaagccaggcatgagctcatctctagagaacacacctgctgtgaatggccactcagcccccatatccccaaccattactcctactctaataagcgtgccaacagcaaccatgcctgtcagcaatgacagatgcggttgctacatgtcaaccaacagaatccaagtctaccctcgccacactgatatggttatcccggaaggcgcggccgtgcttcccatcagcgataatcagtgggtagctgtcagcctaccttattccatggaacaaaggtgagacaaacccagggagacaaaaccatccataaataactaaatatcttatgcaaataatatctctgaaccccacgttataagtttactggatttgggtttcaaaataatatctctgggattgctcacaccgggaaaatgcagggatttctgttgccgtaatccggactgccacttaggaagataaaagcagacaaaaggatggatgctttgtgatgattatatagcttgtgatgctgagcattgcccgtgatgtactaaaatctagtgtaacaagactgccttgcgctggactacgattagtgtccctaatgcggagacttgtgtgactcctattgtatctagattaagctgtacttgtttgactatgtgcggaagtcttgagttacactcctatagtagaggacttgaactctggatggaccatccgcaacatttatcatgatcagacttttttcata

SEQ ID NO: 116604 - DNA, 1306 bp, Zea Mays
cgtacgtcacacaggcctttcaccttgacgtcggcgctaggctctgcctcctccccgccactcatgttcttcgcaggagttcctccccgccgctcccggtcatcgtaggatctcttcctagccgccgcaggaaccggattcagatatggaaggggatggttgttattttaccaatcttgtgaattgaggatttgaaccttttgaagacatctctcaatcaccagttcacttgcaacagccaatctgtacaaaggataagaacacctcatccaagccaaccctaaagcacataggtaaaaatttcagtgaagaagaagatagacacaagggactaatcaaacaagaggcacgttttggaaaagaatatatttgttctctgaggcgaatagagaaaattgtcccaaacgtactgaaaattctttgctgcatcgttggagttgtatccaagatgctgtaagttatgtggatgttgcaatagtattgagactagaaatcaaagcggtttggctgttcatgatagggtggagcaagctgagaagctttttaaagaacaagatccccacaacaagtcttttcaattcaagcattgctggctgttgttgaggaaccaaccaaaatggcatgacaagctaaatcaattagttaccacaaaaaactagtaacaagaagcagaaaacaaccagaaaaatcaagtctaggccttgttgacctatcaatgaaggaggttaatgatgctgctcctaatgcaattgagattccagagatagaaccatcacaaagacctttgggtaagaagaaggcaaaagaggcggcacgtcagggtggcaatgatgcttgcaaagaagcattgaagtttctgtaggcaaaaaagattgaggatgatgcagagaaggagatgaagagagaagaaagacatgcaaagtcatttgctctggacaaagagatgcttgaactagaaaaggagaggattgcgctaaagaaggagaaggttgccaacgaggcaaacaataatttcttgaagaggattgcagaagaagatagaataatgaccattgatctcagtgccatgaatgagatgcagcagcaatattacctgagcattcaagctgagattatggctcgtcgcatgaattagatcatagctcactgctagccttgttcttaatttagtttctagaggcattctattgtacgaactattgtcattgttaattttaattgcatgaactatgtgtcttgagttatcagcattgtaagaactatttcggttgtgatgttaatttaaagaatattaagttcctaattc

SEQ ID NO: 116605 - DNA, 1027 bp, Zea Mays
ggggtagtagctagcgcgccgtcagtgcgatccatcgtgaccgggtgctcgcgccttgtttaagcgacgaaccccacgcgccggcggcgtgaacgcacagtgataatacatgcatgtcgcgcgcaacgcagccacccagcaagcgcacgagcgctgcgcccgtcgcggcggtggcagcggcaggcccggcccacgcgcagggggaggagacgtcgctctgggggtccggggcgccgtgcggcgcgtgcaagttcctgcggcggcgatgcgtgccggggtgtgtcttcgcgccgcactttggcggcagcggcgggggcggggccggcgcggcgcagttcgcggccgtgcacaaggtgttcggcgccagcaatgtggcgaagatgctgtcgcaggtgcccttggcgctgtgccgggacgcggccagcaccgtctgctacgaggcgcaggcgcgcatcgccgatcccgtctacggctgcgtcggtaccatccttgcgctccagcaccaggtagcactcgtccaagccgagctcaccattgcgcaaaccgagctcctcaaccgcaggatggccttggcaacggtccatccggcgtactccgttgtgtcgcccacgagccaaatggtgaactgtagcgctctttcacagaccctggatttcatagacacggagccaaaatgcttgccgttgccccctcctctcctaccatcgcagcaacagcggggagaagaacatgagaggggcagtccaacggatgttttcgcgcacatccccgagaaatagaagttctcgtaactgcatcatgttatttttcatgtatattttaagttttgttgatttaataatagttcttaacaaacaacaactacaatgccaccaattataacctctttgcgattccgccgacatgcttgatacatacgtatcaacatgtcgtaatggcttttgggtacatgggaattgactctctttagcaagtatctgtcttcaacaacgctctctatattcatcatctatatctgttatttaca

SEQ ID NO: 116606 - DNA, 733 bp, Zea Mays
gtccatagcttcatctttataaatggcagctcacccatctcctttctcccacacacctcttcctcctcgagctctttctctcccgagcagcccctgctctagctcccactcggcgttctcctcgaagacaccactgcagcccctgcactttggccggcactctgctttacccgacagccatggcgctctcctgctccatcttccatccatggtcagccccttcccagcagccccagcatggtaccccttccctgctccatggacgcctgcacctccttctgttttcccccgcaccgcccttttccccatggtgcagctcggcctccccattagtgcagctccccgtctcctccctgcgtgcgtgctggaaacaaggttgaagaagtcccccatgagcctatgacgaatgggcccagggtcaaatggatcgccggtgatcgtcggacttcagccaccgggacgttacagggaaccggcggactaagcgcggcgttgctgggcggctgtgcgttgtgcgccacctgcacaaaggggtggcggctgcacgctgcggaggtcctcagccgctggcagtttgtatgagtacgcgggtaaagcagaaacacatgcctctctctagattctttgcgcttgcttattatctgtttggtttgcatcgtgaactgaaccgatctgttaaaatcgctagatgacacggttgcgtcccataacggacgaactgattctggatgaa

SEQ ID NO: 116607 - DNA, 535 bp, Zea Mays
ccttcatcttccctaaaccctaggcagtgtcctaaatacgctctcccccggtggggtcgctacagcgatctgatctttcgccagtcaccggcgccggaggctccgcgctctatactcatggttgtcccgcgcgctcccgagcagacacagcaggaccaggatgaggagatgctggttccgcatcaggatgccattgagggtctgcagaaggatgttcttgagggtccgcagccgatggaagaatttgcatctgctgttgagaaccaaattataccagatacctccacatctagatttacatggtatattgaaaatttctccaaacgaaatgttagaaagcactactctgacgattttactgttggggggtacaaatggcgagtgctcgtcttccccagaggaaataacgtggactacctttcaatgtacctggatgttgctgattcgaacttgatgcctcccggttggagtaggaatgcacaattcagccttgctgtggtaaaccaattagacagcaaagcatcgttaagaaaag

SEQ ID NO: 116608 - DNA, 104 bp, Zea Mays
acatttataattcacatatttcggcttgcttttgtttttgcattcttttatgtttgcatggaaaacatagcacattaataagtcgaaacttaatggtattcatg

SEQ ID NO: 116609 - DNA, 443 bp, Zea Mays
aaagcctcgagcatgtatttatgcattgccagttctccggagcaaagctcatacgcgaacgtttaaaaaaaggggggaaggaaacaaaatctcgcatgccaggctctctatacacagcgaaaccaagaagcgcgcgatacggccggggggcaacccatagcatgggtcaccaaaccttgggcttggcgtcgatgacgtccgccccagcgtcgacgccgccggactcgtcgcccacgatctggtccagcacgagcacgatccccatggcgaacgcggcgtcgaagccggggctcacccgcaggacgaagacgtcgcggcccatgacgacccttgccccctcgtccaccttccgcccgatctccgccaccaccttggccttctccccctcggccctgggcgccagcaccacgcggcagcaccggcgcgggaaggacccgtccacg

SEQ ID NO: 116610 - DNA, 843 bp, Zea Mays
atggcatcacgctccttgctcaggaggattgggatccaaccggcctatcgtctttctggcgaccactgtggcccgcgactgctccgcttcagcgacggtgaggcacaccatcgtttgattccactaacgggggatcaatcgcttttagctccagttgtgttggttcttcgtgaagctatgtctgtttctccaccacaagaaacaaatgtcacttctggaatgattttgaaggatgctatctatatagctaccaatcatgtttattatgaacttttgaactacctcagttttaataaatggccgactgaagcacttcgctttttcaccatcatgcagtgcacgtgttctgtcacagcagtggaaaggcgtattttgggtgttctagcaaatgagaattggtggtttaccatctgcagctacaggagcaacatttgggttggacatggaagcactactgtcagggtggagtatggtgacgacacaattgcaactgacttgtcaggcgctcatccccttgcacatttcctcaggaagaccattgtcgtggtcaagtacaatgccttgctaaggtcatatcttaacacccggtggtcagggtcggcattgtcttctatggcaggcaatcctcaggaggacacagtgttgtttggagactctgaggctatcaaggcccactaccaaaacatcaaactcactggtttcctcgggtgggccgcacagccagagctggtcaatctgggtgttcagaagcacgaagaggttagtaaagtcgaggatgacattgttctcagagaaatatgtttgcttcctgtagatgttgcaacaaaccaagggctgatttga

SEQ ID NO: 116611 - DNA, 795 bp, Zea Mays
catgccccgtccccgatcgacgcgcacaacacagcgcccacacacacacagacagtcttacgcgacgacacacacgcaaggcggacggacatggatatgagaggagggcacaacatgggcggcatggcaccgccgccgtcccctcacggcggcatgcggaagcgctacgtccacatgaccttcttctggggcaagaactcggagatcctcttcacggggtggcccggcgcgcgcggcggcatgtacgcgctggcgctcgtcgccgtcttcgcgttcgcgctcctgctcgagttcctaggctcccgccgcctggacgcgctcctctccgccgcggccggccggcgcgcggcagcggcgggggcggcgcgcacggcggtgtatgccctgcgcgtgggtggggcgtacctgctcatgctggcgctcatgtcgttcaacggcggcgtgctcctcgttgcagtcgcgggccacgccgctggcttcctggcgttcagggccggcctgttcggcgaccggcgggcgcaggtggagggcgacggcaaggatgaggtcgcgccggtcgtgtgctgttaggctcgtccgttgtcgcccgcggcggtgcccatgacgattcggtgggtttgtctatgtcaacggtgcatgcatcgttcgggccggcgcgttcaatggatccgtgttgctgtttggttgaaatcaagatgcatggcgatcgacatgcagttgtaagcttaggtttcggtgataaattgtgaatctcttggctgtatcctattcagacatagtcttcagtcacaccaa

SEQ ID NO: 116612 - DNA, 389 bp, Zea Mays
ggaaattaccggatttgtgtctcggattttttcggaattgtgtctcataatttttcagaattgtctcggaatttcttggaattgtgtcttagatttttcggaaattttcagcatgtgatttttcgcatcgcctgtacgtctctagataaggattacttatttttgtatttttttgaacgtattaagatttttttgggatagatggtgttggaaggcagttgggattaacgatttggtctctcaaacgaatccacgcttttctatgtacatgttatgtattagtaatatataatgatagagagccggcagtctatcttttctacatactaggttttagggttttcctgtgagattatgaaaaactctttatgtgagaaaaaaatatttca

SEQ ID NO: 116613 - DNA, 2344 bp, Zea Mays
aaagacaacctccttccacgtgagcgctttcttccttcagccttctcgttatcctgaacgcggcaatctccgaaggtcccatccaaaacctcgccgccggattcgcacctcactctcgcccgcgcactacgaattgactgacgcctacgccctaccgctgcaagcagcaccatagcgggagccgctaccatggcgtcctgctacaacccgtggcgcctattcccaggcatgtcgacggcggtccctgccgggcccgtcacggcgccggctcattctcgcacctgcaagtcctcgaaagtgttcagtgctttgcctcaccggaggggtctgctgttcctgggcacgcggcgtgccaggatcaagtgcgtcaaggacgactctctccatttcgacccgtcgaagatagaaccgccaccgtactccagctacttcgactccacatccggtcagctcgagccggcgtcgggcgctcgggcaagcatacccgggaaggagtactggccagagggcacggcggcccgcgtccgtgccgcgcgagcgcctgctccggttggggagtcagctgggatgccatcatttggcacgaagcccgggagcaggaggagagggtataaggagcaggtgacgtcggcgtcaggaacggagggtgcacagactgatgacagaaaggatggtgatgaacctgatgtggctattataggctctggggacgatgcattggaggagataaaggattcggtggatgagtatgtcatttatgagacaccagaggaagaggagctgagtgagtatgacatggacaaaatgatggggcggccacacccgttcattgatccagcaaaggcaatgtcactaggggagccgaaaaccagtgaagagctctggtggcactggaggaggaagtctcaggaggaggaaatgtggtcaagatggcagaggaggcgtccagatgttgacacggtttttgcaaaggcaatggcggagactgggcaaattaaaatttttggggaccatccttcacggacagaagctgctcttgcaaagacaagaagacatttgtacaaagaggaaaggttagaagcagagcaaaggagactagaagaaatagggccaatagcgtactactcagaatgggttgaagcttataaaaacaaggatacatcacgtgaggccatacagaagcactttgaggaaactggcgaagatgagaatgttcaacttataaaaatgtttcaacaccaaactgctggggaatatcgtatcatgatgggcaccgatgtgcgtattcagcgagatcctttggccatgagaatgcgggaagaccagatcaaacagatttggggcggtgatcctgtctatccaacaattaattatgttcaggatcctgatgaagtgattgactacagaggtcctgaatttcatgagcctacccctgaagttgtaccttacctgatggagcatgggataatgatcacaaaggaagagctatatgcacgtctgaatgaagagagagaggacgtcaatcaagacataacgtatattcctgaagctaaagatcctatggctaccgccattgatataggagagcattcttacaatgaagacagtgatgatgaggatgaggatgtcgataaagctgctgcacagcctcaatcactagaggatgaggaagacgatagggatgatgttgcagaagtagaagagaaagtgaaccagaattggagtgctctaaagtctactggacaggctgaaaagcccaaggaaaaatcaaagaaagatgaaatgacactaaaagaagctattgacgattctgagaacctaactgactttcttatggactttgaggaaaccgagtaatactctggacattttgctattctgtcccatcacacatgattcttgagaacttacttctggagactcatagcccttaggggctaggggcgatgaagaaaactggatgtccacaaaactctacttgctcaatacgatggaaggtagctccagctgcctgttttgattcacaagttggcaatgctatcagaaaaaaggaatccagatagaatgttgtggcgcatggctcaagaattgacaacaatcttcatgcttttgaagaaacaagagaagccacaaaacaagagataaggagtagcttaaccatttgcagttggaactatgttagccttcttaggctgtccgcagaagatcgtgtaaaataggaaattcacactgtagattacattatttgcagagttaagtttgaaaaagaagataagacatgagatgagatatgatagctgctagagacagtgttacaccataaataatatatttcgactaggca

SEQ ID NO: 116614 - DNA, 2219 bp, Zea Mays
aaagacaacctccttccacgtgagcgctttcttccttcagccttctcgttatcctgaacgcggcaatctccgaaggtcccatccaaaacctcgccgccggattcgcacctcactctcgcccgcgcactacgaattgactgacgcctacgccctaccgctgcaagcagcaccatagcgggagccgctaccatggcgtcctgctacaacccgtggcgcctattcccaggcatgtcgacggcggtccctgccgggcccgtcacggcgccggctcattctcgcacctgcaagtcctcgaaagtgttcagtgctttgcctcaccggaggggtctgctgttcctgggcacgcggcgtgccaggatcaagtgcgtcaaggacgactctctccatttcgacccgtcgaagatagaaccgccaccgtactccagctacttcgactccacatccggtcagctcgagccggcgtcgggcgctcgggcaagcatacccgggaaggagtactggccagagggcacggcggcccgcgtccgtgccgcgcgagcgcctgctccggttggggagtcagctgggatgccatcatttggcacgaagcccgggagcaggaggagagggtataaggagcaggtgacgtcggcgtcaggaacggagggtgcacagactgatgacagaaaggatggtgatgaacctgatgtggctattataggctctggggacgatgcattggaggagataaaggattcggtggatgagtatgtcatttatgagacaccagaggaagaggagctgagtgagtatgacatggacaaaatgatggggcggccacacccgttcattgatccagcaaaggcaatgtcactaggggagccgaaaaccagtgaagagctctggtggcactggaggaggaagtctcaggaggaggaaatgtggtcaagatggcagaggaggcgtccagatgttgacacggtttttgcaaaggcaatggcggagactgggcaaattaaaatttttggggaccatccttcacggacagaagctgctcttgcaaagacaagaagacatttgtacaaagaggaaaggttagaagcagagcaaaggagactagaagaaatagggccaatagcgtactactcagaatgggttgaagcttataaaaacaaggatacatcacgtgaggccatacagaagcactttgaggaaactggcgaagatgagaatgttcaacttataaaaatgtttcaacaccaaactgctggggaatatcgtatcatgatgggcaccgatgtgcgtattcagcgagatcctttggccatgagaatgcgggaagaccagatcaaacagatttggggcggtgatcctgtctatccaacaattaattatgttcaggatcctgatgaagtgattgactacagaggtcctgaatttcatgagcctacccctgaagttgtaccttacctgatggagcatgggataatgatcacaaaggaagagctatatgcacgtctgaatgaagagagagaggacgtcaatcaagacataacgtatattcctgaagctaaagatcctatggctaccgccattgatataggagagcattcttacaatgaagacagtgatgatgaggatgaggatgtcgataaagctgctgcacagcctcaatcactagaggatgaggaagacgatagggatgatgttgcagaagtagaagagaaagtgaaccagaattggagtgctctaaagtctactggacaggctgaaaagcccaaggaaaaatcaaagaaagatgaaatgacactaaaagaagctattgacgattctgagaacctaactgactttcttatggactttgaggaaaccgagtaatactctggacattttgctattctgtcccatcacacatggactggagcaatgaaaggaaacactggtcgagtagccccttaatcatttctttgattcttcccaaggcttgaagctgcagctctaattagcctgagggattcaacaaagtcatccagcagcttatgagaatctggaaattgtgcgtcatccactgctagatttaccatcatagtgttaacataactttggaagttcacggttagggcctgcagaaaaaaaaaagacgaacaaacaaatatgcaaattttgctttaacttgttttagacatgaaccgagtccagactacaagcatgtatgggtattgaagacacttgttttttct

SEQ ID NO: 116615 - DNA, 2611 bp, Zea Mays
cagacagagttcacccaaacctatgaattatggctcatatattgttcacctccaaaaatcactattgaagaggactctaaggggagagcattatgtaaagctgtatagctaccgctacttgattaatggttttgctgttgtcattactcctcggcaggcagacaagctatccgggagaaaagaagtagcgaatgtgatgctggattactcagttaggacagcaacaactcatacccctgaatttcttggactgccacaaggagcctgggttcaagaaggtggtccacaattcgcgggacagggtgttgtcattggcctcatcgacacaggaatagatccaacccaccctagctttgcagatgatctatcgactgatagttatccagtacctgctcactactctggcatttgtgaggttacaaatgattttccatctggatcttgcaatagaaagctcgtgggggctcagcattttgcagcatctgcaataactagaggagtcttcaacgcatctcaggatcttgcttcaccatctgatagtgatggccatgggacgcatacagcatccattgctgctggcaatcatggaattcctgttgttgtggctgggcatcaatttggaaatgcaagcggcatggctcctcgtgcacacattgctgtctataaagctctttacaaaagctttggtggttttgctgctgatgttgtggctgcaatagatcaggcagctgaagataatgttgacattatcagcttgtccattactcctaatcggaggcctcctggactcgcaacattcttcaatccaatagacatggcactcttgtcagctgtaaaagctggcatatttgtggtgcaagctgcaggaaatactggtccttcccctaaaagcatgtcttcctacagtccctggatatttactgttggagcttctgcccatgacagggtatacagtaactatgttgtgcttggcaacaatttgaccattcaaggagttggccttgctcctggaacggatggtgatcccatgtataatttagttgctgcaccacatgcactgaagaacaatacagccagttgtaatgaaatgtcccttggggagtgccaagattcgagtcacctagatgcagatttgataagaggaaagatactagtgtgcagctattctataagatttgtgcttggtctttcttctgtgaaacaagctctagatacagccaatgatgtcagcgccgcaggagttatattctatttagacccatttgttcttgggtttcaactgaacccaactccaatgcacatgcctgggcttataataccatcatctgatgactcaaaggtatttctcacttactacaatgactccctagtgagagatgggacatcaggtcaagttgttagctttggcggagttgctaaaatattagggggtctaaatccaaattatggaaattctgctccgaaagtaatgttctattctgctaggggtcctgaccctgaggacaacacactgtcaaatgctgatatcttgaaaccaaatctagtagcaccgggaagttccatttggggtgcttggagttcagttggattggattctgctgaatttgctggtgaaagtttcgcaatgctctctggcacaagtatggctgcgccccatgtcgctggcctcgccgctctaatcaagcagaagtttccttcttttagcccagcagctatagcttctgcactgtccacaaccacaactcttagtgacaggcaagggaaaccaatcatggcacagcgaacatacagcaacccagacttgacgcagtctccagcgacatcttttgatatggggaatggctttgtcaacgccaccgctgctttagacccggggctcataattgattgcagctatgatgatttcttctcctttctttgcggcataaatgggtctagcccagtcgtgaaaaactacactggcaacagctgcgtggcctccaccatgacaggagcagatctaaacctaccatcaatcaccatagccgtgctcaaccaaacaagaaccataacgagaacggtgatcaacgtggccgctgacgagagctactctgtcaattacagtgcccctaatggaactgcagtttccgtggtgccgacgcaatttttcattccaagcggacagaagcagctcgtgacctttgttgtgaacgccaccataaacagctccactgcgagcttcgggaacgttgggttccagggtaacaaaggccaccgggcgatcatcccattctcggtgatctccaaggttgtatacagttcctgatgactgatgagccgagctgatgcagtggatgcaatgcaaatgcaaatgcaaaccagggcctgactgatccagcgtatgcagtgatgacttgactgcatggaggtggagcttgcctttgactagagaaattttttgttggttgtggcgtgtacattctgaagcatgttgatgtaagtagctgagtgattaaccagtaactgtaaagagaatgtactgccagatatccagaatgggaaatccttgtgcaaccagaatgttaaatagcactctgttggggtttgatttaccgatatgatgttcgtgcga

SEQ ID NO: 116616 - DNA, 411 bp, Zea Mays
ctcccatgggcggtggacgcaactagcatttctttcttggcggttcttggtgtcttgtggttgtgggggtgggcaccgagcagcttcataggaatgggggtggcgcggagggaggagcaccgggcggccgccgccgcgttcctgtacgcgctgacggttcttggggtgttggcgggcggcgccggcgtccgcgctttcgaggacggcactgcggtgtacattgtcaccatgaagcaggcgccggtttcccacaggcgacttaacttggagaagttcgggagcagcaaggctgctactgccgtcggccgcggcggcagcggaggaggaggaggaggagacaccccgaccaccagcgtcctcaggaagccgagctattatatgttctgcattttgtcgcttcggcgtttctga

SEQ ID NO: 116617 - DNA, 429 bp, Zea Mays
caaacatatcctgataatgagtcattacaatatttgctaagataaaatgaacgcactgtctcccggagttgatattacaaatagaaataaaaaaacatgaaatggattaacaagtccatgaaaacggagatgcatattcttcaatattctgcccgcgggagtaggatctcgtggcgtccagaatggattaataagcaaacaagggagtatttgacttcacttataacctcagcttgccgccgccgcagccaagggagtgagggcctgagggagagccggagagggtcggccgcctgcatggctgcactgccgacctggcctctggcggtctgccgccggccgtgagcccgtgagccgtgacggcctgcactgccgcctgccagtctggcgcctggcggtctgccgcccgccgtgagcacgagacaggga

SEQ ID NO: 116618 - DNA, 581 bp, Zea Mays
accaacccaaatccccgcggcggggccggcgagaagccgtcttgtttcccggccccggccccggagaaatcgctatcaccaccacgtccacgccgccgcttctgcagccggcaccgcggtgggcagcggcgcgaaacccccaagacctggcactggcagtgtactcccgcgggccgcgtttgcttggcggtttgcgcgcccacccggcacccggcctccttgcgtgcgtggtactatatggcacaagcagcggatgccaacgagatctgcggcaagatctgtgacggtccggctgcgcagaggctgcccgcgctcacgggcgcaaccagtgcgggccgcccgagcggcaagcggacgcgcgccatcccctgagcctggccgcctgggggtagaagaagccaaggacaggattctggcggccccccacggcgcaccaccaccaaagccacgcaccgtcccgtccggcaccgtctacacgtccggtagaagaccgcgagcagcgaaaggtcgccaagctatgctgccgatgtttccgatcgccctatctgtaactgtaataataataaaaagttttggggcca

SEQ ID NO: 116619 - DNA, 1585 bp, Zea Mays
ggtttgcctcccacacaagggtaaaagcggaacgctaaaacctcaccccctccgcttggaagttccatcgccgccgcctccatcgctacacaccacgacgcagcgcccgattccgccggccagcaacgatgcagagctccctcgcccggccgccggtactggccggatgcggcgagagacggggcctggcagccgtggcacggtgccgcgctgaggcggcggcgcccgtgtggacggcgtccagggcgtctgcggggccgtacaccgggagggacccggaggtgaagaagcccgcgtggctgcggcagcgcgctgcgcagggggagaagtacgctcgcctgcgggagtccatcggcgagctcaagctcaacaccgtctgcgtcgaggcacagtgccccaacatcggcgagtgttggaacggaggtggaggggccggcggcgaaggggacggcatcgcgacggccaccatcatggtgcttggtgacacctgcacgcgcgggtgtcgattctgcgctgtgaagaccagcaacaaaccgccgccgcctgatcccctggagcctctgaacacggctttggctgttgcaagctggggtgtagattatgttgtgctaaccagtgtcgatagagatgacttacctgatggtggaagtagccattttgctcagacagtgaaagctttaaaggagctcaaacctggaatactggtagagtgcttaacctcggattttcgaggtgacctggaggctatctcatctttggcaaactctggcctagatgtttatgcacacaacattgaaactgtgaggagtctacagagggttgtgagggatccccgggcagggtatgatcagagcttagcagttctcaagcatgcaaaaggttccagggaggacatgattacaaagtcttctatcatgcttggtcttggagagactgatgaagaggtgaaacaagccatgatggatctacgggcaattggtgttgacatccttactttgggacagtacttgcagccatcagaaagacatctaacagtaagagagtatgtgactccccaaaagttccaattttggaaggagtatggagaatcggtgggtttccgatatgttgctagcggacccttggttcggtcttcctaccgtgcaggagagctatttatccaaaatttagtcagaaataacaaaactgagtcgtccatggatccgtacgcagaaataacaaaatctaactaaatatcttgtgccagagcaatccatgggatcagtacacactgtttgttaagagcagcaaacaagagtagaacagcataatcatctggttcttccgaaagctgaggcccagctccttgtcccttttcttttcagatagtatgcgcatctttgctctctgcgactctgccgttgttgcccctgttgaatagagaaaaaacgaggatgccgattctttttctgtatacacgataacacgaaaagctgttcaagtgtagtagcatgtacgaaactgtctccatgttttggacgattacacattgctttgttcatcatgataaagagagaaagaaaacgaagaaagctggagaaagggg

SEQ ID NO: 116620 - DNA, 1696 bp, Zea Mays
caggaaccagcagcggcaggaacaaggcaggcgatccggagaaaccaaccttgctatcatcgccggcctaatatcaatcccctgttttacccctgggccacggcagtcgtccagctggtttgcctcccacacaagggtaaaagcggaacgctaaaacctcaccccctccgcttggaagttccatcgccgccgcctccatcgctacacaccacgacgcagcgcccgattccgccggccagcaacgatgcagagctccctcgcccggccgccggtactggccggatgcggcgagagacggggcctggcagccgtggcacggtgccgcgctgaggcggcggcgcccgtgtggacggcgtccagggcgtctgcggggccgtacaccgggagggacccggaggtgaagaagcccgcgtggctgcggcagcgcgctgcgcagggggagaagtacgctcgcctgcgggagtccatcggcgagctcaagctcaacaccgtctgcgtcgaggcacagtgccccaacatcggcgagtgttggaacggaggtggaggggccggcggcgaaggggacggcatcgcgacggccaccatcatggtgcttggtgacacctgcacgcgcgggtgtcgattctgcgctgtgaagaccagcaacaaaccgccgccgcctgatcccctggagcctctgaacacggctttggctgttgcaagctggggattatgttgtgctaaccagtgtcgatagagatgacttacctgatggtggaagtagccattttgctcagacagtgaaagctttaaaggagctcaaacctggaatactggtagagtgcttaacctcggattttcgaggtgacctggaggctatctcatctttggcaaactctggcctagatgtttatgcacacaacattgaaactgtgaggagtctacagagggttgtgagggatccccgggcagggtatgatcagagcttagcagttctcaagcatgcaaaaggttccagggaggacatgattacaaagtcttctatcatgcttggtcttggagagactgatgaagaggtgaaacaagccatgatggatctacgggcaattggtgttgacatccttactttgggacagtacttgcagccatcagaaagacatctaacagtaagagagtatgtgactccccaaaagttccaattttggaaggagtatggagaatcggtgggtttccgatatgttgctagcggacccttggttcggtcttcctaccgtgcaggagagctatttatccaaaatttagtcagaaataacaaaactgagtcgtccatggatccgtacgcagaaataacaaaatctaactaaatatcttgtgccagagcaatccatgggatcagtacacactgtttgttaagagcagcaaacaagagtagaacagcataatcatctggttcttccgaaagctgaggcccagctccttgtcccttttcttttcagatagtatgcgcatctttgctctctgcgactctgccgttgttgcccctgttgaatagagaaaaaacgaggatgccgattctttttctgtatacacgataacacgaaaagctgttcaagtgtagtagcatgtacgaaactgtctccatgttttggacgattacacattgctttgttcatcatgataaagagagaaagaaaacgaagaaagctggagaaagggg

SEQ ID NO: 116621 - DNA, 1195 bp, Zea Mays
caggaaccagcagcggcaggaacaaggcaggcgatccggagaaaccaaccttgctatcatcgccggcctaatatcaatcccctgttttacccctgggccacggcagtcgtccagctggtttgcctcccacacaagggtaaaagcggaacgctaaaacctcaccccctccgcttggaagttccatcgccgccgcctccatcgctacacaccacgacgcagcgcccgattccgccggccagcaacgatgcagagctccctcgcccggccgccggtactggccggatgcggcgagagacggggcctggcagccgtggcacggtgccgcgctgaggcggcggcgcccgtgtggacggcgtccagggcgtctgcggggccgtacaccgggagggacccggaggtgaagaagcccgcgtggctgcggcagcgcgctgcgcagggggagaagtacgctcgcctgcgggagtccatcggcgagctcaagctcaacaccgtctgcgtcgaggcacagtgccccaacatcggcgagtgttggaacggaggtggaggggccggcggcgaaggggacggcatcgcgacggccaccatcatggtgcttggtgacacctgcacgcgcgggtgtcgattctgcgctgtgaagaccagcaacaaaccgccgccgcctgatcccctggagcctctgaacacggctttggctgttgcaagctggggtgtagattatgttgtgctaaccagtgtcgatagagatgacttacctgatggtggaagtagccattttgctcagacagtgaaagctttaaaggagctcaaacctggaatactggtagagtgcttaacctcggattttcgaggtgacctggaggctatctcatctttggcaaactctggcctagatgtttatgcacacaacattgaaactgtgaggagtctacagagggttgtgagggatccccgggcagggtatgatcagagcttagcagttctcaagcatgcaaaaggttccagggaggacatgattacaaagtcttctatcatgcttggtcttggagagactgatgaagaggtgaaacaagccatgatggatctacgggcaattggtgttgacatccttactttgggacagtacttgcaggttagctcaatacacacaggacctattgaatctagatatcatgccatcccatcttcctgtaattaa

SEQ ID NO: 116622 - DNA, 3453 bp, Zea Mays
gtactcctctccttcaccttgatgtgcctcggaatctgatattctatttttttcagaagctaggtagtactacctcgaaggggaaaatcgtttcttttttttcactattattttctttttgggagtgaggtctctccccctgtgggctgtgggctgtgggctgtcactgacctcttcccttctgtgtccgccaatttatctggtgccctgagctctcttgtgtgtgatctgtgaatcactgaatccttctcgccaacagcccaacacatggaaaagagagctgcagaagcagacgcctaaaacatggccgcagtatgctcctcattcacctgccgcgtctagtatttcggaaatattttgtatttattaaagcaggagagggaggcaagcagcagccgaggccgagctatctctctatttccccctcgcccagctcagatccgaagcctgaaggaaatcgcgccaacaggccctagccccagatgcgcgccgccgcttgctgcctgcgctgctgctactccttctaggggtcttgcggcgatgctgggcgtcgagcccgagagcggaggcgccgcgtcctcctccgccgcagagaattttgacgctggccagtacgccttcttcgggaaggagccactcgaggggttcgagctcgggggtttggaggaagccggcagtgatggcaatggcggtggattcagcgggccagatgaggggctgtaccggctaaactcggttggagacgagattgacgatcagagtaacttgtctgacattgatgatcttgcaagcaccttcgctaagttgaaccgaagcattagtggaatccggaatcctggtgttattggggacaggagatccatttcaagaggaagttctttaactcttgactggcctgaggatgtggagttttcaaactgggtagatcaagatgtatttgaaaatgaggaattccaggaaagtaaaagatggtggtcatccaattcttcagtgcagcaaggggattccaactccagaccactaagtcgaacatcttcctaccctcagcagccactgcagcaccggtcaagtgaacctatcgttttaccaaagacttcttcatttacctcatttccaccacctgttgctggtggtggtagagccccttaccctgctcaaggccttacacgtcatgggagcattccatcaattggcgctgggctccaaatgggttctccgagcatgtcactttctgcttctccatatcatatggtcggaccatctcatgggctgccatacacgggaggcatgccttatggtgctcttaacctgcctgtaaacaatccagtgcagaatgattggtcgaatcatgttaaccctttcactggggagcatcttaatctactgcccaatttattgcacaaacaattatcacttcctaatagcccaatgtcgtcactcctattttctcagcatcagcagagattggcacaggtccaatcatcccatcagaattacctcaatataatgccacacgtcctatatccccatcactccgcagagattacaagcaggtttggttctgttggcagttcccattcatcaagagacaagagatcaaggtcggggaagggaaaacataacattcgattctctcaactaccatctgatactggtagccagaatggtgacagcggaggtataaagtttagatccaagtacatgtcatctgaagagatcgaatcaatcttaagaatgcagcattctgcaagccacagcagcgatccttatattgttgattactatcatcaagcttgtatggcaaaaaggggtgccacttctaagcaaaagaccaatttctccccaacatcaatgaaagatgtaccatccaagtctcgatccagcagtgatcagcacacatatcttcaggttgatgctcttggaagagtatctttttcttccatacggaggcctcggtctcttcttgaagtcgaccatccttcatctgctgatggctctcatgatcagaagtccactgtgaggcccctggagaaagaaccaatgcttgcagcaagagtcactgttgaagacgccctttgccttgttcttgaggttgatgacactgaccgtctgttgcagtctagccagtcacaggacaacattttcgaactgaaacgaagacggcaagtcctcctggaaggtctagctgcatcattgcagtttgttgatcctctcggacccagcaaatctggtcattcatctgggtcagccctgaaggacgatgttatttttctgcgcattgtttctctgcccaaaggacgtaagtttttagcacgttaccttcggcttcttgtccctggcagcgagttgacccggatagtatgcatggctatttttcgccatttgaggttcttgtttgggggtttgccatcagactctagtgcagcagaaactacagttgctcttgcgaagactgtttcatcttgtgtgcatcacatggaacttggtgctcttagtgcctgccttgctgctgttgtttgttcgtctgaacagccacctctgcgccctcttggtagctctgctggtgatggggcttctcttgttattaaatcagtactggaccgagcaactgagttactgactgatcgccatgctgcagccagctacactgtgccaaaccgtgctctctggcaggcatcatttgatgctttctttgggcttctaacaaaatactgtgtcagtaagtttgaaagtatccaacagatgtttgtcacacagacaccgagctcaggaatcggacctgaggcttccaaagctactagtaaggagatgcctgttgagctacttcgtgcaagccttcctcatacaaacgagcagcagcgccagcggcttcttgattttgctcagagatccatgccagtaacaggtttcaatccctcaggtgctagaggtgggcacatcacttcagaatctgttcctggatgatgtaactgaaggagacacacaagggcaaagagtcaatgcttttaaacattgatgagatggtcttcagctgataattgttgtatctgaagacatgcatgccccattataagttgtgagcgagcttggagaagttccgattgctcaggaaagtagccttcacttcaggttgtgacgtaagtttaggtttcagagtaatcgaatagaccagtgaaatgttccttatgtgggtcatttaatatagtacccacctgatgatatcataatactggaacaggaaatgtaccccttcacatttctactagagtcgatgttcttcgtaggccattgtggactggtttgcacatttactgggcatgtatttgtttatattctgacatactgttattgagctactcctgtcctgggtcgggctcttggcttctagtctaggtgggtggaaatgttcgggttgtttttgcttgatcatattctgtcagccttcctttcatc

SEQ ID NO: 116623 - DNA, 105 bp, Zea Mays
cttcgggatgagaattattgctgagcgtggaatattcctttgtcgcggaaatggctgcggcgcgaatatgttccgaggaacactggtctctctcaatcatcgtcg

SEQ ID NO: 116624 - DNA, 1839 bp, Zea Mays
aattgaagattttctcctgaacaaagaagtgtagtctgcgagaaaacaggacagaaggtttttggcgcaaacaaggatcatgaattggatgatgaaactggtgtacagctatctgttaaacctgcaaaaataaatgaatttatcgcggcttgcattctgttggcttcaatatgcggggaagttggtagagtggacattgtattagaggtttcgtacaaagttcttcagatgggtaaaagtaatattttgtggactctactggctctccatgtctttgcttccatgtgtggtgataagtttctcgcaccaaagagttgcaactttctcatgacaactatacggttagttgtcctgcttcttgagagcaacgacacttctctgtgccttgtgtcatcatatatccagtcaaacaagccaacaacattaccatcctgtgcacattgtctgtttaatgtggatacggtttccattgatggcttcatctcttcactgttggatgagttggatttatgttctctgcaatggaacaaccgcacctgctcaaatgaaaatatcacaaggtgcagttcgcatatggtatcaagtggacttgataccagatgtagtgaaacttgtaatatcttcaagcaaggaaaactatctgaggatactcataactacccagcagagattaatttatgctacttcaccgagctaatttctttgctcgagctctttgggatctatatgagctgcgagtggacatacaacaatgtcgttatccgtcttctggagattctggaattgtgcatgtgccgtgactattcagctgctctgttagtacttgtgagccaacttggaaggtcatttgtcgatgatgttggttacgaggagagaagtgttagtaagctaaggaacaaattatcgttattgttaacaggggcacattttacaaaatcatggagtttaagtgttcagtttactgccattggtgcattggtcagcgtccttccactgccatttgataaaattgttgccactggaagtagacaattatcaggttccttcgatgtggaaatgaaacagatttctgaatggtttgtccagttaagcagcgagcatcaatatttagctcgttccttttttagctgttagcctatatatgttggctgggccttacatggatcagtgaagaatgccctgtgcaattttgatggtcttataacatgacgttggattactcccttgctttgacactacatagaggatgatgtttattcacgggtgtggagatgtgaaagtattatgaagatcgccatttttttgccaatgctatgttcttgagtgtagagaagcaggcagcggccgttatgagattttagggacccaggataagatttaaaatagaagttttttagttatttttaatatgtaaatgttactaatacaaacactctaggtgtagctaaaaaatattcatattaatcaacaagttaaataaaaagtatggtattaccttaggttttaagtttttcatactacggtattactttaaaagtatatatatgcgaagtcgttgatgatggtgtcaatatggattttatccaataataacttctccgtacataaaatagccaaaatatttaagcttttcgaagatattttgagccacaaataattctctaacaaatttagttttgaaaagcttctttatgctgatgtcttattagtagtcatggtaaataagatttgataagcccaaggtggtatcataattctcggtttaatcttttggagttcaagtgtttggaatagccttgaatcctaagtttttggaatatccttgaatcctctatgtag

SEQ ID NO: 116625 - DNA, 3029 bp, Zea Mays
tcagagcgagagtcggtccaacggctactggttccactgtctccgcttccagactctacgttcctgtctcgttcaaaaccctaaacctttcctctccatcggactctcgccgccgccccatggcggcggaaccaagagagcccacatcctcgctggatgcccagctcgcggcctcttcctcctccgcagccggcgtaggcggccccaacccgtgctgcgcgacgcagtggaagaattgccagaaattggtgaggagccggacggcgctgcgggaggcggtgaagctcctgcaggctgagaacgagaagctgcggaaggagaactcggagctcagcaaagtgtgcaaggaggaacacctccgaggtgattcagcagaagcagctagggcaactgagtctgatgccagagatctattggaaaaggagataattgaattaaagacacagaacatgagtttgaagcaaacacaaaatacctgcaaaaataatgatgaacttttacgtatctctgaattagaggaagaaaatagaaagctcatacagattttaggagaagaaaggaagaagatcacttctgagaagaaaaaaattgaagaagaaaagtgcaaaactctagaaatgcaaaggatatggaagtcagaagcacagaagtctgaagagtatagaagagttgctgatactgaaagaaaagttgccaatgattggagagcatcatgtgaaaggttgaggagtgaagcaaatgaactcagagctcagttgactgctcaaattcagaaaacagaagaaatacttaaaagggctgaagcggagaagcagaaggtcgccagagaaaagaaacgtgctgattcagagaaatcattatctgaaaagaatagaacacttgttgaagttgagaagaaaaaagtaacagaagaaaagtgccgtgctgacaatttatttgctaagttagaggagcagaagaaactcaatgaacatttgcgaactagcatacaggttgaaacgaagaatgcaatagaagagaaaaaacgaggagaccatttgtttcagaaattagaagagatgagagaacagactgaatgtttacagagaaaggcaaatgaattctctgcaggtagagatgtaatttcttctggcaagtgtggccggcgacacattgatagaatttctgagaatgcaaacgttaagcttctcaaagagaaacttaagctgaaaaaagaacaactaaagcatgtcaagaatgtgtccaagctagataaagcaaaaactgctttaataagaagagagcttcaaagtttaaagcaagactggacacagctactgggtcggtttaacatgctggatgaccaccttgcacgtggtgttgaagatattcatgtcttaacacagccctcccaggctcccagcccctacacgcctccctacaggccagtccatctcgtgtgcacacaaccaagggaaccgttgaatcagcatccagagatacatggctttgaacagaagctgcttcctaatgattcagttcctgccccatattttcggttgcaggctgggacagttccatttggctcttctatcccaagtgaatacacttcatatcagttgcccagagaaagctgctcacgatcaatctcaggtactagttctgaattatgcccccctcttggtagctctcacagactgctgaagtcaaaatgtcagcacagatcttcatgtccaacatccatatctgatgaaaaattcatgggctcacagggcaaggataacctatttgtctcatcgacagatatcaggaaaaaacaggattcagttgttcccgagctggctcctaaaattagaaatgatagagcattgccttgtggtacgcttacagatagaagagaaacacttggtggtgataggaagagaaaacacaccaaaatgtctcaagacccctctgcttttcttccctcaaaaaatgatttgctacatttgaaatcaaaggtgcctgctaccacttcaaatgttgcattatcctttgatgatgatcctttgtgtctgcagcaaggaaataacaccatatgtgttactgaaggtgacatggataaagctccttcattcagtttcccttctaaagtgtcttgtggaggaaatggctgtactagtagcaagtttgcttcattgatcccctttgaggaaatggtcagggaaaactgcttaaagttgctcaatttggatgatgatgcagatgaggaaaagtttagaaaggcaaaggagagaccccattcaccaaacctgagcatcatccgaccccgtagaactaaactgccaacgtatgcagaacctcacagcttgggtagatctctcaacggttgtcctgccttaggatctgatgccattgattccaagacaaggtccaaagcatcggaagttaaagagcctgtaattcagaaatcgactcaaaattatatccagcttgatccgtcgtcaaatacaatcgagtgtagtggcattgctaaacctctttttgtgaatgataaatccaatgcagctgtcaatgtttcttgtagcaccagtttggttgtagtgccagcgagcacttcttttgacagccttttgcatgagcatgtggcccagaattctgtagcatcttctgctgaggcattagacagtataagcagaccaatgttatcgggaggtggtcattcagattccattttacatttgtccaaggaagtgtctaacaaaaacaactcacatctgatttgtgacaaatcaagtcctgggctgcaagctaatgttcggacaagtgaaacaacagtgaccaagccaaacaattcggtctcgaatagtttgcttcggcaccatcatggatccgaaaaccctccattgcacttagttggatttacaagaatgaaaagaagcaaaatgattaacatatttcggtattgggagatactgagttctcaatctcaaaagcattctgacgaagcttcagttgatggtccactgcttgataaagtgtcaactgacacaatgctacctatagagtag

SEQ ID NO: 116626 - DNA, 304 bp, Zea Mays
ccaacagatgactttagtgtgaacaggttgtttagttgctagaagacagtgttggtctatattccttgttgataagttctcttctttgaagcaaactggtctatcatgcctaaccgctctccttctccaaagcaacttgttctgcttcttcttgctttagtgtctataccttggatgttgattccaaaacctcttcttttgaagaaacaacatcatcaaatggaccaaggtcaccagtacgccatgcttcagagcactgatgaatcagtgggagcagggttggggggaacatcatgataacgct

SEQ ID NO: 116627 - DNA, 1063 bp, Zea Mays
atgtcagtggtgcgctgtgagttctacccagaaatcattcacagcagaagcaaaatactcctacacggtagggaagtagtggtaacatgtatcaagtcgttgcgtttttctttttctttgacccatcaggaaaatatcatctcaaattatcatcagagcacggtgtcgaggtcaatcggggaaccaagcaaagctatggacactgatatcgagttacccctccctggaaatcataataaggatggacttgccaagctacatctacatgctaccaattcccacaggttcagtcggtttttccccaacaatcattcatgaaaatacacggttttcctatgtaccttcatcccattgattaaggcatgcgtgtattttaagaagtctaaccttttaaatctttgactaacaattatagagtggaaacatagtctggtgatacattaataaatcaatttccacgcttcatcctatcaatttgagataaacttatatctagattttagaaagtggtggaatgtcaaaattccaagctaaatagcctactctattaagtagatcctaattcctccaaaataaaggaatccaaacggcccctaaagagagtccgaacttaggtggtctagacattcgtttatacactgccattttctgcctaacaataaccgttagtttctctccaaggaaatccgtcgaacatgaaacaagcatggcggtgcagcctcgcacagggcagggcacagccgtcaacagcattcgcagtgcacaaaggaatcgtaacagcaaattagctgagcaaggaagctacgtacctaaacagtacgcaaatctgactgcatccgcacactgccggccagggatagaaggcagggagactggaagacgggcagggagggaagactcaccaggtgaagtcccagccgccggatgaagatgttggcggaacggaagcagcagccatagcggcagcggttcacacaccggtcgcccccctggctgcagctccgcgagtaagagttttcgaggcagaggcggcgctcggagttggaggcgccgttggtgaatg

SEQ ID NO: 116628 - DNA, 310 bp, Zea Mays
caagaacacaacaaatgcacctataattttcgatagcaactttacacaatgaataccagctgccaccaattatcacaacttgtctacttatctccacgctgacatcaaactttgggagctatctaagatgcaatgatgctagaactatggtacacaccaacggatcagcaatatcgccagccttacataatttaaaatgcgatcaggctggcaattacaagcacaccaactaccagtagaagcacctttaagtacgcatcaacctgctggccttgtggtgcctgccgtactccgtactccggcttggggc

SEQ ID NO: 116629 - DNA, 1159 bp, Zea Mays
tagcaatgaagaagagaacattgcaggcaaatttcttggaagaaacatgaacatggagaatgttcaacgcaagaacacaacaaatgcacctataattttcgatagcaactttacacaatgaataccagctgccaccaattatcacaacttgtctacttatctccacgctgacatcaaactttgggagctatctaagatgcaatgatgctagaactatggtacacaccaacggatcagcaatatcgccagccttacataatttaaaatgcgatcaggctggcaattacaagcacaccaactaccagtagaagcacctttaagtacgcatcaacctgctggccttgtggtgcctggcgcgggaagccatagccatgtccatgccacccatggaaagaatggccgtatccatagggaaaccctgcagcaggcccataggcagacacctgcgggaatccatgcacctggaagctcagcaacgggaacaaccctccaatggccgccgagaaagtgtaattcccccaccgaccaccagccacagggggggcgccagcgcccatgaaccaggggttctggggcgggtaatgattactgtggtctggctgcggggcagtggagggccgctgcccggtcggcctgctcgggatttccacaccggccaccgaccttgcacggggtgaggtggagttgccaccacggccgtagagagggacgagcttcccctcctcgacgacggccttgcagacgggacactcctgggagtgcgcgtgcacgtggagccactcgtagaggcatggccagcagaagaggtggccgcagagggtgaccacgggatcctgcgccaggtccagacagatgttgcactcgaagctgcccgaatccttgctgctgctgccgccgccgctgttggtcctcgccacaggctcgcctgcgcggctccccatgccgccggagtcggatctgcgggatgcggagatcaatcaagccacgatccgacgacacgagcaaaataaaaaagagcaagcaggagtcgtcgctgccacaatcaagagtagatgcaattcgttcaatacccaatgcgttatgcgtggatcaaagagagagttatgtggacggaacagatccgaataaataggcaatggagcgaccatcgcgcaaacaa

SEQ ID NO: 116630 - DNA, 1579 bp, Zea Mays
gagggagggagaaacagagatcgaagagaatcagggtaatgcagatgggatcgatggaattcgtagcgccggcgttggaggagcttttgccggaactttccctcgaggagcagccacggttgcagaaccaatcccacgagcgtgaccgcatccggaagcgacataacaagcactctcctcctccccgtccgtcgttgacctcggtacggtacgtgatggatatgggatcgatgggaatggatttcgtggcgccggcgttggaggagctgctgccggatctttcccgcgaggagcagctacggttgcaaaacaaatcccgcgggcgtgaccgcatctcgaagccacgtaacaagcacgctcctcgtccccgtccgtcgccgttctcggaatgggatcagtgcaacttcatcaaaattccccaggtcctccacgctctcgcccactacaatgccaggcaccctggtggcgagttcgatgttgtgaagcccctgaagcagagccgcgtgggattccggggccaggcatggttccatgtcaacttctgggctcgccccagcagcagcagcagcaacaataacaagacaatcaagcgcttctttgctgaggtgcactacaagccaaccccgatcagcagcccctcctcgtcttcgtcatcacttgcaataactgcagttcctatagttgaaatatgcatcattatcgaagaacctctatcccaatataggcgtagctgtgccttttgtcccagctaccgagacattttacaccctaagggctgccgtaagttcgtctgtggaaacgacaaggaccggtttgaacagcgactggacccttgctgctgcactggtatggggattgggaagatgccattcactgcccgcccagacatgtctgcttttctcaacatcagtcctaagtaggaagaagaagacaagaagagagtccgggggttcaatgtcaaggctgaccacggggtccttcatgcctcctctcgtatctttaacttcaagaccatgcatgtccatcatgtcatgtgacacatatgtatggagtggagtatataactagcttagcagtgagattgaatgaagaataaatatactttactaggtgttgttttcagaaggaacaattgtgggtcaaatttccacggttaatggtgataagccacatattaatgtactacgcattttgatcagatctgtacggtgtgattcacctgaattatttgctaattttggtattagtctagagagaagggggcaaatggtgttagtctagagagaaggccggagagaagattaatatttaagcctagcaatccatgtttattctgaagaagtttcgaaaagcaaggggtatatccaattttggtattcaatttcttgccatctcaagatgtgagtaaactatataaagaactgtatgattgtacctctggttgaacttcaaaatcatgttggctatttactcctgctcgttgcttctggtacatatttgtatttatactattttaagttgaggatataaagagacccctgttcctatcctatgtattattctcagtttgtcaggaaga

SEQ ID NO: 116631 - DNA, 501 bp, Zea Mays
gaagctgatacatctaactatggggaagcagtataccacagggatctctttgagataatgcatgtacaacaactaactgaatgtgcgcaaaatgatgatggaaaagaaactaaaacatcgagtgctagtgcaaactttgatgatgcagaagctgaaacaacaaatgcaggagatgaagagttaacagaggatcagattgatgccttcattatgagtgagcagatagctgcaacagaagggaacaatgcatcaatagacagcaaatacacacctcaagttgggatggaatttaagaccaggggagatgcagagcacttcttattcttctatggttttttggctggttttaaaccagcaatcacccacactttcaggacttcaaacaaaaaaagaagcaatgaagtaacaaaggtggagctgaaatgtaacaaacatggcaaaacaaaaaagacaaaccagctgttggggacttgttctcaaatgctatgaattaagaacaag

SEQ ID NO: 116632 - DNA, 3596 bp, Zea Mays
atggcgtcgccgccggcggatccgcacccgaagaaacgtagggtcgccgacgcccaggacccaagctcctcctccaatcctgcacccacgcggcgtccttcccctgctccgcctcctcccgaaaccctaggtgctgtggcgtcttcaacctcctccccacctccgacagaaaccgcatcgctgccgccggagggggtgaggcttcaaaagcttcgcaaccaagaggagttgagaaatgtcttccagcgctacagccgtatccgcaagtacatacaggagcataaagacggcggcctcacgcccgagctggagcaggactatctctacctcatctccgcctcccgaggttgtgaaagtgtacagtgttttctatctttgccaatccctcgatttgcctcacgctgtcctactgcactcgaggcggcgactaaagttaccatcaacatgtacaattgcaacatggccactgtaaagagaggggaggatttgaaaagtgtgccatacaagacagctaaagcatgtatcattggcttaacttacatatgctctgcagcatcttctgaagaactcaagtcatctgttatgaaaggaatctgctctgtcgtttatagaactgtcctctccttcttcatttcaaccttggaggggaaggatatctatcgtatggactatacaaaacgtgcaatgcttcaggaccctgtgacgttgttagacactttaaaattggagttggacaatgctaagcaaccaacaattgataatttgtctgagctgggagctatttgcttgctttgcacattccttttgttcccagagaatatactagaagcctgttttaagctgcttgattctgcagaatgtgatgatgtaaaaggagaagggttataccttttaaatcagctgacctgtcatctgacctgtaatgctgcaaatgatgctatgggtgataagatcgatgagcagtgtcctgtgatggaaggaaatttgtccgacaccaataaatttgttgattcaaatcctgttgtttcggaaaatgccatggagccaaatgagtgttacatcacaatggccatctctaggcatccatttctgagacgttggatattatcaaggtacaagaaattatgtgattcctgtaaacctgccgtggtttctgaggtgtcatcttgtttgaaagttttgggctctttgtcagaaccttccgatgataaaagtcacacgggcaatgagtcatcagtgctggagaaacttgataacaatgtcagagaaaatatgcgaccagatgaactaatttcttcatctgagcagggagcacttgcaaaaactgagagtgtcgataattatggaaataagttttcacagaataagaatgtggacatggttcgttctgataatcagaaatctgatgagctcacggacgcaaaattggatgacttcaaaggaggaactgttgtctctgatgcacagcatcaaggttcaagatctgatttgcttatgccaaaatctgtgtatgattctgctggaggatctacatcacttacttctccaggacaacattttggaagggcaaagcatttattttctgaaccatttgatatttatggcacttatgttgcgagggatgtgatttcagtttcaaaggaactttgggttggttcactgggaaatagagcaactgaggcactagtcagatctaagtttgaggagtttggcccattagtaaattttttgttctatccatccagaaaattttctttagttgagtatagaaacatattacatgctgtgcatgcatgtggatatatgcagggttcatctatttggggcggttttcttcaagtaaagtatttagacaggcttataggtagtaagggagttattcgtggtatagctattggtgaaagccgtcatgtttatgttgctaaagtcaagaataaaaaagacaaagatgaggtctttgatgatttaaagatggcagggctgaagtggccatctgggattactgatattcctggagaaaatgctttgcttcttgaattcgagacggcagttgatgcagctactgcaaaattctatattaggcaccaagctcgtccaaatgtttgttccagggatatgaatctacctggtcatcaacttttggtgcaaaatatagaccactcagtccctgacatcgacttaatcaacgccttctctcaattcggtgaggtcatcaggtggcaaatcaatagggctgatagtaactgctttatagtttatagatcacaagatgctgctgcccgtgcgaaatcacacttgcatggagcgcggtttgggttgaagtcaattagtattgaatcaaggacatacagtgcaggatctgttcatgataaaacagtgtcacctgttgctccgttgttaggccagagtgttcctgacaacagcgtgcgccatgagatcaggaatccaatagtcccaggatatcatgcaggatatgcagcaccaggggatcgacctatttatggtccgccacctccaaatacaagcagagctccacaaggaaattttccttgccctcctgtttccacacaccatggttctgtgatgccaccgccacctattcaaacctcttttgttcgtcctatgtatcctggtccagggagtccctgggagaacactactccaaatccaccgcccttcagccacgtttctcctcgcatgatgcctggaagtaacttccgtgttaatccagcttctcttccttttgtaccctcttgtgttacccctgtttcacagcttcctggaggatcagcacagcattctgagaaaatgccaccatcactacctctgccaactgtagctcccccaccatttacacctctagatatgccaccaacacaccctccgccactacctatttcccagccaccttcagtgccgccacccccaaattctcctcctccgcaaccttttgctgattcgtctgactcacaaaagccaagttctcatcctcaatggcagggtcctcttttaaaaagtggcttgcattactgcagaatctatgcaagcagaatagagtttggatgcctgcagatatgaaaatactgtttctgaaccggcagaatggccttcagcgctagatgtgacaaagcgcacagctttccagcatgtgaagacaactttcaacaatacaccgcctaataagagagaggtctgccggctcgtgccttgttcaaatggtgatcagagagggttccgggatttcataagctatctggtacagaaagaatgcgctggcgtgattaggattcctgctgtgaaggcgatgtggacgagaatactgttcatccttcctcccacatctgatgcatgtggcatggtaggaatcccccctcttccagctgacaccatgattgttgtaactttgcccaaggaaacaacagtcgaagcatcataacaattttgtgtgctacatgtatgtatgttagctttgtcggtgtaagctttttgtggagctttgtgctccatagcagtcatgtaaaaactgtgcataattgttggctactatgcggtgttagcattattatacagtaggtcagctcagttcttctgtcaaa

SEQ ID NO: 116633 - DNA, 616 bp, Zea Mays
atgcacgaacatccaagctgcttgctattccaaagactgcaactctatgtctcaagaaaactacagacaaaggaactttctcattgtctagccagtatggtacacaccaatataactcaacttaggccacaacatatgaactcatgagcaatccacatggacccaagaaccctagcaccaagatctctagttcacggtcagtagatggaaaggagttagaggaggaggagaacctgagtatggatgagaagcaaacaccatagggatagcgtcggtcagtcaattgccattcccctcgtggacgctggccagccggtgtcaatgccaccgctggatctcgtgtagccgaatctcctagatgatgtacacgacgaattgtcggatgatgtacgcgacgaatcgttggcgccacaacaacgccacagtgcctccatgccgtcaccgccgccgcctcgcgcgccgcgagcgctcttctcacaggtcgcgtggtttctttccacgccggagggaggaggattgtatcccggctaggctgaggtgggaacggccggggtgggccggggtcgaggcccgagcgggattaaacgaacgctgctatcgtgtgggccgggatttc

SEQ ID NO: 116634 - DNA, 2249 bp, Zea Mays
cggcaacggcatcctcccttcgcaaattgcaagcaagccggcaagggacggcaccaacaagagcgcgatcgacctaccaagctagctagcgaattaaccttctcctcccatggctccgacgacggccacggcggcggcggtggggacgaaggcgacggcgctgggggtggcggcgtgcgagcgcgacgtggagaagctggagttcatcgaggacaagaccaggaacttcgacgcggagcaggtgcgcgtgctcgcggagatcctggcccgcaacaacggcgccgagtacctgcggcggcacggcatggaggggcgcacggaccgcctggcgttcaaggcgtgcgtgcccgtggtcacgtacgaggacctccgcccggagatcgagcgcatcgccaacggcgaccgctccaacatcatctcctcccaccccatcaccgagttcctcactagctcggggacgtcggcgggggagaggaagctaatgccgacgatcgaggacgagctcaacaggcgccagatgctctacagccttctcatgcccgtcatgaacctgtacgtgcctgggctggacaagggcaagggcctctacttcctgttcatcaagtcggagacgaagacgcccggggggctcccggcgcgccccgtgctgaccagctactacaagagcgaccacttcaagcaccgcccctacgacccctacaacgtgtacaccagccccaccgccgccatcctctgcaccgactccttccagtccatgtactcgcagatgctgtgcggcctggtggcccgcgccgaggtgctccgcgtcggcgccgtcttcgcgtcgggcctgctccgcgccatccgcttcctgcagctccactggcaggagctcgcgcacgacctccggacgggcaccctgagcgccaaggtcacggagccgtccatccgggaggccgtggccgaggtgctgaggcccgacgccggcctcgcggacttggtggaggccgagtgcggcaaggagagctgggagggcatcatcacccgggtgtggcccaacaccaagtacctggacgtgatcgtgacgggcgccatggcgcagtacatcccgacgctcaagtactacagcggcgggctgcccatggcgtgcaccatgtacgcgtcctccgagtgctacttcggcctcaacctccgccccatgtgcgacccgtcggaggtgtcctacaccatcatgcccaacatgggctacttcgagctgctgccgcacgacccggacgctgtgccgccgtccagggacgacccgccgccgcggctgctggacctggcggacgccgaggtgggcagggactacgagctggtgatcaccacctacgcggggctctgccgctaccgcgtcggcgacatcctgcacgtcaccggcttccacaacgcggcgccgcagttccgcttcgtgcgccgcaagaacgtgctcctcagcgtcgattccgacaagacggacgaggcggagctgcaggccgccgtggagcgcgcggcgcgcctgctggcgccctacgacgcggccatcgccgagtacacgagccaggcggacgccaccaccatcccgggccactacgtcgtgtactgggagctcatggtgcgggagggcggggcgtcgcccgacgcagccgtcttcgagcgctgctgcctggagatggaggaggccctgaacgcggtgtacaggcagggccgcaacggggacgccatcgggccgctggagatccgggtggtgcgcggcggcacgttcgaggaggtgatggactacgccatctcgcgcggcgcctctatcaaccagtacaaggcgccgaggtgcgtgtcgttcggacccatcatcgagctgctcaactccagggtggtgtccagccacttcagcccggcgtgccccacgtacagcccgcacaagaagtgatgacctaatagcattggccgtcggaggcccagactgagctactacacttctgctagtactattactacttgttgctctctacagtgcgtgtctttcggttccttctcgtgtacgtacaaggcagaggagtgaattagtcacgctcctgcttggttctgtggtaactcttactccactgctagttgttacatatacttgtgcgtgtcatgtcatttctcgaggagaaatgactagtgtttgtacctgtaagacggtatcacagtaacgtcattcttggcctaatatcataactggccttctcgatacctgtttatggtcgcatgcc

SEQ ID NO: 116635 - DNA, 109 bp, Zea Mays
attttccatgcatatacactatatacatgtatatatattgaagttcttttaccaaaaataatgggtattcatttgaataccattgaattcaattgggcccgcccctgcc

SEQ ID NO: 116636 - DNA, 1269 bp, Zea Mays
cgctcgccgtcgccccgaacctatcgcccactgcatttttccggcggaggtatgcgatgaggctgctgcaagcggaggagctatttcggaaggttctggaggtcgggtcgaagaataaggcggctcggctgctggggctcgacgtcggcagcaagtacgtcggggtggccatctccgatgagaagaacagggtcgctatgcctctgagtgttttgtgtcggacaaaaacaaacatcaacttgatggcagatgatttcaaaacattggtttcgatgtattccatagctgggttcgttgtgggctatccattcaaaatctatggtcaaccttgtgcaagtgcaatccaagtaagtcttgctggggaactttgtaaaacagggaaacttgatgatctgccctacgcatattgggatgaaaatttcacctcaaagtgtgtagaagccctcttgcatcccctgaatctaaaagacttggacgatgccaaaacaatgacagacaaatttgctgcagtctgtatactccagggttatcttgacaacatgaacagaaaactgagatccacagataagtctgaagcataaaggtggcacctaagattccagtttgaactaaaccaaagagcaagggaaccttttttttgatagaacaggaggggagggcccctactgaaaattttatttaaaatttgaaaagaaaacaaagtttagaacaaacaagaagacaaattacagggggttagggagagtttgtactgccattgttttctactgccattgttgaagccaagtcgggatggcagaatcaaatctacccaaagctctgtgaatgacaaggagcaattcatttgcaaactcctgcttgcaatgttgcaccgttggatctttgttttgaaaaagccaagcattgcggcacttccaaatgctcaaagtcatgagaataataacctccatagagaatgggacattgagttgctgttttaggtttgccgcagcctcctctggattaacaattctaggtggaatcagaccgattgagtgccagcaggccttcgcgaagttgcacctgaggaatagatgataaaaagtttcttccttctggcagatgcagttctcgcaggtgtaaaactcaagagtcatgttcttcctcctaagcatattccttgtgttgagcctattttttagccatagccaataaaagactttatgcttaggttgacatttgttcttccagagcgatctgtaaatctgatgaacttgagactgacccatc

SEQ ID NO: 116637 - DNA, 1771 bp, Zea Mays
cgctcgccgtcgccccgaacctatcgcccactgcatttttccggcggaggtatgcgatgaggctgctgcaagcggaggagctatttcggaaggttctggaggtcgggtcgaagaataaggcggctcggctgctggggctcgacgtcggcagcaagtacgtcggggtggccatctccgatgagaagaacagggtcgctatgcctctgagatttggtaaactgtgcgagtctgttacacccgaccttcatccgttttccctttgctcaatcaggctgggtcaagcaggtcagactatatatctgatagggtgttttagtctaaaccttttttctcttatcccttgtgtacttctctggagttttgtaacaatttcctctgttgctgtcacacagttaagtctgagaagattcgaatatcttcctttccttgtcccttgtgtacttgcctggagttttgcaataattgcctctgttgctgtcacaaagttaagtctgagaagattcagattacaagctcaacaagataatttgttgttttatggatattggctatattcctaaaatctacttagtttctttatagccaaatctatatcttgtgaaaaaaatgtaacaactgcaattcagacgatagtttacattcatgtacttgttagaaaaggacatgtatcattatctgtggctaagatccttattgaatgaatcttgcagtgttttgtgtcggacaaaaacaaacatcaacttgatggcagatgatttcaaaacattggtttcgatgtattccatagctgggttcgttgtgggctatccattcaaaatctatggtcaaccttgtgcaagtgcaatccaagtaagtcttgctggggaactttgtaaaacagggaaacttgatgatctgccctacgcatattgggatgaaaatttcacctcaaagtgtgtagaagccctcttgcatcccctgaatctaaaagacttggacgatgccaaaacaatgacagacaaatttgctgcagtctgtatactccagggttatcttgacaacatgaacagaaaactgagatccacagataagtctgaagcataaaggtggcacctaagattccagtttgaactaaaccaaagagcaagggaaccttttttttgatagaacaggaggggagggcccctactgaaaattttatttaaaatttgaaaagaaaacaaagtttagaacaaacaagaagacaaattacagggggttagggagagtttgtactgccattgttttctactgccattgttgaagccaagtcgggatggcagaatcaaatctacccaaagctctgtgaatgacaaggagcaattcatttgcaaactcctgcttgcaatgttgcaccgttggatctttgttttgaaaaagccaagcattgcggcacttccaaatgctcaaagtcatgagaataataacctccatagagaatgggacattgagttgctgttttaggtttgccgcagcctcctctggattaacaattctaggtggaatcagaccgattgagtgccagcaggccttcgcgaagttgcacctgaggaatagatgataaaaagtttcttccttctggcagatgcagttctcgcaggtgtaaaactcaagagtcatgttcttcctcctaagcatattccttgtgttgagcctattttttagccatagccaataaaagactttatgcttaggttgacatttgttcttccagagcgatctgtaaatctgatgaacttgagactgacccatc

SEQ ID NO: 116638 - DNA, 2562 bp, Zea Mays
ccttcccctaactccgccgccactgccgtccgcgctcgccgtcgccccgaacctatcgcccactgcatttttccggcggaggtatgcgatgaggctgctgcaagcggaggagctatttcggaaggttctggaggtcgggtcgaagaataaggcggctcggctgctggggctcgacgtcggcagcaagtacgtcggggtggccatctccgatgagaagaacagggtcgctatgcctctgaggtaagcacctccaacaactgctgcccgcggcacactgtgctcgctgcgataagtgctatgtttagaggatttgattttcttcctatgttaacttgtgtactcactgtggtaatccaacataagctcatatgtgccatctcaagatgcagatgcaggttgaaatatgaatgtgtgtgcaaaaacgttttttggccaattggcctccttaaattatttcagtccaaattttttttggcccgcttaaattgcagtggtaccaattcatatgtaaacttagtcaagatagtattcaatgattggatcgaggtgttttatttgtattctgcatattaaagcgacagaaatggtgtgaattgtcgggtggtagatgtggtgctatcctattatgatcttcttttggatattgtgtatgcacctctgaattggtggggaaaggatatgcaacaacatcctatggaatgcatttggtctactcaaccactttatttgcatcaattgtttaaaactgcatgaataataaaaatgaaaagtataaattatcatattggttgggtaaatggaagactccaatattctgtggaatttgatttctttacatatatatttgattcaaggaccacaagtgtactcatccctatgtgtagtagattagaaatagagatgcaggtactcagaaaacactgctagacatttaacagtacaagataaacatggctactgatccatctgtgtatttgttttttctcatgtataacatagatttggtaaactgtgcgagtctgttacacccgaccttcatccgttttccctttgctcaatcaggctgggtcaagcaggtcagactatatatctgatagggtgttttagtctaaaccttttttctcttatcccttgtgtacttctctggagttttgtaacaatttcctctgttgctgtcacacagttaagtctgagaagattcgaatatcttcctttccttgtcccttgtgtacttgcctggagttttgcaataattgcctctgttgctgtcacaaagttaagtctgagaagattcagattacaagctcaacaagataatttgttgttttatggatattggctatattcctaaaatctacttagtttctttatagccaaatctatatcttgtgaaaaaaatgtaacaactgcaattcagacgatagtttacattcatgtacttgttagaaaaggacatgtatcattatctgtggctaagatccttattgaatgaatcttgcagtgttttgtgtcggacaaaaacaaacatcaacttgatggcagatgatttcaaaacattggtttcgatgtattccatagctgggttcgttgtgggctatccattcaaaatctatggtcaaccttgtgcaagtgcaatccaagtaagtcttgctggggaactttgtaaaacagggaaacttgatgatctgccctacgcatattgggatgaaaatttcacctcaaagtgtgtagaagccctcttgcatcccctgaatctaaaagacttggacgatgccaaaacaatgacagacaaatttgctgcagtctgtatactccagggttatcttgacaacatgaacagaaaactgagatccacagataagtctgaagcataaaggtggcacctaagattccagtttgaactaaaccaaagagcaagggaaccttttttttgatagaacaggaggggagggcccctactgaaaattttatttaaaatttgaaaagaaaacaaagtttagaacaaacaagaagacaaattacagggggttagggagagtttgtactgccattgttttctactgccattgttgaagccaagtcgggatggcagaatcaaatctacccaaagctctgtgaatgacaaggagcaattcatttgcaaactcctgcttgcaatgttgcaccgttggatctttgttttgaaaaagccaagcattgcggcacttccaaatgctcaaagtcatgagaataataacctccatagagaatgggacattgagttgctgttttaggtttgccgcagcctcctctggattaacaattctaggtggaatcagaccgattgagtgccagcaggccttcgcgaagttgcacctgaggaatagatgataaaaagtttcttccttctggcagatgcagttctcgcaggtgtaaaactcaagagtcatgttcttcctcctaagcatattccttgtgttgagcctattttttagccatagccaataaaagactttatgcttaggttgacatttgttcttccagagcgatctgtaaatctgatgaacttgagactgacccatc

SEQ ID NO: 116639 - DNA, 1964 bp, Zea Mays
gaaagggctacatttcaatctctcagacactagacacaacctatctactccaagatccacggcggcgtgctggcctactctaagatccgccggcgcgtcgtggcggctcctccgcgtcccgcctccgaggccgcgggcggcgtcaggctgatctgggtggcgcgcggcgccggggagcgccccatcgtattcgtgcctctcaagcctaggccatggagggggtatcatcagctccagaaatggacgaggctatctcaactgaccaatcaagcagatcaacaaaaagaagggctaaagtgtgggatcatgttgattcagagctaatagatgggaaagagaaggcggtttgcaaatactgtaaggcccacttatcttctgctgcgggtaaaggtacaactcatctaaataggcatatttctgtgtattgccatgcaattccaccagaagagagacaaaggttcttagcgacccaaaaaacaaagcctgatgttgctcatgttttcgacccagtagtctttcgtggtctaatagccaagtacttccttagcgcagagatttcatttcgaaagtgtgaagatccatcctggaaagaaatgataaattattgtcaaccatcttttcgattagtcggtcgacagactgtccgttcagattgtatgttgttgtatgaagaggagaagttgcagttaattgagcagtttacaaagttgaaatctcatgttagtttgactgctgatctttggtcctctaaccaaaaccttggatatcttggtgtaacagcacatttcattagtgaagattttgagttgcacaaaaagattattgcattcaagaagatttccttcccacatacatcttatgctgtgcaagatggtattacctcttgtttgctagagtggggattggttggtgatttgtttaccctgactttggataatgctagtgtaaacaatagagcaatgaaagatatgcgagatgctttgggcagccagatgtttttcagtggtgaacacctccatgtgaggtgttcttctcatgtgctcaacatcatggttcaagctggactaaaggtcgttccaaatgcagtcgggaaggtgagggacattatcaaggtcgtaatatctacaccatctcgtttacagatcttcaattctattgttcaaacgttgggtcttagaagtaaatcggggctgattcttgatgttccacatcgttggaatgcaacctatgatatgctaaatgaagccctaaaatataaggctgctctgaacagatatgcagtagagcaacaccatgaatgtcccactgaagaagattggtcgaaggcagaagctcttcatggttttctacaagagtttagtgatgcaaccaaagcattctcagcggataggcatcccacagctcatctttttctcaagatgttgctcgttatccgaggtgtgctgcttgatgagaattataactcaaatgaactccttaatgagatggcaaatgttatgtataccaagttccaaaaatattggataaatcctaatattgtgttgctcatagctgctgttctagatccatcaatgaaaactgaatttgtcaagttctatttctacacagttggtgacaatgttgatatgaagatgagggagctcaaaaggtacttgaagaaatattacctagagtacgagaaaatcatgaggagtcatagtttgcatgtctttattactcccgatgatcagatgagaagtgagccttctacctcttcacctctttgtggtaaaagaagggtggaacatgcatttgctcaatttgcatctcaaaatgcgaatgcccgtccagagcgaacagaaatggatacatacttggaggaccctaggatccttatcaagccagatgaatgcttcaatgttttaggatggtggaagaaaaattcagatgcttatccaatattgtctttaatggctagggatttc

SEQ ID NO: 116640 - DNA, 279 bp, Zea Mays
atgggtggaagaaaaattcagatgcttatcctaatattgtctttaatgcctagggatttcatggctattcctgtgagtacggggtcctcagaatctgcctttagtgcagctggtagagtccttgaaaaaaataggacatcactatctcctgaaacactttacgctttagtctgtgctaaagactggttgattggattcaatgacgaagaagaaggtgaaccaatgactggaaagcgaatgtttgattcagatgatgaggaatatgattgggaaatttga

SEQ ID NO: 116641 - DNA, 817 bp, Zea Mays
gggttctttatctttcaagttctcatttgcgcttacgatttattattgtaacagcataacattcactttcttcaagaggtcctccaaaacagacggtctgatctgctggaatggggtgtcataatactgctgattattgagattgctatctcattatatgaaattgccaaggactccatgatcgattgagagctctgaacaacacctctattcatcctcgatcatcccattatgctaactccagatccactgttttaacaaaaaaaggaaaagaatgaccccagcttccatattttctgactatccatctccaccctttggatttctaaccttagatgaaaggaagttgggaatggcgttctggcttgagtttatttacatcctttaattctacaactccaaacgaaaagaagtttggccaattttcctatgtccaatgagttcccgggcagccaggttttccaatttgagtagaatctagttttcctttcaatattcatgccaggtgttcttgatacatgttcttggtgccactttttagtatcttgataggactgtcagctctttttttttgggggcaaggctgacgccaggcagctgcaactggacctgatggaaaaatcatgaaagtttttatcaaatggctttgtaatttgtacaaatacttagcgtgggaaggttccatttggtttaaccatactgaattgctcgttccattttgcgtggtaattaaccatgcatactgtaagtatgtgtagtacacttgatgcctatgagtgagagtgaattagatatttcttctagtcaaaatctatgc

SEQ ID NO: 116642 - DNA, 1183 bp, Zea Mays
acagattatgcagtggttgagaaaccatccttgacaacatggatgaaaggaggacttgattatatagttcttaaaagtttagatacagacgggattcgcataatttcaagcgttcttggtcaaagtatcgcccttgatcactatattcggcaggtcgatgatatggttgaggaattcactgaaattaatcgtgtcatggagaaaaccggtaactttaccatgcaaagaaaaaaactctttcaacttgtgggtaaggccaattctaatcttgcggatgttatcatcagacttggtctttttgacaggtcagaaattgcttggaaaaatgcaaattatgcacaaattctagaatatcttcgggaggaatatgaactgaatcagcgttttggaagccttgacttcaaactgaaatttgtggagcataacattcactttcttcaagaggtcctccaaaacagacggtctgatctgctggaatggggtgtcataatactgctgattattgagattgctatctcattatatgaaattgccaaggactccatgatcgattgagagctctgaacaacacctctattcatcctcgatcatcccattatgctaactccagatccactgttttaacaaaaaaaggaaaagaatgaccccagcttccatattttctgactatccatctccaccctttggatttctaaccttagatgaaaggaagttgggaatggcgttctggcttgagtttatttacatcctttaattctacaactccaaacgaaaagaagtttggccaattttcctatgtccaatgagttcccgggcagccaggttttccaatttgagtagaatctagttttcctttcaatattcatgccaggtgttcttgatacatgttcttggtgccactttttagtatcttgataggactgtcagctctttttttttgggggcaaggctgacgccaggcagctgcaactggacctgatggaaaaatcatgaaagtttttatcaaatggctttgtaatttgtacaaatacttagcgtgggaaggttccatttggtttaaccatactgaattgctcgttccattttgcgtggtaattaaccatgcatactgtaagtatgtgtagtacacttgatgcctatgagtgagagtgaattagatatttcttctagtcaaaatctatgc

SEQ ID NO: 116643 - DNA, 884 bp, Zea Mays
gcttctcgatacattcacctactgtcatttgtccatgttttttgctaggtcagaaattgcttggaaaaatgcaaattatgcacaaattctagaatatcttcgggaggaatatgaactgaatcagcgttttggaagccttgacttcaaactgaaatttgtggagcataacattcactttcttcaagaggtcctccaaaacagacggtctgatctgctggaatggggtgtcataatactgctgattattgagattgctatctcattatatgaaattgccaaggactccatgatcgattgagagctctgaacaacacctctattcatcctcgatcatcccattatgctaactccagatccactgttttaacaaaaaaaggaaaagaatgaccccagcttccatattttctgactatccatctccaccctttggatttctaaccttagatgaaaggaagttgggaatggcgttctggcttgagtttatttacatcctttaattctacaactccaaacgaaaagaagtttggccaattttcctatgtccaatgagttcccgggcagccaggttttccaatttgagtagaatctagttttcctttcaatattcatgccaggtgttcttgatacatgttcttggtgccactttttagtatcttgataggactgtcagctctttttttttgggggcaaggctgacgccaggcagctgcaactggacctgatggaaaaatcatgaaagtttttatcaaatggctttgtaatttgtacaaatacttagcgtgggaaggttccatttggtttaaccatactgaattgctcgttccattttgcgtggtaattaaccatgcatactgtaagtatgtgtagtacacttgatgcctatg

SEQ ID NO: 116644 - DNA, 290 bp, Zea Mays
acggtggggtcgcggagcttgccagctttgtggctgcaactcgccagcctgatggggcggcttcgcgcgtgctgccgtctccaccgcttcctcgcgccgccgccggcacaagtgccatcaccgggacaatctctggcccgcgggtccaacaccgctaccgctcacgtagcgcctttctcgaggcttctctcgtcggccgcggccgttgcgccccacgacacacgcgactcgggcctcggcggttcggcgtactgggcctggattcgcgccgggaccgagtcgggccccgc

SEQ ID NO: 116645 - DNA, 453 bp, Zea Mays
atggccaagccgtcatactcagctttgccggctgccgctattaaagcgtaccacccaaaaacggagagaggccgagcgccagtaatgaagcactcgcattgcctctttttgcttttcttggtctccatcctcgtggcctcgtcggcggtcaccgtatcgcctaacaaggcggcggcacgggagaaggcctggaaggcgagggcgccggtgcagctggccgacgaggccttcctcgcccgcctctgcgacgaccgcgagcagcagcgccggcgggggcggccaccgcggatcctcccgttgtgcacgcagcttcacgccaggcgccaagcaggcgcccaccagtatcagcacctgccgatgccgccgcccagccgcaacgacgagcagatagacccgcgctacggggtgtccaagcggctcgtgccgagcgggcctaacaggctgcacaactga

SEQ ID NO: 116646 - DNA, 1239 bp, Zea Mays
ttatcatcttaatggcattatcctatgttttgttttgttgggtttgacaaatgttagatgtttctgtatcaattctctccccaccgtttaagtagcctactgtattagtcttgcatttgtttttccatggatgattgtatagtcacaaacaaaagaaggacgtatattaggatctttttatgtcgctgtgggtacgaggttatggggttaaatttaattatttgctttccaatgaatggcatatacgtatacaattgtagatgcacttctaccaggaagaaatttatagccgttgttgttaggtggctggatgcagcaacatgtaaatgttgcaacttgctatctctagctttcatgaaaatagcccttgacagtttcagttaagaatgctaattgaaagttcatggttctgatttcggctaggaagattatgttacgagagattttggagtcaattctgtaatgcctcataagtataaagggatgtgtgatgtggtctacgggtggactggaagggtgtgacatcccatccagcatttgttaaagtcttcctcagcatatgaacggaccaatgatatcctctttctcagatttatgctacctgcggactggatttctctttcaggatctataggattgaacagaaccactgaacactgataatctctcttccttagcatttgttacaacccgatgcactggtctcctgaagatcccattgttcagtatctgtgtaaaaagaaataacagcagagccttttatcctaagaaagttgggctgtcccggtggcgaggatggccggccgcgggggcagggcaggggcaggaacgccatccatttggggcacccccggcatcgcaacttctctcgcctcctaggaaatcacggagcttccgaacagggctcctacacgatctacatgaagattgtcggggatgacaacgaggagctgagctgcatctcgtttgggttcagcatcagcttcgtcgcgtccgagcctgggcatgagaggcagccagcccatggatgattctgatgaggacgagactgatgattccgatgaggacgagacagatgaaaccaattgccttttaatggtctatgttatcattcaaaattgtcttatgttgacactatgtatatatgctattcacaataatagagccattcatactgttgggcgccttggatgaactatcttttcttcaacaaagatggagctcatgcagattgattta

SEQ ID NO: 116647 - DNA, 589 bp, Zea Mays
ggcgcccgccgctagcaagcccgaacgagcctggtcgttctcctccccgtcctaataatcagggaaaggctcgccgcgaggctccgcccctatcgcgcgccgccagcgacagagaatgcttgcggtcccggtggcgaggatggccggccgcgggggcagggcaggggccggggcaggaacgccatcgatctggggcgcccccggcatcgcagcttctctcgcctcctaggaaatcacggagcttccgaacagggctcctacacgatctacatgaagattgtcggggatgacaacgaggagctgagctgcatctcgtttgggttcagcatcagcttcgtcgcgtccgagcctgggcatgagaggcagccagcccatggatgattctgatgaggacgagactgatgattccgatgaggacgagacagatgaaaccaattgccttttaatggtctatgttatcattcaaaattgtcttatgttgacactatgtatatatgctattcacaataatagagccattcatactgttgggcgccttggatgaactatcttttcttcaacaaagatggagctcatgcagattgattta

SEQ ID NO: 116648 - DNA, 901 bp, Zea Mays
ggcgcccgccgctagcaagcccgaacgagcctggtcgttctcctccccgtcctaataatcagggaaaggctcgccgcgaggctccgcccctatcgcgcgccgccagcgacagagaatgcttgcggtcccggtggcgaggatggccggccgcgggggcagggcaggggccggggcaggaacgccatcgatctggggcgcccccggcatcgcagcttctctcgcctcctaggaaatcacggagcttccgaacagatttatgctacctgcggactggatttctctttcaggatctataggattgaacagaaccactgaacactgataatctctcttccttagcatttgttacaacccgatgcactggtctcctgaagatcccattgttcagtatctgtgtaaaaagaaataacagcagagccttttatcctaagaaagttgggctgtcccggtggcgaggatggccggccgcgggggcagggcaggggcaggaacgccatccatttggggcacccccggcatcgcaacttctctcgcctcctaggaaatcacggagcttccgaacagggctcctacacgatctacatgaagattgtcggggatgacaacgaggagctgagctgcatctcgtttgggttcagcatcagcttcgtcgcgtccgagcctgggcatgagaggcagccagcccatggatgattctgatgaggacgagactgatgattccgatgaggacgagacagatgaaaccaattgccttttaatggtctatgttatcattcaaaattgtcttatgttgacactatgtatatatgctattcacaataatagagccattcatactgttgggcgccttggatgaactatcttttcttcaacaaagatggagctcatgcagattgattta

SEQ ID NO: 116649 - DNA, 101 bp, Zea Mays
cacatcttgtaaaattatcacttttctttggactacttgatatctggttgagaagatccttttaccttgcaggagctgcacctgcactactatgtagtgac

SEQ ID NO: 116650 - DNA, 2304 bp, Zea Mays
ctagtgtttatttgctctagtccctatcacctttaattgtgaattgtgatgctagctttatctagtttttttttccagtttctgtttccctctgctatttacatgattgtgtttgaaagtttcagagttttctgttttagcatcgtatgcttgattttcgcaaattgatgcttaatcatcgatttccatctatttggtatgatatggttttcattatctttacttctttgggtaactagctttcccaaattgaagtctcaactttgaaacgttggagttagacctgatctttgtgttaaatatgatgcagggaaggttcataatatgatggccgcagagttagtaaagcagtattcaaacatcactctgggagaagataataagatatgtgatattaaacaagcgcttaaggccttgagaaagaagattcttagtttggattttgacaactccatgcacgtccatgacccacaggactcatttgagtacttggaagtgctgcgcaaaatcaaacaactatctgaaaagttaaggaccttagaccctggtggggaagccaaacaactggatgaactcactgtgtatgcatatgaaatttctgaaatggcaatggcaagacttgaagaggaatttatttatctccttacacatttcaaacaaccattagaacaggaggttctctcttttcgctctacagaggatggtagtgtggaagacttttcaagcagttcatttagtgaggaaccatcggatgggaaggcaacaccgaatgatatcagtggaggaccagaatattttgtgcctgatttaattcaacccggtgcactctctgctgtcaagtccattgctaaattcatgttcctgaatggctatgataaggagtgtttacaggcttatataaactcacggcagactgcaatagatgagtactttgggtctcttcgtctggaaaaactcagtatagaggagcttatgaacacaagctggaataagttgaattcattaataaagagatggaaccgggcaatgcgtggttttattcgagtatatcttgtaagtgagaaacggcttagcaaccatgtctttagtgaacttacagattcaactgctgacttgtgcttctctgagatttcattcaactcagttgtacaacttctgagcttttatgtatctgtagcaattggaccccccaaaacagaaaagctttttcgattgcttgatatgtatgaggtcctggatgatcttctccctgaagttgaatccttgtttgaaccaaagtacggtgatatgatcctgaatgagtatcatgaagcactactgcaactgggagaatctgcaaggaagacatttgcagaattcaagtgtgccatccaatcatacacttcatccaatgcagtagctcgtggagaagtgcatccacttacaaagtatgttatgaactacataaaggctctcactgcatacagcaaacctcttgattcacttctcaaggacacggatcgaagatgcctgacttctgatattcagttgatggcaaatacatatcctaatttcacggcaacagctttgcatctacagtctgttactgcagttttggaggcaaatcttgaagctgggtctagattgtaccgagatgatcgactgcagaacatcttcatgttgaacaacacccactacatggttcagaaagtgaagaactcggatctcaaaagctttcttggtgatgactggatccggattcataacaggaaatttcagcagcaagctatgagatatgagagggcatcatggaataatgttctctcttacctcagtgatgatggcttgtgtgcttctggtgatgctgcttctcgcaaaaccatcagggagaagataaaaaatttcaatctgtcctttgaagaggtttaccgagttcagacagcatggtctgtcccagatgaccaacttcgcgacgacgtccggatttcaatatcactgaaagttatacaggcctataggaccttcgtgggaagatattcaggctttcttgatggctcaaggcatcgagatcgttatgtaaagtacagggcggaggatctggagacacttttgctagacctttttgaaggaactcaaaagacactgcagcattcttgtcgagtgtaagattaaaccagttcttgaagaagagatgcctcagtcttttctgggttccttctttggtttgtaatggactaatggtactgttgaatgagtatagtgatatcctgttctgccaaactagaatgattttgttagagatagcattctactgttcacgaaact

SEQ ID NO: 116651 - DNA, 2427 bp, Zea Mays
cgcgtttcccgttggaacggaatgccgcagcctgtcgtccttgactccgtcggggagagggacggacggcgacgggcagctacaggacgatcgagcgacagacccggcaccacggcatcccgttccaattgcgtccgctgaccatccccatctccccaccggtgtcctcccctccctcccgtcgccatcgcttccctcggttgacttgacttgtactgttccacacacctccagtgacctgacaaccacaccgcaataatcgtattcagttctttttctcccttttgtactttggggtttgggcctctctttctcttcccctgcgagcctctttcctcgctcttgtctcctgggcgagttctgaatctgggatcggcggtaacgtgggcgaccgccggagtgggcgaagcgcagcagctcttcggtgccggtgggaaggttcataatatgatggccgcagagttagtaaagcagtattcaaacatcactctgggagaagataataagatatgtgatattaaacaagcgcttaaggccttgagaaagaagattcttagtttggattttgacaactccatgcacgtccatgacccacaggactcatttgagtacttggaagtgctgcgcaaaatcaaacaactatctgaaaagttaaggaccttagaccctggtggggaagccaaacaactggatgaactcactgtgtatgcatatgaaatttctgaaatggcaatggcaagacttgaagaggaatttatttatctccttacacatttcaaacaaccattagaacaggaggttctctcttttcgctctacagaggatggtagtgtggaagacttttcaagcagttcatttagtgaggaaccatcggatgggaaggcaacaccgaatgatatcagtggaggaccagaatattttgtgcctgatttaattcaacccggtgcactctctgctgtcaagtccattgctaaattcatgttcctgaatggctatgataaggagtgtttacaggcttatataaactcacggcagactgcaatagatgagtactttgggtctcttcgtctggaaaaactcagtatagaggagcttatgaacacaagctggaataagttgaattcattaataaagagatggaaccgggcaatgcgtggttttattcgagtatatcttgtaagtgagaaacggcttagcaaccatgtctttagtgaacttacagattcaactgctgacttgtgcttctctgagatttcattcaactcagttgtacaacttctgagcttttatgtatctgtagcaattggaccccccaaaacagaaaagctttttcgattgcttgatatgtatgaggtcctggatgatcttctccctgaagttgaatccttgtttgaaccaaagtacggtgatatgatcctgaatgagtatcatgaagcactactgcaactgggagaatctgcaaggaagacatttgcagaattcaagtgtgccatccaatcatacacttcatccaatgcagtagctcgtggagaagtgcatccacttacaaagtatgttatgaactacataaaggctctcactgcatacagcaaacctcttgattcacttctcaaggacacggatcgaagatgcctgacttctgatattcagttgatggcaaatacatatcctaatttcacggcaacagctttgcatctacagtctgttactgcagttttggaggcaaatcttgaagctgggtctagattgtaccgagatgatcgactgcagaacatcttcatgttgaacaacacccactacatggttcagaaagtgaagaactcggatctcaaaagctttcttggtgatgactggatccggattcataacaggaaatttcagcagcaagctatgagatatgagagggcatcatggaataatgttctctcttacctcagtgatgatggcttgtgtgcttctggtgatgctgcttctcgcaaaaccatcagggagaagataaaaaatttcaatctgtcctttgaagaggtttaccgagttcagacagcatggtctgtcccagatgaccaacttcgcgacgacgtccggatttcaatatcactgaaagttatacaggcctataggaccttcgtgggaagatattcaggctttcttgatggctcaaggcatcgagatcgttatgtaaagtacagggcggaggatctggagacacttttgctagacctttttgaaggaactcaaaagacactgcagcattcttgtcgagtgtaagattaaaccagttcttgaagaagagatgcctcagtcttttctgggttccttctttggtttgtaatggactaatggtactgttgaatgagtatagtgatatcctgttctgccaaactagaatgattttgttagagatagcattctactgttcacgaaact

SEQ ID NO: 116652 - DNA, 305 bp, Zea Mays
gtgacttattttagaaacttgatctcacaaactttctcttatttggtctctatatgatggaattatgtcattttataatctctgttcattcagtcaatcgttgtgaactcttttcgaatagctcactttattggtcgtgttgtaccaaaacatatttgcatggagtaaacaataacatcagttagccaaatcaaaaaaatatattatatagagagcagagacaattaataaaaaaatcttgaatttttttatggatagtttacgtgggtattgttgtaagccgtcgcaacgcacgggcaaccgac

SEQ ID NO: 116653 - DNA, 743 bp, Zea Mays
gataaagaagatcccaaagccacacaagctagagaacaatgcagaatggaagcggtggcggcggcggcctcgctgccggagtgcggctccaccggtggactgctcatcagtggcagcagaagtgcttcactgcagctgcccccgccgacgctcgcgcaagaaggcgttcgtggcgcgcttttgcacggcctcgtcgaagtgatcaccgagaatgcgaggccgccacggagaccaggtccaattctagaaagaaaacaatgtcgttatacctccaactccaaccagtacgtcatgctacaccactctctgttggttcgtatcgtgggtttgtgcagcacgaaggagacgtacgtgctgatggaacccggcatggacgaggcgttcgtgtccagagaggagctagaggagagcctcacaagaactggcccgtggacaccctatccctggacctcgccaggttcggcatggtcgacgaggccgtctcgtacctcgtcaggtccgtgtgtgtgctcgagatcgatggagacgttgggtccgtggagtggtaccaggtccagttggactagttgccaccctagcttggatgtatgtcagtgagaaacccattaagagcctttttcacgcccctcagcttctcgcctctagacggccaccccacgcagatatggcgacgcgaaccgtgagcttcccctcctttgcggtctcttaccagtgccgaggtgcgaggaggatgcatttacgtt

SEQ ID NO: 116654 - DNA, 526 bp, Zea Mays
gataaagaagatcccaaagccacacaagctagagaacaatgcagaatggaagcggtggcggcggcggcctcgctgccggagtgcggctccaccggtggactgctcatcagtggcagcagaagtgcttcactgcagctgcccccgccgacgctcgcgcaagaaggcgttcgtggcgcgcttttgcacggcctcgtcgaagtgatcaccgagaatgcgaggccgccacggagaccagcacgaaggagacgtacgtgctgatggaacccggcatggacgaggcgttcgtgtccagagaggagctagaggagagcctcacaagaactggcccgtggacaccctatccctggacctcgccaggttcggcatggtcgacgaggccgtctcgtacctcgtcaggtccgtgtgtgtgctcgagatcgatggagacgttgggtccgtggagtggtaccaggtccagttggactagttgccaccctagcttggatgtatgtcagtgagaaacccattaagagcctttttcacgccc

SEQ ID NO: 116655 - DNA, 406 bp, Zea Mays
gataaagaagatcccaaagccacacaagctagagaacaatgcagaatggaagcggtggcggcggcggcctcgctgccggagtgcggctccaccggtggactgctcatcagtgtcactcactgcctgctgccaggggccaagtgcttcatcgtcgtttgaccttgcgttccattgaagactcgttttctcaaaaattccttccgttctagattaagacctgctctagatcgtcacggctttggtaggagaccttgaagcgtcctttaatcgacatcttgaataattcatgtagtcagcttggtcataattgttcgtatttgtgcaactaaacagcacggctcgaagtcttttgactttctaagcgacatgtacaattgtggcatagcaagagccggctacaatctca

SEQ ID NO: 116656 - DNA, 771 bp, Zea Mays
cccgtcacgcccggcggccaagaatcgtcgtttgcctttgaataaggctctagatgcaattgggggtgggtcgtagtccgcccgtggagctactcgataggttccacaccggcgtctcgtcgtcgggtgtcaatcctcgctactcctcattctgcatcacaggcgacgcaccagctttctttgggggaacatggaggactacaggtgaaattccttctccaattgttggaatctactagcactcaaatgtgaagaacagagacagaattggaggcagaagaagctcagtagctagacgcaagaagccaagaacttggggaacatgtacgctgccttttatattttctatttttttcagcgctcaaacgctccggcgcccagacaccggttctcttttcttcagctcccgttccggaagccttgcaaccctgaccccttgagcagcaacaggatcaggcgtgcactccaccgccatatccatcacaattcacaacatctgacagaggcaaccaccggctcacaacagattgcagcacagtctttggttctctgtttttgtgcgtgtgccgtaagaggttgagcgagagacgagagtgttcctgggctgcccatcaatgttacacgtgttaagtcatattattcagtcactgttagattttgttgttgttttcattgatgtaagtcatattattcagtcactgcaaatagcctcctagtaaaaaattagtcaaatgatctcagcatataaaggtctctgatcacgagtcaagc

SEQ ID NO: 116657 - DNA, 92 bp, Zea Mays
ccggtgcccagcctccatgtcgccaccgtctgcatgctacgcgcagccgccccgcgcgctagctcgttcagccaccgtgctgctacccagcg

SEQ ID NO: 116658 - DNA, 1797 bp, Zea Mays
atggaggacagagagtgggcggacaacaaggatcgatacgtgtcctgcaccttccgcgccgacgtcgcgacggactgccgccgcgcgcaggacctggacatcgtttgcagagcgcaccaggtggtggaggacgaatatgagttctctgtcgaccgacagctcgtcaccttcttctctgcccccaactaccgcaagctcggctgctccttcaccatcatcaagctgaaggcggacagaaacagcagctcgcccctcgggtgttcgaccaaatgtcccagccaggcactgcaccccattgtcaagcccaatctagtagtcgtgctgaatattgcaggtgctgggggcaagttatgtggaggatttaatatcaaagttttcacaagggttcatcagactggggatgtatcgcttatgtcaaacgtatccattgagcttgtgtcaaacatgatggaacagggcaaacaaccttctgttgcagccattccaggtcttgcattgggtggtggcctagagttgactatgagttgtcaggctcaaatacctactcatgttgctcacaccatctgctcgcttgttaacaacgttatggcatcgcaggctcatgtcgtcggacaagggatcgtagaccgcgccgcgttcagtggcgatcaccaatggatcgtccaaggtactgccaatggtcacgggctctcctccaaggttgctgctgaggtgaacaatcagtttagagttggtattcagactactgcgattattcatgtgctgccaaggggtgtcctacagtttggctctactggtttggctttgggaaacaaaaaaattgtgatgtttgcaaagaagttgtgttctcagctaaacaatcgttcaagcctagctgcatctgcttcggctaaaaacacttcaagacagcatggccagtcacttattgataatgcaattgtgtcaaccagtacaccaccaaatgtattgttgattgcatctttgctttgggctgcacaacagaatggtcaccctgagctcattggaaaaacaccaatagtgaggccatcattagatgttgagagacacattcttctgaaaggagcttttgataaagctgaggaaatagtcttgagaatgaagcaatgggatggtactgcgggacttgtttggcagaaggatagcttaatggtgcccaagtggcttactgacagattgatggcatttctaatattctatagtgaggccattacagctcttctctgttgtgcactcattcctggcctgttattgctagaattagtcaagttcacagagacttggcaagggactgtttgctgggagccaacaatcctattgatgatgcggagacacctttacaaacagaatgagttgtatgcgacactttttgagggagctatgattgggtacactccaggaggaatgcaatttgctcaagaaactatagagacgatgatttcaagcaatctcttcttgactgccgagatggccaatactctatctccatggccatggttcaattgcgttcaagatgtgcacattgataagacaattagtatacttgttgttgctgtctatgaaaatgctgcttacagaagatggaacatattaaagacaattgtgtgccgtgtgtcatatattgtgataatgaatgcttatcgtttacgaaatggcaatcttggtccctgcaacctgcttccaagaatgacagtaattgcaagaggtatcagggagaatgggtgtggattcagaggaaacatcctcgcattgtttacggtgaaatggagaatatcttga

SEQ ID NO: 116659 - DNA, 3020 bp, Zea Mays
cactctccccacctttgcctttgttcatctgccatgaaatattaaccatattgagtaccatcggtatcatcattgtagagagttttcactggaataaatacatcaccgctcaacattgtttaaaacaagagtaacaaaggtcataaggtcaagttggctgctagaattgaaactggaacattcaactgcagtttcacttacaataaggaaccaaagtcacattccacttgcatctcaataaccttgagtagaaaatgtcagtatattgcatttacatgtacttgagtattcgtttcaaaagaaaacgtaccagatctcatgctctatggttgttaaatacaaccattgccattattcttttatgtagcttaaaagtttttttatgaagacacttaatatactattcgttaatgttacattaagcagaattcagtatctagcaacgctacatatgagatacagatattagaagagtacagataaaattgcccaaacaatgggatttgaatatttgattgtgcatgagaatacacttgagaaaaattattcaattggcaacagtgagaaaatactgatgttttaaaataagatatagcagatcaaaggtcagatcaaacataactgttaattctccagtctccaccaacaagtcagtatcaatattccatattaatgagcctaggtcgatatagcattgttgcattggcttttcagttttcattgtatcgtaaggtttcactggatggaaccttgccaaaacaggaccctagctcgaattccagtgtagctctggagcaaaggttatatatattttgtacaaccaagggtgatacaaatgtttgaaaatttctcaagatataaataccagcagattttgcaaaaaaaaaacaagaataaaaaatatagatgcaaaattcggaaacacagattttgttacatgttcactacatgctcatttatatcatgtttgatctgcctctattgcatagaatgggagtgattggaaccaggtgatgtctcaatatggaagcttccttagccagattgacgagcagcctatcgcaacacaacattctgaatttccagttgatgggcaacccgagggctcaagaacaccagctgttactaaaaagccaactcaaagaactaagctagcaaacttcactgctgaagaggacacaagggtatgccatgcatggcttgctgttagttgtgatcccattattaacacagggcagaaacgtcaaggattttggagtagaattactgaagcatacaactcaagacgaggaacattgcccgaaaggtccacaaaatctttgatgagcagatgggatactatcaaaacacagtgttccacttttgctggatacatgatggcagtcctccgacagaatcctagtggactcagtgacacagacaaggtttgtaagtatgtccctgttgtaaccagttgttttatgtggcagacatcactggcagcttctaggtttgcagcaattgagaagaagcctttccactttttacactgttgggccattcttaaggaccaaccaaaatggatggacaaccacatgggtcaacaaaatcagcaagccaacgctaatcccacacattctaacactgtcgatgtggatgcagaagaatctgtaccatctagcttcacatcgaagaggccactgggtcgagattcttctaaggaaaaggcaaagaggactaaatctgtggacacaacttcgtcagattctgagttcatgacacgcatgggagatctttctttggagcgcctgtcagtgtacaaaacagttgttacaactgaggaaaagaagttggattcaatgaacagaaatgagaggcagaaattgctcctagaaaagaagaagttgaacctacagaaattaaggcttgaaaggcagaaactaaaggaggacaaggaagaggagataatgatcttaagcatggatcagatgtctttcgaaaagcgttgaatgccgagaaaacatagaaaaatgaaaaagaaatggaaaatgtgaatctgttaacactgtagctttagggacggaatttagaggacgctgctagagacggagaatatatagaggacagaatcttttagagtgttctgtaaaggacagagaatattcctttagtggatgaaatttaggggacgctgctggagacagtcttagaagagtacagataaaattgcccaaacaatgggaattgattgtgtatcagaatacacttgagaaaaattattcaattggcaacagtgagaaaatactgaagttttaaactaagatatagcagatcaaaggtcagatcaaacataactgttaattctccggtctccaccaacaagtcagtatcaatattccatatagcctaggtcgatatagcattgttgcattggcttttcagttttcattgtatcgtaaggtttcactggatggaactggaaccttgccaaaacaggaccctagctcaaattccacagtgtagctctggagcaaaggttatatatattttgtacaaccaagggtgatacaaatgtttggaattttctcaagatataaataccagcagattttgcaaaaaaaaaacaagaatgaaaaatatagatgcaaaattcggaaacacaactgtaagtatcagatatccatgaaataagtaaaggacccagagtttatcaaacagtaataaaaaacacaatttccttttcagatccatctccatagtcttaagagggaactataggtaaaggacccaaagtttatcaaacagtaacaatgaaaaaaacaatttccttttcagattcgtggctccaaagtcttatgttaattcagtttctgcatcacgaagactactaattatagaggcaagtgcatacgaacaaaagtttgttcagtgtgaaaagttgaaaaacagtactcacaatacgaagaagtgtacgtcgttccctctccctagcacctctgacagcctgaaagcttcagtgatcagcgcaaaacaatactgtt

SEQ ID NO: 116660 - DNA, 975 bp, Zea Mays
atgtctcaatatggaagcttccttagccagattgacgagcagcctatcgcaacacaacattctgaatttccagttgatgggcaacccgagggctcaagaacaccagctgttactaaaaagccaactcaaagaactaagctagcaaacttcactgctgaagaggacacaagggtatgccatgcatggcttgctgttagttgtgatcccattattaacacagggcagaaacgtcaaggattttggagtagaattactgaagcatacaactcaagacgaggaacattgcccgaaaggtccacaaaatctttgatgagcagatgggatactatcaaaacacagtgttccacttttgctggatacatgatggcagtcctccgacagaatcctagtggactcagtgacacagacaaggtttgtaagtatgtccctgttgtaaccagttgttttatgtggcagacatcactggcagcttctaggtttgcagcaattgagaagaagcctttccactttttacactgttgggccattcttaaggaccaaccaaaatggatggacaaccacatgggtcaacaaaatcagcaagccaacgctaatcccacacattctaacactgtcgatgtggatgcagaagaatctgtaccatctagcttcacatcgaagaggccactgggtcgagattcttctaaggaaaaggcaaagaggactaaatctgtggacacaacttcgtcagattctgagttcatgacacgcatgggagatctttctttggagcgcctgtcagtgtacaaaacagttgttacaactgaggaaaagaagttggattcaatgaacagaaatgagaggcagaaattgctcctagaaaagaagaagttgaacctacagaaattaaggcttgaaaggcagaaactaaaggaggacaaggaagaggagataatgatcttaagcatggatcagatgtctttcgaaaagcgttga

SEQ ID NO: 116661 - DNA, 3845 bp, Zea Mays
atccctggtggcagagcccgagcagcgaccgccgaggttgagacttgagagacctatgaaaccgcgaggcgccgcacaccaaccaacccccgggctgcccgtaaatgcggacacaggcgtgggggcgcggggcggtggcgcgcttgatgacgccattcaatcgccgcgcggcccacgcctcttctccccacctgctccgcgcctgctcatccgcctcttataccatcgctctcgctcgcctccgacgccacttcacctcttctgcttccttctccccagcatacagtgccagacaggatacccacacattcatggaggtggttcaagaagtccttaggcatggctcagcagatagtgtccgtgctgtcataagagctaacaaaaagagctacagccttgtccagctcattgcagcctcttttgatgtctacaacattttgtgcagcaaaaatatgacaccaaatgggatgcaagattcttcttccaaaggaagaaatggaacaggattccttcatggagctcgtgttggcattgtggctaaaccctctcctgaatttgttgctggggtatttggaacctggctttctggtggagttgcagtaccccttgcccttagctatccagaagctgagcttcttcatgtcatgaatgactcagatatttcaatggttttaagcaccaaggagcatcacgaaatcatggagaacctttctatcaagtgttctgcttattgttctattcttccatctgtcactagtataccttcagaaatcaatcctcaagaaccttcaagcaatgaggcgatttcatcagtctctactttaataactgagaccaacagttcaaagaaaatcaaaggcgatgaccctgctcttatcctttacacaagtggcacaactggtaaacctaaaggagtagttcacacccatgagggcattctttctcaggttcagattctatctgaagcgtggggatatcgaagtgaagaccaatttctgcactgtctcccgctgcaccatgtgcatgggcttttcaatgctctatttgcgcccctttattcaggatcagtggttgagtttataccaaaattcagtgtaagcgggatatggcagagatggcgagaatcatatcccaacgatgcgagtaaaagtacagaggccattacagtatttactggagttccaaccatgtatacacgtctgctgcaagggtatgatagtatggatcctgatcaaaagtcggcctcttcttacgctgcaaagcatctgaggttaatgatgtgtggatcatcagctcttccttccccacttatgaagaggtgggaggaagtgacaggccatcgtcttttggaacgctatggtatgactgagtttgtcatggcactgtctaatccattgcatggtatccgaaaagaaggtacagttggtaaacctcttccacgcattgaggccaagatcattatggaggacggggctgaaactacaactggagttggcgagctctgcattagaagtccatctcttttcaaggagtattggaaaagaccagaggtcaccgcagaatctttcattgatggaggattcttcaagacaggtgatacagtaactgtagatgaggaaggatacttcataattttgggacgcacaaatgccgacattatgaaatttggcggttacaagctgtcagcattagaaattgaggcagtactgttagagcatgatgctgtactggaatgtgctgtccttggcttgcctgatgaagcctatggggaggttatatgtgcaataattgtgcctaaggaggatgcaaagaaaaaggctggacaggactcaaagccagcgctaaccttggaagcattaacaagttggtcgaaagataagcttgctccatacaagattccaacaagactatacttgtgggattctcttcctcggaatgccatgggaaaggttaacaagaaggagctgaagaaattgttaggagcttagccatgtgtatagatgtatttatctcttcatttccttcttaaagtttagcaagtcgggctcattatattgattagcgaataagtgctttcgttaccatggaccaataatcttcgaaacggcctgagttagactgcacacacatttatttatcagaaaagtttctagtcacactgcgcagtatcgatgttatgcattgacttgtaggaagactaataaacctcctctgctggtgaccctgacaagtctaaacaacagtaactaataggctagtaaagttaactagatgttttatactaccacatgcattgaacattcaacctccagaagttcattgtttcagccctacagggctcacaggagtcccagccatacaggactagggctgctccgtgttgtcctcctcttcccactccacgttcttcccctcctcgccatacaaccagcagcaccaagcgaagtacacgaagttcgccacgccgtagcccgtgagcagccagtagtaatagtcgtagcggccgacgttcaagttgtcgacgagccagcccgttcccaccccttgcccgctcgccacctgcaccaccttcacgatgagggcgccggccaggttgcccactccgaaggccatgtacagcagcgacatgctgaagctggccatgctcttgggcagctcggtgtacaagaactcgatctccccgatgacgccgaacgcctcggcgagccccacaagcgcgaactgcggcacgagccagaacgccgagatggtgaccccgcgctgcgccagccgcctccgctcgccctccaccgccgcggagacagccgtcgacgcggtggcgaggagcaggcccccaccgatgcgctgcttcatggtgagcccgtgcgggttgcccgtgtaccgctgcagtgccggcgcgacccacctgtcgtagcaggccgaccacagcgacatggtggccatgttgaagacggccaaggagccgctgggaacgcggaacccgcccgcgccgacgcgccggtccatagcatcggcctgcttaacggcgaagctctggttcatggcaagggcgaggaagatggtggaggaccagatcggcaggacgcggatcgccgacttgagctgctccacctggtccaccgtgcacagcctcgtcccgtcgtggccgtgccgctcggaggccgccgccgccgcgtccgagccgttgcagggcgcgtcgtccttggtggcacggagcaagcacgccttgttcaagaacctgaacgtacgtacgtacgcagctcaaaacgccaacgtgttcgtcacaccacgcatccttctgccagctagctagctgcatgttgggggggacgggacgtgacgtatatacctcagcttgtccgtggggacagcgagcttgcagtccttgaggtgatggtacacgccatcgacggtcttgtccggcaaccgcgccccgtggttcctgatcgccgcggcgacggcggtgcctatcccggcgaacatccgcctctcgcccttctccttgatgtataggctcgatcccagcaagaagctgaccgcggagagcagcatgaggcccatcgggacggcgaacccgacgctccacccgacgttgtcctgcaggtagacgatggccgtgacggcgaccgtgaaggccacgccgatggacgcgtagtaggcgttgaagtaggattgcaggatgctggcccggcgctgcctggggtgcctggagaactggtccgcgccgaacgccatggagcacggccggacgccgccggcgccgagggacaggaacgcgaagccggcgagcagccacgcgaggtgcctcgtccccggcggcgcgcactggtcgccgctgcacggag

SEQ ID NO: 116662 - DNA, 2373 bp, Zea Mays
gcccgtaaatgcggacacaggcgtgggggcgcggggcggtggcgcgcttgatgacgccattcaatcgccgcgcggcccacgcctcttctccccacctgctccgcgcctgctcatccgcctcttataccatcgctctcgctcgcctccgacgccacttcacctcttctgcttccttctccccagcatacagtgccagacaggatacccacacattcatggaggtggttcaagaagtccttaggcatggctcagcagatagtgtccgtgctgtcataagagctaacaaaaagagctacagccttgtccagctcattgcagcctcttttgatgtctacaacattttgtgcagcaaaaatatgacaccaaatgggatgcaagattcttcttccaaaggaagaaatggaacaggattccttcatggagctcgtgttggcattgtggctaaaccctctcctgaatttgttgctggggtatttggaacctggctttctggtggagttgcagtaccccttgcccttagctatccagaagctgagcttcttcatgtcatgaatgactcagatatttcaatggttttaagcaccaaggagcatcacgaaatcatggagaacctttctatcaagtgttctgcttattgttctattcttccatctgtcactagtataccttcagaaatcaatcctcaagaaccttcaagcaatgaggcgatttcatcagtctctactttaataactgagaccaacagttcaaagaaaatcaaaggcgatgaccctgctcttatcctttacacaagtggcacaactggtaaacctaaaggagtagttcacacccatgagggcattctttctcaggttcagattctatctgaagcgtggggatatcgaagtgaagaccaatttctgcactgtctcccgctgcaccatgtgcatgggcttttcaatgctctatttgcgcccctttattcaggatcagtggttgagtttataccaaaattcagtgtaagcgggatatggcagagatggcgagaatcatatcccaacgatgcgagtaaaagtacagaggccattacagtatttactggagttccaaccatgtatacacgtctgctgcaagggtatgatagtatggatcctgatcaaaagtcggcctcttcttacgctgcaaagcatctgaggttaatgatgtgtggatcatcagctcttccttccccacttatgaagaggtgggaggaagtgacaggccatcgtcttttggaacgctatggtatgactgagtttgtcatggcactgtctaatccattgcatggtatccgaaaagaaggtacagttggtaaacctcttccacgcattgaggccaagatcattatggaggacggggctgaaactacaactggagttggcgagctctgcattagaagtccatctcttttcaaggagtattggaaaagaccagaggtcaccgcagaatctttcattgatggaggattcttcaagacaggtgatacagtaactgtagatgaggaaggatacttcataattttgggacgcacaaatgccgacattatgaaatttggcggttacaagctgtcagcattagaaattgaggcagtactgttagagcatgatgctgtactggaatgtgctgtccttggcttgcctgatgaagcctatggggaggttatatgtgcaataattgtgcctaaggaggatgcaaagaaaaaggctggacaggactcaaagccagcgctaaccttggaagcattaacaagttggtcgaaagataagcttgctccatacaagattccaacaagactatacttgtgggattctcttcctcggaatgccatgggaaaggttaacaagaaggagctgaagaaattgttaggagcttagccatgtgtatagatgtatttatctcttcatttccttcttaaagtttagcaagtcgggctcattatattgattagcgaataagtgctttcgttaccatggaccaataatcttcgaaacggcctgagttagactgcacacacatttatttatcagaaaagtttctagtcacactgcgcagtatcgatgttatgcattgacttgtaggaagactaataaacctcctctgctggtgaccctgacaagtctaaacaacagtaactaataggctagtaaagttaactagatgttttatactaccacatgcattgaacattcaacctccagaagttcattgtttcagccctacagggctcacaggagtcccagccatacaggactagggctgctccgtgttgtcctcctcttcccactccacgttcttcccctcctcgccatacaaccagcagcaccaagcgaagtacacgaagttcgccacgccgta

SEQ ID NO: 116663 - DNA, 771 bp, Zea Mays
gcccgtaaatgcggacacaggcgtgggggcgcggggcggtggcgcgcttgatgacgccattcaatcgccgcgcggcccacgcctcttctccccacctgctccgcgcctgctcatccgcctcttataccatcgctctcgctcgcctccgacgccacttcacctcttctgcttccttctccccagtctcagccagtcaacctgggcggtggccgccggccgccgggcgggacaagcagccatgcgggggcgggacaagctcacaagtcacaagcagaactgcagaagcagctgggccaccggacgggacaagtactcaagcagtcaagcaagcaggaagcagtggcagccgggcgggtcgacgggacaagcagccggccgccgggtgggcgggacaagccgccgggcgcgcgggacaagcgaccgtgagtaggagcagcggagcaggcgtgccggcaggagcggccgagtgggagtgctgtgtgcgcctgtgcgggacgcgccgacgcggggacgggcggacgacacagagtgtgtcttagctaaaccctaatctctaatctcttagtgggccggcccaaggtattgcccatgcaatactgggccatactgggccctccgcccctgattgccgtgctgctttcttgttaccacagctcttgcatggctgagaatgcgattcgtgggttaatctaggaagcagtggtctaggttatggccatttgactgtcttcatagaggaattcgtggtgactgttttatcattgcacaata

SEQ ID NO: 116664 - DNA, 1000 bp, Zea Mays
gcccgtaaatgcggacacaggcgtgggggcgcggggcggtggcgcgcttgatgacgccattcaatcgccgcgcggcccacgcctcttctccccacctgctccgcgcctgctcatccgcctcttataccatcgctctcgctcgcctccgacgccacttcacctcttctgcttccttctccccaggtcggctattccactttctcgtctctctttttgtaacttcgttttcagttcagcgccggatgttcgtcgttctggcacgaggacgtaccacttgtgctgtcaagtttcggcgactcctggccgaagctggcgaggcgaaacttagatttctatgtcacgatttggcagaacggaaggtgttcgccgtttcgcctctgccgctcagcggatgccttgcgtagaaggttgtaggtgtagttgcgactgcggatcaacgagattgatgatcagtttttttcttaatgcataagcggtccaattgggcagcctatggtcgaaattgtggagcagtgaagcactgggcgtaaaaatgggttgtcctgtgctcctagtggagtagtggttttgaaattgcctttttgtgtctcagggtgtaacacgaacacgaccatggtgttcgggcaggattctcataggtttgcctgtgttattaggtatctttaaattgccgtcagtggcggaggacaaaagaaaattaaggtatggctagctagtaggggaaaaaagaaaaaaatattgtgcacatggaaatcaaacaagcaacttgatgtctcatacgctaaggattaaccactgcaccacatgcatcctattgtttataaaaggaaggtatgaagattttaaaaatttaggcatgcctgatgccatactcagccataatggctcctccgcggctgagttcatcacaatgacatcacatcttcacaaagctcaagtcttgattttagttcgacctactgtgcgaaagcatgatagatttaccagtaagaagttcagg

SEQ ID NO: 116665 - DNA, 1307 bp, Zea Mays
gggaaaatccactaatcccccacccaagctcaaaacccgccataaacacgcgtcggagcttgtggcgagcgccgccaccctgcactcggctgcggggcctccgcccccttcgatctgtagccggccgcggcgatcccgcagcggccccccgcggctgccgcgaattggttttgtgttacgttaccggtgggcggtgggcggaggcgttttgatcctgtagctgccggcttgagtagatggagggcaatgaacagggctgtggagggctgccgcaaaggcctcccgtgctcggtgcgtccatgcaaccgccgattaagaagctggtaaggcagctcgacttcaactcggcggcattggcgggaaaccccgcgatggcggtggccgccgccgccgtatctagggttctgcagccgaaggcgtcgtccgtggggttccagcatccgcagcacgtgggggctgccatgccgatgggagtaccgcagcagctgcaccagcgtgtgctgccggtgatgcgcctgcatcaggtggtggggcatgtgccgctggcggtctctgtaccgcagcttcgtccggtgccgccgcagccagtccagcgccccccggtcgccgttcccttgaaaccagagtcaccaaaactacgggcaagactgtacgaagggaaagatagtactcccacgaagaagaagtgctgcaactgcaggaattccaaatgtctgaagttgtactgtgaatgctttgcttctggtacttactgtgatggttgcaactgcaccaactgttttaataatcctgataatgaggttgccaggcgtgaagctgttgaagctatattggatcgtaatccagatgctttcaggcctaagattgggagcagcccacatatgcataggaataatgaggtgcctagtgatctccctttagtagggaagcataataaagggtgccattgcaagaagtcaggatgtctcaagaagtactgtgagtgcttccaagctaatatactatgctctgaaaactgcaagtgcatggattgcaagaattttgaaggaagtgaagagagaagaaatcttttccaaggggatcacaaaaatgcaattaacatgcagcaggtgacaaatgcagcagtaaatggtgctattggagcaacaggattcccttctccttccacatcaaggaagaggaaacataatgatccttcacttgaccatttcaataaggaacatatagcgcacaagaattatcacatacctcaggagcaagctgaagtgccttgttacattactaggagtgtgagttttttcccatga

SEQ ID NO: 116666 - DNA, 1043 bp, Zea Mays
gcaaaccagacatctgatgttgcgttagtggactagagagctccgtccggttcacatccggtgcggtacatcggaggccaagcagctctttgcgcggtgttcacccaccgccgcctcgtgtctcccaattccgtctcgttctgcagtgattccacaccgcaggtgggcagccatgatggcgtgcgccctcgccgtcgcctggcctgcagcgtctctcgcgccatccggcaagaggaacctctccggcggccgtcccccatggctgccgtctcccagaccttcaggcagcagaagggcgtcactgctgctgccccgccggcgctcgcagaagacggcgttcgtggtgggtggtgccgcgagcttttgcacggcctcgctgaagcgatcgccgagaatgcgaggccacggagaacaggtttgtgcaacgcggaggagacgggcggacatccagtcggacacgtacgtgctgatggaacccggcatggatgaggcgttcgtgtccagggaggagctggaggagaggctcaagggctggctcaagaactggcccagggacaccctgcccccagaccttgccaggttcggcacggtcgacgaggccgtctcgtacctcgtcaggtccgtgtgcgtgctcgagatcgacggagacgttggttccgtggagtggtaccaggtccagctggactagttgccgccctagattggatgtatagcgctgagaaacccattgagagccttttttttcacgcccctcaacttctcgcctctggacggccgcccaatatgcagatatggcgacgcgaaccgtgactccgtgagcttacccctcctttgcggtctcctaccagtgaggacttgttttctcaaaaaattccttccgctctagattaagaactactctagatcggcacgcctttggtaggagacctcgaagaatcctttaatcagcatcttgaatatttcatgtagttagcttgatcataattgttcatatttgtgcaactaaacaacacggctggaagtctttgactttctaagagaca

SEQ ID NO: 116667 - DNA, 1246 bp, Zea Mays
gaaaaaagggccaatctgcaaaccagacatctgatgttgcgttagtggactagagagctccgtccggttcacatccggtgcggtacatcggaggccaagcagctctttgcgcggtgttcacccaccgccgcctcgtgtctcccaattccgtctcgttctgcagtgattccacaccgcaggtgggcagccatgatggcgtgcgccctcgccgtcgcctggcctgcagcgtctctcgcgccatccggcaagaggaacctctccggcggccgtcccccatggctgccgtctcccagaccttcaggtaaaactgctcctggttcctcacttcctctgcatacaggcctgatgcggacggagttttgtgtactgtacaccatattccacttctgcgtcaccgcgcacaagcgcccgtcatctgcactgtctcctcgaaaacacaggcagcagaagggcgtcactgctgctgccccgccggcgctcgcagaagacggcgttcgtggtgggtggtgccgcgagcttttgcacggcctcgctgaagcgatcgccgagaatgcgaggccacggagaacaggtccaattctagaaagaaaacaatgttgttatacctccaaccagtacgtcacactccaccactctctgttggttcctattgtaggtttgtgcaacgcggaggagacgggcggacatccagtcggacacgtacgtgctgatggaacccggcatggatgaggcgttcgtgtccagggaggagctggaggagaggctcaagggctggctcaagaactggcccagggacaccctgcccccagaccttgccaggttcggcacggtcgacgaggccgtctcgtacctcgtcaggtccgtgtgcgtgctcgagatcgacggagacgttggttccgtggagtggtaccaggtccagctggactagttgccgccctagattggatgtatagcgctgagaaacccattgagagccttttttttcacgcccctcaacttctcgcctctggacggccgcccaatatgcagatatggcgacgcgaaccgtgactccgtgagcttacccctcctttgcggtctcctaccagtgaggacttgttttctcaaaaaattccttccgctctagattaagaactactctagatcggcacgcctttggtaggagacctcgaagaatcctttaatcagcatcttgaatatttcatgtagttagcttgatcataattgttcatatttgtgcaactaa

SEQ ID NO: 116668 - DNA, 377 bp, Zea Mays
tcctcacatctcatcagcgctttcttgatgctgcccgcttgcccagcgtgcaggtcaccaggcccgttacgacctccaccgcattcgtcgggagcgcatcaccggcccgtcgccgacgagctagccagcacctagaacgccagggtggccagcgacccggcgaactgcaccgccgtcctgtcctccttatccttcctcgacgcgatcaccgccgcgccggctcggcctccagcccgtccggcagcacggccacggcgctggagtcgtgcccatcgatcacaagccgcaggaccgcggcgtcgataggcgcgtacgccacggtcgactcgcagagtcgcaggggctggtgctgctgttctgaaggatcaggttggtgc

SEQ ID NO: 116669 - DNA, 1572 bp, Zea Mays
atgaacgccggtgcgcagcttgagcggcggagctcggtgcggcggtcgcagagcatggtgcaggaggaggacaggggccagccgcccgacgaggagctcatgtcccggagccagggctccagcacggagccgtcgggcggggcgctcaggaccggcggcgccgtgcccgacaaggacagcgcgacgcccaagccgcgcctcgccgaacagagcgcgggaccttccgagatggacctgatgaaggagaagttcgccaagctgctgctcggggaggacatgtccgggtccgggaaaggggtgccctcggcgctcgccctctccaacgccgtcaccaacctcgcagcttctgtgttcggcgagcaacggaagctggagcccatggccccggacagaaaggggaggtggaagagagaagtgggctggcttctgtccgtcgctgaccacatcgtcgagttcgtcgccaagaaacaagtcctggacaacggcaccgaaatggaggtgatgggcacgcagcagagacgggatctccaggccaacattccagcattgcgtaaactggacacgatgcttctcgactacctggataacttcaaggaacgcaacgagttctggtacgtgaagcgcgactcgtgctcagagagcgagaacgaggagaggtccgacgagaaatggtggatcccgatcgtcaaggtgccccccggcgggctttccaagacctctagaggctggctcctgcaccagaaggagctggtgaaccaggtgctcaaggcggccatggccatcaatgccaactgcctcatggagatgagcatcccggacacgtatatagacacgctccctaagaacgggagagccagcctcggggacgcgctgtaccgaatcatcacagatgtggagttcgacccggacgacttcctgtcgacggtggacctgacgtcggagcacaagatcctggacctcaaggaccggatcgaggcatcggtcatcatctggaacaggaaggtgcacaacaaggacggcaagtcctcttggggctccgccgtcagccaggagaagagggagcagttcgaggagcgggcgcagacactgctgctcatcatcaagcacaggttccccggaatcccccagtccacgctcgacatcgcaaagatccaagagaacagggacgtcgggtttgcgctgcttgagagctactccagggtcctggagagcctggcgttcaacgtcatgtcccggatagaggacgtcatccaggccgacaacctggctagggagaaggccaagaagaacgcgccgcccgcagcagaccccgccgccggacgccgcggcccgcaggaggccggtggcgacgacgacgaccagagcaagacgaccctgctggacttcatggggtggactggggactccgagggcaagaacgacgacgcatctcccccgccgccacccgagctgccggcgcaggacgacggcaggctgatgaagctgccaaacatcatgaccaacctcaagcagacgtacatggataagctggacttcctcagcgggaacagaagcccctcaggtcgccattag

SEQ ID NO: 116670 - DNA, 648 bp, Zea Mays
acgcgcagtcttcttcagaattccctgatcacgttccaggcagctgagagcccgcgtactagccggacaggaggcgacagcgacaccgcgagacgtgccatcatgttggaaggaaaggcggtggtggaggacaccgacatgccggcgaagatgcaagcccaggcgatgtcggcggcgtccagggccctggatcgcttcgacgtcctcgactgccggagcatcgcgtcccacatcaagaaggagtttgacgcgatccatggccccggatggcaatgcgtggttggctccggcttcggctgctacatcacgcacagcaaggggagcttcatctacttccgcctggagtcgctcaggttcctcgtcttcaaaggggcggcagcatgatgacaagccccacggctaacatcgcgagttcacgaccaggcaaagcaggtggaggatgggtttttttttcaccggcctttgtggacggcttgcctcgctgtatacgatatcaccatggtaataccaaccagtagattgaaacgttgtgggagattatattggaaacaatggaatttcatcacttgtcaaatagcttttgtgtacgaaatctagatggatgtaaatttgaaatcatttggatttggaaactggtcaattagtatc

SEQ ID NO: 116671 - DNA, 1454 bp, Zea Mays
ttttctttttacatgtcaggagcaatttagtcattccaataacattcatcgaattatctaatatgatccacccatctcgtttctagggaatcttgaagaacgaacttactccggcacagttcatgttatgaccccaaatactctagcagaattgtctcagcatcctgatgcacccgagcagaaccaagtagggacagacatggcagtggacgtaactagaacagaaattaaaggtgcccaggtggaaggaactactgatatttcaactaatggtgaaagtgatgatccatcaaatcgtttccttcctccacccgtgactacaaaatgctctgcagcattacagcaaaaaattaacaggttccttgcatacagaagggctggaaagagctttaatgctgaagtgcgcaacaggaaggactacagaaatcctgactttttgcagcatgctgtgggataccaagaaattgatcagatagggacctgtttcagtaaatatgtttttgatccttatgggtacgacaaaggcgactactatgatgagatagaagctgaaatgaagcgtgaagttgagaggaaggaacaggagaagaaaaggagcccaaaagttgaatttattactggagtacaacccccaatcaatgcatcaataccgaagatcccaggtttggctggtgtctgtacactaccggtacctacagaaggtgtacagaaagagactagaccaaacaagaaatcaaaatgggataaggttgatggtgatgttaagaaccatgtggttcctagtggacacgacaacttatcagcaactactgcggcactcttgacttcagctaatgttggtgctggatacgctggttttgcgcaacaaaagagaaaagaggccgaagaaaagaaaaacgatcataagtcagacagaagatcgtagcaccaccttttgtttcattctgagcagtcagcgtatcatttattttttttcagtgacatagttttgtaatgtggatagagaaaagaaggaaacaattaaaaccaatcctagggaaatggtttcagaaaagccctctgggcaacttggtagtcttgtattatacaggtaccagaaacttaacattttagaccaagaaaaagagaaccgtgagcgttctgcacttctgccgcctgttacagtggtcaattatgtgtttttgcattcagctcattggtctgccgcttgaatgctgggattttaaatcgccaaccatttatttatcatcgatggtcacctaatctttatgtcttgatcgtttatttttatttcatatcgattgggtgcgacatatatatttggacttgatatagatttaaactgacttaattctactcaattttagatcaaaatgaatgaccctttaggggtgttgactaaattttagtctctttattttagtttttaaacataaaaactaaaataaatataa

SEQ ID NO: 116672 - DNA, 1942 bp, Zea Mays
cctaaaatcctccgcctccttcctcgccgtttcgggcctcgcctcgtccccaaatccaacccttcgtactcagtttccatcattggcatggcgtccgataccgagggcatcgccgccctcttctcgatgtacaacgacgacgaggaagaggaggatgccgacgagcccagccctcctttcccagcgcttcccgccgccgtcacctcctcctcgccgctgtcccctcaagccggggccgaggaccccaacccttctgtggcgcctccgtcaccttcccgtcccgaggaattggccagtctcaaaaccctagcgagtccccacccttccccggcgcgggggctgcttccgccacttccctcgcggcgctcttcatcaccctttgcagtgtcgtccccctccccgctacggggaccgttcttcgcgccgccggcagacctgccgcgccctccgcggcgcggggcgcttgcaatcgtggactatgcgcacgacgagacggctatgtcgcccgagcaggaggatggggagatcacgagcaacacatacggatttggctcagatgctcaggctgcagaggggaatcttgaagaacgaacttactccggcacagttcatgttatgaccccaaatactctagcagaattgtctcagcatcctgatgcacccgagcagaaccaagtagggacagacatggcagtggacgtaactagaacagaaattaaaggtgcccaggtggaaggaactactgatatttcaactaatggtgaaagtgatgatccatcaaatcgtttccttcctccacccgtgactacaaaatgctctgcagcattacagcaaaaaattaacaggttccttgcatacagaagggctggaaagagctttaatgctgaagtgcgcaacaggaaggactacagaaatcctgactttttgcagcatgctgtgggataccaagaaattgatcagatagggacctgtttcagtaaatatgtttttgatccttatgggtacgacaaaggcgactactatgatgagatagaagctgaaatgaagcgtgaagttgagaggaaggaacaggagaagaaaaggagcccaaaagttgaatttattactggagtacaacccccaatcaatgcatcaataccgaagatcccaggtttggctggtgtctgtacactaccggtacctacagaaggtgtacagaaagagactagaccaaacaagaaatcaaaatgggataaggttgatggtgatgttaagaaccatgtggttcctagtggacacgacaacttatcagcaactactgcggcactcttgacttcagctaatgttggtgctggatacgctggttttgcgcaacaaaagagaaaagaggccgaagaaaagaaaaacgatcataagtcagacagaagatcgtagcaccaccttttgtttcattctgagcagtcagcgtatcatttattttttttcagtgacatagttttgtaatgtggatagagaaaagaaggaaacaattaaaaccaatcctagggaaatggtttcagaaaagccctctgggcaacttggtagtcttgtattatacaggtaccagaaacttaacattttagaccaagaaaaagagaaccgtgagcgttctgcacttctgccgcctgttacagtggtcaattatgtgtttttgcattcagctcattggtctgccgcttgaatgctgggattttaaatcgccaaccatttatttatcatcgatggtcacctaatctttatgtcttgatcgtttatttttatttcatatcgattgggtgcgacatatatatttggacttgatatagatttaaactgacttaattctactcaattttagatcaaaatgaatgaccctttaggggtgttgactaaattttagtctctttattttagtttttaaacataaaaactaaaataaatataa

SEQ ID NO: 116673 - DNA, 1956 bp, Zea Mays
cctaaaatcctccgcctccttcctcgccgtttcgggcctcgcctcgtccccaaatccaacccttcgtactcagtttccatcattggcatggcgtccgataccgagggcatcgccgccctcttctcgatgtacaacgacgacgaggaagaggaggatgccgacgagcccagccctcctttcccagcgcttcccgccgccgtcacctcctcctcgccgctgtcccctcaagccggggccgaggaccccaacccttctgtggcgcctccgtcaccttcccgtcccgaggaattggccagtctcaaaaccctagcgagtccccacccttccccggcgcgggggctgcttccgccacttccctcgcggcgctcttcatcaccctttgcagtgtcgtccccctccccgctacggggaccgttcttcgcgccgccggcagacctgccgcgccctccgcggcgcggggcgcttgcaatcgtggactatgcgcacgacgagacggctatgtcgcccgagcaggaggtagaatcggtgaagatggggagatcacgagcaacacatacggatttggctcagatgctcaggctgcagaggggaatcttgaagaacgaacttactccggcacagttcatgttatgaccccaaatactctagcagaattgtctcagcatcctgatgcacccgagcagaaccaagtagggacagacatggcagtggacgtaactagaacagaaattaaaggtgcccaggtggaaggaactactgatatttcaactaatggtgaaagtgatgatccatcaaatcgtttccttcctccacccgtgactacaaaatgctctgcagcattacagcaaaaaattaacaggttccttgcatacagaagggctggaaagagctttaatgctgaagtgcgcaacaggaaggactacagaaatcctgactttttgcagcatgctgtgggataccaagaaattgatcagatagggacctgtttcagtaaatatgtttttgatccttatgggtacgacaaaggcgactactatgatgagatagaagctgaaatgaagcgtgaagttgagaggaaggaacaggagaagaaaaggagcccaaaagttgaatttattactggagtacaacccccaatcaatgcatcaataccgaagatcccaggtttggctggtgtctgtacactaccggtacctacagaaggtgtacagaaagagactagaccaaacaagaaatcaaaatgggataaggttgatggtgatgttaagaaccatgtggttcctagtggacacgacaacttatcagcaactactgcggcactcttgacttcagctaatgttggtgctggatacgctggttttgcgcaacaaaagagaaaagaggccgaagaaaagaaaaacgatcataagtcagacagaagatcgtagcaccaccttttgtttcattctgagcagtcagcgtatcatttattttttttcagtgacatagttttgtaatgtggatagagaaaagaaggaaacaattaaaaccaatcctagggaaatggtttcagaaaagccctctgggcaacttggtagtcttgtattatacaggtaccagaaacttaacattttagaccaagaaaaagagaaccgtgagcgttctgcacttctgccgcctgttacagtggtcaattatgtgtttttgcattcagctcattggtctgccgcttgaatgctgggattttaaatcgccaaccatttatttatcatcgatggtcacctaatctttatgtcttgatcgtttatttttatttcatatcgattgggtgcgacatatatatttggacttgatatagatttaaactgacttaattctactcaattttagatcaaaatgaatgaccctttaggggtgttgactaaattttagtctctttattttagtttttaaacataaaaactaaaataaatataa

SEQ ID NO: 116674 - DNA, 1385 bp, Zea Mays
ccgcggcaatggagtccgacaccgagcgagacgtccacaactcctcccgctccactaaccctagcggccaccaccagcgaccgcttcggttagtcaagtctacggcgttcaagcgggaggagcgccgcaagcgcaaggaccgcaagcggcagaggcacctcgttgacgagctcgtgcggtggcaacctctcggcgccccgacgcccctcccagccgccaccggatccgtgtccccctcccaagcgcagcccgatacgccttggccgtgtgacccgccgccgcctccggaccccgcggaagccgactcctggagctggggcccgcccgccgtaccctcgccgacgccgacgcaacccacagtcgacgtggcgggcgcggtccccttgcaccctcaggtcgtcgccgtaaggtcctgccgcgcgttctttgaatcgcagttcgaagaggacgaggaggaggagaacgagggcagtgcggctcgattcttcagcgagctgctgggcagcgacgcggcgctgagggggttctacgaggcggagcgggacaaggggcacttcctgtgcctggtgtgcgaggggagcggcgccaggctgggcaagaggtttgccggatgcgccgcgctcgttcagcacgccgggtcgatcgcccggaccaagtggaggctggcgcaccgcgcgttcgccgactccgtcggcctgctgctcggatggggcgcaggccggattgctcctccgccggtaccgccaccggcagattctgacagcgacggttcttttgatcaagtaggcagctctcagatggtagaaatggagctgtcgtgactcctgatgactgcagtctactgcaacaaggtttgtagttttctcgtaactacgcgttgttacagagtggagactgatcaggatggaaacagtggctagcatggtttaatcatcttgacctcaataatcatcacattgcggcatatctgatactatctcgacctgatgggctggggttgctgccttgctggccagacgggttctattttggtgtccggttatgatgccgaagatgtgaaatcatcatcctcgatttttccgactggagcaataagctggaagttcttcacagagccaaccataacccgaccatgaacattcaaacaccagcaccgcagatcctcaagcgaacgtggtgctttaatgtacagaaccattgtggtgtcgacgtgtcgtcatttacagggcactggataccgcagtgtattcttctcgatcctcttcaggacacttctcccgtttcaacattaccgaatgggtctgtctgtttgtttccttgcaaaccacggtctgtatcagctgattggcaccttcatcatattgtagctgcagagcattagtgaa

SEQ ID NO: 116675 - DNA, 2731 bp, Zea Mays
atcttattttctctcgcgttccactcctctctgttggctagctaccaccaccgtttccacgatgacggcgctgcagttcctgttgctcgcgctcgtcgccgtcactcaggtcgcgagcgccaccacggtcacctacaacgaccgtgcactcgtcatcgatggtcagcgccgtattattctatcagggtctattcattaccccaggagcacgccacagatgtggcctgatctcatcaacaaagctaaagaaggcggcctcaacaccatcgaaacatacgtcttctggaatggccacgagccacgccgccgtcagtataatttcgagggaagctacgacatcatcaggttcttcaaggagatccagaacgctggaatgcatgctattcttcgcattggtccctacatctgtggggaatggaattacgggggccttcctgcatggctgcgcgacattcctggaatgcagttcaggttgcacaatgccccctttgagcgcgagatggagaccttcaccaccctcatcgtcaataagatgaaggacgtcaacatgttcgcaggacagggaggcccaatcatccttgctcagatcgagaacgagtatggaaacatcatgggacaactcaagaacaaccagtctgcctcgcaatacatccactggtgcgcggacatggcgaataagcaagaggtcggtgtcccgtggatcatgtgccagcaggataacgatgtgccacacaacgtcatcaacacctgcaatggtttctattgccacgattggttcccgaataggaccggcattcccaagatatggacagaaaactggactggctggttcaaagcctgggataagccggatttccatagatccgctgaggacattgctttcgcggttgccatgttcttccagaagcgtggatcggtccataactactacatgtaccatggaggaaccaatttcggacgcacttctggtggcccgtacatcacaaccagctatgattacgatgcacctttggatgagtatggtaacattaggcagcccaaatacgggcacctgaaagatctccacgacctgatcaggtccatggagaaaatccttgtccatgggaagtacaatgacacaagttatggcaagaatgtcactgtaaccaagtacatgtatggtggttcttcagtttgcttcatcaacaaccagttcgtcgacagggatatgaaggtgaccctcggcggcgaaactcacctcgttccggcatggtccgtcagcatcttgcccaactgcaagactgttgcctacaacactgcaaagatcaagacgcaaacatcggtaatggtgaagaaggccaactcggtggagaaggaaccggagaccatgcgatggtcgtggatgcccgagaacctcaagcccttcatgacagaccaccgtggcagcttcagacagtcacaactcttggagcagatcgcaacatccactgatcagagcgactacttgtggtataggacaagccttgagcataagggagagggaagttacacgctgtacgtgaacacaagtggccatgagatgtacgcttttgtaaacggaaggcttgttgggcaaaaccactcggccgatggagcgttcgtcttccagctccagtctccggtgaagctccactccggaaagaactacgtttctctcctcagcggcacagtcggactcaagaactatggaccttcgtttgagcttgtgccagcgggcatcgccggtgggccggttaagcttgtcgggacaaacggcaccgccattgatcttaccaaaagctcttggtcttacaagtctgggttggccggtgagctcaggcaaatccacctcgacaagcccggctacaagtggcagagccacaacggtaccatccccgtcaaccggcccttcacgtggtacaagaccacctttgaagctcccgccggcgaggaggccgtcgtggtggacctgctgggcctgaacaagggcgtggcgtgggtgaacggcaacagccttggacgctactggccgtcctacaccgcggcggagatgcccggttgccacgtctgcgactaccggggaaagttcatagcggagggcgatggcatccgctgcctcacgggttgcggcgagccagcgcagcgcttctaccacgtgccgcgctccttcctccgcgccggcgagcccaacacgctcatcctcttcgaggaggccggcggcgacccgacacgcgccgcgttccacaccgtcgccgtgggccccgtgtgcgtggcggccgtcgagctcggcgacgacgtcacgctgtcatgcggcggccacggccgcgtcgtcgccagcgtcgacgtggccagcttcggcgtcgccaggggcagctgcggcgcctacaagggaggctgcgagtccaaggccgcgctcaaggcgttcacggacgcgtgcgtcggcagggagtcgtgcacggtcaagtacacggccgcgtttgccggcgcagggtgccaatccggcgcgctcaccgttcaggccacctgctcatagcgacccaggctagatcaaggagagttttatcttagctagatcaaggagagttttatcttagctagatcaggatagttttatcttagctagatcagatgatgcatggtttggtttggacacttaatgtagtcctcacatttcgttcctcaagattagttgaataaaaaaacctaagtacccttatgttttctgagatgaaaa

SEQ ID NO: 116676 - DNA, 1535 bp, Zea Mays
accaagagaggtaactgagcgaagcatccggtgttccctcgtcatccgccgccgccgccatgccgggcttcgctcagcgtctcgcgggcatcccgtggcggagcatcgcgaggcaaggcctctcccgcgtgttcctggtggcgaaggcctactgcgtgatccacatcgccaacgagcacctctgctcggtcgctttagtgcggggcgccagcatgctgccggccctgaacctggcggacgacgtggtggcggtggacagggtcagcgtgaggttcggccgggtcgcgccggcggacatcgtgctgatgatctcccccgaggacccgcgcaagtggctcatcaagcgcgtcgtcgggatgcagggggactccatcacctaccttgtcgaccccggcaacagcgattcctccagaaccatcgtggtgagttggtcaccactgggctaggcttttgggttcctactgcttgttaggtgctgcctccgtgatccgatttgtgctcaattgattgatgctgagcatcgttggtcttaatggagtttcagtagttgtttttagcgacaggcttagtacttgtcagtacattttacatgcttcgaattgagatgcatatgaattaggagacatgtgtttttgggtaattggtacctacttgcgcctgagactctagtctaggcaccaatgtcagggaggtgtttctctgagctctgcttcaaaactgtattatctgatgtctgtctgagccactggtagtgttggattggatcagtaatgagatgtggagtgtcactgaccctaaaaattaatcactagtgatataattagatcctcaatgaattagaactatgtgctggtaaaaatcttatttcatgaggcaggttgcacttgttcaaatgagtttttgtattaacaaacgatatggtttcagatgattactcttggaggttcttctgaactggacttattgattacatggacccattttcagaaggtgttgttttcagtgtgaggcctacaaagaaaagttggaaaaacatttccaatatatcttgtggtgagaagaagttatggaaaaatgaatacagtgaatacatgggcacatgcgcaagaacaatttgctttaaagttcttctccatcagttttaaacagcaccatttggaaccagtttgctactaaattagatcagtctgcagctgaagcagtagccagctgaacatgctgacatgttcttgcgggtggtcaaggctcagtattcagagcagaagatgcacataaatactggtgaatgatgccattgacgatgatgaattgatgaaacgatggatgatgccatcgatgaaagatggaatggaactcaaattttggtggtcgcacaagtgtggagacatgaatttatatatacttagttaggctcaatgttagcacaaacagttgatacagttgatgagcaagtttgaatttagagtacacttatgtatgagttatttgacaatgcttatttattagatattgaatggtatttatctatattatat

SEQ ID NO: 116677 - DNA, 3150 bp, Zea Mays
ccgggcgccgccccaccgcactagtgaagtggagctggagccgcggaggcggctggctgggctcgcgggagagtctattatttccatcggcaccatcacggcagggcggcgcgcggcgcgcggccagcgggtttacagacccttctgtctctctcgctcgcttccaacgctcgcgaccggctctccctgcgcccgttcccggcggccgaagcgagtcgcgaacccctttccgtggctcccgagcgagtcctacgggcgatgcgggcggatcgcgcgatgggggaggggagcggcaaccagcggatcgacctgggcgcgccgctccgctcggcgcgcctcgccgacgcgccgacgcagtacaaggccggcctcaactccgggcccctgcgccacccgggcaccgtgcccttcgcgtgggagcagcgcccgggccagcccaagagcgtccgcacacgccgcgcggcgccgccgacgcccccgcgggaaacttcccgggcgcggccgggcgagacaggcggcagcccctactacgacgccgttgcggagctcgatctccaggcgcttcgtggcgtcgccgaccaaggttcccggactgccgccgcatcgcgcaaggtggtggtgggggagaacgagcttgcggtggcggtggaatcgaccaaggatgtgaagaagcacgaggcgctcccggcggctgcggtcctacagaagcaggacggcatagtagaagaggaagaggagaggttctccgacgcgctcgacacgctctcccgcaccgagtcctttgccatgaactgcagcgtcagcggcctcagcggcgctctggaccccggacatggcgccgagccaggctcccggggcttcatgatggaccggttccttccggccgcgcaggctgtcgccgtgggctccccgcagtacaccttccggaaggccggcgccgccggtggcaccggcaattctggcagcgggcacgcgcgcgcggctgcggtgaaggcaggcgtgggcaatggcgaggatcgaatgaggagagcgcctgtccagctcccataccagcacctgccgcccaattacttgtcctgcgcctatccaagacacgaagagcatgaagaggaggatgaaggggatgacgatgacgatgactatgatgtgcatagtacccgggggttttcagccaaggggtgtggtttgctccctagcctatgtgcgaaaacttccttgttgctcttaaatccaatgcctgcaatgaagcgcggcaaggtgcgagggcgagttagaggctggcagttaccgtgcaaaggccaaggccaaggccaaatggcgcagagtccgcttgcgcggagctcgcagaacaagcacctgggatgtgattccaacgggcaatcatgggaggatgtgtataagcataagttggagcagaagtatcttggtcaaggagaggatgataggaggagcaagctgacaagtgagtcgaatcagcttactttctggagtgattcaccgactggggatggatcttcaccatattaccattccatagctggtggcatgtctccatatcgcagttatgctgtgatgtcaccatcaagtaaaccaaatgggtcgtctggaacaggagataaggatgataaagcaagtaggagcaatggttctggttcgtttgggaaagaccatgatcgaacctcgttggttggatcagatgatagtagcttcaagcgatcaagttccatgagctcaggaccagatggaacagtgcatgaagattcaatggatcaccacagagatactgattcagacacatgtcacttgggtgtgcttgtgcatacaaaagcagcattggatgcaaacatatatgacactcaacctggagggcgaaagacagttggaaataatttgattgtgaaagatcaagtcaatgatccattgactgaaaagatcgctgaacttagagaacccacatttccattggatgatggaaaagatttgcagcgtaatgctagtcatgagttaccacaacatctcgaagacaatgatgttgccaaaaaggaaatcataccattacaatctctgctccctttaccagtacccaaatcaccttcagagtcgtggctttctcgcactttgccatccgtgacaaataggtcacctctgccatcttttcttggaattcaagtacactcaaagaaacaggctccctgggtcataacgcaaccaaaggagaatgatcataaaccttccaggccacgacagataagatttgcagatgtagtagaaaaaccaacttcgttggattcggagatatgatatcttctcgcaaaaccagtatctatccattcatggtgttgccttgaaggctatcaaggtcatatacctcactggcacttacgagttcctaggatgtgcctctgctttttacagatgtggtcacttgatacagctgctggttaccacttaccatgttggtaattggagttcacatgccatgtttgctggactgtggtcagtatgtttctcatggtaagctggtaggtggtggtttaggtttggagtaaatcttatattcgtacaggatgacttcagctttcttccttactgtcgatagtgaaataaagcaatagtacccaaaaccaaaaaaggccgagttgttgcaaaatgtaatgcatcccaaagaataagaagatgtcaaaacagattaggcttccattcctggtacattttctattcgtaattgtatcagctggatatgtcagtacttgtgcttgatagaatcatagaactgtatctagtgccatatgttgtgtcagttgtgtctgacagtaagtatattcagcatatttcatatctatagtaaatttatttgctacattgttgtcattgattgacatcaagatggaagattatatagcagaagcagcaacgttccaactgtaaaagctttagagattctccaaaaagtgttgccatgtgatgagctcatgagcagaaccttatgaattgacgcatgacctcaacaattgactatcggatgtgggtcaactgccgaatgggttgtagtgctgttcaactagaacactcgtggggcttttcatttgtcgcctcacagatattttcttgtgctctgtaaacatcatatgaattctgtgggcaacttat

SEQ ID NO: 116678 - DNA, 125 bp, Zea Mays
gggattgtgtggatttaaaacccaatcaagtcaaatttcttctcatttttttcaatcccatccaatccataggtaacgggattaaccgaacaagacctaagcctgtctttatgaaccggtctaag

SEQ ID NO: 116679 - DNA, 1655 bp, Zea Mays
ctctaccacacgggagccgccgcggaggggaaccatggaccagaaggaccggctgagctgcctccccgacgacgtcctccaatccatcctccgcaaactctcgctcaagcaggccgtccgcaccggcgcgctctcccggtggtgggagtcccagtggattcgcgctctcgccggctcccctgttgtcaacctcaccgacgacccggactttgcccgcggccagccgccggcgctgtctgcggccacggtggatcgctgcctccggctccacgccgagctcggtacgcccctcgaggtgttccgcgtggcgctggtttgcccatcagatctggacgggcaagacgtcatcgggtggatcgcggctggcctgcggaggggcgccaaggcggtcgaagtggatttggcgccgccgctgccggaggaggaggaggaggaggaggaggagggcgaggaggaggtggaggaggaggaggaggaggacccgcacgccggtcacgaggcgccgctcttggagctccccgccgatctgttccaggccaggaactcactggagcggctggcgctcggtcggttcagcctccgcgccgttccgctccccgcggtgggtctcgccggcctccgctcgctctccctcagccacgtcgacgtcaccgacgaggcgctccggggccttgtcgccaactgcccggcgctcgagcgcctcagcctgaggcgctgctcccgcctcgccatggtgagcgtggccagcgagacgctgcgggtgctggagctcgtgggctgccaggccttgaaacaactctgcgtcgacgcgcccgcgctggagtcgttcgccctgcactgcaacgtcttcgtcaccaaccgcgacgcttcctgtgaatgggattgggatactcctgttgaagtcgacttactcggcccgccggccctccgggacgcgtatctgtcacacatcggctgcgacacccgcctcgacaccgagcataacatgctctacccttccttgtgcctcgacgtcgtgctagcccggatcctgactatttgctccgtcgtcttgctgcatgttgattcactcagctggctcgacccattcaaagacatgccgaacctagaagagttgcagctgctgatggactacgaaggttactgccttgaggccgtgtccggtttcttcaagctcatcccacttccagtccttcaacggctctttgtgcgtctccatattgatcacgagccggagggagaaggcagctcatcggcagcagtgtggagcgtcgagaacgatgacagcgaagacatggcacccagggaggagatcgtccttgaccagctgacattcgttaagtttgtgaattttagtgggacatggtgccagctgcagttgctcagcttcttcctggataagtcccctgtcctccagcagctggtgctggtcacgccggaaggggaggaagctctgggagacgaccgactaaaggtcatctatgagcgggtggccgcattggagaaggcgtcgagcgaggcaagcattaccatgtgccggcccaaggaagacgataccccgaaccatccacacacgaggtacttccacgaggagtatgaaactatgtaactatgctatataagcatgcatcgatcaggcatatgcatgattcaaa

SEQ ID NO: 116680 - DNA, 103 bp, Zea Mays
ttgctgccaacagtctttcttcggaattctactgaacgggtcgatcctcccctccgtttgttttagcaacttatcctaaggtctcttcgccaagaactctccg

SEQ ID NO: 116681 - DNA, 2507 bp, Zea Mays
gccaagctttcctcaaaaactcgaaaaaggaacggagaaggcgtcctcgacgactgcccatggccgccgcccggacctaggctagggattgctgtctcctgagtcccgacctaccaaggcggaaagggagagggggcgctgtggcgtcaggaaataactggaagccgagggctgagggcgagttcagagtcaggtggttatcgctttctttttcgttttctttttccggagggtagtattggggatgccggttgctaggccggagccgcaggagccccgggtgatcgcccatgtcgacatggactgcttctatgttcaagtcgagcagcggaggaacccggcgctcaggggacagccgaccgccgtggtgcagtacaacggctggaaaggcggcggcttgattgccgtcagctacgaggctcgtggatttggtgtgaagaggtccatgcgcggagatgaggccaagagggtttgtcctggtattaatcttgttcaggtcccagtggcgcgtggcaaggctgaccttaatctttacagaagtgctggtgctgaggttgttgcaatccttgcaagcaaagggaagtgcgagcgggcatccatcgacgaagtttatcttgaccttactgatgcagcaaatgaaatggtcttacaagctcccccagattcaccagaggggatttttatggaggcggcaaagtcaaatatcttgggccttccggctgatgccagcgagaaggaaaagaatgtgagggcatggctttgtcaatcagaagctgattaccaggacaagttactggcatgtggagctataattgttgcacagttacgagtcagagttctggaggaaacccaattcacatgctctgctgggattgctcacaataaggtttataatgagtcgtactaatgttagctaaacttgtcagtggaatgcacaagcctgctcagcaaacagttgtcccttcttcatcagttcaagacttactagcatcactacctgtgaagaagatgaaacagcttggtggtaagcttggaagttccttgcaggatgatcttggggttgagaccattggtgatctcctaagttttacagaggaaaaattacaagagcagtatggagtaaatactggaacttggttatggaagactgccaggggcattagcggggaagaagttgaggaccgtcttctcccaaagagtcacgggtgtggaaagacatttcctggcccaagagcactgaagtacagtgcttctgtcaaaggctggctggatcaactatgtgaagaattaagtgaacgtatccagtctgacctgaaccagaacaagagaattgctcaaacgctaactcttcatgccagagcatttaagaaaaatgaacatgattcaatgaagaaattcccttccaaatcctgtcctttgcgctatgggactgggaaaattcaggaggatgcaatgaggctatttgaatctggccttcatgagtttttagaatctcagaacactggatggggcataacatctctttctgtcactgcaagcaaaatatttgatatacctagtggaacaagctcaatcctgagatacattaaaggtccaagttctgctgcagctctgactatacctgattctccaagttctgctgcagctctggctatacctgattcttcatttgtacctgaggatccatctcttggtgatgttccttagctgaagtgtgcctactgtttgccatttttgtttgttcttacttaaggatcttccaatatttttctgtagataatgatgtatttgtggagccaattcatgaagaagaatgccaaccatcaacctctgagaaagaagacgacaataatacacattctgcgtctgcattttcagctaaaaaatgccgagcaaatgaagaaaaaagaatatcaaagaaattgcctggagttcagggaacttcctcgatattgaagtttctttcacggggccaatctaccttacatgagaaaagaaaatctgatggactaatttgcagtcatcaaggtcccgggagttcttcggaagcatacaaagctggagcacacaatgtgcccgcggaagctgaggataggaacaacaccaacagttgtgctgaaccctctggcagtaacacatggacgttcaaccttcaagacattgatccagcggtggtagaggagctgccaccagagatccaaagagaaatacaggggtgggtccgtccatcgaagcacccgatcacgaagagacgtggttctacaatttcttcatactttccacccgcgaggtcttagatacgttgatacgttagttcttgattgtatattctttattttctacacacaacggcctcgctctgtgtattgtaattgtaagatgtgaagatgtttaggtagccctatatgtgattaacagcttgacgggacctctgagaatggtaagtttatttacgtggggtatggaaacatgaacattaaagcatgtgcaattgagttgaggtccta

SEQ ID NO: 116682 - DNA, 2326 bp, Zea Mays
gccaagctttcctcaaaaactcgaaaaaggaacggagaaggcgtcctcgacgactgcccatggccgccgcccggacctaggctagggattgctgtctcctgagtcccgacctaccaaggcggaaagggagagggggcgctgtggcgtcaggaaataactggaagccgagggctgagggcgagttcagagtcaggtggttatcgctttctttttcgttttctttttccggagggtagtattggggatgccggttgctaggccggagccgcaggagccccgggtgatcgcccatgtcgacatggactgcttctatgttcaaggtcgtaacttcggacgaaatggttgtgcttattctgtattcaggtccatgcgcggagatgaggccaagagggtttgtcctggtattaatcttgttcaggtcccagtggcgcgtggcaaggctgaccttaatctttacagaagtgctggtgctgaggttgttgcaatccttgcaagcaaagggaagtgcgagcgggcatccatcgacgaagtttatcttgaccttactgatgcagcaaatgaaatggtcttacaagctcccccagattcaccagaggggatttttatggaggcggcaaagtcaaatatcttgggccttccggctgatgccagcgagaaggaaaagaatgtgagggcatggctttgtcaatcagaagctgattaccaggacaagttactggcatgtggagctataattgttgcacagttacgagtcagagttctggaggaaacccaattcacatgctctgctgggattgctcacaataagatgttagctaaacttgtcagtggaatgcacaagcctgctcagcaaacagttgtcccttcttcatcagttcaagacttactagcatcactacctgtgaagaagatgaaacagcttggtggtaagcttggaagttccttgcaggatgatcttggggttgagaccattggtgatctcctaagttttacagaggaaaaattacaagagcagtatggagtaaatactggaacttggttatggaagactgccaggggcattagcggggaagaagttgaggaccgtcttctcccaaagagtcacgggtgtggaaagacatttcctggcccaagagcactgaagtacagtgcttctgtcaaaggctggctggatcaactatgtgaagaattaagtgaacgtatccagtctgacctgaaccagaacaagagaattgctcaaacgctaactcttcatgccagagcatttaagaaaaatgaacatgattcaatgaagaaattcccttccaaatcctgtcctttgcgctatgggactgggaaaattcaggaggatgcaatgaggctatttgaatctggccttcatgagtttttagaatctcagaacactggatggggcataacatctctttctgtcactgcaagcaaaatatttgatatacctagtggaacaagctcaatcctgagatacattaaaggtccaagttctgctgcagctctgactatacctgattctccaagttctgctgcagctctggctatacctgattcttcatttgtacctgaggatccatctcttgataatgatgtatttgtggagccaattcatgaagaagaatgccaaccatcaacctctgagaaagaagacgacaataatacacattctgcgtctgcattttcagctaaaaaatgccgagcaaatgaagaaaaaagaatatcaaagaaattgcctggagttcagggaacttcctcgatattgaagtttctttcacggggccaatctaccttacatgagaaaagaaaatctgatggactaatttgcagtcatcaaggtcccgggagttcttcggaagcatacaaagctggagcacacaatgtgcccgcggaagctgaggataggaacaacaccaacagttgtgctgaaccctctggcagtaacacatggacgttcaaccttcaagacattgatccagcggtggtagaggagctgccaccagagatccaaagagaaatacaggggtgggtccgtccatcgaagcacccgatcacgaagagacgtggttctacaatttcttcatactttccacccgcgaggtcttagatacgttgatacgttagttcttgattgtatattctttattttctacacacaacggcctcgctctgtgtattgtaattgtaagatgtgaagatgtttaggtagccctatatgtgattaacagcttgacgggacctctgagaatggtaagtttatttacgtggggtatggaaacatgaacattaaagcatgtgcaattgagttgaggtccta

SEQ ID NO: 116683 - DNA, 2487 bp, Zea Mays
gccaagctttcctcaaaaactcgaaaaaggaacggagaaggcgtcctcgacgactgcccatggccgccgcccggacctaggctagggattgctgtctcctgagtcccgacctaccaaggcggaaagggagagggggcgctgtggcgtcaggaaataactggaagccgagggctgagggcgagttcagagtcaggtggttatcgctttctttttcgttttctttttccggagggtagtattggggatgccggttgctaggccggagccgcaggagccccgggtgatcgcccatgtcgacatggactgcttctatgttcaagtcgagcagcggaggaacccggcgctcaggggacagccgaccgccgtggtgcagtacaacggctggaaaggcggcggcttgattgccgtcagctacgaggctcgtggatttggtgtgaagaggtccatgcgcggagatgaggccaagagggtttgtcctggtattaatcttgttcaggtcccagtggcgcgtggcaaggctgaccttaatctttacagaagtgctggtgctgaggttgttgcaatccttgcaagcaaagggaagtgcgagcgggcatccatcgacgaagtttatcttgaccttactgatgcagcaaatgaaatggtcttacaagctcccccagattcaccagaggggatttttatggaggcggcaaagtcaaatatcttgggccttccggctgatgccagcgagaaggaaaagaatgtgagggcatggctttgtcaatcagaagctgattaccaggacaagttactggcatgtggagctataattgttgcacagttacgagtcagagttctggaggaaacccaattcacatgctctgctgggattgctcacaataagatgttagctaaacttgtcagtggaatgcacaagcctgctcagcaaacagttgtcccttcttcatcagttcaagacttactagcatcactacctgtgaagaagatgaaacagcttggtggtaagcttggaagttccttgcaggatgatcttggggttgagaccattggtgatctcctaagttttacagaggaaaaattacaagagcagtatggagtaaatactggaacttggttatggaagactgccaggggcattagcggggaagaagttgaggaccgtcttctcccaaagagtcacgggtgtggaaagacatttcctggcccaagagcactgaagtacagtgcttctgtcaaaggctggctggatcaactatgtgaagaattaagtgaacgtatccagtctgacctgaaccagaacaagagaattgctcaaacgctaactcttcatgccagagcatttaagaaaaatgaacatgattcaatgaagaaattcccttccaaatcctgtcctttgcgctatgggactgggaaaattcaggaggatgcaatgaggctatttgaatctggccttcatgagtttttagaatctcagaacactggatggggcataacatctctttctgtcactgcaagcaaaatatttgatatacctagtggaacaagctcaatcctgagatacattaaaggtccaagttctgctgcagctctgactatacctgattctccaagttctgctgcagctctggctatacctgattcttcatttgtacctgaggatccatctcttggtgatgttccttagctgaagtgtgcctactgtttgccatttttgtttgttcttacttaaggatcttccaatatttttctgtagataatgatgtatttgtggagccaattcatgaagaagaatgccaaccatcaacctctgagaaagaagacgacaataatacacattctgcgtctgcattttcagctaaaaaatgccgagcaaatgaagaaaaaagaatatcaaagaaattgcctggagttcagggaacttcctcgatattgaagtttctttcacggggccaatctaccttacatgagaaaagaaaatctgatggactaatttgcagtcatcaaggtcccgggagttcttcggaagcatacaaagctggagcacacaatgtgcccgcggaagctgaggataggaacaacaccaacagttgtgctgaaccctctggcagtaacacatggacgttcaaccttcaagacattgatccagcggtggtagaggagctgccaccagagatccaaagagaaatacaggggtgggtccgtccatcgaagcacccgatcacgaagagacgtggttctacaatttcttcatactttccacccgcgaggtcttagatacgttgatacgttagttcttgattgtatattctttattttctacacacaacggcctcgctctgtgtattgtaattgtaagatgtgaagatgtttaggtagccctatatgtgattaacagcttgacgggacctctgagaatggtaagtttatttacgtggggtatggaaacatgaacattaaagcatgtgcaattgagttgaggtccta

SEQ ID NO: 116684 - DNA, 704 bp, Zea Mays
tgaagatatcgatgcccgtgttttagaagtacaacggcatgggttctaggatgttaccggttcaatttgctccaggccgctttgattaagcaggcattaaaaaaaaccaaatggaagctctgaattatatatattcaaggtctccacaagttgcatcgtccaatacactcctgtcgaggcctgagcttgcttcttcttccaattcattatcaagctgtatactttctacctctccgagttcatcattgtcatggtctccttttgccgtctcttcagttttactatcagggtaaactctaattctaatgcgcttgcctttgatgtatcgatattcccatttcggtggtgggtatttcttttttaacttttcgtatttgtccatcatctctatcttttgaaatacatcacctagcatcctgataatagaaccatctggtcttacgcctagttcctccatatcagcaaaaatctggaaaatttaggtgtaagacatcataagaatgcttggataattatccccaactaatgtttctttgagcaaagctttcctatcatggaaaaaaacggtatgaagtcaaatcctatcttttagttaaaacagcatgcaaactggtgaaataagggaaaaaaaagaaattccatttcctacctcgaacatcttatcatgctctccagcactgtaatagaaagaaataattctcatg

SEQ ID NO: 116685 - DNA, 897 bp, Zea Mays
atggagttgttcaagctggcaagcgggcgggctgagcgagctcaccgttgcgaaatttgggacacgggtcccattccgcggcttcttcagctcagcgttttccgccgtgagggcagcgatctccgtgtccttctccgccagcttcgccttcagctccacgacctccgggctctccttgtcggcgccgtcagattccaccgccgcgctgttgtcctccccgatcattttcttagtctcctcttcctccgtctcctcattctcggccacgtccaccgccgccttaccgccgccgcagctaacgacctcgcagacctcagccgcgctctggttctccttgtcccccgactcggcccggacgacctcaaacacatcggtcgccgggacgtttatgctgctctcctcctcggctgccggctgaggcagcttcagctcctcggtcttcttggcgatttcgaccccaggcgaagggggggagagaggagtggtggtggtggtggaggctgggcttcccttggtaccgacgcgcttcttggcctcctcgagcgcgacctgcgcgtccttcttggcggcctcggcggacgcgagctgctcccgcagcttcttgagctcctcctgcaccttccccagcttgccctccagctccgcaacacgtgttcccgccgcacgcttcttctcgggcagagggctgcgcggcgagaccctggggctactccggtcggcgacggggcggtggtgcgcgccattcgcctcggagcaggccgtcgtcttgaggtgcagcggcgcgcgctgcgacgtccgcagcggcggctcgttgcccctggatctcggcatggtcttccgcgagttcgtggtggcggcggcggctgcggcgctcgttccccaaccctcccggcgtga

SEQ ID NO: 116686 - DNA, 381 bp, Zea Mays
atggggtcatcgaccccatcgacggtggttgtggaggaatggaggaagatgataaacggcggcggcggccagaagaggcgcaacccaaatatcattcgctttcaacaccacattgagtccgaccccaagttcttcgacaagttgtggcgtgcctccatttctactacttcaaccttggtaggatttgaggaagcaatggaagaactacatgctaaggtgtacaagggactctctattgatcagttgaggcaacaatgcaatataagaatcttacctgataggaagccataccagattcttgtgttcctgtcatatcccactgaaacaggtttgaagagaagcgctcgacgtggcgcaggtctgtcagattctatggtgtag

SEQ ID NO: 116687 - DNA, 2505 bp, Zea Mays
cctgcgaccacaacgatgtttcctgcgacagcaacgatgtttgttgggttggtgaagcgagggagttcgaataatcagtcctcagttcctcacgcatgtggcacgcgatgggccggatctgaggttgagacgttgagtgtgcgatcccgttggcatctcgacaaagtttggtgggtcccaccgcagatcccggcccggtaggtactagttccgccgtcccccctccctagtctccggggaggaccgtctcggccgagagagtgcgctcgtcgactccactcagctctctcgctcactctcctcccccaaggtcctagagacaggcagccggcgaggcgcgccgccgcgaagcaatggatttcaaggggttctgggagtccagattcggtggcaagaaggaacccgagccggagcagaacgggcacgccaacggggtccagaaccagaagaggacctccgatctggcggtctacgagcagttcgagcagcaggccaggcagacccaggtccgagccgccgcgattcgcgacggagacgctgatgtcatccagaagccccttctaccttcatttgagtcagctgaaatgcgtaatctcgcagagacattgttgagggatattattcgcgggagcccagatgtgaaatgggagagcatcaaaggactggaaaatgcaaaacgccttctaaaagaggctgttgtcatgcccataaagtacccaaaatacttcactggtctcctttctccatggaaaggcatcttactttttggccccccagggacaggaaagacaatgctggcaaaagcggtcgctactgagtgcaaaaccaccttcttcaacatttcagcatcatcaattgtcagcaaatggcgtggagattcagagaagcttgtcaaagttctgtttgagcttgctaggcatcatgcaccatccacaatattccttgatgaaatagatgctatcatcagccagcgtggtgaagctcgcagtgagcatgaagctagtcgtcgcttgaagactgagctacttattcagatggatggtttgacaaagacaaacgacttggtatttgtacttgcagctacaaatcttccctgggaattggatgcagccatgctccgccggcttgagaagcggattcttgtaccgcttcctgaaggtgaagcaaggcaagcgatgtttgaggaacttctgccagcaactacctcaaagttagaaatcccgtacgacatactagttgaaaagactgaaggttactctggttcagatattcgtctcgtgtgcaaagaagctgccatgcaaccactgagacgtctcatgtcagttcttgaagccagtgacgagttggttccggaggaagaactgcctgaggttggccctctgaaacctgatgatattgaacttgcattaaggaacactaggccgtcagcacatctccatgcgcatcgctatgagaagttcaaccaggactacggtagccatgtcgtttgttcagagctagcatgatcttattatcgggttgatgtttcgttcaatcatggaaccagagcagagctaatatatgtcctgctccggcgcatcagtttgttggcatgttgatgggggtcgcgtgttgtcaaaacggttgctgcgctggtaacgcgactcccaacatattgcagtttccctctggccgcagtaccttgcattttgcatgggttaaagtgcgaggtgcaggtgcttgctgctcagatctatgtgggcatgtggctttgttcatgcaatctgagattttcccgaatccttgaactcagaaaaaaaagattcgttctctagttacgtgtctaataaatgttagttaccctgcagaaaagtacactctggtttatatttaaaggaaaacgagccagagagcttgtataagtttcttctgattgttggtgtaattacccagctcgttaaaccaagctttaacaacaaattcttgcatgttgtggtcaactgctatccaatgtccagtgtggcttgttgctcttggctagtcagcgaagcatcccgtgcgccgccacgtccagtgcctttcaagtttcaacacccctgcagtcgctttcttcccagttccaggcgagagcctcgctttcctgtttgacatcggccgtggcagacgagcaatctgcgtatactcgagcgctcattctcaaccggagcctggtatcaccaccaggtagactggcagagcgtcgcttgaaagaggcctggggctgcttgtgcccgccgccaagggtcacggagccgttcgatttatctggctagccggtaatcagtggtggccggttttgtgttaccgatttttatagtttgaatttagaatattttgtaaattttgataaaataaataatgtcagtttttgtataaatactatggattatttgatgactttctaaaaaaccaaaatttaaaatcgcaacaaaatgaaactaaaaaccaaacaagttttgtaaaatttaaaaataaaaaagaaaactc

SEQ ID NO: 116688 - DNA, 1503 bp, Zea Mays
tcagttcctcacgcatgtggcacgcgatgggccggatctgaggttgagacgttgagtgtgcgatcccgttggcatctcgacaaagtttggtgggtcccaccgcagatcccggcccggtaggtactagttccgccgtcccccctccctagtctccggggaggaccgtctcggccgagagagtgcgctcgtcgactccactcagctctctcgctcactctcctcccccaaggtcctagagacaggcagccggcgaggcgcgccgccgcgaagcaatggatttcaaggggttctgggagtccagattcggtggcaagaaggaacccgagccggagcagaacgggcacgccaacggggtccagaaccagaagaggacctccgatctggcggtctacgagcagttcgagcagcaggccaggcagacccaggtccgagccgccgcgattcgcgacggagacgctgatgtcatccagaagccccttctaccttcatttgagtcagctgaaatgcgtaatctcgcagagacattgttgagggatattattcgcgggagcccagatgtgaaatgggagagcatcaaaggactggaaaatgcaaaacgccttctaaaagaggctgttgtcatgcccataaagtacccaaaatacttcactggtctcctttctccatggaaaggcatcttactttttggccccccagggacaggaaagacaatgctggcaaaagcggtcgctactgagtgcaaaaccaccttcttcaacatttcagcatcatcaattgtcagcaaatggcgtggagattcagagaagcttgtcaaagttctgtttgagcttgctaggcatcatgcaccatccacaatattccttgatgaaatagatgctatcatcagccagcgtggtgaagctcgcagtgagcatgaagctagtcgtcgcttgaagactgagctacttattcagatggatggtttgacaaagacaaacgacttggtatttgtacttgcagctacaaatcttccctgggaattggatgcagccatgctccgccggcttgagaagcggattcttgtaccgcttcctgaaggtgaagcaaggcaagcgatgtttgaggaacttctgccagcaactacctcaaagttagaaatcccgtacgacatactagttgaaaagactgaaggttactctggttcagatattcgtctcgtgtgcaaagaagctgccatgcaaccactgagacgtctcatgtcagttcttgaagccagtgacgagttggttccggaggaagaactgcctgaggttggccctctgaaacctgatgatattgaacttgcattaaggaacactaggccgtcagcacatctccatgcgcatcgctatgagaagttcaaccaggactacggtagccatgtcgtttgttcagagctagcatgatcttattatcgggtaaagctttcaagcctgacgaaatctgcccaacatattgcagtttccctctggccgcagtaccttg

SEQ ID NO: 116689 - DNA, 1495 bp, Zea Mays
tcagttcctcacgcatgtggcacgcgatgggccggatctgaggttgagacgttgagtgtgcgatcccgttggcatctcgacaaagtttggtgggtcccaccgcagatcccggcccggtaggtactagttccgccgtcccccctccctagtctccggggaggaccgtctcggccgagagagtgcgctcgtcgactccactcagctctctcgctcactctcctcccccaaggtcctagagacaggcagccggcgaggcgcgccgccgcgaagcaatggatttcaaggggttctgggagtccagattcggtggcaagaaggaacccgagccggagcagaacgggcacgccaacggggtccagaaccagaagaggacctccgatctggcggtctacgagcagttcgagcagcaggccaggcagacccaggtccgagccgccgcgattcgcgacggagacgctgatgtcataagccccttctaccttcatttgagtcagctgaaatgcgtaatctcgcagagacattgttgagggatattattcgcgggagcccagatgtgaaatgggagagcatcaaaggactggaaaatgcaaaacgccttctaaaagaggctgttgtcatgcccataaagtacccaaaatacttcactggtctcctttctccatggaaaggcatcttactttttggccccccagggacaggaaagacaatgctggcaaaagcggtcgctactgagtgcaaaaccaccttcttcaacatttcagcatcatcaattgtcagcaaatggcgtggagattcagagaagcttgtcaaagttctgtttgagcttgctaggcatcatgcaccatccacaatattccttgatgaaatagatgctatcatcagccagcgtggtgaagctcgcagtgagcatgaagctagtcgtcgcttgaagactgagctacttattcagatggatggtttgacaaagacaaacgacttggtatttgtacttgcagctacaaatcttccctgggaattggatgcagccatgctccgccggcttgagaagcggattcttgtaccgcttcctgaaggtgaagcaaggcaagcgatgtttgaggaacttctgccagcaactacctcaaagttagaaatcccgtacgacatactagttgaaaagactgaaggttactctggttcagatattcgtctcgtgtgcaaagaagctgccatgcaaccactgagacgtctcatgtcagttcttgaagccagtgacgagttggttccggaggaagaactgcctgaggttggccctctgaaacctgatgatattgaacttgcattaaggaacactaggccgtcagcacatctccatgcgcatcgctatgagaagttcaaccaggactacggtagccatgtcgtttgttcagagctagcatgatcttattatcgggtaaagctttcaagcctgacgaaatctgcccaaccatattgcagtttccctctggccgcagta

SEQ ID NO: 116690 - DNA, 1572 bp, Zea Mays
ccccccacatgcacttgctgcaggagcagccgtagtacacacgcacaccgcctcgactcgactcccacctcccctgttctcaccgtgcttgccctgtttcgacctctgcccatccgcgctcgcgtgcccgccgtacagtacaggccagacagccatggtggtgctcgccaaaccgcctgtcgtcgaccagatcccgctcctgcggtccccgggccccagggacagcttctcgggagtgccggtcgtcgacctgtccagccacggcgcggcgcgggcgatcgtcgacgcctgcgagcgcttcgggttcttcaaggtcgtcaaccacggcgtggccgcggccaccatggacagggccgagtccgaggccgtcaggttcttcgcgcaggcgcaggcggacaaggaccgcgcggggccggcgtacccgttcgggtacggcagcaagcggatcgggctcaatggcgacatggggtggctcgagtacctcctcctcgccgtcgacgccgcgtcgctctccgacgcctgccccgtgccctccagcgccgcgttccggagcgcgctgaacgagtacgtcgcggccgtgcggaaggtggcggcgcgtgtgctggaggcgatggcggagggcctgggcattgcggacgcggacgcgctgagctccatggtgagcggcgccgggagcgaccaggtgttccgcgtgaaccactacccgccctgccccgcgctgcagggcctgggctgcagcaccacgggcttcggcgagcacaccgacccgcagatcatctccgtgctccgctccaacggcacctccggcctgcagatcgcgctccgcgacggcgcgcagtgggtctccgtgccctccgaccgcgacgccttcttcgttaacgtcggcgactcgttgcaggtgctgaccaacgggaggttcaggagcgtgaagcaccgggtggtgaccaacagcctcaagtccagagtttccttcatctacttcgcggggccgccgctggggcagcggatcgcgccgctgccgcaggtgctggcggagggagaggagagcctgtacaaggagttcacgtggggcgagtacaagaaggccgcgtacaagacgaggctcggcgacaacaggctggcccagtttgagaagcgtagcaacatctagctaagctagcaaggcgcgcggcccgggcatgcacgccgcgtcttcacaggacaacaataacaaccaccatgacgagcgagttacttgcaagaaatgatgacaaggaagaagaagaagaagaaggtgaagacgatgatgtgaacagccagggagcgtagtgactactccagtagctagatttttttgtgtggtgggtgcagggtttccgcaaagttgctaatggcctgttctggtgcttgcggtggggttagttgcctatttcggtatgctggagctggacgggcgatgagccgccgcctgtaattagggttaaccatgatagcatgcagcgaagcgaaggggacgatcctctctggctccgtagcttcccacgtttgcttccttgtgctttccctttcctggtttatatatattttcgtata

SEQ ID NO: 116691 - DNA, 794 bp, Zea Mays
actcactcccccacaagcagcatccgcacactcccaattcccctcgagcgccgcagcgagcccaagaagccgaccgccgagccccctctccagtccagtccgcggtctcggtttcttgcttgcccggcgcccaatcttcagagagagctccttctcgtcgtctgtctccatggccgcctcgaccaagaccgtcgccgtcctcctcgccgcggtgctcctcgcgctggtcgcgtccgcggcagccagcaggaagctggaggaggacgcacttctgggaagcctggccccagcccccgcgccggccgttggcggtgccgcggggctgcctggcggcaagccgggggcgtgggccgtcgccgctctggtctctctcgtcgccttcctcgtgatctgagggcgtggggatcgtgctgcgcatcgcgggagatggagggacgaatcctgcgatctggatcgcagagagagaggagagggggatatttatgttcgttctgtttgttctagggtgcctctcttttgcctgtataagagaggatcatgattttttttatataataataccgtttatttgtcattctttttataatatatgtattccttctgggttgagctagcaaattttattatgcgcgacagaatctggtagtggcaattttgtgtcctagtgatttttattttgtcaaccggctaaaacattgggacgggtcccttcctagattcctgcactgtacagacgttctttctaggcgaaatttcggtcgaccgaccattaccaaaaggcaaatgtttttcta

SEQ ID NO: 116692 - DNA, 1543 bp, Zea Mays
atggcccagtgccgtggaggtccatgcctatctttttatgtcgtaccttcatcaccacacatccacgccatgatctatagtgctctggactttggaccactacatggggtacccagttggaggacagttggtagatgtttcactttcacggcctcaccacataagatcgatgggcatagtcacatggccgtccttgtgagaacaatgaagcatggcctgctcagcaatggtgactttgagacagcaccaagtggtggttttgtaaaatctgcttctgttgctgagggtgcatcgtcaatccctggttggacgatcaacggcacggttgaactcatttcagcaggccaacaccagggtggcatgatcctgattgttccacagggggaccatgcagtaaggctagggaatgatgctagcgttgggcaggtggtggacgttgagaagggttcggagtatgctatcacattcagtgctgcccggacatgtgcacaactggaggcactgaatgtttccgtgctaggtggcgtgtctcagacagtagacttgcagacgttgtacaacatagaaggctgggatgcgtacgcgttggcttttcaggcgacggaagagcaggcacatcttcaattcatgaaccctggcatggaggatgatccaacttgtggtcctatcctagacaacgttgccgtcaagaagctcttcaccccagacaaaccaaaggataacgtggtgctgaatggagactttgaggagggtccatggatgttccccaacacgagcttcggcgtgctgctcccaactaaccttgacgagcaaacgtctgccatacctggttggatgatcgagtcaaaccgcgccgtccgctacatagactctgatgagtacaaggttccccagggaaagcgtgccattgagcttctgtcaggcaaggaaggtatcatctcccagatggttgagaccacccctcagaaggtttacagcctgacgttcacactgggcacggcgggggactcgtgccaaccaccaatggccgtcatggcattcgcgggggatcaggcccagaacttccactactccccaatgggcaacgccaccagccaggctgcgaatgtgacgttcactgcacgcgctgagagaacacgtgtggcgttctatagcgtgtattacaacacgaggagtgacgaccacagctcgctgtgtggcccggtgattgacgatgtccgggtatgggcattgaacgccgcggctgggttgaaggcaagtattgggctggttcttggcattgttggtgtcgttggcatggtgttgttctgaaatctgaatctctcggtgccagtggtcttgggaagtatggatgtataacttcttctgttagttggaggcttactagttttggtagtaagcttgaagtttgttgagtgatatgagcttaggttaaaaagctacgagaacctacatggtattgcttgtgttacttcattggtgacatgcagttgtatggtattgtgtggcttgtttgccctagcttgtaatatgagatgtcaga

SEQ ID NO: 116693 - DNA, 628 bp, Zea Mays
agccgcccccacctccttccccgcgcaacgcacagccgcccgcgcccccgcctccttccccgcgccgccgcccgcgcagcgcagccgcccgcgctgtcgcccccatatctgctctgtgcgtgttaatagtatctgctctgtgcgtgtggtggggaaaaccgcatctgctccaaggggagttgatcgagaagcgttggtggacatgggtcaaatccagtactctgagaagtacttcgacgacacctacgagtacagagtgcagcagagccgcgggtgggtgcactacgtgatccaccgcccggagctgcacatcatgctgttccgccgccggatcaactaccagcagcagcaggaggcggttgccgcgcagatgctggccaatatggtcatggtgattttgcccagtctcgaggtcaagcctggttccactgttaagtgtgagcctggatatggttttatgctgcaccttttccaggagaacccgattgaaggcaagtgcaagaaatgcaatcgaattgtgataaaaggcctcaaacacatgagctgtgaagctcctctgctaggacctatggctgagctatggaagctgaagaacccagatatttctgagagcgagtgggcggtgtaa

SEQ ID NO: 116694 - DNA, 222 bp, Zea Mays
atgcgattgcggagctcgtcggtgagcacgacgccatcactgccagcctcggggcactccgaggcggcgtcgttgatgatgtcggttgcgacgggtaggatgtcgtcctccatcacctcgcccttgacgatatcgggcgcgacgagtagggcgtcatccaccacctcgcccgtgggctgcagctcgtcggatacggtcagaggatcccgcgtgacgttgtag

SEQ ID NO: 116695 - DNA, 1671 bp, Zea Mays
ccccaccaacaactacccgcgctacgcgtacgtagcgcactccactggaatactggatcgctctcggagcagggaaggagctagctagctagctggcgcaggctgtcctcatgttccaaaagtctcgtcccatgtgacccctccaattccaattcccgtccgtctccatcccctcgccccggcacaagctacccgggggccaggacggtggtgccgtgcggtctcgtagctactgcactgcatcactataaagctaagctccaggcgccgcgccgcccatctatcgcgagatctagcgagcgagcgcgcacactgctggcggcaccaggctacgacgatcgagagagccgccgtgccagcacattgtccattgtccgcgcggcgggggatcgggcggacgcgcacataatatggcgcagctgccgcccagggtcccgaccgcggtgcaccgctggccggagggcggccaccacggcgcggcggcgtgggccgatgacttcgccgagttcgctgcgtcgcggcggggcgcgcaccgcaggtccctgagcgactcggtcgccttcgtcgaggtggcgcccgcggccggcgagttcgacaggctcgacgacgaccagctcatgtccatgttccccgacgaggccgccgccggcggcggcggcggcgggtcgtccgcggcagggtccgagaacaacggcggcagcagcgacagttacggcgataggcgcggcggcggtggccctgcggcgggaggcaccagcaccaccaccagctgcaatggcttcgatggtggcgagcacaacgaagccgcggacgcgcaggcgacggggcaagctgccgccgccgccgccgcctccacggagctgatccgggaccccaagagggtgaagaggatccttgccaaccggcagtcagctcagaggtcgcgggtgaggaagctgcagtacatctccgagctcgagcgcagcgtcacaacactgcagaacgaggtgtccgcgctgtctccccgtgtggcatttctggatcagcagcgtaccatactgaccgtcggcaacagccacctcaagcagcggatcgcagctcttgctcaggacaagattttcaaggatgctcatcaagaggcgttgaagaaggagatcgagaggctgcgccaggtctacgagcagcagaacctcaagatgtcagccggcgctgctgcctctgaccatggcccgccaccggtgcgcgcggagaaagagctcatgagctagctacccagtcgatccacgcgtgcccgctgtgcagtgcagcccgcccgccttatcattaattaacatggagggaacattgcatcatgatttctctttttttcggattatgtggatgttttcttctttctttctttcttcttccattgacacgtgtgcgttaattctttgtatgttgattttgggatttggttcactgtgcaaattgtggtaaagtcatcagggaaactgatctgttgtgtaaatcacttttttgaagcattacattcctgggaatctggttacccatgatttttgtacggcctttctttttttccctttagtagtgtgattatataccacaatatttggcaggttcgatgtaattgaattagcaatgtgggcagctatctttctttttttgtctcctttctaacatactaacatt

SEQ ID NO: 116696 - DNA, 1060 bp, Zea Mays
ctgctaaccacgcccaccaaaccgcgccacccagtgttctcactcaccaaccaaccgagcgacacgcctaggacggagcgcgcacatacctgcgacaccatgtcgacgacgacgacgacgatgaaggcgagcgacccggggtccgcgtggttcggcagcggcgcccgggcaccggcggcggcggcggggacgggccacaacgtgcggctcatcaccaccgcggtggccgcgttcgtgtccgtgctcggcctcgccctcttcctccacctctacgtctgccacgtccgccgccgcaaccggcgccgcgcggccgccatagccgccgcgctgccgaccacggccgcggcgccggcccccaagggcgggctggatcccgcggccatcgcggcgctgccgaccaccctctacaggaacgacgcggccgaggcgggcgccggctccgacgagtgcaccatctgcctcggcgccgtgcaggacggcgaggtcgtgcgcgcgcttccggcctgcggccacgtgttccacgtcccctgcgtcgacacttggctcgcgtcgagctcgtcgtgcccggtctgccgcgccgaggtggagccgccgccgccgacggcggtgggctcagctcggttcgtgcaggagaaagtgcaggacgctgtgaagcaggaagccggcagctccactccggaccgggggatcggtgcctgtgcgtcgctcatcaagatgttgagcagggagaggccggcgccgcgaaggccccagggcgcctacgccgacgccggggacttggacgacttggaacggcagcagtatgctgttgccgtgaataattaattactctattattttttttctctaaaaaaaagacggcctttttagtttggtcgttttcctcatcatttgtacatcccgcacttgcgtgagtggcgcagtatcaagacaaggctgtgagctcttaactttttttgatgaatgcaagggcccgtttgaaaataaatcgatatgcggttccaatctctacaatttagttcagatttgaactataaatccttaaatttatccatttgtc

SEQ ID NO: 116697 - DNA, 85 bp, Zea Mays
tccatctgcatgtgcagggtgcctgagactaagagtaaagtgctacagttgcacagtatcatccccatgcagctctagtttgccc

SEQ ID NO: 116698 - DNA, 612 bp, Zea Mays
gtacggtttattggcgtctcgctccgtctccgcactgtcctgttgcgccggccaccacagtgcagaagaacacacagcatccgcctgcctcgccgccgcaatggccgccgtggcgagatcctttctccggtccagcggctcatcgtccctccgcagcgcggcggccagagccgcctcgcgggccggaccggttccgctgccgaggcggatacccagttctgggccccgggtactcctaagcgtgtgcctggagtccctgatgcccatgcacagcgccacggcttcggcgctcatgacgtcgctactcgctgccccggcttgcaagggattgggttggctatcagaagatggatgatttgtcattattggagacctgcagtgatggtatctggtctggattatgcaatacctcgtgaatttatagtacttggttggcgtctcagttaacatgttttgtgctctgggattccagtttgtatgaaatttacataattcttcctgagatttattttggcccactagctgtcaaaaagactttggtcttgacgaccaggctgatcatgtacatctggaatgaataagcttgattaaaggcttttcacatttcacata

SEQ ID NO: 116699 - DNA, 872 bp, Zea Mays
gtacggtttattggcgtctcgctccgtctccgcactgtcctgttgcgccggccaccacagtgcagaagaacacacagcatccgcctgcctcgccgccgcaatggccgccgtggcgagatcctttctccggtccagcggctcatcgtccctccgcagcgcggcggccagagccgcctcgcgggccggaccggttccgctgccgaggcggatacccagttctgggccccgggtactcctaagcgtgtgcctggagtccctgatgcccatgcacagcgccacggcttcggcgctcatgacgtcgctactcgctgccccggcttgcaagggattgggttggctatcagaagctggtaatgatgacttgtgacactctctagatggaatgtagcagattattatcctgtcacctcagatctacaggcctgtggttagtgcgatggaggtcatctttgatgaggactagaccgcgtgctatttgttttgccctctgttgccttgattttgctcattataaatgaaacagagtaaatgtagctttcatcgttgtaacttttatgatgttagtttagagcttgagctgatgaactcagattattgtgtttctatttgtagatggatgatttgtcattattggagacctgcagtgatggtatctggtctggattatgcaatacctcgtgaatttatagtacttggttggcgtctcagttaacatgttttgtgctctgggattccagtttgtatgaaatttacataattcttcctgagatttattttggcccactagctgtcaaaaagactttggtcttgacgaccaggctgatcatgtacatctggaatgaataagcttgattaaaggcttttcacatttc

SEQ ID NO: 116700 - DNA, 840 bp, Zea Mays
atgggttcctctgctcgtgctcgccacctcttctttctcgccgccttggtggccgtcgcggcgcctcgctcggcggacgcgtggggcggtggccgcttcttcttcagcaagaccacgcgtgccgaagccactgctgagcccgacaagaaggccgccggcggggacaccgttgccgcgccggcgttctcgcgcccctcgaccgccggcagcggcggccgcgggtacgggctctacggccgcctcgaggagaagtacccggcggactacttccgccgtggcgtgcaccgcaacaccgagaagctgacgacgacgaccggcggcgagcgcgtccggacgacgttccccgaagacagcggcaggggtcggccgcccaccgacgtgccgggcgccaccgaggaagaggggggaggcgccggaggagacctcgagggcgtccggccgtacccggaaaacggcagcggcaggggccgcccgccgtggtactacacggccttccaccgcggcaggcagcaggagcaggagcagcgggacttcgggatgagcgacacgaggctgtaccagaacggccgctactactacgacgtggacgccggcaggtacggctacggccgcgagtcgaaccccatgcggacgcgccccgacgagggagagttcggctccgggtacggccgaccccgcggccccgccggtggcaggcgcggcagtagctacggcgacgcggcgggttaccagcagcggtacggcaacgacgaggagttcggggacggagccatggatcagaacacgaacggcgccttccaggaggaagcaggccaaaacggacgacgatacactccatga

SEQ ID NO: 116701 - DNA, 1354 bp, Zea Mays
ccccgaagggcgtcgccgagctagccattgccgcctcccggctcgcgactcgcgagtcacaggcgcagccgagcgttccttggggacgaggctacatcgcgatgtggtggagggcggtgaggcgccggtgggtcgcgacggcgcggcccgcgtcctccgcggcggcgggggcggagaagagctgccgcgccgtggtggtgccgcgtttcggtgggccggaggtgctcgaggtcaggcagggcatgcctgtgcccgatctgaagccgcaggagatgcgatgtggctatgggcgctccatattcgaaccactcctacctctgatcattggtcgggacattagcggtgaagttgcggccaccggaactttggcatcgtctttttctattggccaagaagtgtttggttcgttgcatccaactgctctcagagggacatatgctgattatgctatcctgtcactggacgagcttactctcaaaccatctacactcagtcatgtggaggctagtgcaatcccgtttgctgctttgactgcatggcgcgctttacatggtacggctcgtatttctgaaggacaaagagttcttgtgattggtggaggaggagcggttggattagctgctgttcaacttgcggtggctgctgggtgtgtggtttctgctacctgtggaacacaaagtattgagcgagttatgggagttggtgctgaacaagctattgactacactgctgaggatactgaagcagcaattaaaggaaagtttgatgctgttttagacaccataggagtacctgagacagaaagaattggcatcaatgttcttaggagaggtggacactatatgacccttcagggagaagcagctgccctagcagataggtatggattggctgtagggcttcctgctgctactgctgttttactaaagaaacagatgcagtatcgttattctcatggaatagagtattggtggacatacatgagagctgacgccgaaggccttcacgagatccaaaggctatctggagctgggaaactacagatacctgtggagaagacctttcccatcagccatgtaagagaagctcatgcggccaaggagaaaaagttggctcctggcaaggtggttctggaattcgattaatgttattaagattttgtccattgggacctgaagggctgtgcgtttgcaaatcatgatagttttttttgtaaaaaaataaatctgaatctctctgccgacttcaggttccattttatcgttccgtttcagtagaaatacggtaaataatcatatcagctatggcctatgggcacgattttcctgatgaaattcttctgtcacagtgtatc

SEQ ID NO: 116702 - DNA, 1462 bp, Zea Mays
attttcacataaaccgatatacttaaccctttctcacacactccttcgcctcccatcccaccccgaagggcgtcgccgagctagccattgccgcctcccggctcgcgactcgcgagtcacaggcgcagccgagcgttccttggggacgaggctacatcgcgatgtggtggagggcggtgaggcgccggtgggtcgcgacggcgcggcccgcgtcctccgcggcggcgggggcggagaagagctgccgcgccgtggtggtgccgcgtttcggtgggccggaggtgctcgaggtcaggcagggcatgcctgtgcccgatctgaagccgcaggaggtgctcgtgcgcgcacgcgctgtctctatcaaccccctggacctccgaatgcgatgtggctatgggcgctccatattcgaaccactcctacctctgatcattggtcgggacattagcggtgaagttgcggccaccggaactttggcatcgtctttttctattggccaagaagtgtttggttcgttgcatccaactgctctcagagggacatatgctgattatgctatcctgtcactggacgagcttactctcaaaccatctacactcagtcatgtggaggctagtgcaatcccgtttgctgctttgactgcatggcgcgctttacatggtacggctcgtatttctgaaggacaaagagttcttgtgattggtggaggaggagcggttggattagctgctgttcaacttgcggtggctgctgggtgtgtggtttctgctacctgtggaacacaaagtattgagcgagttatgggagttggtgctgaacaagctattgactacactgctgaggatactgaagcagcaattaaaggaaagtttgatgctgttttagacaccataggagtacctgagacagaaagaattggcatcaatgttcttaggagaggtggacactatatgacccttcagggagaagcagctgccctagcagataggtatggattggctgtagggcttcctgctgctactgctgttttactaaagaaacagatgcagtatcgttattctcatggaatagagtattggtggacatacatgagagctgacgccgaaggccttcacgagatccaaaggctatctggagctgggaaactacagatacctgtggagaagacctttcccatcagccatgtaagagaagctcatgcggccaaggagaaaaagttggctcctggcaaggtggttctggaattcgattaatgttattaagattttgtccattgggacctgaagggctgtgcgtttgcaaatcatgatagttttttttgtaaaaaaataaatctgaatctctctgccgacttcaggttccattttatcgttccgtttcagtagaaatacggtaaataatcatatcagctatggcctatgggcacgattttcctgatgaaattcttctgtcacagtgtatc

SEQ ID NO: 116703 - DNA, 2065 bp, Zea Mays
attttcacataaaccgatatacttaaccctttctcacacactccttcgcctcccatcccaccccgaagggcgtcgccgagctagccattgccgcctcccggctcgcgactcgcgagtcacaggcgcagccgagcgttccttggggacgaggctacatcgcgatgtggtggagggcggtgaggcgccggtgggtcgcgacggcgcggcccgcgtcctccgcggcggcgggggcggagaagagctgccgcgccgtggtggtgccgcgtttcggtgggccggaggtgctcgaggtcaggcagggcatgcctgtgcccgatctgaagccgcaggaggtgctcgtgcgcgcacgcgctgtctctatcaaccccctggacctccgaatgcgatgtggctatgggcgctccatattcgaaccactcctacctctgatcattggtcgggacattagcggtgaagttgcggccaccggaactttggcatcgtctttttctattggccaagaagtgtttggttcgttgcatccaactgctctcagagggacatatgctgattatgctatcctgtcactggacgagcttactctcaaaccatctacactcagtcatgtggaggctagtgcaatcccgtttgctgctttgactgcatggcgcgctttacatgacaaagagttcttgtgattggtggaggaggagcggttggattagctgctgttcaacttgcggtggctgctgggtgtgtggtttctgctacctgtggaacacaaagtattgagcgagttatgggagttggtgctgaacaagctattgactacactgctgaggtaagtagcctttggtgctcttgtccttgtacaatcttttaaggtaataatgttgcatcttgagatattagtttgtgatgcaacagcatacacaggctatttaacattcgtttgcagttgtcgtcttgtaaaatcttgctgcagatgtaagctgtattctttgtctaccctttacagaattatataaaatgatgtattctatattagtgatcatgtgatagctgcatggtattcaatacacttcatgtgatcttcacggccttctttattgctcaagctatattattcttcatggagtagaaggggactctggcgagctctttgccactttgctctatgaagctggcagctgcttgatgctttgcattgtaattcttcatggatgcttccatttcatgacaaacctgtaatattatacttgcagatctgcaggattccacggacacttaaatctgttcccctcctcctaggtttaatgtagctattttttcttcatgtaataagatgaaaatccaatatatatgcacttgttcggggatgccacagatgctcctggaatccattagttttgtgtgctggcttgagttgcacaactatgtggagcaaacttgcaattgaagacccccaggccccaccacaccgcaaaaaaaggaaaaaagaaaatatttaacagaaggcacctaaatctttgcttattcttctggaccagaagtttgcgccagcttccactaatgaataaatggctagtatttatctttaattgcattgcatttttattccccttgcattgggtgctatcttgtttgtcttctatttataacctaccttacaggatactgaagcagcaattaaaggaaagtttgatgctgttttagacaccataggagtacctgagacagaaagaattggcatcaatgttcttaggagaggtggacactatatgacccttcagggagaagcagctgccctagcagataggtatggattggctgtagggcttcctgctgctactgctgttttactaaagaaacagatgcagtatcgttattctcatggaataggtaaaaccataaaagccttctgtttctagtatatttggatacatgcagtagtttgtatgtgtgtatcaattcttgtggtcctatgccgtttaagaccacaacttcaatgaatggccaaattgctgttagtcaccaaatgacccaagataaagttgtattttgctagaagtttataagaatactg

SEQ ID NO: 116704 - DNA, 1091 bp, Zea Mays
attttcacataaaccgatatacttaaccctttctcacacactccttcgcctcccatcccaccccgaagggcgtcgccgagctagccattgccgcctcccggctcgcgactcgcgagtcacaggcgcagccgagcgttccttggggacgaggctacatcgcgatgtggtggagggcggtgaggcgccggtgggtcgcgacggcgcggcccgcgtcctccgcggcggcgggggcggagaagagctgccgcgccgtggtggtgccgcgtttcggtgggccggaggtgctcgaggtcaggcagggcatgcctgtgcccgatctgaagccgcaggaggtgctcgtgcgcgcacgcgctgtctctatcaaccccctggacctccgaatgcgatgtggctatgggcgctccatattcgaaccactcctacctctgatcattggtcgggacattagcggtgaagttgcggccaccggaactttggcatcgtctttttctattggccaagaagtgtttggttcgttgcatccaactgctctcagagggacatatgctgattatgctatcctgtcactggacgagcttactctcaaaccatctacactcagtcatgtggaggctagtgcaatcccgtttgctgctttgactgcatggcgcgctttacatgacaaagagttcttgtgattggtggaggaggagcggttggattagctgctgttcaacttgcggtggctgctgggtgtgtggtttctgctacctgtggaacacaaagtattgagcgagttatgggagttggtgctgaacaagctattgactacactgctgagaattatataaaatgatgtattctatattagtgatcatgtgatagctgcatggtattcaatacacttcatgtgatcttcacggccttctttattgctcaagctatattattcttcatggagtagaaggggactctggcgagctctttgccactttgctctatgaagctggcagctgcttgatgctttgcattgtaattcttcatggatgcttccatttcatgacaaacctgtaatattatacttgcagatctgcaggattccacggacactt

SEQ ID NO: 116705 - DNA, 91 bp, Zea Mays
ccgttatgttcctgggcccacatgtcggggctcagtacccttgtgcatggctccagtggcggaggacggaataataattaggtatggctga

SEQ ID NO: 116706 - DNA, 3971 bp, Zea Mays
ccccttcgattattgttggcgtgaaatactttcaatctgttgtagttcatgttaagggaacctgatttaacagtagtttttttgtatttgtggaattttgtcttatgaaaatttgttttaacaggaggtggattttgatgacaaaagcagctggtggtatttgttcaaggactattggttaaatttgaagacaaacttgtcattgacagttgaggaaatatcagcagccaagtctcaaaagagtggagaattacctgatactaatgacgaaattaattcagagagttcatcagggcgtcatctagaaaacaatacatcgaaaaagaggggcaggaaccgatctaaacaagctgccatcgagcagggctctgaaggaaaagagaccactgggaaatctgccaaactaggtctgtcaggcattcgtgatgctcagacttcttcagggaaaaaggttagaaaattatccaggcgttctttgagcagccagcattcaccaaaagattctgaaagtgttgggacatcaacatcctcagctgacgaggtcagctgggcttctaaggagctcataaactttgtagctcatgcgagaaatggtgataaatctgtgatcaatcagtatgacgtccaaccccttttacttgactatatcaaacgcaacaatctgcgcgatcctcgtcggaaaagccagataatttgtgattctttgctccaaagtctcttcgggaaagaccgtgttgggcattttgagatgcttaagcttcttgaatcacattttcccacgagtgaggtttcaccaattgatgctgatgaaaatcatggtggtgtagtagaccctgatcctagtcaggatgctgatggtaacagtgaagcttcagttgttatgagttcagaaaaaagaagaaaatcacgtaagtatgacctgaaacatcagcctaatatcgatgactatgcggcaatagataaccataacattggcttgatgtacttacgtcgcaacctaatggaagaattgattgatgacgttgacacttttgatgagaaagttgttggatcgtttgtgagaataagaattcctggtacagggcaaagacaggacatttatagacttgtacaaattgttggcactggaagatctgcagaaaaatataaatctgggaaaaggactactgatataacgctagtgatactaaacttagacaagcgggaggcagtaactattgacataatctcaaaccaggagttcactgaagaggagtgcaaacgcttgcgtcagagcataaagtatggattcattccaaggctgacagtgggagaggttcaggagaaggcaaaggttctccaaactctgaaagtcaatgattggattgaaagcgaaaagatgcgacttgggcatcttcgtgaccgtgcaagtgatatgggactattcacgcttagggaatgtgtagagaagctgaaattgctaagcactcctgaggagcgtgctcgtaggctcaatgaagaacctgaaatacatgctgaccctgcaatggatccatattatgaatctccggaagaacaggagcaggagattgaaagaagtagcttcaataagtccagaagttctttcttgaggaaagatggtagtcttgtgtctccaggtaaaggagatggtagaaatgctgcacagcgagatccaaaaactaactgggaatctaatcgaaacacaagggctgaatcgagttctcatatggaatcacccctttcacggaggtccacatattcttctcaaggagaaagtgttggttatacaaataagccagagggcttgaacattgatgcacaaaccgttagactggaaggcaccacgcgcagtgctccacaagggtcacctggtgcctcatctggaagtctagctactaacataggttcaggggcaaaaactgcatctcaatcagccattaacgagtctgagaagatctggctgtacatggatccttctaataaaatccaaggtcctttctcaatcatacagctgcggaaatggaacagcaatgggtacttccctcctagtttgaaaatatggaaagctagtgagaagcaggatgattccattctattgactgatgctttggcagggaagtttgagaaagaccttcctccatgggaaccaccacatgttagtttgtctcaaattaacaaaacccctcttgagcaaagcacaatagctgatgaacaaactccaaaatcagtaattgcaaagtctttctcaagcagtgatcaaagacatgattatagttcaacgaaccttggaacaaccatgatccattctggctcacaaggttattatggaatgcaaaattcccatgcagcatacacaagccagcaatctcttactgggagttggaatgccacgtcaagtcagtttggggttgcaataagtcctttgacacctacccagcctgccatgcaaagcctttcaggacaaaatattgtggctgcagaaaatatgggtcatttaactactggaatggctcctgcaactgcaaatgcagaaatggttaattcagatttgacttcccagaaccaaatgttgtcttctttaccgcaaacggatgacagattagctgatggaattgaatccaaatcaggagaagatgtttcacatggaagagtgaggtcttcggctgaagctatcggaccacaggatgcacagcttggaccagtgcaactaaacgctcagcaacttgaaaacacaagaaaccatatgtcatcaattgatctctccaagtcaatgatgccatcacagatgatgtcagcaccatctgctgcatcagtacagccttcattgacaaccactgctcgcagtgataatcaaagcagtgggtgggctgtacctgcacaaatggcgaacacacctggccagtctcagataactggaaatctaacctggggaaatacacctcagggtgacgcaagcttaggttggggaatggtgggacagagcaatatgaatatgccttgggtagcatcagctcaaggtgcttcaggctacaacatgggtgtagccatgccgacgcagccaaatgcagttccaaacatgggctggttaccaaatccaggaaacaccagcatgaacatgatctgggctgcaactcaaggccaggggactccaaatgcggctcctatgatgggaggtcagatgcaaggagtcccaatggccccttggggtggtgttgcagcaggaagtgcaaattcttatcctgcctggggaaaccaacaagctggaaacatgaaccaaaatgttggctggagtgctcctgtgcagggaaatccaggtcaggcaaataacaacatgaactggaacgcaccaaatggtaatcctaattggaataatcaacagagagagaatgggggcaggcactctggacaccgcggtgcttttagtggtggtgactcaggcggaaggtcatggaagtcacgctctggtggcgatggggggtcaaggggacatagcagattctcccattcaacaaacacagagggatatccatccaggactgatcggcattacgataggcagaattcaggcaacgagaggcgatatgagaatcacaatgagagaaatggtcgacagtttgataggcagccttcggataatgaaaggaaccatgataggcctgatggcagacatggtggcagggatgacgataggcaggctgataggtccgagtcaagagagctgcgttagaactggtttctgtttcttacattcgtttccttgtatgtgcagtagcaaactagcatagtagcttccgtgcatgttttgaactttatgctctgtagcgatctgcatacatgtgcagatcaccgtgtataacatttgtagtttaatgctgtgtgcatcctagttccgaatttgtaatttacttgaataaatcgtcttgtctgatttctgatgtaaagcaggggctacacgcccaggttcttggact

SEQ ID NO: 116707 - DNA, 437 bp, Zea Mays
gtattgtacttgagtgttttaatttgttcctgaatatggagactagtgaaatcagtcttgatttgtttaacttatatggattagaaaagtatgttatctcttgctgtatatgagttaagaaatatgtttagtttttgcactggacactcttagatgctagcttacttctaagacctgatattgttctgttattctggcttctgaaacaaggactcagggtttatttgatcttatttactttactgccagggtggcacatttgtagcaactgtcagaaacctgcccgccatatgtgctacacctgcaccttttcattatgcaaggcatgcatgaaagatgcaaagtttagctgtgtcagagaaaacaagggcttttgtgctacgtgcatgaacactgtgatgttgatagagaacagagaggaggctgcagacccaatg

SEQ ID NO: 116708 - DNA, 2609 bp, Zea Mays
aactcgacaccaatcccccaatcacaaaccctaggccgacaggcgcaacgacgcgacggtgcaacaagcggacaacggcgaccgcgcggccaccgcttagtgtgcgaactctgcagcgcgccagcggaagcagaggaggcgtgcagcatctggcgtcccggcctcccggggtcgagttcgagcgccgcgcgcacacgtccgccagatggtgtgtagtagcggtggttgggaatatctaatcacccaaatcctggtctgacactgttccactgatagaatcagtatgtccgacgctgagccacctcctgcaatggaggaggccacgctgacaacgccggatgttgtgctaggcgagggatacaaagatatcgagggtcagaaggatggccgaacttgttatggtgaaggtggcgatgttatagtggctgatgagttcgcgggtattgttgaagaccccaaccaacccgatgtttttaaggctaaagagccagaggagggtgttgatgtaggggggcaaactaatgtcattagtgctgctgtgcatgttctcacagaggtggatgctgctgtgtcatcctccacactggtggatgatcccatggaggttggcatgcaaaccaaagaggttagtgctgctgcggatgatctcatagaggtgggtgctgccctggtaccatctgcacaggatcacacagcagtggctgcttgcctggttaatgatgactgcaatatagttatcactggtggtgtgcataggtcggatgaccaaactgttcaggagtttgggggtgactcccttgacgctgatgaggttgctcccttggtaaatgatgtacaagatgacagtgcaaggattgatatggatgttgcagctaatgatcatgtgcatgctcaggatcaggaaagctcacagttggatgtggctacagctctgttaaatgaggtggaaacagagattgccgaagctggagaccatgttgtacaggactgcacaaatatggatatgcagatccaaactggagatgacaaacatgttggcactattgcggacactgccacagatgaggagggcaagcacatgggtgaagataccatgggcagagatggtagtgagaaacatgatggggcagtcggtgttgatgtgtctgatgagagggtagaaatgggtaggggtggactgtctggagatgataacgagcaaaaggaagttgcaacagctgatgaagatcgtgtggaagaggaagacatgcaggtggatgccgtaagcattactggagacatggttgaggaaggcagaattgctgttgaatacattgcaggcgaagctgtaaatggcaaggatggtattgatgtccctgaagaaaagactcctcagatagacaaggctggtaatgatatccctgaagaagagggtctccaaatggggggagctggcttgattggcaataaaaatgggccgaaagaggctgtgatagctgattaccatggagtggaagaaaataccatactgatggaggcagctaccacgactaacaatgatgatgatgatgacaacaaaattgttggtgaagatgttgcagaagctgtcaatgacataactggtgatggtgtccctgaacaagaggctgcacatatggatgacgatgatgacgatgagccacctcctttagtggcaaagaaaggtggagggcgtcgtaagaggggccgtccatcttccaaggtccaggctgtggtgaaaccatctgtaaaggggaaagatgaagaggaggtttgcttcatttgctttgatggtggtgatcttgtgatttgtgatcgtaggggctgccctaaagcttaccatccttcttgtgttaatcgggatgacgacttcttcaagtcaaagggtcggtggaactgtgccacccctcctcgacgacgctgcgacccaggtcgcagcagagcatgaagctcgcctccaagctgctgctaggcgtgatgctgctctcgcccaagcccttcaggcagagcaggaggcggccaccgcggcccaggagcgcgatgttgccgccgcccgtgttcgcgctgctctcgagcgcgcagcccatgcgcgcgcccttgctgctcagactgccgccgatggcagccctgtcgacgatactcagtcccacctctctgatccagcgggtggtgctgacaagggcctccacgacaccatcctccttcacgaggctgctgcgatcgcgccttcggctccacgctccggccaccccaaccgtcgcagcaagaggggtggccaaggccgccagggtattcttccattccctggcactggtcccggcagccagcacgggagtgcctccggcctgtggccctccctccaaaatccttggactggggccatccagatgtggcccggcccacgggcgccaaccccacagcagcaacaaggtctcctggcgcagcaccaggccctgctgcctccgacggcccagcaacagcaggttttttacgctgctcctgtctccatcgcccctcaccaggcgctgctggcccaccagacccagcaatacgttcatggtgctcttcaaggacagggaggcgcccccctgcagcacacgacgaatctctag

SEQ ID NO: 116709 - DNA, 695 bp, Zea Mays
gccaaaaggacggctcccttttcctattgggaattgtgaatttttgtaggaactaataccttgcacagcaatgcctcgatgccaagatacagactttaaatttaatgttggattagatgctggaagagaaacatcctggtgtatattgcagtggaatgtactgctggaatacatgtttttccgaaggagcaattgcaactaagtttgtgcttttggtgcactggactctacctgctggctgatgttaggatagcatgtactgtatgcagcattgctgttgcagctgaaggctgcagccatgcctggaatcaccggggtcggccggcatgcattacactttggttgcattacatttcggaaacaacatagaattgtgccgatgcacaatttatataaaactgaatgtttcgagcaaacaatttaaacatagccctgcacaagtgttcctcaatatggaatcaaaggcaggtttcgatctacttgttaacaggtggactatacaaaactccaggtaacacatcaagtaaatcgctgacatttgaaactgaacccaaccacaacactgcaagatacattgtgaacctgtacgtagcaaaaaccttgtacgtagcagtggaaatcaggctcttgcaatcttgccccctccaccgccacgaagaagaacctgttgcgagagagacgactgaactggtact

SEQ ID NO: 116710 - DNA, 422 bp, Zea Mays
atgactccatcgtcgccgtcgtgcaccacatcgctggctggaccccctgtcctccgaccaccgcggcgcgtgcggcaacgagctgtgtgcgcgtctggctgcatcgtcgaggagttacagatggagcagtccgtgcagccgtacctctttgcgttcgctgccggaaaaaattgatggcagaataaatttcagaatggaaagggtactgttcacatttgtatatttgtttgcagtgaaccaatctatattactgtaaagttatgggttctctgaatagcaacaaattataaatcattcagtggtttacgattcttttcaaattgataacatggtgatgaaagatcgggtcatgctgacttgtaattcagtatggccagcagctccagcagggtgagaaagaaaaaataaggaaaaaaagaaaa

SEQ ID NO: 116711 - DNA, 2164 bp, Zea Mays
gatcatactagtacacaccacactcccccggctagcaccgtgctctctagctagctagctaagctactactgccctctcctttccaggcgactttgcaaccctagcaagagcattttcgccatgtctcccactatggcttcgtcgttgtgcgtatttgcagcgatgtctggcgccagcggcaggccgtcggccggtggctcggcggtaccgggccgtctgtccagcagcacacaggggggcaagggaaagcgggccgtggtgcagccgctcgcggctagcgtggtgacggagacgccagcgccggccgtagctccggctcggcccgtcgtcgacgccccgccgcgccgccgtgggggccgcggcaccgtcgagcacgcggcgtggaagagcgtccggcaggagaggtgggagggggcgctggagctggagggagagctgccgctctggctggatggcacctacctgaggaacgggccgggcctgtggaacctgggcgactacggcttccggcacctgttcgacggctacgccacgctggtccgcgtgtcgttccgcgacgggcaggcggtgggcgcgcaccggcagatcgagtcggaggcgtacaaggcggcgcgcgcgcacggcaaggtgtgctaccgcgagttctcggaggtgcccaaggcggaggggttcctctcccacgtgggccagctcgccaccctcttctcgggctcctcgctcaccgacaactccaacacgggcgtcgtcaggctcggcgacggccgcgtcctctgcctgacagagaccatcaagggctccatcgtggtcgacccggacacgctcgacaccatcggcaagttcgagtacacggacaggctgggcggcctcatccactcggcgcaccccatcgtgacggacaccgagttctggacgctcatcccggacctcatccgcccgggctactcggtggtgaggatggacgccgggaccaacgagcggcggttcgtcggcagggtggactgtcggggcgggccggcgcccgggtgggtgcactcgttccccatcaccgaccactacgtggtggtgccggagatgccgctccggtactgcgccaggaacctcctccgcgcggagcccacgccgctgtacaagttcgagtggcacctcgagtccggcagctacatgcacgtcatgtgcaaggctagcggcagggtcgtggcgaccgtggaggtgccgccgttcgtcacgttccacttcatcaacgcgtacgaggagaaggacgacgagggccgcgtcaccgcgatcatcgccgactgctgcgagcacaacgccaacacctccatcctcgacaagctccggctccagaacctgcgctcttccaccggccaggacgtcctccccgacgccagggtgggccgcttcaggatcccgctggacgggagcccgttcggcgagctggagccggcgctggacccggaccagcacggccgcgggatggacatgtgcagcatcaacccggcccacgtcggcaagaagtaccggtacgcctacgcctgcggagcccaccggccgtgcaacttccccaacaccctcaccaagatcgacctggtggagaagacggccaagaactggtacgaggagggcgccgtgccgtcagagcccttcttcgtgccgcgccccggcgccgtggaggaggacgacggcgtcgcgatctcgatggtgagcgccaaggacggatcggcctacgcgttggtgctggacgccaagacgttccacgagatcgcgcgggccaagttcccgtacgcgatgccctacggcttgcactgctgctgggtgcctaggagtacctcagacgcgtagcgctagcagatcgttcgactctgctgctcacatctcccacaccgtacgtgccgactcgaccgacagacatgggcatagtagtacaaacagaaaggtgtctctgctgctttatttcctggccttcggctgaatgggaaaaaggtatacacgtcgtagtgatgtattgacagacatcgtatacgtcttcccagcaaaatgtggctgtagcaattacacgcgtttaattgtacagagctagctcatgtgagcgagcccatagtattgttcattatgtacacatgtagtacagtgttttgtttttttaaaaaagatgcccagtacagt

SEQ ID NO: 116712 - DNA, 116 bp, Zea Mays
atgtttaacatcattattaatcagttattcctttatttaaaagtgtggtggtcgtgctgctacatcccttccttcccaaagcaaagatcaggtgcctgcatcagacaatgcaagag

SEQ ID NO: 116713 - DNA, 2120 bp, Zea Mays
ggaaccacttgtcccgtcgtccactccactccaggtcccagcccctcctcctacttcactacttcttcaagagtccaatctgctccctgcgcatcctctattcctcttcccctcccactccccagctcctgccgccccgctccacgttccagaacatctgggggggtatcccactcgcatggtcaccccatagccccccgagaaaccaccccaccgacgcacaggcagcaatggcggtgggcagcggcctggccctgtaccacgtcctcggagtggccacctgcgtggcgctgctgtacttcaccttcggcgaggtggacctccgccacatctcgctcccgtccttgcccgtctcccgcccgtcccccttccgcgcggctgccgtggcggcgccattcgtggagcggcgcggcgcgcagctgttcctggccggccggcccttctacgtgaacgggtggaactcctactggctcatggaccaggccgtggagccgaggtcccgggaccgcgtctcccgcatgttccgcaccggcgccgagatgggcctcaccgtgtgccgctcctgggcgttcaatgacggcgcctacaacgccctccaggtctcccccggccacttcgacgagcgcgtcttcaaggcgctggaccgggtggtcgtggaggccgggcggcacggggtgcggctgatcctgagcctggcgaacaacctggaggcgtacggtggcaagacgcagtacgtgcggtgggcgtgggaagagggcgtcggcatgtccgcctccaacgattccttcttctacgatccagccatccgcgactacttcaaagtctacctcaagacgctgctgacgaggaagaaccacttgacaggggtggagtacagggacgaccccaccatcctcgcgtgggagctgatgaacgagccccgctgcaccacggacccctccggcgacacgctgcagcgctggatggaggagatgtcggcgtacgtcaagtccatcgacaagaagcatctgctcaccgtcggcaccgaggggttctacgggccgacgagcccccaggagaagctggacgtcaatccgggcacgtggaaggacaacaactacggttcggacttcatccgcaacgccaagatcccagacatcgacttcgcttccatccacctctaccctgacacctggctgctgcagcagcacgccacggtggacgagaagctcaagttcgtgaagcggtgggtggcgtcccacatcgaggacggggacaaggagctgggcaagccggtcctcgccaccgagttcgggctgtcgcaccgcgccaagggcttccaccactcccaccgcgacgtcttctacaaggccgtctacgacaccgtctaccggtcggccgcccgcggcggcgccggcgccggcgccttcgtgtggcagctcgccgtggaggacatggaggagttccacgacgacttctccgtcgtgcccagcgagcacccctcgctgcacaggctcatcaagtcgcaatcgtgcaggctggccaagcttaggcacggggtcggggaggaggccaagcggacgctgtcggtgtgcgccgccggctcgtcctaggaacgaccgacgagcggtgctgcgcaggcagaagccatttccacgcgtccccctttcagctttgttgcgcccagtccgagggttttgtctttgtttctgtcgtccgaatggagcgagtggtgatggtgaagtgtgtcagaaatagatcggagaaaaatgaaatagaaagcagcaacagcaacaagaaaaaaaaagtgtgttacctcgtgaggctttggtaatgctgctggttagattcgtttgtggccacagcaccgacgcctcacgcagtcacgcctgcccgtggaatggcagatcggcatagataagctacagtttccgtcctgtgcaactgtacgttagatgcccttgacctttgatatatagagtcatcgtcgggtggcatccaatggtaatagtcctccatatagtgtatttctgcaatctggacattggacctatatttatatatagctgtaagcataagaggacaaaaaaacacaacatcttcgctttaaactttaatctgtaccggttgcttctacaata

SEQ ID NO: 116714 - DNA, 1226 bp, Zea Mays
tcctgacctcctatcctgctcgtcgagtcgtcgtcagtggtcgctcgaattcgccctccggcgcgatcgcgatgaccacgatcctccgccatctcctccgcgtggctctacctcccgcccccgcttccctctccagtcacctccccttctccaccagatctcgccgcacccctcaccgcttccgccgcagtcccaaaccggcgccgccctcccccgacgccgtgtccgcagctatcgcatccctcccgtcccgcctcaccccgcccgtgctcgcctccttcctagcctccacctccgacgcccgcctcctcctcccgctgctcacccactccctccgcatccccgcattccgtcccgaccccgcccccttcctcgtcgccatcaagcgcctcgccacctccgacctctacgaggacttcgaccgcacctgcgcgctatccttctctctccttccctcgctctcttctcctggccccctcctccgcaacgcgctttacttctactgccagttcggcaggctcggcaaggccttccacgtctacaccctcatgcgcgcttccgccgaccccgcagcgcgcccttcctccgacacctaccacgcgctcttcaccgcgctgctgtcgcgcggaggcggcgacaccttggtccattacatgtacatggacaacgtgtcggcgctgttcaggcagatgctcgaggaggggatcccgccggacacgcgcacgctcaacgtgctcatcaggggctacgcgcagtcgctgcatctcaacgacgctctgcgcctgttccatcagatgcggcccctgtacgggtgcgagccggatgcgttcacgtacagctacctcgtgcacgggctgagcgcgcagggtcgcaccaggaacgcgcgggagctgttcggtgaaatgcgcgggagcggtctcctgccgacggagccagcgtgcaatgcgttcgtaggtgcgctggctatggctggggaggctgcggacgcagagcgggtgatgtgggagatggccagggccgggagggtggtggatgacatcacaaggagagcattggtggatgagttgtccagggccgggaagcgggaggatgctgacagactagcgagggagatggagcagaagggcatcgtgagtgctcgcgagctacgagcactgctgagttcaatccgcgacgatggtgatgacaatttggatgtgtatggtagtgggaggaatacatggtga

SEQ ID NO: 116715 - DNA, 1435 bp, Zea Mays
aggttcagttcggtactagagtctgagattagcgcctctgcttcaccacgtggccaccaccacagtacccaccacaggcggaaaaaaaatgatgaacaggaaagtggagaaaaggaaaagaaaaactgcgccaaatgaaacagacttagggctagactagagcgaacgggctcacacaaccaacaaatgcacatcgtctgttctctctcttcttaacctccccaccctcttcctccactcaaatcatcttcctcctcttctctcctctcctcttactcttccccaccaacgccaccaaaaccaacactccgatggatgttttcaccaagcaactcctccccatgcctcaccagcgggaccccaactacccttcctcttccacctcttcctcctcgtcgtcgtcctcctccacgcccccatctcgccctcaccaccgtgcgcaaccccaaccccaaccccacaacctcccccagtccccgagacccgtcccgcgcaccatcgacaccaccccgttccccaccaccttcgtccaggccgacaccacctcgttcaagcaggtcgtccagatgctcaccggcgccgagcagccggccaacaacgacgcgacggcggcgggggcagccgctgccgctgccgccaacggcggtggcgccggcgcccaggcggccagcggcggaccgtgctgccggcccaagaagccgtcgttcaagctgtacgagcggcggagcagcctgaagaacctgaagatgatcgcgccgctggcgatgggctcgccgccgtcgccgtcgccgtcgccgcggagggcggcgccggagatcctgtcgccgagcgtgctggacttcccgtccctcacgctcagcccggtgacgccgctcgccggcgaccccttcaaccgctcgccggcgtcggcgtcgtcctccgaggaggccgagcgcgccgccatcgccgagaggggcttcttcctccacccgtccccgaggggcgccgagcccccgcgcctgctcccgctcttccccgtcgtctcgccccggatggccgcctccgcggcggcgccgtcgtccgagtgaagatcccccgtcgcgggcgcgcgcctgctctaccgtagccgccgccgccgccgccaccaccatcagtactactactactacaacaaccgtcgccgtcgccgtaccgtccgtccttgtttcgtgaggtgcttgctttgctgttctccttgatcgacgccgctgtaatttttgcccccttcttgcttttcttggaacgggcgaggaagggagttctctctctctgttttttttttttttgcttcgtttcggagtggcgacacgcgagcgatctgacgatccaggctcgctcgcgggagcctccgggcgggatgaaatgatggatggatggatgaattagatataattaatgaagcctaatcttaagattt

SEQ ID NO: 116716 - DNA, 333 bp, Zea Mays
aacctccccaccctcttcctccactcaaatcatcttcctcctcttctctcctctcctcttactcttccccaccaacgccaccaaaaccaacactccgatggatgttttcaccaagcaactcctccccatgcctcaccagcgggaccccaactacccttcctcttccacctcttcctcctcgtcgtcgtcctcctccacgcccccatctcgccctcaccaccgtgcgcaaccccaaccccaaccccacaacctcccccagtccccgagacccgtcgccgtaccgtccgtccttgtttcgtgaggtgcttgctttgctgttctccttgatcgacg

SEQ ID NO: 116717 - DNA, 3203 bp, Zea Mays
cagtcttacacaagcagcaaatacaacaaccttgagctcttagatcgattttcaagtatatctcagcaaatacaacaaccttgagctcttagatcgatttttcaagtataggagatatgaaacagatttcatgatatagctctgaacctctagattataaatatagttaataaataatatatacaaagagtagagcggtgtagagacagattttttttttcaattaagacatgcctaaaagaacagctcacaagatatagaaaaactgttgtcagttctatccagccgttctgaacttctgaagccgcattattaccaatgggggctagttgggctgtacaactccgtgccagcccagcccatctgatccattaatataacggccatcccgaacccgaacggctcccatcccatctgatccctcgccgcatttcaaattcaaatcccctcttcacccaagtgctgccttcgcatcgcatggcggccagttccctctcgtccccggcggccagccggacgccgaacctgaaatcggccgtggctccgtcaccttctccatccactcgccgggcgccagcagatgcggcgtcggcgtcgatcacggcggagtcgaaggcacggttcgaggcttacaaccggctgcaggcagcggccgtggcgttcggcgagaagcttcccatcccggagatagtagtgattggaggccagtcggatgggaagagctccctcctagaggcgctccttggcttccgcttcaacgtccgcgaggtcgagatgggcacccgccgtcctctcgtcctccagatggtccacgaccccactgccctcgagcccagatgccgattccaggaggaggattccgaggagtatgggagcccgatggtggtggctacggccatcgcggacctcatcaagcagcgcactgaatcacacctccggaagatccaggctgctgtctcatccaagcccatcgtcatgagggctgagtacgcccactgccccaacctcacaatcatcgacaccccaggcttcgtgcttaaggctaagagaggcgagccagagagcacaccggatgagatacggtcgatggtgaagtcactcgcgacccctccccaccgcctcgttctgttcctccagcagagcagcgttgagtggtgctcgtcgatctggctcgacacgcttaaggagatcgatcccactttcaggcgcaccatgatagtcatctccaagtttgacaaccgcctcaaggaattcacggagaggtgggaggttgatgccttcttgagtgcgagtggataccttggggataacatccacccgttcttcgtggctcttccaaaggaccgtggaacaatttccaatgaggagttccgcaggcagatctgtcatgttgatattgatgtactacgtcacttgcgagataatgtaaaaggggggttcaatgaagagaaatatggatcacacattgggttcagctgcctgaggaagtacctcgaatctgaacttcagaagaggtacaaagaagcagctccagctaccctggcattgttagagcagaggtgcactgatgtctcaatggacctaacgagattagattccaaactacaagcaacgtctgatgtctctcagctccggagatcggcaatgcttcatgcagcttctatttgcacacacttgcatgcattacttgatggatctgctgatccagatccagaaatatgggggaagactacggaggaggaacaaatgcatagtgctattggcagctggcctggcattaatacgcctgtaaaacctgccaactccagccttaagctgtatggtggtgcagcttttgagagagtaatgcatgaatttcgctgtgcaacatattcaatggaatgccctcaagtgtcaagggagaaggttgcgaacatactacttgcccatgctggaagaggtggaagcagtaggttgactgaggcagcagctgagatagctcgggcggctgcaagatcatggcttgctcctcttattgatactgcatgtgaccggcttgcatttgtcctacaaagtctgtttgaccttgctatggagcgtaaccgcgataaggattcacaacatcatcagaatgttgaagatatggatagttatgttggctttcttgctgctctccggtgctcatattataagtttgtcaaagaattgtccaagcaatgcaagcagatagtgcgtcatcaccttgattcagttacgagcccttactcccatatttgctatgacaacgactttttgagtgatgttggatccgtagcaaaccccatgagtaggtttagtcactttactggagttacatcctttgatctagcagacagtggatcagcactagaggaagctcaggagaacttgcctccaagagatcagcagcattcgacaccgcctactagtaaagggaatgagtcaaaggaggttctcagagaaagccagctaacagtacctgagacgccttctcctgatctgccatctgatatacatggtggtaggaagaaagaaaatgggatcccaaatgacggtggcccaaggaaaagacatgcaaggatggcagcgtatacaaacagaaatcaccataacagtatgattgttggagatgacatgggctcaaagtcagggtcatcatactccaccatatgcgcaatatctgctcaatattttgccaagatgcgagaagtcctgattgaaagaaatgtcccctctgcattgaactctggattcttaacaccatgccgtgaaaggttatttctggcactcggctttgagctattcgctgtgagtgatgacaagttcatggacatgtttgtcgcgcctggggcagttgatgctattcagaacgagcgcaattctcttctcaaacgtcagaagattttgctgtcctgtctgcatgagtttaagaacatatcccgggctctgtagtgatgatctttctggaattcctcaggcatgtgtattcatgtggttaacgaatcctctcagacggtacactatgccgggggcttattgcaatggcccattctttttttatccccattctcatgtcatgtatctttcttggccttaccctgttttcttgagctctgtatcactctgtcagttccttgttgacaaggtctgtatcactaacgtttgttcagattcaatactttgattatgctcgacgacaccaatac

SEQ ID NO: 116718 - DNA, 5264 bp, Zea Mays
actgcctacagatgcaaatcagtaccaggcgtgctctccgtgagctctacgcctctacctgtgtcttggcgacgactgggcgaccgacgacgcagccgtaggacaggcgaccgacgacgcagccgtaggataggcgaccaggtcttcctgttggctcttgcccttcgccggcgacgagcacccgccaggccacaacgacattgggaacaagtgtatgacatacaaacagtaaaatgggaaggaaagggtcagaagtatcaccaagcaaaaggtatcccttgaggtctgcacatagtagtggtagagttcttcgctctgccttagccaataataataaggacagtgagcctctgaatgcggctgctgctacccaagcagctgtgaaaaaaagaagtggcaaccagctagatagtcctaatagcactgtcaggctacttcgttctacatcaaaaaataaggacgaggcacatagcgggcctctaaatgacaggatcattgataagccagctgcaaataaaagaaaacatgccaatccctcacaggttggaagtcccagcagcagtgtcagggtgcttcgctctgcaataaaaaataaagatatggcgcgcagtgagcctcaaagtgacaggaccgctggtgaggcagctacaaataaaagaaaaaacgccaattcctcaaaggtggggagtctgagctctggtctcagtgtgcttcggtctgcttcaaaagctaaggatgagacatgtatcaaacctttaaatgatagtgctgctgttgaaccagcttcaagtaaaagaaaatgcaccagtccgtcaaaggtgggaagtcccagcaacagtgtcagggtgcttcgatctacttcaaaatataagaatgagacatgtaccgagcctttaaatgatagtggtgctgttgaaccagctgcaaatagaaggaaaggtgtcagtcgttcaaaggagggaagtcccaatagcagtgtcagggtgcttcgctctgcctcaaataataagattgatgtatctattgagccactaaataatagtactactggtcaaccagctgcgaaaagaagaaagaatggcagttcctttaagagcagtgccagggtgctttgctctacctcagaaagggcaaatgaggcatctagtgagcctttaaatgatagtactgctgctcagccagctgcgaggaaaaagaaaggtggtgcaatgccaaagactgataacccaaagattggtgtcagggttcttcgctctgcctcaggaaagaagaatgagacatgtactgagcctgtaaatggcagtacttctgctgaaccaactgtgacaaaaaaaagaaattgcaagccttcaaaggatcgcagtcccaagaaggactacttaaaaatttgtcaaagaattaaatatattttgaatcgaatgaagtatgaacaagcctttattcaggcttatgcaagtgaaggttggaaaggccaaagtttggaaaaaataagacccgagaaggagcttgaacgagccaaggcagaaatccttcaatgcaagttaagaatccgggaagcttttcgaaatatggactctcttttatcgaaggggaagcttgaagaatctttgtttgattcagcaggacaaatttcaagcgaagatatattttgtgccatatgtggctcaaaggatgttacttcacaaaatgacatcattctttgtgatggagcctgtgacagaggattccaccagaattgtttgagccctcctttgctaactgaagaaattcctccgggggatgaaggatggctttgccctgcatgtgtgtgcaaagcagactatatagatgcgttaaatgaacttcaaggaagcaaactctccattcatgactcatgggtgaaagttttccctgaggcagcttcaactgccaatggttctaaacaagttgatgcttctgatctgctgccagatcatataaaggacagtgctaaccttgcattggttggaacgcacatggtgaatgaaatcaggttttctgaagaggatgatagcaaagcggatgacctcggcttgccttcggaggactcaggggatggtgacttcgatccagcaggtccagattctagtgaagaccaaaatgatggattgaactcagaagagtcagatttcacatctgactctgattatttttgtgctgagattgctaaatcttgcggccaggatgaagtctcggcatctccattatcaaatgtgataaaccgtactgatagaatgaaactcagggcctacagtagacgctctaatgaagaaaaccacaatcatgcatttatggacatggagctagagcaagacatagtgctaccagttccaagcaggcggcaggttgaacggttggattacaaaaaactatacgatgaggcatatgaggaagaatcatctaattcaagtgatgaagaagagtggtctggaaaagaactcttagaaggcagtggaacagattcacttgatgagcgacttcgtcctgtaaaacggtgctctagaagagcaccagcagggcagcagaataatgaacttacaccacagagccggcctcatggttctaacagtgagcagaaaactgaagttcttcgctccaatggcagtagtagcacaggacggaagtatgatcctgaagttacccagaaattgaaggtgcattttgagaaagatccatatcctagccgtgaaacaaaagaaaatctatcagaagaactaggcttgacatttaatcaggtctccaaatggttctctagtactcgtcactattcaagggttgcttctgccaaaaaagaaatgcatcctgacagccatacttgtgagaataatgatgagacaactgtagacagcatgcaagcaaaacaacccaatgctggggtgatggaaaagttgacgggggatagaaatggcattgttcctgagaaaccgatggtgcaggacaatcttaaccaaggagcgatggaaaagttaactagggataaaaatgacattgttcctgagaaaccggtgatgcagagcagtcttaaccaatgtaataatgaagatataccgctttctggaacagaaattgagatggagtcttacgaacaagaatcatctgactcaagtgatgaagagtggtccatacttagcacaccacgaaaaacaagattacaagaccatggaaaatcatcagttactgaatcacttcgttctgcaaaacggtgttccagaagagcaccagctagggagcagaataatgaacgtattcagagtgagcagcttcatggttctgcaagtgagcagcaaactgaatttcttcgctccaatgtcagcagtggcaaggtctcaaaatatcattttggccctatagttagtcagaagcttaaggaacattttgaaaaagatccatatccttgccgtgcaacaaaagagagtctggcacaagagctaggactgacatttaatcagatcagtaagtggttctctggcactcgtcattattcaagagatgctgttgccaagaatcagaaacgcccgggagaaaatactactgtgaataataatagcacaacctttgatgacatacaagtaatagaacccaatgttgggttgatagataaaccagctgcagatgtaaatgacatgatttctgaaaagttgatggtccaaataaatcttaacgaaggcattgaagaagatatcccaccgagccaatatgccaggtgtgaagagaaaataactatgactccagctgccatctcaagggaagctggtcttccaggatatggtcctggtcctggagaaaactttcttcaggtcagttcaaggaatactagctgtgagcagagtgtgatactggctcctaccgctatcgcaagagaagttggtccaccaggatatgcgactggagaaaaccagggcaatggggctccatggaatacaagttatgagcgaagactatttatgaatcctgtgaccagctcaagagcagtcagtcctccaggatatgggcctgaagaaagccgaggcagtggcatttcctggaatacaagcagtgaacaaatattgtttatgagtcctacaaccatctcaagagaacttggtccaccaggatatgggcctagagaagaccagtgcagtggcacttcatggaatgcaagctgcgagttgggagtatttatgagtcctgtgaccacctcaagagaagacagtccgccaggatatgggcctcgagaaaaccaggagaatgacaatatgagatgcgagttgagaatgtttacaagtcctacaaccatctccagagaagttggcccaccaggatatgagcttactggaaaaaacaagggcaacggcgcttcatgtactacgaattaccagcagggagcgtttacgagtcctgaagccttcccaagagaagcctgtcctccaggatttgtgtctggagagaaccagggtaacgacactccatggtatatgagcagcaaacagatggcgtttacgagtcctacgaccaaccctagagtaggtccgccagggtatggacaggaaaaccagggcagtcgtgtttcttggaatacgagttatgagcagggagtgtttatgagttctacaaacatctcaagagaagccggtccgccaggttatgggcctggggaaagtcagggcaatatcacttcatggatttcgacaggcgggcagagaatgtttacaggtccttcaactatcccgaacgaagtcgggcagcaaggatatggcccttcaggaatcccgggaacggatggctcaaggagtatggacttgaaagcctttccaccaggatatggacctgctggagaaaaccagggcggtggtgcttcagggagcgtcataagcccccaagctcggtctgcagagaacgtagagttttcagacgacgctagaaaaaaggctatacagcgggagctgagacggcggcagaagttcaggtgatggccgtgatgcgaatttctgatcttgctcatcgaattttgactacggattactactttttaagactacatatccagtcttgatggctgaatgagtgacgaccctagttgtcgagacgcaaaaccttttgttgtatgtgttccttttacagacttccttggcttgtcatgaatttctaatgtgaacttgtgctgtgaacttgttgcaaaacctcttgaacctgaagcattcaacatgatgtgagcttgtgcagttactcttcttctgcatgagttcatgttatctgggttgcacggc

SEQ ID NO: 116719 - DNA, 846 bp, Zea Mays
cataccatccctcgaccggccacctcttcccaattgcatcgcatccccaggacttgccggccggtccagagacggcgataatgggggcttctgaggtgtggtcaccggtgccggcctggctggcgatcgccgtcggcttggcggccgtggtttcctcgtcggaggctcacgtcttctacgccggtggccgcgacggctgggtccttgaccccaccgagagctacaaccattgggccgggcgcagccggttccaagtgaacgacaccatcgtgttcacgcacgaggagggcgtcgactctgtgctgctggtgacggagcaggacttcgacacgtgcaacacgcgcaacccggtccggcggctccaggccgtcggcagcagcggcagttcggagcgttcggtgttcaagctcgaccggtccggcccgttcttcttcatcagcagcgacgaggaacggtgccaaaagggccagaagctgtacataatcgtgatggcggttcgccggtcgacgacgccggcggcaccggcacccgacgcggcgttcccgccggcggcttcaccggtacccgattcggcgttcccgccggcgccttcaccggtgtgggcctcggcgcccgacaacgcgcacgctccaccaccgacggcgggtgcgtcacgtttggacgacggagcgatcatcggctctgtgcttggggttataggagctttggtgctctgtaccgtgtactagatcagaaatcaagactccaaggggcgttccgtctgtgtggttttcaccgtctcttttgctaatcatgtttcttaaaatcatgattttacaatacaatagtataatacagtagttttga

SEQ ID NO: 116720 - DNA, 1967 bp, Zea Mays
catcatcacttgtccgttttcctctgacgacaccccgagcccgaagaggcgactcgttcccctccctctggcgatctgtctcctctgctccccgtgcgtcgagccgtcgaggcttggaggtctcatggtacccgatcccccctccccgctgcagagaaacaagcagccggcaaagcagatgagcaagtcctcctcgcatcggccgagcaagtcatcgacaccatcccacgctccgggacggttaactctgagtctgaccagccccttcgcgtcgccgctgcttctcttacttacggccgccgccgccgccgctgtgttcctctactccctgaccgccgcccgctcgtacggggcccgcggggaggctcctccgctctcctccccgacggtggagaccatggagagagcgcgcgccatctgggagctacccgccgcggggccggccagggcggtcctcttcgtcgcccacggctgccgctgccgcccggagaacttctggccgccgtccccgcgctgcccggggtgcgtcggcctgccagaggacgtcgccatcacggaccgcgcgctgcggaggcggttcgcggtgctggccgtcgcgagcgccggggagtgctggtcgccggggaaggaggtcgacgtcgccaagcgggtgatccggtcctgggccgccaagaacgggctcgaaggcctgccggtagtcgccctcggcgcttcgtccggcgggtacttcgtgtccaggctggcggccaagatgagcctcgccgccgtcgtgattatgatcgccgagggcgcgttcggcagctcagctggcgcgcttccggcggtttaccctcccgcgatgttcatccacatgccgaaagataagcggagggcagtgctggtggataagaattccaagatgctgatgaagaatggcgttgaggtgaaggagctccagagcctcgagctccctttgacgcctactctgctttccgagaggatacctgggctggaccgcgggctatcagaaaggatctggacagtgttcagggaagaagctttcgttgatgacaaaggatacatgaaagaggatggccgggaaacgccatggaaggatgcattggtcaagaggggcctctgggaagaggtgtctgcgttggctgatcacatccaggaagagctaaatcttgcttatggataccacgagatgacgagcttacacgctgatgagatgtttgattgggttgacaagcacttgagatgagggggctatggtggatcatttcagcatcggtgcagcttctattaaactagttggagaaatgtaggggaatgaaaatcataaactggtgacacagaagacacgcacaacatatccatcctaacattcggatgaactgactttattatgtgaaatgtgtcgtgttcactacttccagcttgctcttgtgcaatggatttgtgaaaagaagtactctatccgtcctaaaatattagttgttttaactttttaacttttatgtctatgttcaaatagatgatgatgaatatagagacatatataaaataaatacattagttattgtatgaataactaaaaatgtaaaacaaattttattttgggacaaagggagtatatatagagatagttcggtgagatctttctctgatatgcaatgtggactttctgttaatcaaagatgagattttgcataaaaatgatcttgtttgtatctgaataatcacatgggatcatcttttttgtaagctgaggataagatcctgcattcatgctgcttgaaataaccttttgatctgtggaattagttttcctttctgaacttggttcctctctttcagacacttgtgaactgttgtcttcattctccaatggtccaaataagggggtgtttggtttatttagtcatccttctaaactttagaaactaaactttagtccctacaatttctatttgggaggcgccttt

SEQ ID NO: 116721 - DNA, 757 bp, Zea Mays
acgccgcaggcggtgtacctggccgtgcatctagtaagtagccatggaagagttccaggaagccgacatgctgtggccggacgttgcccttgcccacaaccacggctaccaccgcccggccgactcctcccacggccgctgccgccagcacctcacagatcagccgcaacaaccacgtccaggcgccgcggtcgtccacccactacagtcctcgcctgtgcgcatcccctcgatgccgccgatggggccgcgcccgacgagcaggggttcgtggacgcgcagctacaaggaggaggaggacgacgacgacgatggcgcagaagaagtgggggtcgtgccgccgcacgtcctggcggcgaggcggtgcggggaggagcggagagtggcctcgtcggtgtgcgtgggccacggccgcacgctcaagggccgtgacctccgagccgtccgcaacgccgtgctccacatgaccggattcctcagcagctccgacaagtagattattaagcagctcgctatattccggcaatattaagacatgttcgtttgtgtcgaattacacctgaaatcgttccagttaatcaaagtttatataaattacagaagcaatccggttagtaatcgttccgacccaccaattcagcacaaacgaacaaggcctaaatcagaaataatgacagccagatagtctatatttaggttcatcaagtcatctagtagtaacaaaatacgtttttttaaaaacgttttaaattaggag

SEQ ID NO: 116722 - DNA, 472 bp, Zea Mays
ggacgccatggacgagttccaagaagcggacattctgtggcccgatacggaggacgagctggcgcctttcgcgcccatggacacggaggagctgtgcgaggccgccggctccgtgtccagcgtcgcgccggtgttcgggcgccgtttcgaggtgtttttcctctccggcgctggcccgtcgtcgttatcggccgacggggacgacggcgaggagtggcaggaggcggacgtgctgtggccagagccagacacggcggacgagcggcgggggagcgggggctcggtgtggccattttctggctcttcttccttcagcggcagggcaggccggcgcgtgaagcctgccgccgccacacgcgatgggtggacgacggggccggccgcgtcgtctcccatcaacataccggctaacattgcccctcgcgcgccgccgcgttgtcagtttaggacggtgatgaaccgccgttcgtag

SEQ ID NO: 116723 - DNA, 2046 bp, Zea Mays
ccaagttccactcccaaaccccctcgattcgtccatccctcgcacgcgctggccgcccgccccccatctccacttctcctcgccgctctcctgaatccttcgcccgaaagcctccgaccgcagaaccttagcgttgccgtccacctccatggaatcgaagcctcacgcgccggcgtctgggctggcaacgccgcggttcaggctgggtaaacagtcgtcgctggcgcccgagcgcggcggcgagggcggtggtgcggggtcggcagatgggtcggccgaggcgaacggcgtcatgagcttccagctcatgtacctggcccacgagggcagcgcggaggggatccgcgagctcctcgacggcggcgtcgaccccaatttccgcgactccgacggccgcacggcgctgcacatcgccgcctgcgagggccacgccgaggtcgtcgagctgctgcttcagagcggcgcggaggccgccgtggaggaccagtggggcagcacgcctttggcggatgcaatgcattatcagaatcatgatgtgatcaagatctttgagaagcatggctccaagcataagattgctccgatgcatgtgaacaatgttcgtgaagttcctgaatatgagattgacccggctgagcttgatttcagtaatggcaatgatttatccaagggcacatttagaaaagcaacatggaggggcattccggttgctgttaagaagctggacgatgatctaattgcggacggcagcaaagtgcaggcattcagagacgagcttgatgtgctgcaacttatacgtcatccaaatgttgtgcaatttttgggcgctgtgacacaaagcaatccaatgatgattgtcatggaatttatgcgcaagggtgacttgcgcactcacttgagtaagaaaggagctctgccaccatcatatgctgtgaagttagctcttgatattgcaagaggaatgaattacttgcatgagcataaacctcaggctatcatccatcgtgatcttgaaccttctaacatattgagggatgacactggacatctgaaggtggcagattttgatctatgtaagatgctaaaatggagaagaaaagttagagaagataaagcagtcacttctccaggcaatgcttgtaaatatgtggctccagaagtcctgcgaaatgaagagtatgataccaaagtggatgtcttctcattcgctctgatacttcaggagatgattgaaggatgccttccttattatgataagaaaaatgatgaaattgagaaggcacataattctaaagaaaggcctccttttcgagctcctccaaagcattatgcccatgggttaagagagttgattgaacagtgctggagcgaaaattctgcagacaggcctgattttagagtaattatcaaccggctgtctgctatccaaaatgagatagctcacagaaaccgttggaaggcgagacctctcaagtgtttcctgagcattgaaggaatgtggaagaaagatcgcaatgagggcagcaccacccgttcatcacgctcatcgcgatcctatttttaaccaccagcacaagctattgatttcaatcgcaagatcatattggtgattgctagaaaatatactcaaatgtatatcatattttcgttttctaaaactatgaaaaaagatggttctgcaactggttgattctcagctgatcatagttttgattgtatatcaggcatgccccttggccccaacccctgctttggcattcccctgggttgggacaatatggataatgccaacttaattatatttatataataatgtgttttgatgtaaatgagatatgttatatatcgtagctattcatacatgttgtattttttcgaaagtaaatattaaatggcttaagttatatgaaatgttcataactaaaaggtgactaatctaactttgatttctaataaatataacttaaaataatacctactaagatgcttctctaaaacatattgtgtatttgttttactaaactataaaaaatacacaacatagaa

SEQ ID NO: 116724 - DNA, 1196 bp, Zea Mays
cactcatctgatgccgtaacacaaggctgaatttttgttcggtctagccgacccgacgatggcgtccagcgacgggaaaccactgccaaccccggcctctgtgggcggcggcggcggcagcagcaccgcgccgcccgggcagccgaccacggtagcgtccaaggtgctggacatgggcgcggcggcgatgcagtcgttgcgccccgtgaagcaggcgaagcagcacatgtgcacgttcgcgctgtacgcgcacgacccgaagcggcaggtggagacgcaccactacgtctcccgcctcaaccaggacttcctccagtgcgccgtctatgactccgacaaagccgacgcgcgtctcatcggcgtggagtacatcgtgtcgaggaagatcttcgactcgctgccggcggaggagcagcggctgtggcactcgcacgcgcacgagatcaagtcaggcctgtggacgagcccgcacgtggcggggctgctggagaaggcggagctggaccacatggccgccacgttcggcaagttctggtgcacctggcaggtggaccgcggcgaccgcctgccgctgggcgcccccgcgctcatggtgtccccgcaggccgaccccgccgcagccgtgcgccccgacctggtccggaagcgagacgacaggtacggcctctccacggaggagctccgcgccgctagggccgacgtcgaggcgcccgccgaggagcacccgggccaggccgactactggctccgccaccgcaagggcttcgcggtggacgtcgtgccgcacgagatgaagcgtcacgcgccgtttccgtgagccgtgaccaaccggtgttttacagtggcgcatgtgtaataaaaccaaacgatccagcaggcgtctccgtccgaactcgtgaatggcacgcgtttatttgtttttcagttcatgatgttcaaatcggcagtacgcatgtgttatggatgcgtgtgtattggatgaagtggatcggtgagaacagactttagcctcgcaggtgttaaactagaactgcaattacacccttcccaattacaagtgggattttctttcattttgaacctcgaattgctaatcatgttgctcaaaacagcaatctgcatgacgaagcttgcacatctaacaaggttcacaaagagagattgccatagatagataaccacaaacgaatggatca

SEQ ID NO: 116725 - DNA, 2680 bp, Zea Mays
atggccggctctggacaatcaccggcgatggtaggagatggcgttcgtcttgatccagagacagagggagtagttgatggtaacttactggttacaccaccttttgctctattggggcctgtaatcgacgagatgagcataggggaggaaggagaacaaagggttcgacctcctatgtccaatattagctccagggagatggatacgcctcaaatactgcattcacataaaaaaaacattgatccaaatatagtgccaacagtagggatgactttcaaggatgttgatgattcatataaattctataaaaggtatgcatatgaagttggatttccattgaagaaatacagagagaagacattcagtaagtggataaattgttcacgtgaagctgcaaaaattgaactggtgaatttggagcataaccatgagttcataactgacgaagcagagaaacaacatttacgttgcaacaaaagtaggcatgctgagttcataaattttgttgatgcaatgcatgatagccgagtgctgcagcattgcatagttgattttatatcagacatgcatgatgggccagagaacgtaccggtaactgctcaaaatctgaaaacatgtaaggcagcaaggagacgagaaaactgcgcaaataatgtagccaaacttttggctttctttacggaatgcaagaaacagaatccacaatttttttgtgattttcagctagacaatgatgggaaaatagtgagtattttttggtcacacgcaagtatgcagggggaatatgcagattatggtgatgctgtgacatttgatacaacacacaagacaaatatatatgataaaccactgggcatgtttattggagctaacaaccatctgcagtgtacattgtttggatttgttttgttgggagatgaaacagttcagacttttgaatgggctttcaattcattcaaaacatgtatgggatgcgagggtccgagagttatgctaacagatcaagatccttcaatgccaattgctctgagaactgtatttccaaaaacagttcacagactgtgtttatggcatgtccagaatagatttatgccattcttaaatgaattatatgcaaggtttgctgataaggattttaaaacaacattccaatctattatacatcatccattaactcctcatgagtttgaatgtgcctgggaaatgatgctagaggaattcaatcttcatgaagatatgactctacgcaaattatatgaaataaggaaagaatggataccggcattttttaaaaatgacttctgtggggtaatggtatctacacaacgaagtgagagcatgaacagattagtgaagcaatcacatgtagatgcgaacacccctctgcatgagttcgctaaacaaatgatgaaaatgttgcatagcaagaaaatgaaagaatcaaaggagacattgatgagcaagggaccaaggacaacagatatattgtataggttcgaagtgagagtctctagggcatacaccagagctgttatgaatagatttgaggaatcaataaaatacgccactgcatacagaatattgaaggtcacaaacggttgtgataaagattggatcgtacaacatacaaaaagatctaataaaattgtgtggggacaacatcaattcaagataacaacagacatagaagctggggagtatacatgcgagtgcaaacagtgggaacatacaggtctattgtgtgttcatcttttaagagccttcatgcatctacaagttgaaaagataccttcaaagtatatattgcaaaggtacactgtctcatcaagaaaagatgtgccgtttgaaagaattaataagagcttcaggggaaaggatggagttactaaatcatacagacagaaaatgttgctaacgaaaacaatgaaagttgttcgccaggcgtgtatgtcaaaagcagggtacgacaagacaatggatgtgttggatgagctcgatggcattctatgccgattagagccagacattggatgtaatgggtcatgtgatgttagtaatgatgaggaaaaccaggaaggagaagtaaataataataatgctggcgttggaatggaagatgacaattcaattacatgccataaaatggatgagcataacactatgactggatgtgaacatgcgttaacattaataacatctggtaaccaggtggacaacatgagaattccacctgaggttggtgatacaagttctccgtgtcacgtagcacacgaccaaatggaacagattggtgcatcctcagaagctaagaagaggttgaattttaatgtggatgttataaatctgaggatgccggatcgtgcaagaccaaaaggacggacaataaaaaatatagaagataggattatgaaactaggtgccaaaagaaaaaaagaagaataggagatgccaattgtgtggaatagcagatggacataacagcagaacgtgtctgtctgtggaagagaacagggcaagactagcaaaactggctaatcgaaagagaggacgaccggccggatcaagactaaacaataaaacaactgctccacagtggaatgaaacatcgactgctaaaaaacatcgtattgatgaagaagtagaaaatgaataagccgctgagcatatggaattaggtgaa

SEQ ID NO: 116726 - DNA, 110 bp, Zea Mays
atggataatgatgtcatatcaacagcgtttgccgttaacaacacttcatttgtaaaaggtacactaattctgttggatttagaaatggaaaaacatcacaccaggacaaa

SEQ ID NO: 116727 - DNA, 3384 bp, Zea Mays
ccgctcggtgtttcggccatgatgtcgcggtcgtataccaacctgctcgacctcgcggagggcaacttcgcggcgctgggcccggtcggcggcagcgggcggcagaggcatgggtcgttcgggctgcggcggatgtcgcgggtgatgacggtgccggggacgctgacggagctcgacggcgaggacgagtcggagccggccgcgaccagcagcgtcgcctccgacgtgccctcgtccgtggcggcggaccgcctcatagtggtctcgaatcagttgcccatcgtcgcgcgccgcaggcccgacggccgagggtggtccttctcgtgggacgatgactcgctcctgctccagctccgcgacggcattcccgacgagatggaggtgctcttcgtcggatcactccgcgccgacgtccccgcagccgagcaggacgcggtatcgcaggcgctgctcgaccgattccgctgcgcgccggtgttcctccctgaccacctcaacgaccggttctaccacggcttctgcaagcgccagctctggcctctgttccactacatgctccccttctcatcgcccgcttccgcgtctgccgccgctacctcttcctccgtcgccacttcgtcacccggcaacggttgcttcgaccgcagcgcttgggaggcatacgtgctcgccaacaagttcttctttgagaaggtcgtggaggtaatcaacccagaggatgactacgtctgggttcatgactaccatctcctggcgctgcctacctttctccgccgccgcttcaaccgcctccgcatcggattcttcctccacagccccttcccctcgtccgagatctaccgcaccctccctgttcgcgacgagatactgaaggcgctgctcaattgtgacctcattgggttccacacttttgattacgccaggcacttcctctcgtgctgcagtaggatgctgggaattgaataccagtcaaagcgtgggtacattggattggattactttggccgcactgtagggatcaagatcatgccggtgggagttcatatgggtcagttggagtcgggtctgcgcttgcctgatagggagtggaggctttctgagcttcaacagcagtttcagggcaaaactgtcttgcttggtgtggatgatatggatatctttaaggggatcaatttgaagcttcttgcatttgagaacatgttgaggacacatcccaagtggcaggggagagcagtgttagtgcagattgctaacccagcccgtggaaggggtaaggatctggaagccatccaggctgagattgagcagagctgccagaggatcaatgtagactttggccagtcagggtatagccctgttgttttcatcaatcgtgatgtgtcaagtgtcgagaaggttgcctattatacgatagcggaatgcgtggttgtgactgctgtgagggatgggatgaacttaacaccatatgagtacattgtctgtaggcagggtgcaccaggatctgagtcagtatcagaggtgagtgggccaaagaagagcatgctggttgtgtcagagtttattggctgctcgccgtcactgagtggtgctattagggttaacccatggaatatagaggcaacagcagaggcgatgaatgaggccatttcaatgccagaacaggaaaaacagttgaggcatgagaaacattaccgttatgtcagcagccatgatgttgcttattggtcaaagagcttcatcctagacttggaaagggcttgtagggaccactttaagaggacttgttggggcatagggttgggttttggtttcagggtggtggccttggaccctcatttcagaaagcttaacatggattcaattgttaatgcttatgagatttcagagagcagggctatattgcttgattatgatggaacactggttcctcaaacttccatcaacaaggaacctagtccagaggttttgaacatcatcaataccctttgctcagatagtagaaacatcgtttttcttgtcagtggtagagacaaagatacgttaggaaagtggttctcctcatgtccaaaattggggattgcagctgaacatggttacatcttgaggtggtctagcaaagaagaatggcaaacatgcacccaggccatggactttggatggatgcaaatggcaaagccagtgatgaatttatatacagaagcaactgatggatcctacattgagagaaaagaaagtgccttggtgtggcaccatcaggatgctgacccaggctttggatcctcacaggcaaaggagctgcttgatcacctggaaagtgtactagcaaatgaaccagtctctgtcaagagtggacagttcatcgttgaagtcaagccacagggagtaagcaagggaatagttgccgagaggatacttgcatcagtgaaggagaggggaaagcaggctgatttcgtattgtgcatcggcgatgataggtctgatgaggacatgtttgaaaatattgccgatatcattaagaggaatatggttgctccaagaacatcgctgtttgcatgcactgtgggacaaaaaccaagcaaagccaaattctacctggacgatacatttgaagtggtcgctatgctgagcgcacttgcagatgccactggagctgaactgaaatctgattcggctgatgaattggcggcatctatctcatcacttgatattggtgacgaacaatcagaatccagcgatacaccaattggagggtcttagccagttttctcttgaatttcagaatataatgattatttcaatagtcaattctacagaggggaagcttctcaatctgctgcactccaagtttatccagttgggcaagatagtagtctgtcgctgcaaggcgtagatccatatgttcatagctgactcgccgacttggcatattctttgactttctcattcctggttgaagtaaaatgaaagcctgacagaaggaaagggaactgtgtggctgaagtaattggggaaagttataggagtggcaaatgctaaaggagcccgtgcgcagcttctgatatgatcccttattaacatgacattacaaagtggtgtcactttttgaactatcagtagtaggtagtagcaatctcaagggtgaggtttaaattgattagttgcttcaaaaccagattttggctcctctgtgtttgggttatattttaattaattatccagggttagtatgttgagaattgcctaaatagtttggaaacttaaatcccttttaagattattggggattgagagaaaatgagctattttttcactcaatccccgggaatactggagcagatttaagtttctaaactagcctttaggtgcacgatagcgcgttttcag

SEQ ID NO: 116728 - DNA, 3442 bp, Zea Mays
ggggtagccgggccggctagggcgtgctcacatctcgcggcgaagcttttctctccgctcggtgtttcagccatgatgtcgcggtcgtataccaacctgctcgacctcgcggagggcaacttcgcggcgctgggcccggccggcggcagcgggcggcagagacatgggtcgttcgggctgcggcggatgtcgcgggtgatgacggtgccggggacgctgtcggagctcgacggcgaggacgagtcggagccggccgcgaccagcagcgtcgcctccgacgtgccctcgtcggtggcggtggaccgcctcatagtggtctcgaatcagttgcccatcgtcgcgcgccgcaggcccgacggccgagggtggtccttctcgtgggacggcgactcgctcctactccagctccgcgacggcattcccgacgagatggaggtgctcttcgtcggatcgctccgcgccgacgtccccgcagccgagcaggacgaggtgtcgcagacgctgctcgaccgattccgctgcgcgccggtgttcctccctgaccacctcaacgaccggttctaccacggcttctgcaagcgccagctctggcctctgttccactacatgctccccttctcatcgcccgcttccgcgtccgccgccgctacctcttcctccgtcgccacttcgtcacccggcaacggtcgcttcgaccgcagcgcttgggaggcgtacgtgctcgccaacaagttcttcttcgagaaggtcgtggaggtaatcaacccggaggatgactacgtctgggttcacgactaccatctcctggcgctgcctacctttctccgccgccgcttcaaccgcctccgcatcggattcttcctccacagccccttcccctcgtccgagatctaccgcaccctccctgttcgcgacgagatactgaaggcgctgctcaattgtgacctcattgggttccacacttttgattacgccaggcacttcctctcgtgctgcagtaggatgctgggaattgaataccagtcaaagcgtgggcacattggattggattactttggccgcactgtagggatcaagatcatgccagtgggagttcatatgggtcagttggagtcgggtctgcgcttgcctgatagggagtggaggctttctgagcttcaacagcagtttcagggcaaaactgtcttgcttggtgtggatgatatggatatctttaaggggatcaatttgaagcttcttgcatttgagaacatgttgagaacacatcccaagtggcaggggagagcagtgttagtgcagattgctaacccagcccgtggaaggggtaaggatctggaagccatccaggctgagattgaggagagctgccagaggatcaatggagactttggccagtcagggtatagccctgttgttttcatcgatcgtgatgtgtcaagtgtcgagaagattgcctattatacgatagcggaatgcgtggttgtgactgctgtgagggatgggatgaacttgacaccatatgagtacattgtctgtaggcagggtgcaccaggatctgagtcagtatcagaggtgggtgggccaaagaagagcatgctggttgtgtcagagtttattggctgctcgccgtcactgagtggtgctattagggtcaatccatggaatatagaggcaacagcagaggcgatgaatgaggccatttcaatgccagaacaggaaaaacagttgaggcatgagaaacattaccgttatgtcagcagccatgatgttgcttattggtcaaagagcttcatcctagacttggaaagggcttgtagggaccactttaagaggacatgttggggcatagggttgggttttggtttcagggtggtggccttggacgctcatttcagaaagcttaacatggattcaattgttaatgcttatgagatttcagggagcagggctatattgcttgattatgatggaacactggttcctcaaacttcaatcaacaaggaacctagtccagaggttttgaacatcatcaataccctttgctcagatagtagaaacatcgtttttcttgtcagtggtagagacaaagatatgttaggaaagtggttctcctcatgtccaaaattggggattgcagctgaacatggttacttcttgaggtggtctagcgaagaagagtggcaaacatgcactcaggccatggactttggatggatgcaaatggcaaagccagtgatgaatttgtatacagaagcaactgatggatcctacattgagacaaaagaaagtgccttggtgtggcaccatcaggatgctgacccaggctttggatcctcacaggcaaaggagctgcttgatcacctggaaagtgtactagcaaatgaaccagtctctgtcaagagtggccagttcatcgttgaagtcaaaccacagggagtaagcaagggaatagttgccgagaggatacttgcatcagtgaaggagaggggaaagcaggctgatttcgtattgtgcatcggcgatgataggtccgatgaggacatgtttgaaaatattgccgatatcattaagaggaatatggttgctccaagaacatcattgtttgcatgcactgtgggacaaaaaccaagcaaagccaaattctacctggacgatacatttgaagtggtcgctatgctgagcgcacttgcagatgccactggagctgaactggaatctgattcggctgatgaattggccgcatctatctcatcacttgatattggtgacgaacaatcagaaaccagtgatacaccaattggagggtcttagtcagttttctcttgaatttcagaatataatgattatttcaatagtcaattctacagaggggaagcttctcaatctgctgcactccaagtttctccagttgggcaagatagtagtctgttgctgcaaggcgtagatccatatgttcatagctgactcgccgacttggcatattctttgactttctcatttctggttgaagtaaaatgaaagcctcacagaaggaaagggaactgtgtggctgaagtaattggggggaagttataggagtggcaatttctaaaggagcccgtgcgcagcttctgatatgatcccttattaacatgacattacaaagtggtgtcactttttgaactatcggtagtaggtagtagcaatctcaagggtgaggtttaaattgattagttgcttcaaaaccagattttggctcctctgtgtttgggttatattttaattaattatccagggctagtacgctgagaattgcctaaatagtttggaaacttaaatcccttttaggattttcggggattgagtgagaaaacgagttattttttcactcaatcccccggaacactggaggagatttaagtttttaaactagcctttaggtgaaagatagcgtattttcaga

SEQ ID NO: 116729 - DNA, 86 bp, Zea Mays
tttctttggggttgagctctgaggttttcatacggggtttcatctctagcctaccccaacgtgcttgggataaaaaggctttgttg

SEQ ID NO: 116730 - DNA, 903 bp, Zea Mays
gccgattagcaccagtctgtctgatgataaacctgcttcgcgcttctgtgtgtcatgtgcaggggttactaccgctgcagcagctccaaggggtgcccagcgaggaagcaggtggagcgcagccacgcggaccccaccgcgctgctcgtcacctacaccttcgagcacaatcacgaggcgccgcagcccaagaccagcggcggcagctgctgccaccagcaaggcaagccgtccgcgcggccgccggcgccgaagcctgagccgtccgtggtcctggtccagcgggatgagctcggcccggagcacgagctggtagaaacagaggtgccggagcaggagcaggagacggagccagaagaggagcacgagccggcggaagagggcgtcccatgtctggccggtccggaagcggcagcaaccttaacggtggcgccggcggccgaggaggacgaaagcttcgactttgggtggttcgaccagtacccgacgtggcaccggtcggcgctgtacgcccctctgctgccgccggaggagtgggagcgggagctgcagggggaggacgccctgtttgcggggctcggcgagctgcccgagtgcgccgtcgtcttcggccgccgccgcgagctcagcctggccgccaccgcgccgtgctcctgatggtccttcgactctttttacgtttgtttttatttttttttcttttccttttgggcccctctttaagttttacacggaacgatttggaggcactggtacatagctctgattggtgcacggggtttatctgttcaaggccggctgctggcttaagctttctctcctcccgtgttgattggtgcacgcgttcgccgtccaaggttgtcctgtttgcgatgtgattccaaccagaaaacagcgaaaggt

SEQ ID NO: 116731 - DNA, 1043 bp, Zea Mays
gagctacgaagatggctaactcggctcttgtctatttctgtgcgagcagccggagatcggtggagaagcgggttgtgtcggtgccgctggccgagtgcggggaccggcccagaggggccagcggggaggggccgccgccgtcggactcgtgggcgtggcgcaagtatgggcagaagcccatcaagggctccccctacccacggggttactaccgctgcagcagctccaaggggtgcccagcgaggaagcaggtggagcgcagccacgcggaccccaccgcgctgctcgtcacctacaccttcgagcacaatcacgaggcgccgcagcccaagaccagcggcggcagctgctgccaccagcaaggcaagccgtccgcgcggccgccggcgccgaagcctgagccgtccgtggtcctggtccagcgggatgagctcggcccggagcacgagctggtagaaacagaggtgccggagcaggagcaggagacggagccagaagaggagcacgagccggcggaagagggcgtcccatgtctggccggtccggaagcggcagcaaccttaacggtggcgccggcggccgaggaggacgaaagcttcgactttgggtggttcgaccagtacccgacgtggcaccggtcggcgctgtacgcccctctgctgccgccggaggagtgggagcgggagctgcagggggaggacgccctgtttgcggggctcggcgagctgcccgagtgcgccgtcgtcttcggccgccgccgcgagctcagcctggccgccaccgcgccgtgctcctgatggtccttcgactctttttacgtttgtttttatttttttttcttttccttttgggcccctctttaagttttacacggaacgatttggaggcactggtacatagctctgattggtgcacggggtttatctgttcaaggccggctgctggcttaagctttctctcctcccgtgttgattggtgcacgcgttcgccgtccaaggttgtcctgtttgcgatgtgattccaaccagaaaacagcgaaaggt

SEQ ID NO: 116732 - DNA, 1579 bp, Zea Mays
ggatatcgctcgccctgctcaccccggtgctcccccgatgacacaagcatcgttcccataaaatataaaaaaggcgcccactagcgcacgcacccgcataaacagacaccaggcacgccgcgcatcgcaagcgagcgacacaagagagcgcccatcatctgtgccctgtgcgccaccatctcgcccgccttcaatcccctccatcattcgttccaacagccccgctttctccaccatcagtgcgaaaaaatttatgcgcgctttgggaaagcgcgagctcgttttgctttgaagctgcctccgcctttttatccgtccgggccggggctgtgggctccgcctccgcctccgtgtactccggccgggcgtggtcaccgagggagcagcggcgagagagggggggatctgatcgatgtcgtcggccgaggacgggtactgcagctcggattcgccgcgggcggaatcccccgacgagccgcaggcgggggcggacgcggagtcgccgcgcgccggggccgggctgaacaagcgcgagcgcgacctccccgcctcgccgtcgtcgccgctgccgccagctaagcgcagccggagatcggtggagaagcgggttgtgtcggtgccgctggccgagtgcggggaccggcccagaggggccagcggggaggggccgccgccgtcggactcgtgggcgtggcgcaagtatgggcagaagcccatcaagggctccccctacccacggggttactaccgctgcagcagctccaaggggtgcccagcgaggaagcaggtggagcgcagccacgcggaccccaccgcgctgctcgtcacctacaccttcgagcacaatcacgaggcgccgcagcccaagaccagcggcggcagctgctgccaccagcaaggcaagccgtccgcgcggccgccggcgccgaagcctgagccgtccgtggtcctggtccagcgggatgagctcggcccggagcacgagctggtagaaacagaggtgccggagcaggagcaggagacggagccagaagaggagcacgagccggcggaagagggcgtcccatgtctggccggtccggaagcggcagcaaccttaacggtggcgccggcggccgaggaggacgaaagcttcgactttgggtggttcgaccagtacccgacgtggcaccggtcggcgctgtacgcccctctgctgccgccggaggagtgggagcgggagctgcagggggaggacgccctgtttgcggggctcggcgagctgcccgagtgcgccgtcgtcttcggccgccgccgcgagctcagcctggccgccaccgcgccgtgctcctgatggtccttcgactctttttacgtttgtttttatttttttttcttttccttttgggcccctctttaagttttacacggaacgatttggaggcactggtacatagctctgattggtgcacggggtttatctgttcaaggccggctgctggcttaagctttctctcctcccgtgttgattggtgcacgcgttcgccgtccaaggttgtcctgtttgcgatgtgattccaaccagaaaacagcgaaaggt

SEQ ID NO: 116733 - DNA, 874 bp, Zea Mays
atggagcaatgtgttggtggtgagaatagtccacctcagttcatcaacaatgatctggatgttgtgccctgttatgagaatgttccatctcagtccattaacaatgacacttcagaaaatgttgatggtaagaagcataaaagaatttgcacatctaaagtttggcttgatttcgagccgctctacaatactgtagacggcaagaggataaggtatggtggtaagtgtcactggtgcaaatctacattgactattgtgtctactagtggtactggtcatttgcttaggcaccaacgtgattgcaaagttaagcttgctaaacaaggcaagcagtcagtccttaagtttaaccctgatggttctgttcgtaactgggattactgtcctgatcgtgctagaactcagatgtgtaggttgattgctaggcttgatcttccacttaattttgctgagtcacctgcttttgaggagtatattagactatctcataatcctgtctttaagaaagtatctcatcaaactactgttagggactttgtcaagttctttaatgatcgtcgtaagatagttgttgagtgcttgcaatctgtttcttctattgcaattacatctgatatttggagtggtaatgctaaggaagactatcttagtgtggttgctcattatgtttctaaggactgggcattagaaaagagggtcattggccttagactaattgaaacagctcacactggtgagaacattgctgcgagggttatgactgtgcttgaagattatggtgttgttaataaagttttttctataaccttgggtaatgcctcctccaattctaaagctatggagaagcttagtccatccttagctggatatgttg

SEQ ID NO: 116734 - DNA, 1498 bp, Zea Mays
gccagcatagcaacgccaacgatggagcaaaagcggcgaagggataaggcccccccgagtggggtcccgtcgcaattctttaatcggacccatcgtggttccacgtggcggtccaaccctctccggggggagaagatcggcaagatgacttgcgtggagacgcgcaacgagacccggccggtccgcctccgcccccgacgccgttatatacacgcccctgtctcccccctcgcctggttcgttgccgcacccgctgccgcctgccgtagtgctgctcccggccctccctctaattgctcttgccgctttatgtatttgccgcgcgcggcgacagagaatatacacgagtatatacagtagccgccgccggtggagtctctatctggcagccggccggtcggtcggtactctgctctagaagctagagagatactactctgcaggctagctagctagctagaggtagtagaagaggccggcccggcccgattgaagaataacatagagctgtcagctgctgagcgacgacggcgatggtgctctacttcaaggcgcgtccggacgccggcgactacaccatctacatgggcgccgacaagaacgagaacgaggagctcatcaaatacggcctccccgaggacgtctggttccatgtggacaaggtatcctcggcacacgtctacctgaggctaaagaaaggcgagacgatacacaccatcagcgaggccctcctggaggactgtgcgcagctcgtcaaggctcactccattcaagggaacaagatgaacaacgtcgaggtgatctacacgccctgggctaatctcaagaagtccccatccatggatgtcggccaggttggcttccacaacccgcggatggtacatgtgcttatagtcgagaagcgtgtcaacgagatcatcaacaggctgaataaaacccgggtagaacgccgggcgccagacttgaaagcggagaaagaggcatcaaatgcagcagaaaaggccgagaggaagatgcagctgaaagagaagaaacggaaggaggagatggaaaggctggagaaggagaaatgggcggagatacggagctacaagggcctcatggtggccgagaagatgacgtccaaccgccagatcgcctccgccggcaagtccatgcaggaaatggaggatgagttcgtctgaagacgactgtcatcgtcactggagtctacatctctctctctctctctctctgtctgtgtgtgtgttgtgtgtgtacgtacatatgtccatgctcgcgtgataacgacgagtcgaagcaaccaaaagatctcatggatcgattattcgatccgttcctgatcctccgttgatctgtgctctgtacataacatgtgctcccagcatggacatgtataggtcacgagaagagctagcgcgtatgtatacaagtaactagtgacgagctgttgctcggagggatcaacatatatggagttcatcaagagaatcggtgc

SEQ ID NO: 116735 - DNA, 82 bp, Zea Mays
atggggagcccaaaaaacccctcatttgtagctacaaatgagggagttttaagggctatgaaaaagttgggggcgctttagg

SEQ ID NO: 116736 - DNA, 3056 bp, Zea Mays
cttactcgcttcggcaagccaaggtgagaattgtgcacacggccagtgcaagcggaaaaaaccaccccacgggccacggtttcaacagcgtccagcagcacatagatatcgcgttctcgcccgggtcttggattattcgcttgggttgctttggtcgtagtccaccggtaaacggggcggccgactaatcgttgcacaagctcgcggcgcggcgcggcgccgccatgtcgtctccagcgccaacgtcgccggctacgccgtctccaccaccaccggctccggtaccgcccacgccgtccccgcagccgccgactccggcgccggtaccgcccacgccagcgccggtaccaccaactcccgcgccggtgccgcccacgccagcgccgattccgcctacccccgcgccggtgccgcccacgcctacgccgtcccctcctcctccgtctccgtcgccaccaccgccggtgacgccgtccccaccgccgccagcgaccgtaccgacgccatccccacctccaccggcatctcctccaccaccgaccgtgccaacgccatcaccaacgccaccagcatctcctccaccaccggcgaccgcgccaacgccaacacctcctccacctgtactacgcccgcctcctcccagtgctgtcccggcgtcaccaccacctcctgactccgtcccatcaccgcccccgtctcctaacggcgtcccggcgtcacccgcgtctccgccgtcacatcagttattggctccgcctccaccggcctcgtcgaccggaacatcatcaacgtcgtcatcgccctctaaatcatcaagcaacgccaccgtggtgggcataggcgtcgccgtcggggcggttgttctgatcggcctcgccgtcggcctcatttactgcttcgcgggaaggaaacgacgccggcggtcgccgctgccgtctcaggggtttccaggtacgtacgcgcatatgtacaaaacaaatacaacgtggtcgcctttgttcctcggcgtcccgtcgtggccacgttgatgcgacagtacgcgtcgtgactcgcgacgccgaatgcgggacccttggtggccgagtgataaattggaattccacgggccactattcactccgcgtatcgcgggtgacagttacatcgacgccaagtggcatcgtgtgctcgctcatacggcgtaccgcgcgatgcatgggtggcttcgtaacttggcgtgccatggattgcgagctgtttgtacgcacgcatgcacgcagcggaaaacctgaactggtgcgtgttagcgccagttctctctaaacacttgctggactgaccgatcgttctgctcttccttgtccccggcgccaccaggcgagttctacgacccgcggcggggtccaatgaccccgctgcacatgtcgcacgtgcaatcgacgacgccatcctcgacgccgccactgatgcactcgtggcagcagagcagccacggtctgtccgagtccccgctgccgccactgaacccttcgccggccatcacgggcggcacattcgcgtacgacgacctggcggcggcgacggacgggttctcggacgccaacctgctcgggcagggcgggttcgggcatgtgtaccgcggcacggtggccgggcaagaggtggccatcaagaagctgcgggcgggcagcgggcagggcgaccgcgagttccgcgccgaggtggagatcatcagccgtgtgcaccacaagaacctcgtctccctcgtcggctactgcctccatggtgaacaacggctgctcgtctacgagtatgtgcccaacaagaccctcgagttccagcttcacgggagtggcaggccaacattggactggccgaggcggtggaagatcgcggtcggctcggccaagggcctcgcctatctgcacgaagactgtcatcctaagatcatccatcgtgacattaaggcggcgaacatccttctggattataactacgagccaaaggttgcagattttgggttggccaaataccaagcagctgaagtaacctctgtttctacgcgtgtaatggggactttcggatacttggcgccagagtacgctgccacaggcaaagttaacgaccggtccgacgtcttctccttcggcgtgatgcttctggaactgatcactggaaggaaaccaatcatgacatcttcagagtatcagcctgagacattagtttcttgggctaggccattgctgacaagagctgtcgaggaggaaaactatgacgaactgatcgatcccaggctggagaccaactacgacgcgtacgacatggcgcggctggttgcgtgcgccgcggccgccgtgcgccagactgcgcggtcccgcccgcggatgagccaggtcgtccggtacctggagggcgagctgtcggtggaggacctaaacgccggcgtgatgccggggcagagtgcgatgcagcggtcgagcggcggcacgacggaccagatcaaccggctcaggcggatggcgttcgggccgggcgcaggagggagcaccgggaccggggcaatcacggagtacaccagcagcgagttcagcgatcccaccaccgagtacgggctgaacccatccagtgagtacacggccagcagcgcgggcgacacgggggaggtggccgcgggcgcgcaggggcagcagcagtggcacggcaggcgcgcgcccggcgacaccgagaggatgagccggcgcaccaccggcaggcgcacccagtcgtaaacacactggcacacggcattcatttttgcgctttgtcaggctatagtagattgtgatttcgttcgttcgtgtacatgcgcgtgacaaggctgtggtactgaattttgctgtctcttttttttttacttctctgtgtttcggattcatgcaatttttaggccgggtgagtggaggtttaagctgtaaattgtatatgcacgttattggcgctcctcggtaaacaaaagttaagctttgagtatgttagaactcaagttgtgtaatatttctagtaactggcaaggttcgcgagttcaagtttttatgatc

SEQ ID NO: 116737 - DNA, 2722 bp, Zea Mays
atggcaaaagaatcgaaggcagacgcatacagcgctcgggttcacacagcagcagacaatgcattgcgtgcaactgctaatccaaactcttatttcggcaaaggctgccggagaagaaagctcgccgttctgattgagaggtccaccggtaaacggggcggccgactaatcgttgcacaagctcgcggcgcggcgcggcgccgccatgtcgtctccagcgccaacgtcgccggctacgccgtctccaccaccaccggctccggtaccgcccacgccgtccccgcagccgccgactccggcgccggtaccgcccacgccagcgccggtaccaccaactcccgcgccggtgccgcccacgccagcgccgattccgcctacccccgcgccggtgccgcccacgcctacgccgtcccctcctcctccgtctccgtcgccaccaccgccggtgacgccgtccccaccgccgccagcgaccgtaccgacgccatccccacctccaccggcatctcctccaccaccgaccgtgccaacgccatcaccaacgccaccagcatctcctccaccaccggcgaccgcgccaacgccaacacctcctccacctgtactacgcccgcctcctcccagtgctgtcccggcgtcaccaccacctcctgactccgtcccatcaccgcccccgtctcctaacggcgtcccggcgtcacccgcgtctccgccgtcacatcagttattggctccgcctccaccggcctcgtcgaccggaacatcatcaacgtcgtcatcgccctctaaatcatcaagcaacgccaccgtggtgggcataggcgtcgccgtcggggcggttgttctgatcggcctcgccgtcggcctcatttactgcttcgcgggaaggaaacgacgccggcggtcgccgctgccgtctcaggggtttccaggcgagttctacgacccgcggcggggtccaatgaccccgctgcacatgtcgcacgtgcaatcgacgacgccatcctcgacgccgccactgatgcactcgtggcagcagagcagccacggtctgtccgagtccccgctgccgccactgaacccttcgccggccatcacgggcggcacattcgcgtacgacgacctggcggcggcgacggacgggttctcggacgccaacctgctcgggcagggcgggttcgggcatgtgtaccgcggcacggtggccgggcaagaggtggccatcaagaagctgcgggcgggcagcgggcagggcgaccgcgagttccgcgccgaggtggagatcatcagccgtgtgcaccacaagaacctcgtctccctcgtcggctactgcctccatggtgaacaacggctgctcgtctacgagtatgtgcccaacaagaccctcgagttccagcttcacgggagtggcaggccaacattggactggccgaggcggtggaagatcgcggtcggctcggccaagggcctcgcctatctgcacgaagactgtcatcctaagatcatccatcgtgacattaaggcggcgaacatccttctggattataactacgagccaaaggttgcagattttgggttggccaaataccaagcagctgaagtaacctctgtttctacgcgtgtaatggggactttcggatacttggcgccagagtacgctgccacaggcaaagttaacgaccggtccgacgtcttctccttcggcgtgatgcttctggaactgatcactggaaggaaaccaatcatgacatcttcagagtatcagcctgagacattagtttcttgggctaggccattgctgacaagagctgtcgaggaggaaaactatgacgaactgatcgatcccaggctggagaccaactacgacgcgtacgacatggcgcggctggttgcgtgcgccgcggccgccgtgcgccagactgcgcggtcccgcccgcggatgagccaggtaagactcctgctccagaacgtctcacacacactgggtgcagccgtggctgcaagcgtgacactcgtctccccgttcccaaatggtcaggtcgtccggtacctggagggcgagctgtcggtggaggacctaaacgccggcgtgatgccggggcagagtgcgatgcagcggtcgagcggcggcacgacggaccagatcaaccggctcaggcggatggcgttcgggccgggcgcaggagggagcaccgggaccggggcaatcacggagtacaccagcagcgagttcagcgatcccaccaccgagtacgggctgaacccatccagtgagtacacggccagcagcgcgggcgacacgggggaggtggccgcgggcgcgcaggggcagcagcagtggcacggcaggcgcgcgcccggcgacaccgagaggatgagccggcgcaccaccggcaggcgcacccagtcgtaaacacactggcacacggcattcatttttgcgctttgtcaggctatagtagattgtgatttcgttcgttcgtgtacatgcgcgtgacaaggctgtggtactgaattttgctgtctcttttttttttacttctctgtgtttcggattcatgcaatttttaggccgggtgagtggaggtttaagctgtaaattgtatatgcacgttattggcgctcctcggtaaacaaaagttaagctttgagtatgttagaactcaagttgtgtaatatttctagtaactggcaaggttcgcgagttcaagtttttatgatc

SEQ ID NO: 116738 - DNA, 639 bp, Zea Mays
tggaaggactaccattatgatccaatttatttaggtggaaggaaattcccatgggctagggttataatgagtaggctgagcaaagcgttacaacatgtttgccccaatgtagactttcctaagtttggtaattttccaatggatatgccatctaattgcccaacaatgaggacagggtcaaatgactgtggattttttgtaatgagttacatgaagttttatgatcacaatgcaggtgtcataacttctttcaatcaaccagacaattcccgagacctacgtgctcatgcccttcatcaactcacattccattgcatgaacaaggcgctgccacttccattagatatccagagatttatgtttgcgcgcaattagttaactatgtgtcagaactaagcaatggtgtgggcaatgtaccgtactgtggtattttggccattattgtcagttaacaatcttaggaagcttccttatatgtgctgttttagaacaattgtcatgctaccttgtcttaggggtgttacccaggttctttctgtgaactctagttggctggatacttatggttatgctgcgaatatgtgaacatcatatgttttcacttctgtgggctttaaatatgatctgtttatatgttat

SEQ ID NO: 116739 - DNA, 501 bp, Zea Mays
atgaaagaactacatctacaagagagtgctcggtgtattaacacttcaaccacagtcgcaggaaatgtggtatgcagtgtggctccctgtcccggttccagatcagggttaggtacgaagccgatcgcaagctgggtcgatgcttgggacatcgtcccgaaggccgttggatcattgagaagcataagagcttcatcattgccatcgtcaaactgccggatcattgagaagcataagagcttcatcattgccatcgtcaaactgccgcatctagctttgtggatgtgggagatatcctgtgatcttccaccgtcaactgcatcctcggaggctcagatggtgcctgtaagtgttggagacactgtgcggcgctgggctggctggccaggcaccagaggtgtgcgtgacgctagagctgagcgctggaggctggcagtggcgcgtgcgactgtgcctctgatgtatgtccataggatgagagttggactgttggagacctag

SEQ ID NO: 116740 - DNA, 238 bp, Zea Mays
gtttaggctctacgataggtatttgcccatgctgtaattatacagaaaagtttaagaattcttctaatatgcatactctaacaattcttgagttgactaaaaagcaaaaaaatcaagacacggcatggacagaggtgtgtgaatgcatgagcatgagcagataggcaagaaatactcccattccaaattactccatcccaaaaaaatagggtgtataaagttttagattttgtcccaa

SEQ ID NO: 116741 - DNA, 540 bp, Zea Mays
atggctgcggcggaggcgcggcgccggtcagcggtctgggccctgctgccgctgctgctgcggctgctccacccggtcgcgctcgtgctggccaacaccgaaggtgcgttcgtggccgggcaattctcagggagggcctcggtgtctgtgtttggttatgctactcagagtgatttgaattttaacaatatatttagcattcatgatgctcatctccatttatcacgccaccatattgttcctcagttgattgactggcatgagggtggatacttgactgttgatttaccaatgtctcggggagaagttgtcattgggggtccaaatgtttcgtcattcttgcctaccgctgtccctttgcttcagaatacggtgaaacagaagtccttcattggctcttctcatcttggctcacatgcagtacttgaataccagtttcttcctgagcagccaagtgatgcatatgagaggggaagccagttgcgcttctatgatgctctagcagaagtgttaaactcaaggaaagaagaacaaatgtag

SEQ ID NO: 116742 - DNA, 107 bp, Zea Mays
ctatttcaaatgccgccattcccaaaacatatattcttggaggccctggcagcggtacaaggtgtcaacataattgcttatggttaagcattatatatttactcttt

SEQ ID NO: 116743 - DNA, 406 bp, Zea Mays
tactcattctaaaggatggtcaaggtggtgatgaaaggaaggtatcagaagtccaaaagcacttagtgcccagccgacagcgatgaggagcatgccgcagggcaccgagcaagcgaaaaaagatgggccagctgtctgtgctcacgaggatgcacatcttctgacgttagttaagcctgacaagcacggggatgaacatcgaatggaggcccctctcttgtcctacaagtgtgaggtcgatgacaaggggttttggacgaaactgaagactctatccactagtttatcaaggagctgatggcaccaccaccatatctacggtatgtttcaggtagcatctcacttctcacttcacggtgacacttagttggaaggaccaaatctgatttgatgctacatcttggat

SEQ ID NO: 116744 - DNA, 1137 bp, Zea Mays
aaacaacccatccgctccatctgcgagcaagctctagcgatctagcagcatgcaggccctatgacgctcgccatcctcatccgggagcgtggccatgcctccgcccgcctcttcccccacccccggtgccccttccacacaccccccgcaccgctgtcctgcccctctcccctcgcacacccactcccttctaccatctccatgcttggcgccctcaccacctccccgaccgcctctgagctcatcgccttcccccatagcccgaacgagatatttgcgtccgacccgcccatcgacgtggacgccatcatggagaacgagctacggaagaaggacggcggtgcggatgtggaacatctcagatctgtcactctatctccggcgacctgggtcgggcgaggcacttcttttatgtgatgcctgagtggaacttggtatcctggaacaaaatgttgggcgcgtatgcctgtggcaggatgctcaccgaggcgcgggacctgttcgacgcaatgcttgccaggaacagcgccaccttccgataattattagctcgcctcccctcccattttctcagtacaatctactccatgttgttgctgtatgatcagacaaaattcttctatcaggttcgcccgatgagaagaaaggaaaaaaagtactctgaattctgctttctcacgctcgctgttcatcgattcccgagccgattagcagagagtctgctgtttcttctctctgaatttggatggagagactgagctccgaattcagtttcgacacggacgcgggatgatgaatcagttggtcttttttcttgtgctgctgttgggttttcttagattgaggtggtggcacgcccaaagttcttccttccctcactctgcccaaccacgtagtatctcggttcctttgaattctctctctgtttctagcgttggggccctcggggttggatttatgacctggatggatgaattctctgaattcccccttcctctttggatgtttctaccattggaagaaagccaagctctgttccctttactcctgccccctttttttatgtggttctacttgtgctgtgttgcaattacttattactgcaccccaagtgcgttttcgaccaaggaaatctta

SEQ ID NO: 116745 - DNA, 1842 bp, Zea Mays
aatcacgaaaactgggttggagccgatggatcgtttctatcctcgttttcctccctctcctccagatccggtgctcctctccgccgcctccctcccgcagctcccatatttttccgtcgctcgcgcgcccgacgcctccctcccgcgctcccggagcttatgcgcgccaaatctcccgccagcatctccttctcccgcgcacgcctctggctttcgttccagaccaggctccggccagatgagaacgctccaccagtagctaggcttcattttcctttttaatggctcatttccatcccctgatctagcgctaaaatttagtccccaattcatctctaaggaaaatcgagtttcagatggatttgttagggaagggtggtgcgcaacaaaagaaatcaaagaagtcttctccaacctccagaaaatcaactgttgttccggccatggcatctgcaggcagtgcaggcgttgcagctccaagcacgggtggtcgaagtagttctcatccattttctgtggtttgggatgggatggcacttggaggctcattcgcgtctgaatcatctcccaccagctctgaatggctatatccaccaggcgggtttgtaaattctctaaggatgccatttccttatgctacctatccgaatggcagccaacttccagaaaactcccattttgttggttgtacaagcaacaaagggactccatcaccaactaatgataaagggactcctattgcagaagtacatgattcaattgacattgacgccgatgacaccctagagcctgctagaactgacaaacgattgaattggtcacatgaagaagatgttagattggttagttcttggctacaaaattcactagacccggtcgatggaaatgataagaagtcagattattactggacagatgttactaatacgtacaacagcaccacgccaagtaaccgtaggagaaaccgtaaccaattgaaaattcgttgggaccgtgttaagaaacctttaagtgagtttcatggctgttgggtaaggaccactagagtgttccaaagtgggcagagtgatgaccaaaggacagataatgcattgcagctatatgcatctgaacataatggcaagcctttcttgctgcaacatatatggagagtagtacgacatgaaaggaagtgggctgcatatgtggacaaacttattaatgcaaaggacaaccgtgcaacaccaagtcctgttgtgaatgtagaagattcacctacaaagcgtcctactgggaagaaaaaggccaaagaagagcgctttggaaaacgaaaggcaccagaagctatttctgcaattggagagaaactagaaaaattcattgaagcaagcagcaaggttgagaagatggcacaagtgcaacaatgtttggctgacaagaagttagaagtagccaagattaatcacaaagcagcccaagaacaaacaaagtgtaaaatgatagacctttataaagatttattgtgtggttccacggctggtcttagtgaagaagctctagctgagagatcaaaagctttagagtgtatgagattgtctttatttgctccagataattaaggagcttgatcggaaggtttttatatgcacatggagaggctggatctgtgcatggagaccgaacctgggtgtgctaatgttcatgtcgatcaaaagttgttgtccatctcagatctttgctatctatatattaagagaagtttgctataattatatattactatgtattatggactacattatatttatcaacatggatactgttttactatggattaatatattttaatctatgtgttgctat

SEQ ID NO: 116746 - DNA, 1768 bp, Zea Mays
agttgccgctcccccttccaaacatgaccgttgggccgctgttccgctgtccccttcctgagatcccaaataccccaccgccgcgctccctcacctggcacccgagaatcctcgcgctggcgcactccaaattcctcgcccccacgccggttcgaccgttgccaatctccccgcgcgcacgcgctctccatctcgcgatccccaccccgagccgcgagcactttcccgggcgggggcgtatggcctgcgccgcgacgatgccgatcgacttactccccgctccagccccggcggaggaggaggtgaaggcggttgaggaggacgaggagatggtggtggaggtggagggagaagggtgcggcggaggggccgtggtggtggccgtggcggacgcggaggcggagggtcacccctacgacttccacgtgtccgggccgcgcaacctgccaccgcccaactggaaggacataatcaggtcgagctggaagggtccaaattacaaaaggatggtaatggcctgcttcattcaagcagtctacctgcttgaactggacaggcaggaccagaaaggcgaagaggatggccttgctccaaaatggtggaaacccttcaaatacaaggtcacacagacattggtggatgagagagatggttccatctatggcgccatgctggagtgggatcgctcttctgccttatctgactttatcctcataagaccaagtggggcaccgagggctgtgttagctctcagaggaaccctcctgcagaagccaactatgaagagagacctgcaggatgaccttcgtttcttggtatgggagagcctcaaaggttcagtgagatttgttggtgctttagcagcactacagttagcagttgagaagtttggcagcgccaatgtttgtgttgctgggcactccttgggagctggctttgcacttcaaatctgcaaagagcttgccaaacaaggggtttttgtggagtgccaccttttcaatccaccttctgtttcactggccatgggtgtaaggagcatgagtgagaaggccagctacctgtggaagaaagtcaaaggaagtctgccattgaaggaagagacaacaacacttgagactgccaaggccgaggcaaatgacaagaagagattgcgcaccgagaataaatgggtgccacatctgtatgtcaacaacagcgattacatctgctgccactacaacgctccctcttgcccgtccacatcaacagatggttcttccgacgaacagcagcaacaacgcaaggcaagtgagattgccagtgatgtggtcgcaaagctctttgtgacatcaaaaggcccacagaagttccttgaggcgcatgggctacagcaatggtggtcagatggcatggagctgcagctggctctctatgatagcaagctcataaacaggcagctgaaatccatctacacagcaacagcaataccatcttctaccaggtcctagacacggcttaagccgctgttgcatgggtcattagaaatactctttctaatcactgtgttcctttattatcaactgagaatgttttataactccagggggttcctgcaaacagtcaaataattcgaaaaactaagacaacattattttttcaactcaaatgttggttgtaggataggcgcactcactgtcagagttcgctctatctgacctgcactgtcattacaaaagtaatataggggatacatttttcctttaataaaaaatattgttttcacagtatc

SEQ ID NO: 116747 - DNA, 1647 bp, Zea Mays
cggaaaacaaagggggcaggagccactgccaacgacttcgaggtcgcacctacccccgccccattctgcaagccttgctccatttgcgactcgcgagctcaccttccacaccctacctactcctccactctgagctcacaccaaacagcccgtgcaccaaggccaccattcacctccaccaacaacaaacgggaactcttcacagcttcgcacctcgcgtcacaacaccaagacgcacgtaggagggaacctcaagcttcagtcgtccatggctcagcagcaaacaaatcctgaagaggtggtcctcgggcaggaggtcggggccgcgagggtggccactctcaaccgcccgcgccagctcaacggcatctccgacagagtggtgtacctcctcgcacagtttctggagaaatgggagaaggatgagaacgccaaattcgtcatctttaagggtgctgggcgtgcattttctgctggtggggacctaaagatgttttatgaagggaaatcaaatgattcctgcctcgaggttgtgtatagaatgtattggctttgctaccacattcacacgtacaagaaaaccatggttgctcttgttaatgggcttgtcatgggtggtggcgctgcaatggttgcgccactaaagtttgcagttgtcacagagaaaacaatctttgctactcctgaggctagtgttggattgcacacagattgtagcttttcctacatccattcccggctccctggatatttaggcgagtatctggctttaactggtgctagactgaatgcgaaggaaatgatttctgctggtcttgctactcattttgtcagttctgaaaaattggaagaacttgaaaaacgtctactggatttggacacaggtgctgagtctgcagtccgagctgttattgaagaattttcaacagatgttcaaactgatgaagatagtatattgaataagctttcaactatcaacaaatgcttctctgcagagactgttgaggatatcataaaagcatttgaatcagaagcgagcatagacggaaaccaatggatagctccagtcctaaagggtctgagaagatcatctccaactgcactgaagatcaccctgagatcgatcagagaaggtcgaaaacagagtttgcctgaatgtttgactaaggaatttaggcttacaatgaatatactgcggtctgttgtcaatggggatgtttatgagggcattagagctcttagcatcgataaagacaatgcccctaagtggaatcccactacccttgaggaggtgaagtacgaggacatcgaccgtctgttccagccgttcagtccggagctggaacttcaggtcccatctgatgattccaacaggtggagcggcaaatacgagaacacggtctatggcagagcttcccagtgactgtatacaagatcccccagccttttgttattttcatccgaaccactgcattacggaatattcagtttgcggcacgtgtgtatttcgagtgtttgtgtagcgcgacgttccaatgtatgaactgttgcaaaggttacacgatgacatgaagtttgatccaacaccaaaaccatctattagatgggaaagttctgcactttggatgttatatcgccaatcagaag

SEQ ID NO: 116748 - DNA, 80 bp, Zea Mays
ctctcgtgcgcttgcgtcctccgattgttggtgcgtggctaaacactcttttcaacttgttgggggttaaatgctggttc

SEQ ID NO: 116749 - DNA, 1981 bp, Zea Mays
ctccattctccaatctccactctgtccggcgcccctttcttctgacgcgcccgatgcagcgatgctactgcgatggatcgcagctgaggggcgtcggcgagcgcggccgtctaggcccctcgcgcgctctctctcgtacggtagggttgtggacgctgccgctcgcgatggggagctcagggtgttcgtggtcgcgggcgaggtatccggcgactcgctcgcttcgcgactcatggcggctctcagggcgctgtcccctgtgccggtccgtttcgctggcgttggcggtgaactaatgtgcaaggaaggtttgcaatcactttttcccatggaagaaattgccattatgggcatgtgggagctgctgccgcacatatacagtatcaagaggaaaattgaggatagtgcaaatgcggctatgctatttcaacctcatgctgtggttacaattgattcaaagggtttttcttttcgactgttgaagcaactgaaatgcagaagcaatcagaaggttcaaagtcctctgcatatccattatgtttcgccgtcattctgggcctggaaaggtggtgaaagcaggctctctaagttgcataattttgtggaccacatgttgtgcattcttccatttgaggaagaaatatgcagattaaacgggttgcctgctacttatgtgggccaccccttactggatgatgcgattggcctaaacatggggacagaattgtgttctgacaagtctaagtatcaaagaagttgtgaagctttccgactggaacatgggctgtccccaggtgccacaatcataaccatgttacctggaagtaggatgcaggaggtagttcgaatgcttccgatctttttgcatactgtgcagaacttaaggcatacatttgatgaactatcattagtcatcccagttgctccacatcgagatgtgaggacctatattgaaaatgttgttcagtcagaaccttttccagtggtgttgatacccggggggtcgcttaaggaaagatacaatgcattcagtgctagtagagcagcattatgtacttcaggtacagctgttatggaactaatgttagcaagactgccctgtgtggtagcgtaccaagctcatttcattacagaatgctttatccacttgaggaaaaagataaactttatttctctgcccaacattctcttgaattctctcgttgtgcctgagatcctttttggggcttgtacagctaagaatttagctgcaaaattaagtgaggttatttcaaatgatcaaatccgccagatgcaaattgaatcagctggccaagtattcagggttctctatgaacccatcaagaaacgggatactttattaagggaagagatcgactactcaggcttgtcatcaaatttcctatctcctagcatgatcgcagctttaacagtgctttatatggataagcatcaaaacactgcatgccggaatttggtggtagaatcagaagctaagaaatctcttgttctaccaacgtggtcagggttccatgcatgttgttcatgcacaactggagtaacaaggcaacaagcaactggttatgtttaagcttccacttctgaagtggtatcagggtcggtcagcatcatggtatcgcaaacagatttggtcatcctgttggtgcagactcttctacggttagaatttcctagatggaacaggactcggggagtgtgactagatggtacagtggggcttcgaaagtaataatgaactacaagatttttttcttctgtgtttctgatttctttcagattctgcagtggctaggcagactgtacgctagcagtcgtctgctcctgctttttagcaaggggggatatgagagatgtcgttataatgaagcgcatatcgagatttctgttgtcctgacggatggagaggtaaatcctccaaatacccccacgaagtttggtaacgaatcctgatgtacttact

SEQ ID NO: 116750 - DNA, 252 bp, Zea Mays
atggctcctccgcgttgcgcccacaccctgctgcatcttctcctcggcctcctctctgcaacaggcggcgcttggtcctgcttggcgcccatcaaggaggctgcagatctcagctccatggctgttttcccaatcgcagcagttccaagccggtcgccggtgctccctgcttcaaccctgcacgacgctcactccctggctctcatcctcgccaccagcctgtgcaacggcctggccgtcggcctcgcctag

SEQ ID NO: 116751 - DNA, 131 bp, Zea Mays
ttttctttttcttttctgttttctatttcttttcctaattttagttttagtttctaattcaaatttaaatctatgttgagtttcctagaatttaagtataaatgcacacacaaaaatcctagcatgaatgc

SEQ ID NO: 116752 - DNA, 469 bp, Zea Mays
attccccacctcagcccaccaaatgaggtagggtttccgattgcttccgcggttcaatcaccgcctacgtagaacccctccgctccttccagctcgctctctacctgcaccagcctcgcccgcccttcgctcgccgccgccatggggaggggaaagttcaagggaaagcccaccggccgccgcaacttctccacaccggaggagatcgctgctggtacttcaggtcgccctcgcacctttaagaagaaggaggaagaggaagaggaggaagaagaaagagaagagtcagaggaggaagaatctgaagacgagtctgatgacaaacctaaacataaaggtactgagggtattattcagattgaaaatccgaacttagtaaaagtgaagaatataaaggccaaggaagttgatatcctgagaagcatgaaaagaaggggaaagagaaaaaaaatcctcattgcagtttaat

SEQ ID NO: 116753 - DNA, 570 bp, Zea Mays
accgaattcctcattccccacctcagcccaccaaatgaggtagggtttccgattgcttccgcggttcaatcaccgcctacgtagaacccctccgctccttccagctcgctctctacctgcaccagcctcgcccgcccttcgctcgccgccgccatggggaggggaaagttcaagggaaagcccaccggccgccgcaacttctccacaccggaggagatcggtaacgacgcgcccgcccgccccatcctccccctttggtcccatttataggtcgaattcgatttcatatctggagcgtgccacggtgagcctaggcgactgcttgatctgatgatttcgatgtgagctagttctggaccggatttgcgtgatcgagcagaactcaaaccatttagtagcttgtcgcgagttgtcacttaagttcctggttttaagtctgtgctgcgaggtttccatgggttcgttcgatgcttggaggaacgatgatttgttcatctagttgttcgatttagaggctcaatgattcacctatttgcacgtaccgtttggtttgggtacataattgtgctt

SEQ ID NO: 116754 - DNA, 2168 bp, Zea Mays
gaccccgacccaacaaagtggcagccagaaaactcgcagagctagagcatctcgcttgcgaaacagaggagaggacggcgcgcgagaggaggaaaggaaaacaaccacgagtccacgagaccacgacccctcatccattccattccacttccacccgagcaccgatcacggcggcgatggggaaggtgccatcgtcgcgggcgggttcgcggcaccagcagttccgcgcccgcgccatgacccgcgtcgacgacctccaggaggtcttctcgggcctgcagtccgcgcgcaaggactcacgccccaccgacgccgccatcctcgaggcgcagctccaacagatgctgcgcgagtggcgctccgagctcagcgctccgtccccggcctcctcgctccagggcaacgccagggaactgtcggatccaccttcggatactcttcgtatgctgcaattggcggcggccgaggaggaggacgacgccacgagcaagatggtcgagcagcagcagcagcctccgcccccagctaaccagaaccaggggcacgcgcaggtctgccaggacatgaagagggagccacgcgaggaagcagttgacgtcgctgtggagaagccgcagccgctgagtcagggagttctgcttaatggtgctgctaccgcgtctgcggtgttccatgatcaggaacttacggttgaagattttctttatgatgatgattacaagatagacctttccgggtctaatctggatgtccttaataacctggaagggatcgttcagctggaatatccacagttaaatttgccgcaagagttagcccctaatgtgtacattgacatgagttactgtggacagaatgctgggggtgttttactgcacatgacagatttgttcacaacaatgacttcggcaccttctgcattcctgaagccaaaatgcgctctctgggactgccccaggcctgctgttggatcagaaagatggcatgattattgcagcatgtatcatgctgatttggctgtgcaggaagagggccctccaggcacaatgcctgtgatccgtccaagaggcattgatctgaaagatggccccctgtttgctgctcttagtgcaaaaatccaaggaaaaaatgttgggatccctatctgtgaaggagctgccactgcaaagtctccgtggaatgcacctgaactgttcgatctttacatctttgaaggtgagtctatcagagaatggttgttttttgacaaaccaaggagggcatttgttagtggaaatcggaagcagcggtccttgccagattacggcggccgtggttggcatgaatctaggaagcaggcgatgaaggactttgggggtctgaagaggtcctattacatggatccacagccatccaacagctacgaatggcacctctacgaatatgagatcaatgagtgcgatgcttttgccttatatcggcttgagttcaagtcttcagatgcaaagaagattgtgaaatccaaattagcctgtaatccactgaatgaaattcagcagcaaatggttagactcagtgcagacagtcctgtagacaacaaacggacggcccggggcaggcaacatgctaacccgacagatgtcgatactaacatctattcagttccaaacaccacagctcaagccaatgttccaaatgcttatcagccagggtcacaagtggaccagatgacatatttgaatggtagtgtcgtttatgggcctcatctgccgtatggttactccactgaaagaagtgacttttattggaactcagctgatgggacatgagaagatgaacacatattcgatttatggcatatttggccttcaaattctaacagttccagttatggttattgggtctactctattagcatgaccctcccatcttcttttaattggaactggtccaatctacaggaaacatctctgaaacaaaggatgtcaatactgcagttctattttctgtggtaacttttgttgttgtaatataggtgtatcttgaaaatagcaagcaagcatctccccgatgtgcatgcagctgtatcatatgcaagataaatctctggtttggtggactggtaacctgtcacgctggtggttccatttatctgtcacgttgtacgtgcatcaatacatcctgttctg

SEQ ID NO: 116755 - DNA, 171 bp, Zea Mays
atggcctcatggctcaaggtcgccgaagacttgctcgaagtcgtcgaccggagggcaaagatcgtggcaacagaactgtcggatgagcagtctacctctcagccttcaggaccaaacaaccaagaagtgcaagcaaagaagggaaagctgagggagaaggtcactgcttaa

SEQ ID NO: 116756 - DNA, 1041 bp, Zea Mays
atggccagctcgcacgacgatcttgtgacctactccgccaagatggacctcatccttgagcaactcgccgccatcaatgcccgtttggattcccacgacgctcgtctggccaagctcgagcaggcgtgggtcagcccctctgcttctaccgcgggctgcctggacgcgagcgagggcggcctgggcgcgggcggaggcggccgggtcgaggacgatggggtcgatgggctgcaacccgacacaaccagggaggaggtggaggcggcattctatgttgaggtggctgtgccactgctgcagcccgcctccgtgctagtggaggtccaggcgtggcccgactatgcgcggatctgctcgcccaatctacaacaatcggccaccatggtggcccaacttgtagagagagctgctgatcaaagctcatcaagagtgctggaattggagcacaaggtggctgtgcttgaggttgaatatgcttcattgcaacaagaactgcaggagatggaagctcgtaaccgccgcacacagaaaaaaccttcagaagaagccaatcaagttcttcagatgcaggcttggcaggaagaagttgagcgtgcacgccaaagccaacgagaggcagaagcaaagatatcatcgttggaggctgagttacagaaaatgagagttgaaatggctggaatgagaagagatgcagagcattattctagacaggagcatgttgagcttgagaagagataccgggagctaactgacttgctgtaccacaagcaaacacaattagaatccatggccagcgaaaaggccggattggagttccaactggagaaatcattgaaacaatttcgtgaagtgcaggtcgaagcagaaaggagtaaagctactcgcagatcagcatcatcgtgggaagaagatactgatatcaaggcattagagcctcttcctctacatcatcggcacatggcaacagcaaatcatcagttacaaaaggctgcgaagcttttagatacaggcgctgttcgtgcaacaagatttttgtggcga

SEQ ID NO: 116757 - DNA, 526 bp, Zea Mays
gagcctcctttgccgcagctgctgaagagcaggaaaggaagaactctgccgcgatagcatcgctgctgtctccttggaggtcactgttgtaagctggtttgccggacacacttttgtagagcccgcactgcgtccatggaaacggaacagttggtcaccgacggtgacgacgagggcgccgtcgaggggcgagaacctggaccagcctcgccgcgagaagacgtggaacgccgacgcgccggggcagagatggagggcgagagcgcgggagcaccgcgagctccgtaccagcatccgcaggacgtcatcttgactgatcggaccggacgcgctgctgccgccgagtcggtgcttgcggatgcagagaagcgagccgttcgcttcagctttaggcaacgattcagctgctgcactactggcgtgctgcaaggcgtgcaggagcttggttgaagcctgctcaagttgggtaaacaaatcgtctgcttcgttcctgcgacccagcaaaatccagaggcgtgtcgatacg

SEQ ID NO: 116758 - DNA, 539 bp, Zea Mays
atggctcattcagaaggcttctcagttccggacgttgtcccttgtggcggtcgagggctctcgagccctcatcttcactggccgatggtcgatgtcgacgaagtcgttatccagcgaagtctttggtcacttgaagcgctgcaattagtcgaggggtcagtggcttctgtggtcgagtgtcttttggctctaaaggataatgtgactacaggattgcgtcaaaacattacgaacaatgctgctaaaacaccccttagaaggaaactggaacttgaagaatctgatgagcctgtaatttcggttatgacacccgggagaagatctggggaggaaagatggaaaggccactgggattctaagtctcaacaaagaagtattcttcattctggacaaaaggtccatgatgctttccaacttaagcgagcctcctacactgatcttcctcctgccaaagtttcagagatgatgcatccaagaagtatagataatgcccctactcaatcacttcttagagttgttaatggcattctagatgagag

SEQ ID NO: 116759 - DNA, 992 bp, Zea Mays
tgcgattgttatacaccaacatatatctcttataaagagatacaggctccaagaatccgcatctattcaagtcactctccaaaatgtggatagcttgtgcacaccgtggcaatcaaatcaccagtgcacgcaggatggtcacatttgctatccagaaactggaatatctaagttttcacttgtgtttggtaggcaaacagaaaactgcctcctccgctatataagcatatggcctgctcagttttctatatccattgctcccaccagttgatacatgtcttgtgacttgtgaagtgtgttcctatctgcatcaccttccttcgccttgcaaccctttggctagttcattcatacgaatggattattctaatttgcgtcgccaagctgcatccatgaaaaagactctctttgatcaggggtacctagatgagcaattttgccaggtggaagacttgcaggatgaagctagtcctaatttcgcggaagaggttgtcactttgtttttcaaggactcggccaggctaatatcaaatgctgaacaggctctggaaaaataccccaaagatttcaatagatgggatgcatacatgcagcagctaaaaggcagctgttccagcattggtgcttcaaggatgaagagtgagtgcgtgtcattccgggattactgcggacagggaaatgttgaaggttgtatgagatcgttccagaaagtgaagagggagcacggtgccctgaggcagaaactagaggcctatttccagctgctacgacaagctggtcctgctggagctgccaccaggcctggatgtaagaactaggagttgcaggaaaacggagtatgacccaagaagatacctcactacaactgactggcccagtggccctgctgcgcagcaattaggggtcagcatacgaagcgaaacaagagatgatatgcatggatatgcacaaaactgtaataagagattgttttttcaagaacaaaaaaaaaa

SEQ ID NO: 116760 - DNA, 1859 bp, Zea Mays
gcgggcagcctgatccgcgcggacgtggttttcctcttcggggctggacctgcactgcacgagggccgcgcgtaaacctcgccggggcgctgtcatctgctgctgcctaattccaagccctctcttttgccgccgctccaaagtttctcgctcccatctcgtgagcttctctttctgacgctggtgcaagccgatcttggctccaatccgctcgtacaattggcctccgtttggcagctctgccgttcccctaccgaacgagagagaaaaaaagagaatcgcaggcgcagcatgaggcgcgtcgtgaggtggctcaggcagctactggctggcaggaaggacgagcgcggaggaggactcgaggtgagccatgtcggtagcggctggagcgacgggccggagaaggagaagaggaggtggagcttcgcgaagcagaggaagagcggaggcggaggcgcgcggtcgtcgggtccggacgccgtcgctcctgctgccgcggtggaacggtcgcagctggtggggaggccaggggaggacgcgagggctcgagaacaccgtgccgcgatcgccatccagaaaaccttcagaggctacctggctaggagagcgctccgagctctccggtcgctcgtcaagatccaggcgctggtacggggctacctggtgaggaagcaggcgaccatgacgctgcacagactgcagacgctcatgcggctgcaagccgactccatcgccgtcaagaatgcatcgtaccggagatccatggaacaagaagtaacccacatggttttttttctctctctctctcgaacttttgctgcatgtgattcacgacgttcgtgttgatgaagttgcacctcggggctgggcgccggcctgggttctgttgatcttatatatgtcgtgcttcgtgcaggagagggtctatgctcgggacgtccaggtgaagccgctcgcgacggcgccggtgcaccgccggatgctgtctgacagctcggactccatctacgagcgcagcccgcggatcgtggagatggacacttgccacctccgctcccggtcctcacggatcaccagcaggtacaacaagtacaagtacaacccggatggcttaccagagtaccaccaccgccacgcggcgccgacgccgtcgtgctcgccccttcccggcggcaacggcaagcatcagcccgcgcgggtctcgttccggcagagcgcccgcgaccgcgagcgcgacccccggggctccaagactgcgcagagcacgccccggctcgcctccccccacgactcctcctcgcccgccaagagcgtcgagcacagccagctggccagcacgccgcggcggcgccccgcgacgcagcgggaccgggaccgggacgcgctcgtcagcccgcggcacatggccggcaccgcgtcctccgcggccaggacgcggtgccacagcgcgccgaggcagcggaaggcgacggactccgagcaggcgccgtcgccgaggacgggcgcctgctgccaagaaggggcgtcgaggaggtcgtgctcgcacgcgcacgcccgcgggttctgcttccagtgctcggaatcgacccggacggacggattgtccgggatcagcgtcagcgacgaggtgggtgccagagactactacctggacagcttttggtgatcaggcacggatttgtacatactcgtagtcagtcatagacgctaaaacacctagcaaatcacggaacgagtggaagataacacgggatagccagacagtctcacagaagagtgtagatgctgaaacatacttgtacacacttgttgcttgggtgttggatggaagtgttcttatgtgaaggatgaagctaaca

SEQ ID NO: 116761 - DNA, 354 bp, Zea Mays
atggctcctatcctgtatgcaacactgaaactgcttgctgctctggcacaaggccttgttcgtttgtgtcggattgcacccggaatcgttccacctaatcaaagtttatataaattagagaagcaatccggttcggaatcgttccgacccatccatccggtagaaacgaacaaggccttaaccagaacgattctggttgcaatccgatttaaccgaataaggcctaaggccgcggccgacgcgccgccggacgccgagtggcacagggcagggcgtgtgcacatggagagcatgtggcgcgcggtgctcgcgccgtctgtggccatcctgtccgctgccgctccggcgtcctag

SEQ ID NO: 116762 - DNA, 3366 bp, Zea Mays
ccgttcccaccgcatccagctatccccacccagcgggcagcggctgacaaccgcagcggccgcgagcaccagtcagcacaaccaaacgcccacgccacgaagccgccggagacaatggcgccaccgcggcgcgcgtgcccgtgcgcgcgcgcctgctttgtcctgctgctcgcgctgctcccctgctgccgcgtgcgccgagcgggcgcgcagtcgcagccggcggacgacaagcatctgctgctccggatcaagagcgcgtggggcgacccgcccgcgctggcggtatggaacgcctcgtccccgggcgcgccgtgcgcctggacgttcgtcgggtgcgacacggccgggcgcgtcacgaacctcaccctcggcagcgccggcgtcgcgggccccttcccggacgccgtcggcggcctctcggcgctcacccacctcgacgtctccaacaacagcatctccggcgcgttcccgaccgcgctctaccgctgcgcttcgctccagtacctcgacctgtcccagaacaaactcaccggtgagctgcccgtggacatcggtcgccgcctcggtgcgaacttgtccacgcttgtcctcagcaacaaccagttcgatggcagcatcccggcgtcgctctccagcctctcgtatctccagcatctcacgctggacaccaatcgcttcgtcggcaccgtcccgccgggtctcggttcactgacgaggcttcagacgctgtggttggcggccaaccggttcgtcccggcccagttgccggcgtcgttcaagaacctcaccagcatagtcagcctctgggcatcacagtgcaacctcaccggcggcttcccgagctatgtgctggagatggaggagctggaggtgctggacctgtccaataacatgttgaccggaagcatacctgcgggtgtttggagcctcaagaacttgcagcaattgtttttgtacgacaacaacttctccggcgacgtggtgattaatgacttcgccgcgacgagcttgacgcacatcgacctttcagagaattataaacttacaggacccatccctgaagcctttgggctcctgaagaaccttacacagctgtacctcttcagcaacaacttctccggcgagataccagcgagcatcggcccgttgccgtcactgtcaatatttaggtttggcaataaccgctttactggcgcgctcccgccggagcttggaaagtactcaggattgctcattgttgaggctgattacaacgagctcaccggtgctatccccggagagctgtgcgctggaggcaagttccggtacctcaccgccatgaacaacaaactgaccgggtccatcccggcaggcctcgccaactgcaacactctgaaaacgctggctctagacaataaccagctctccggagacgtgccagaggctttgtggacggcgacgctgcttaattacgtgacactaccgggtaaccagctctccgggagtcttccggccaccatggccagcaaccttacgacgttagacatggggaacaacagattcagcggcaacatcccggctactgcagttcagctcaggaaattcacggccgagaacaaccagttctccggccaaataccggccagtattgctgacgggatgccgcgtctcctgacactgaacctgtccggtaacaggctctccggcgatatcccggtgagcgttactaagctaagcgatctgacgcagctggacatgagcaggaaccagctcatcggagagataccagcagagctgggcgccatgccggtgctcagcgtccttgacctgtcgtcgaacgagctctccggtgccataccgccggcgcttgcgaacctgcgactcacctccctcaacctgtcctccaaccagcttagcggccaggtgccggccggcctagccaccggggcctacgacaagagcttcctggacaaccccggcgtctgcaccgccgctgcgggagccgggtatctcgccggtgtgcgctcctgcgccgcggggtcgcaagacggaggctattccggaggcgtctcgcatgcgctccgcacgggcctcctcgtcgccggcgccgcgctcctcctcatcgccgcggccatcgccttcttcgtggcccgcgacatcaggaaacggcgccgcgtcgcggcgcggggccactggaagatgacgcctttcgtcgtggatcttggtttcggggaggagtccatactccggggcctgacggaggccaacatcgtcggccgcggcggttccggccgcgtgtaccgcgtcaccttcaccaaccggctcaacggggccgcaggcgcggtggccgtgaagcagatacggaccgccgggaaactggacgggaagctggagcgcgagttcgagtcggaggccggcatcctcggcaacgtccggcacaataacatcgtcaggctgctgtgctgcctctccggcgccgaggccaagctcctcgtgtacgactacatggacaacgggagcctggacaagtggctccacggcgacgctctcgccgccggcgggcacccaatggcgacgagggcgcggtccgcacgccggacaccgctggactggccgaccaggctcaaggtggccgtcggcgctgcgcaggggctgtgttacatgcaccacgaatgcgtgccgcccatcgttcaccgcgacgtcaagacgagcaacatcctgctggactcggagttccgggccaaggtcgccgacttcggccttgccaggatgctggcgcaggccggggcgccagagaccatgtccgccgtggccggctcgttcggctacatggctcccgagtgcgcttacacaaagaaggtgaatgagaaggtcgatgtctacagctacggcgtcgtgctcctggagctcaccaccggcaaggagcccaacgacggcggcgagcacggcagcctggtggcatgggcacggcaccactacctgtctggagggagcatccccgatgccactgacaagagcatcaaatacgccgggtactccgacgagatcgaggttgttttcaagttaggcgtgctgtgcactggagagatgccgtcgtcgcggccaaccatggacgatgtgctgcaggtcttgctcaagtgcagcgagcagacgcagcacaagggcaaaacggagcgtgtccctgagtacgaggaggctccactcctgcagccacagcgcgggagtcgccgaaaacagccctcgaacggcacggggattgacatcgaatcgaagagcgacttcgacagcattgtctgaaggaaggaactgaccactgcacgtagtaaggggtgtttgattgaactgaagctaataattagttgttaaatttagttaaagaacagc

SEQ ID NO: 116763 - DNA, 2690 bp, Zea Mays
ctaaacttcctgggctgggggagctgcacgcctccctccggctcccattgcctaaatatacaagccatcctaggaggaggggtagtacggtggtgtcattctttttgactgtctctctctcctcacctcaagtccccgaaccagtagtgcaccaagaaccactccatccatctccatgggagactccggaggaagaagaggaccacctcttcctcggctgctagatctcatcccggacgggaaagaacggaaggggagggaagcgcaagacgcgggaaggtcgaagaacagcggcggcttcgggggcgaggaggacgcgaagctggagctcaagctcgggcctccgggtctcactctcgtagaagaaggaacgacagctaccgtgccaagagatggaggcgtactacagcgagagacgacgaccaccccgaccctctcgctcgggtgcttcccacgtaacccctccaagcctgcggtagacgcagctacagctgggacgaagagggggttcttcgacaccgccgtcgaggccaagacagaaggccgcgacgagcggatggagcagcaggccggagctggatgtgggaacgagctagcactggacgagaagacggcagccgcggccgcgagtgagagacagaaagggtcctgctgcccgccgacgccacagcacgcccctcctgctgcgaccgtgcacagcggagcacacgtcctgcagctgggaagaaggccttcggctccggttgtcggttggcccccggtcagatccttcaggagaaaccttgctcatcatcatcatggaagctcctccaaacaacccaccgagccacagaacagcgaagctagcaggaaggagaagcctgcctgcaagaagaaccctctcgtaaaaatcaacatggacgggatccccatcggaaggaaagtagaccttgcagcctacgacagctacgagaggctatcactgggcgtcaaagagcttttccacggttttcttcaagctcaaaaggatatgtctccaactgctggaaagatattctctcaattgttggatggatctggcgaatataccctggtctacgaagacaacgaaggagacaggatgctggtaggggacgtgccgtggaatgtgtttgtgtcaactgctaaaaggctgagggttttgaggagctcggagcttgccaaaggtttggtaggcacaaggccacctcagattgcggtagctccgagaagaggaccaccagattgctgaaagcctgaaacagcgacaaaattctgatcatttggaatatgcatgccgaggtcctggatattttgtaaattaggctaccaataccatgcgactcgttgctgtagagtaataatgtcctgatgtaattcaacatgggcattaattggacttataagagaaatttcgcagatgcaagatctaccaatgtaaaattacccgttctgtgcgacaggtttgtaatcccaacatgcaaatctaatgtccagaccacaatcgttagcactcaccaatgcgctaaagagaacagtgacaggctagcgtcattgcgacatagcatctaaaagagtagaaatttcatgtggtattttcaattactcggacacacaaaaattgggaaaaagagcaaggtgtccacttcaaatgtggccaaaagtaccataagcaataacaaaccacgggagcaaagccgttgagtgccagattgcatagtcataaataattacatgcaccgaacctgatgacaccagctgccaaacaacacatcaagtgacagtgcttatgaccgttcatgcgagcatgcctatcacttgaatagcggaacattattgaggccaaacttcatgaaaaattcagcaaagcaagcttcatccttttttgcacagttttgacaaacacaacttaaaacaacagctataattcatttgaaacaatctcctggccaaggaacctgctcatttggagagagaaaaaacacacaaacaactggtgtacatgttcaataaacaattggctggaattccagcagcgttcaatcccttctaaactataattcatcctaaatttcttctatcgaagtcagcctgtagctaacatgaatccctgaacaaggtgaaccttgttcggcaaaggacctgacgagtaggggtagttcacataattgaaacgtgatgtgtaacagatagcgttaaaccatgtttgtttaagtccagccgtaatcaaataccacactgaaaactgatactagcctatttaaatttattaccactgtcactccagtataaatcattaccgttgtcatttacgttacacttggtgaaccaaacaggaccaaaatgtattctcattgcaggccagcaaattagcacattatttacatgttcttgagaacgttttatcctacaaataatttatagacaacttcaaaatacaacttcctcttgtcagcagaattgtattgaaagaaccaagatgcacaagagaagagtggattaggcttcactaaatttgcttcagtaaatttaattataaactcaagcataacttcatcacttatgtctaatagtgtgattaatagttttgcacccttagtttcaatcccattctagcatgaaaattccagaaatataaatacttaaattgaattgatcacatataaatacgtaaagtaaaaaaacaatcagga

SEQ ID NO: 116764 - DNA, 2754 bp, Zea Mays
gtgcgcaactaaacttcctgggctgggggagctgcacgcctccctccggctcccattgcctaaatatacaagccatcctaggaggaggggtagtacggtggtgtcattctttttgactgtctctctctcctcacctcaagtccccgaaccagtagtgcaccaagaaccactccatccatctccatgggagactccggaggaagaagaggaccacctcttcctcggctgctagatctcatcccggacgggaaagaacggaaggggagggaagcgcaagacgcgggaaggtcgaagaacagcggcggcttcgggggcgaggaggacgcgaagctggagctcaagctcgggcctccgggtctcactctcgtagaagaaggaacgacagctaccgtgccaagagatggaggcgtactacagcgagagacgacgaccaccccgaccctctcgctcgggtgcttcccacgtaacccctccaagcctgcggtagacgcagctacagctgggacgaagagggggttcttcgacaccgccgtcgaggccaagacagaaggccgcgacgagcggatggagcagcaggccggagctggatgtgggaacgagctagcactggacgagaagacggcagccgcggccgcgagtgagagacagaaagggtcctgctgcccgccgacgccacagcacgcccctcctgctgcgaccgtgcacagcggagcacacgtcctgcagctgggaagaaggccttcggctccggttgtcggttggcccccggtcagatccttcaggagaaaccttgctcatcatcatcatggaagctcctccaaacaacccaccgagccacagaacagcgaagctagcaggaaggagaagcctgcctgcaagaagaaccctctcgtaaaaatcaacatggacgggatccccatcggaaggaaagtagaccttgcagcctacgacagctacgagaggctatcactgggcgtcaaagagcttttccacggttttcttcaagctcaaaaggatatgtctccaactgctggaaagatattctctcaattgttggatggatctggcgaatataccctggtctacgaagacaacgaaggagacaggatgctggtaggggacgtgccgtggaatacaggcctactttgttgcaccatctgaagccttcctttgtatgtgatccctgcagtgtgtttgtgtcaactgctaaaaggctgagggttttgaggagctcggagcttgccaaaggtttggtaggcacaaggccacctcagattgcggtagctccgagaagaggaccaccagattgctgaaagcctgaaacagcgacaaaattctgatcatttggaatatgcatgccgaggtcctggatattttgtaaattaggctaccaataccatgcgactcgttgctgtagagtaataatgtcctgatgtaattcaacatgggcattaattggacttataagagaaatttcgcagatgcaagatctaccaatgtaaaattacccgttctgtgcgacaggtttgtaatcccaacatgcaaatctaatgtccagaccacaatcgttagcactcaccaatgcgctaaagagaacagtgacaggctagcgtcattgcgacatagcatctaaaagagtagaaatttcatgtggtattttcaattactcggacacacaaaaattgggaaaaagagcaaggtgtccacttcaaatgtggccaaaagtaccataagcaataacaaaccacgggagcaaagccgttgagtgccagattgcatagtcataaataattacatgcaccgaacctgatgacaccagctgccaaacaacacatcaagtgacagtgcttatgaccgttcatgcgagcatgcctatcacttgaatagcggaacattattgaggccaaacttcatgaaaaattcagcaaagcaagcttcatccttttttgcacagttttgacaaacacaacttaaaacaacagctataattcatttgaaacaatctcctggccaaggaacctgctcatttggagagagaaaaaacacacaaacaactggtgtacatgttcaataaacaattggctggaattccagcagcgttcaatcccttctaaactataattcatcctaaatttcttctatcgaagtcagcctgtagctaacatgaatccctgaacaaggtgaaccttgttcggcaaaggacctgacgagtaggggtagttcacataattgaaacgtgatgtgtaacagatagcgttaaaccatgtttgtttaagtccagccgtaatcaaataccacactgaaaactgatactagcctatttaaatttattaccactgtcactccagtataaatcattaccgttgtcatttacgttacacttggtgaaccaaacaggaccaaaatgtattctcattgcaggccagcaaattagcacattatttacatgttcttgagaacgttttatcctacaaataatttatagacaacttcaaaatacaacttcctcttgtcagcagaattgtattgaaagaaccaagatgcacaagagaagagtggattaggcttcactaaatttgcttcagtaaatttaattataaactcaagcataacttcatcacttatgtctaatagtgtgattaatagttttgcacccttagtttcaatcccattctagcatgaaaattccagaaatataaatacttaaattgaattgatcacatataaatacgtaaagtaaaaaaacaatcagga

SEQ ID NO: 116765 - DNA, 1613 bp, Zea Mays
agtacggtggtgtcattctttttgactgtctctctctcctcacctcaagtccccgaaccagtagtgcaccaagaaccactccatccatctccatgggagactccggaggaagaagaggaccacctcttcctcggctgctagatctcatcccggacgggaaagaacggaaggggagggaagcgcaagacgcgggaaggtcgaagaacagcggcggcttcgggggcgaggaggacgcgaagctggagctcaagctcgggcctccgggtctcactctcgtagaagaaggaacgacagctaccgtgccaagagatggaggcgtactacagcgagagacgacgaccaccccgaccctctcgctcgggtgcttcccacgtaacccctccaagcctgcggtagacgcagctacagctgggacgaagagggggttcttcgacaccgccgtcgaggccaagacagaaggccgcgacgagcggatggagcagcaggccggagctggatgtgggaacgagctagcactggacgagaagacggcagccgcggccgcgagtgagagacagaaagggtcctgctgcccgccgacgccacagcacgcccctcctgctgcgaccgtgcacagcggagcacacgtcctgcagctgggaagaaggccttcggctccggttgtcggttggcccccggtcagatccttcaggagaaaccttgctcatcatcatcatggaagctcctccaaacaacccaccgagccacagaacagcgaagctagcaggaaggagaagcctgcctgcaagaagaaccctctcgtaaaaatcaacatggacgggatccccatcggaaggaaagtagaccttgcagcctacgacagctacgagaggctatcactgggcgtcaaagagcttttccacggttttcttcaagctcaaaaggatatgtctccaactgctggaaagatattctctcaattgttggatggatctggcgaatataccctggtctacgaagacaacgaaggagacaggatgctggtaggggacgtgccgtggaatgtgtttgtgtcaactgctaaaaggctgagggttttgaggagctcggagcttgccaaaggtttggtaggcacaaggccacctcagattgcggtagctccgagaagaggaccaccagattgctgaaagcctgaaacagcgacaaaattctgatcatttggaatgtgagcaagcaaactgaacccggaccttttgtgatgtgacggtacttttttctttttgcctgtagaaactaatctagtgagatgaactgccatttcagatgcatgccgaggtcctggatattttgtaaattaggctaccaataccatgcgactcgttgctgtagagtaataatgtcctgatgtaattcaacatgggcattaattggacttataagagaaatttcgcagatgcaagatctaccaatgtaaaattacccgttctgtgcgacaggtttgtaatcccaacatgcaaatctaatgtccagaccacaatcgttagcactcaccaatgcgctaaagagaacagtgacaggctagcgtcattgcgacatagcatctaaaagagtagaaatttcatgtggtattttca

SEQ ID NO: 116766 - DNA, 1571 bp, Zea Mays
agtacggtggtgtcattctttttgactgtctctctctcctcacctcaagtccccgaaccagtagtgcaccaagaaccactccatccatctccatgggagactccggaggaagaagaggaccacctcttcctcggctgctagatctcatcccggacgggaaagaacggaaggggagggaagcgcaagacgcgggaaggtcgaagaacagcggcggcttcgggggcgaggaggacgcgaagctggagctcaagctcgggcctccgggtctcactctcgtagaagaaggaacgacagctaccgtgccaagagatggaggcgtactacagcgagagacgacgaccaccccgaccctctcgctcgggtgcttcccacgtaacccctccaagcctgcggtagacgcagctacagctgggacgaagagggggttcttcgacaccgccgtcgaggccaagacagaaggccgcgacgagcggatggagcagcaggccggagctggatgtgggaacgagctagcactggacgagaagacggcagccgcggccgcgagtgagagacagaaagggtcctgctgcccgccgacgccacagcacgcccctcctgctgcgaccgtgcacagcggagcacacgtcctgcagctgggaagaaggccttcggctccggttgtcggttggcccccggtcagatccttcaggagaaaccttgctcatcatcatcatggaagctcctccaaacaacccaccgagccacagaacagcgaagctagcaggaaggagaagcctgcctgcaagaagaaccctctcgtaaaaatcaacatggacgggatccccatcggaaggaaagtagaccttgcagcctacgacagctacgagaggctatcactgggcgtcaaagagcttttccacggttttcttcaagctcaaaaggatatgtctccaactgctggaaagatattctctcaattgttggatggatctggcgaatataccctggtctacgaagacaacgaaggagacaggatgctggtaggggacgtgccgtggaatacaggcctactttgttgcaccatctgaagccttcctttgtatgtgatccctgcagtgtgtttgtgtcaactgctaaaaggctgagggttttgaggagctcggagcttgccaaaggtttggtaggcacaaggccacctcagattgcggtagctccgagaagaggaccaccagattgctgaaagcctgaaacagcgacaaaattctgatcatttggaatatgcatgccgaggtcctggatattttgtaaattaggctaccaataccatgcgactcgttgctgtagagtaataatgtcctgatgtaattcaacatgggcattaattggacttataagagaaatttcgcagatgcaagatctaccaatgtaaaattacccgttctgtgcgacaggtttgtaatcccaacatgcaaatctaatgtccagaccacaatcgttagcactcaccaatgcgctaaagagaacagtgacaggctagcgtcattgcgacatagcatctaaaagagtagaaatttcatgtggtattttca

SEQ ID NO: 116767 - DNA, 1515 bp, Zea Mays
agtacggtggtgtcattctttttgactgtctctctctcctcacctcaagtccccgaaccagtagtgcaccaagaaccactccatccatctccatgggagactccggaggaagaagaggaccacctcttcctcggctgctagatctcatcccggacgggaaagaacggaaggggagggaagcgcaagacgcgggaaggtcgaagaacagcggcggcttcgggggcgaggaggacgcgaagctggagctcaagctcgggcctccgggtctcactctcgtagaagaaggaacgacagctaccgtgccaagagatggaggcgtactacagcgagagacgacgaccaccccgaccctctcgctcgggtgcttcccacgtaacccctccaagcctgcggtagacgcagctacagctgggacgaagagggggttcttcgacaccgccgtcgaggccaagacagaaggccgcgacgagcggatggagcagcaggccggagctggatgtgggaacgagctagcactggacgagaagacggcagccgcggccgcgagtgagagacagaaagggtcctgctgcccgccgacgccacagcacgcccctcctgctgcgaccgtgcacagcggagcacacgtcctgcagctgggaagaaggccttcggctccggttgtcggttggcccccggtcagatccttcaggagaaaccttgctcatcatcatcatggaagctcctccaaacaacccaccgagccacagaacagcgaagctagcaggaaggagaagcctgcctgcaagaagaaccctctcgtaaaaatcaacatggacgggatccccatcggaaggaaagtagaccttgcagcctacgacagctacgagaggctatcactgggcgtcaaagagcttttccacggttttcttcaagctcaaaaggatatgtctccaactgctggaaagatattctctcaattgttggatggatctggcgaatataccctggtctacgaagacaacgaaggagacaggatgctggtaggggacgtgccgtggaatgtgtttgtgtcaactgctaaaaggctgagggttttgaggagctcggagcttgccaaaggtttggtaggcacaaggccacctcagattgcggtagctccgagaagaggaccaccagattgctgaaagcctgaaacagcgacaaaattctgatcatttggaatatgcatgccgaggtcctggatattttgtaaattaggctaccaataccatgcgactcgttgctgtagagtaataatgtcctgatgtaattcaacatgggcattaattggacttataagagaaatttcgcagatgcaagatctaccaatgtaaaattacccgttctgtgcgacaggtttgtaatcccaacatgcaaatctaatgtccagaccacaatcgttagcactcaccaatgcgctaaagagaacagtgacaggctagcgtcattgcgacatagcatctaaaagagtagaaatttcatgtggtattttca

SEQ ID NO: 116768 - DNA, 1495 bp, Zea Mays
agtacggtggtgtcattctttttgactgtctctctctcctcacctcaagtccccgaaccagtagtgcaccaagaaccactccatccatctccatgggagactccggaggaagaagaggaccacctcttcctcggctgctagatctcatcccggacgggaaagaacggaaggggagggaagcgcaagacgcgggaaggtcgaagaacagcggcggcttcgggggcgaggaggacgcgaagctggagctcaagctcgggcctccgggtctcactctcgtagaagaaggaacgacagctaccgtgccaagagatggaggcgtactacagcgagagacgacgaccaccccgaccctctcgctcgggtgcttcccacgtaacccctccaagcctgcggtagacgcagctacagctgggacgaagagggggttcttcgacaccgccgtcgaggccaagacagaaggccgcgacgagcggatggagcagcaggccggagctggatgtgggaacgagctagcactggacgagaagacggcagccgcggccgcgagtgagagacagaaagggtcctgctgcccgccgacgccacagcacgcccctcctgctgcgaccgtgcacagcggagcacacgtcctgcagctgggaagaaggccttcggctccggttgtcggttggcccccggtcagatccttcaggagaaaccttgctcatcatcatcatggaagctcctccaaacaacccaccgagccacagaacagcgaagctagcaggaaggagaagcctgcctgcaagaagaaccctctcgtaaaaatcaacatggacgggatccccatcggaaggaaagtagaccttgcagcctacgacagctacgagaggctatcactgggcgtcaaagagcttttccacggttttcttcaagctcaaaaggatatgtctccaactgctggaaagatattctctcaattgttggatggatctggcgaatataccctggtctacgaagacaacgaaggagacaggatgctgtgtgtttgtgtcaactgctaaaaggctgagggttttgaggagctcggagcttgccaaaggtttggtaggcacaaggccacctcagattgcggtagctccgagaagaggaccaccagattgctgaaagcctgaaacagcgacaaaattctgatcatttggaatatgcatgccgaggtcctggatattttgtaaattaggctaccaataccatgcgactcgttgctgtagagtaataatgtcctgatgtaattcaacatgggcattaattggacttataagagaaatttcgcagatgcaagatctaccaatgtaaaattacccgttctgtgcgacaggtttgtaatcccaacatgcaaatctaatgtccagaccacaatcgttagcactcaccaatgcgctaaagagaacagtgacaggctagcgtcattgcgacatagcatctaaaagagtagaaatttcatgtggtattttca

SEQ ID NO: 116769 - DNA, 1660 bp, Zea Mays
acatttgatttcattcgctgcaagcgcaagcgcggcagtcgagctcgccgagctcgcgatcaccggcagctcgctcgctcgccaatcgccatggacccctgcgcgttcgtgcgcgtcaccgtggaccagctcctcctcaagctccccgccgtgccgcgccccagctccagcgccggggtgtacccttccaactcgccctgcttctgcacgctcaccctccaggaccacccctcctcgctctcccgcaccgcgctgctcccgctcgcgtgcgcctcgggccccgccgcggcggcggcgcacgccgaccccgtcgtgctcagcctcgacgccgacgccgtgcggaggctctcggcgcgccccgccgccgagctggtcgtgtccgtgcacgcgggcccgacggggaccacctgcggcatgggcgcctcccgcgcgctgggccgggtgcgcgtcgccgtcgacgtggcgcgcgccgcggccggggagaccgtcgtcgcccgggacggctgggttgacgtggggaagcccgcgtcgggtccgtcggcgcccccccgcgcctccgcgcgcgcgcagatccacatggtcgtgcgggcggagcccgacccgcggtacgtgttccagttcggcggcgagccggagtgcgggcccgtcgtgtaccaggtgcccggtggagccgcccgcggagggcagcggcagccggtcttcacctgccggttcagcgccggccggagggcagccaggagcagatcgctgacgccgcagtcgtccatgagccggagcaccagccgcaggctgcggtcctggctgagcagcaccctccacggcgaaggccgcgacggcgcgcactcgcgacgcgagcagcggaagggctggacggtgacgatccacgacctgtcggggtcccccgtggcggcggcgtcgatggtgacgccgttcgtgccgtccccgggctccggccgcgtctcccgcgccaacccgggcgcctggctcatcctccaggccacgggcgcggggccgtccagctggaagccgtgggcgcggctggaggcctggcgcgagcgcggccccgtcgacgcgctcggttaccgcctggagctggtcttcgactcgggcgcccacgagtgcgccgtccccatcgccgagtcgtccatcagcaccaagcgcggcgggcagttcgtcatcgacccggccacgttccccgaggcggccgcgggcgctgcctggccgctcgccggcggcttcgtcatgggctccactgtcgagggcgagcggcgcgcgagccggcccaccgtgcaggtcggcgtgcagcacgtggcgtgcatgggcgacgtcgcggtgttcgtggcgctgtccgcggccgtcgatctctgcatggacgcctgcaggctcttctcgcagcggctcaggaaagagctgtgccaggaccaggacgagtgagagagagagaccggcccgagcgacgtgtattagaagagctcctgggtttgcttgcctttttgtgctgtgagttgtgtgattaattctagccggtttagttgctatgtcttgtggaggtgatggccctgtggctgtttttagtgtaggctgggtcggatcacaggaacgggacgggggtttgtagtacgttcgttgcctcattcaattctttcgattcttttacaca

SEQ ID NO: 116770 - DNA, 885 bp, Zea Mays
ccagcctatctcgcacgtctctggcgctggcggtgggggcacgagtcatcacggccagtggcgagctgcgcacaggcacagcgcaccaaaggaagggccgacgccaagtggtggcgatccagtcctccgccacgccgcggccccccgcccccccgcgcgcctctatttataccgtggccgccccctggcacacctgcgtacgtgagcgctagctcttcccaccagtgagatcgatcgagcttccacctcctgtcatcctcctcttgcaggtcgcagctgagcagcaacaaggccggaaaggatgtcgtggcagacctacgtcgacgagcacctcatgtgcgaggtcgagggccaccaccacctcacctccgccgccatcatcggccacgacggcaccgtctgggcccagagcgccgcattcccgctgttcaagcctgaggagatggccaacatcatgaaggacttcgacgagcccgggttcctggccccgaccggcctcttcctcggccccaccaagtacatggtcatccagggcgagcccggcgccgtcatccgcgggaagaagggatctggaggcataaccgtgaagaagaccggggaggcgctggtggtcggcatctacgacgagcccatgacccccgggcagtgcaacatggtggtcgagaggctcggcgactacctcgtagagcaaggcctgtaaacggaactgcttcagtccaaacggaattgtttataattggtgtcgttccggcaaataattttgtgtggtttcacctaaaaatttggttgtcttatgatttgtaaacccagaacagtatctatatgtgattgaactgcgcctacctattcttttattatacgggaatatatgtatgtatttcgtgc

SEQ ID NO: 116771 - DNA, 2066 bp, Zea Mays
gccggccttgtttgaacgccctcagctccatttcatagccaccggctggcgtccgctcccgcaacagccgtcacgcacttcaatccagcagcctctgctctgcctgcgtcgcagccagtggctcagcggctgcgcccgtgcctgtcacgtcttgtcctcaatctctctctctctctctcaatcctcacctctccggctctctttctcctccccagtccccaacggtgaggcccccgccgcgcagcccatcgacgcattgccgctgcaagcgcggacaccgagggctagaagcggcggcggtgccagggttcggcgctcggtcggcaatggcgaggcggcttatgctggcgctccctgtgctcctcttcttattgctcgtcgggcaatgccacggcggcaagattggcgtctgctacggccgcaacgccgacgaccttccggcgccagacaaggtggcgcagctaatccagcagcagtccatcaagtacgtgcgcatctacgacaccaacatcgacgtcatcaaggcattcgccaacaccggcgtcgagctcatggtcggcgtccccaactccgacctcctcgccttcgcgcagtaccagtccaacgtcgacacatggctcaagaacagcatcctcccatactacccggacaccatgatcacctacatcaccgtcggcgccgaggtcaccgagagccccaccaacgtctcagccctcgtcgtgccagccatgcgcaatgtgcacaccgcgctcaagaaggccggcctgcacaagaagatcaccatctccagcacccactcgctcgggatactgtcccggtcgttcccgccgtctgctggggcgttcaacagcagctacgcctacttcttgaagcctatgctccagttccttgtggagaatcaggcgccgttcatggtggatttgtacccctactatgcgtaccagaactcgcggagcaatgtgtccctcaactacgcgctgttctcgccagagtctcaggatgtgattgacccaaacactggactggtttacactaacatgttcgacgcccaggtcgattccatcttctttgcgctcatggctctgaacttcaagactttgaagatcatgatcactgagtcagggtggccaaacaaaggggcggtcaaggagactggagccacaccagacaatgctcagacctacaataccaatttgatacgccatgttgttaatgacagcggcacaccggcgaaaccaggggaagagattgatgtctacatattttcattgttcaatgagaacaggaaacctggcatcgagtcggagaggaactggggactgttttttcctgataagagctctatctacagccttgattggacgggccgaggcaatgtggatgttatgactggagcaaacattacaagtgctaatggtacctggtgtattgcttcaactaatgcttcagaaactgatctgcagaatgccctcaactgggcatgtggtccaggcaacgtagattgttctgccattcagccaagccaaccctgctaccagccggacactttagcttcccatgcttcgtatgcattcaatagctactaccagcaaaatggagccaacgttgtggcctgtgactttggaggtgccggaatacgaacgacgaaagatccaagttatgacacttgcgtctatttggctgccggcaataagatgagcacgacgaactcaacatctcttccagctcgcagcgactccggtccagtcccatgcgccaaatgcttcgccactttgctccccatgctggccatcgtgatggctgcagttatggtgtgatctatggaaaaaaaaaatgctccagctagcctccttaagacctgagatgaaaggtgaattgcgtaatgctgctggtaaccattgaagttctgtttttgccatgagcagtagactagtagtagtctagtagagaggcaccttatgctgtaggaattctctggtcagttaagatgtacatcggcgcgcggacaatatatatcagctggtattaagaacttgatatcgtattatgctgtgtttcggctctca

SEQ ID NO: 116772 - DNA, 1997 bp, Zea Mays
agccgtcacgcacttcaatccagcagcctctgctctgcctgcgtcgcagccagtggctcagcggctgcgcccgtgcctgtcacgtcttgtcctcaatctctctctctctcaatcctcacctctccggctctctttctcctccccagtccccaacggtgaggcccccgccgtgcagcccatcgacgcattgccgctgcaagcgcggacaccgagggctagaagcggcggcggtgccagggctcggcgctcggttggcaatggcgaggcggcttatgctggcgctccctgtgctcctcttcttattgctcgtcgggcaatgccacggcggcaagattggcgtctgctacggccgcaacgccgacgaccttccggcgccagacaaggtggcgcagctaatccagcagcagtccatcaagtacgtgcgcatctacgacaccaacatcgacgtcatcaaggcattcgccaacaccggcgtcgagctcatggtcggcgtccccaactccgacctcctcgccttcgcgcagtaccagtccaacgtcgacacatggctcaagaacagcatcctcccatactacccggacaccatgatcacctacatcaccgtcggcgccgaggtcaccgagagccccaccaacgtctcagccctcgtcgtgccagccatgcgcaatgtgcacaccgcgctcaagaaggccggcctgcacaagaagatcaccatctccagcacccactcgctcgggatactgtcccggtcgttcccgccgtctgctggggcgttcaacagcagctacgcctacttcttgaagcctatgctccagttccttgtggagaatcaggcgccgttcatggtggatttgtacccctactatgcgtaccagaactcgcggagcaatgtgtccctcaactacgcgctgttctcgccagagtctcaggatgtgattgacccaaacactggactggtttacactaacatgttcgacgcccaggtcgattccatcttctttgcgctcatggctctgaacttcaagactttgaagatcatgatcactgagtcagggtggccaaacaaaggggcggtcaaggagactggagccacaccagacaatgctcagacctacaataccaatttgatacgccatgttgttaatgacagcggcacaccggcgaaaccaggggaagagattgatgtctacatattttcattgttcaatgagaacaggaaacctggcatcgagtcggagaggaactggggactgttttttcctgataagagctctatctacagccttgattggacgggccgaggcaatgtggatgttatgactggagcaaacattacaagtgctaatggtacctggtgtattgcttcaactaatgcttcagaaactgatctgcagaatgccctcaactgggcatgtggtccaggcaacgtagattgttctgccattcagccaagccaaccctgctaccagccggacactttagcttcccatgcttcgtatgcattcaatagctactaccagcaaaatggagccaacgttgtggcctgtgactttggaggtgccggaatacgaacgacgaaagatccaagttatgacacttgcgtctatttggctgccggcaataagatgagcacgacgaactcaacatctcttccagctcgcagcgactccggtccagtcccatgcgccaaatgcttcgccactttgctccccatgctggccatcgtgatggctgcagttatggtgtgatctatggaaaaaaaaaatgctccagctagcctccttaagacctgagatgaaaggtgaattgcgtaatgctgctggtaaccattgaagttctgtttttgccatgagcagtagactagtagtagtctagtagagaggcaccttatgctgtaggaattctctggtcagttaagatgtacatcggcgcgcggacaatatatatcagctggtattaagaacttgatatcgtattatgctgtgtttcggctctca

SEQ ID NO: 116773 - DNA, 2209 bp, Zea Mays
ggaaacaggtaggtatacgagccaaacaaaccaccaccaaaaccctcctcccgtcctcgctcggtccctccccctcgctccggccgccacaccacgcgggcacgtcaatggcgcgcatcgtgtcacgagcgctcccgttcgcctcgcgctcgtccctccgcctcccgctcccaccgcccttccccggcgcggcgctggtccgttccgccgctgcgggttcgcccctgcccccagctgccgaggctgcactcgcggcctcgctgctctcctggcgcgggcacacggccacccccgagtcctcgatagcggcgccgccgccgttcgcagggtttctcgctggaatccgcaggttccgcaagggacggcgcggacaggcgtcggcgaagcggtcgcagcctcaggacgccccgccgcccccgcccccgcccccgcctccaccgaaggagagagagatcgaactcgtcgctcgcatcggcatcgaggaggacatgcctgacgacccagaagtgctgaacattgtagaaatccttaagttaaatgtcccaatggcaatgaagattgcacttgatggacttctggattccagttacagcacccgagatacctcaataagtgatgttgggaagtatgataaggttgaggtttctgtattgctatgcaatgataacttcatccaagatcttaacaaagaatggagagatgtggactgcgctactgatatactctcaatgtcccagtacattccagatcttgatgttcccatcctaatgttaggtgatatagtaatatctgttgaggcagctgaaaggcaagctggggagaaaggtgttacacttcttgatgaagtgcgggtcctagtggttcgtggcatattgcatcttcttggttttcaacacgagtcgagcaatgaggctgcagcagaattggagaaggaggagcagctcattttaaaaagtctaaggtggaaaggaaaaggtctagctaaaagtgttctggattcaagcaagcctcaaacagattcattggatgaatgtttacaggacaagtgacaaatgacctgaagaaagctggcagccttagattttacaaaccaaaattcaaatatattttttgtgatatggatggtacgctgctcaacagtaaaagtcaagtttcagcaaggaatgcagaagctctaagggaagctaggtcaagaggagtaaacatagttattgccactggaaaggcacgtcctgctgtaatcgacgctcttagtatggtggacttatctggaaggactggtattgtttcagaatcatcacctggtgtattccttcaggggctgttggtttatggtttggaagggagacggatttataaaagaaatttggaccaagaagtatgtagagaggcactctcatattctatagagaacaagataccatttgtagcatttagtcaggatcattgttattcgatgtttgaccaccctttggtcgattctctccattacatataccatgaacctaaggctaaaatagtgccatctattggtcagcttttagaaacagctgagatacagaaagtattgttccttgaaactcctgagaggatttcgtctgcactgagaccgtactgggcaaaggcgatagagggaagggcccatgttgttcaggcacagcctgatatgcttgaacttgtaccacctgcaacttcgaaaggcaatggtgtgaaggttctgttgaaccacctttccattagtccagatgaggtaatggcaattggtgacggagaaaatgacattgaaatgttgcaactagcttcgtttggggttgctcttgcaaatggatctgacaagacaaaagcagcggcaaatgtaattggcgccacgaatgatgaagatggagttgcacaggctatttatgaatatgccttctaagagcaacgaatcattttggactgggttaatttcttctgatttcccatttttcgtggactcaacacagaacaattgtagtggttccaacttgcaagtacacaccgctccaccggagcgcaatctcgctctggtgttacagtttctgaactgtttgcaactgtaagacattttttagttggcatgaaccgaaatccagctaccagctcgacatactcttggctggatatgtaaccgctaaccgaattactatttttttctcatttttttatgcaaaagctttcctttttttta

SEQ ID NO: 116774 - DNA, 1617 bp, Zea Mays
cttccgaatcagcaatccgtgccacctgtttccgcattccgccattccgccttctgctgctggggttttagacaaaaatcactcgtcccatttctcgcgtccccaggccacggtcgcgagcaaggctaccccactgtctcgatccaccgatttccctccctcttctgtgcctccacggatcttctcgttgtggaagcggaggcggacgctggaggcgtctcggcgcgaggatttgcgagctgctgcggtggtgggaaatgaggatctgcgaatcgggagacggtgacgacgttgcgggcctggtgtttcagcaagagcagcaggaggaggtccaggcgagcggcgagctcgtacggcttaaggcgaagcacgcgctcgtcggcgccggcgcgagggtgctgttctacccgacgctgctctacaacgtcttgcgcaaccggttcgaggcggacttccggtggtgggatcgcgtcgaccagtttattttgctgggcgctgttcctttcccaagtgatgttccacggttgaagcagcttggagttcaaggggttgtaacgttgaatgaaccttatgaaactcttgtcccaacatctttataccaggctaatgagattgagcacctggtaattccaacaagagattacctctttgcaccttcattcgaggatatttctcaagccatagatttcatccatcggaatgcatcacaaggcggtactacatatgttcattgtaaagctggaagaggacgaagcaccactattgtattgtgctacttgattaaatacaggaacatgacccctgaagcagctttggatcatgtacgatccattaggcctcgagtgcttttggcaccctcgcagtggcatgctgttaattcatttggagctctcaccggtggacaacttccagtacggagtacaaacctggcctgtttcctagaagccattgaagctggctgtacgaacacaacaggaaatgatgattaccacgtgatggagtttgactgcgaagatagtggcttaccactttatcaaattatgctacctaggccagccagccccactgggtctgggtgcaccgatgcagtcctcgtaacagaagcagatcttgagggctatgatacttatattggtaccaggaaagatgcggtgtcgttggaagtagccactcgcagtcccatcatgaggagattgtcctgcctctttggctccctcaaacttagtaacagcaactgtgagccagcttcaagccggttcactgaggttcgcgcctgctaggtaggtagtgtcttcctccagttttccatgctgcatcaagagtgtatctctagataggcaggcaatcatccaaaaaggatttgtagaagcctgtgttcatttcatggccatggggcagtgccatcgggaagaaagttgtgtgcatagccagaggggttgtttagttttcattagagtgtagagctgtgaacgcgtcgaatatccttgttttttcttgagagcatgtgattcattgcaatttgcatcattgtttacttgaaataaaataagttttctttccatccaacggaggcggcaacgacttaagtttgattggttattgacaaaatttgtatta

SEQ ID NO: 116775 - DNA, 2266 bp, Zea Mays
atgggggacggtagtggtgacattagtcgctccaccaaccacgatgtgaggctactgggagaacctggagaccatgagagccatgctactgccactttcgaccatggtagtggcagtggtagcagtgctgcagctcctatcgacctcgtcgtcggggagtctggcgctggccaaggcgcagaagctcctgccgaggttggtcagggctccagcgactgcaagaggtgtaacacctcaaaggtatgggatgactttgagcctgtgtacacgattaagaacggcaagtgggtaaggactggtgggaagtgtcactggtgcaaagtaactttgtttgctgtatcttctagtgttactggacatttgctttggcatcaacgtgattgcaaagtaaaaaatgctaggatgggcaagcagtccatgattaagttcaacccttatggttctgttcgtaattttgattattgtccccatcatgctagaactgagatgtgtaggttgattgtcagtcttgatcttcctctaaactttgctgagtccactgcttttgaggagtacatcaaattatcccataatcctggctttaaatctgtgaccagacagactacatctagggatatggttaagtactatactgatcgtcgtaaggttatagctgattgcttgttgtctgcttcgtccattgcgattacttctgatatttggtgaggcaatgctaaagagaactaccttaatgtagttgctcattacattaataaggattggatgctagagaagagaatcattggccttaggctcatagagtctgctcacacttgtgtgaacattgctggccatatctataatgtgattgatgattttggatgcactaacaaagtgatctctatcactttggataatgcatcttctaactccagagctatggagaagcttaaacctctactgtctggttatgttggtagtctttttttgcatcagcgttgtgcatgccatattatcaatcttattgtgaagtttggcttgaaacgacttaagccttacattgaagcatttagaactgctatttcattcctaaactcctctaattagcgcattgctgcttataagagttattgtgttgctatgaatgtacgccctcgtaagtttgggcttgacatggatgtgaggtggaattctacatatctcatgcttaagcatttagttccatacaagtcaacattttctgttttcatgcatattcattaccctagaaagcctagtgaaatctattaacagaggctcattggtatgtggctgaaaaggttctagaatatttggaattgttctatgatgcaactgtatcccttcctggtgtttattatcccacatctcctctgatattgcataacatacttgatattgctaaacatttaaatgagtatgacaatgatcacttgcttagaaatgctatttttcctatgaagtctaaattccttaagtactggagggatattccaatgttatatgctcttgcttttatattggacagtagagcaaagattataggttttcataatattctgaggatatcgtttggtctcactagtactgactactcaactttctattctaatgtgagatctgaactgactgcaatgtttaccaaatatgatgctaagtttggtgtagttaaactaccgaggcccactcctacaacatctattactagtaataggaaacaataatggagctggatctatggatctaaaaatgagtatactcctcctaacttgtctaggggaacatcagcatctgaactgactgcaatgtttacgaagtatgatgctaagtttggtgcaattaaactactgaggcccactcctacaacatctattactggtacgaggaaacaacaatggagctggatctatgtgcatgcataaattttgtagactcagaactgtcctcctaccttgacagtgacactcttcagaagtttgaggatgacttcaacctcttaaactggtggcatgagcataaagtaacctttcctgttctctcaatattagctagagatgttatttcagttcctgtttcaacagtatcttccaagtctgctttcagtctttgtggcaggatcatcgagaaacgacggcggcgattagccccagagatggttgagatgctcctttgcattaaggactgggagctaggtgatgcaagaactcaacactctgcccagaataaagaattagaagatgcatttgagggactatatcttgatgaggtg

SEQ ID NO: 116776 - DNA, 103 bp, Zea Mays
attcggagtgtggaagatagttcttattgctatgagttgctcaatcaatgctgataactttgggagcaaactcaaaccaatgtgagcaaaaagagaactttag

SEQ ID NO: 116777 - DNA, 119 bp, Zea Mays
atgcttctcctgagacttagttcaaatttaaagtcttcagcagatgcgaagaaattaaaacatactaaaaaaattagactgaaacaaacattgagcttacctctttctcaaagaattcg

SEQ ID NO: 116778 - DNA, 1503 bp, Zea Mays
atgggctacgggtacgtggatcccttcccgccccctcagcagccacaacaggcggcatacgtcgcgccgcagcagggggactacgggcagccgcagccgcagccggctccgcggccaccggcttgcccgtactcgtcgtccgcctccgctccgccgggctccgcgtcctatcatttttcgcctccggcaccgtcccctccgccgtcgcattcgaactcgagccatgcagctagtggcagtggcaagaacatcgagatatcgagggaagcggccaccaccattgtagcactggccggtctcgccatgctcagctttattggcgcgaccatttggttcgtcaagaaaaagcgccggcgcatagagcctccggctacattgcctacacagcaaccagctcctccgccaccgcccaactacattccatcttcggctggatcctcgctagcatcagacggattctacttgagatcgccagggtatcctttcatgaggtacagcactgggagccatggttttccatactccccagccgactctgggattgggtattcccatatgctgttcacaccagagaatttggcagctatcacagatgactttgcagaagataaccttttgggagaaggtggatttgggtgtgtgttcaagggcattttgccggatggtcgccctgtcgccgtcaagaagctcaagattgggaatgggcaaggcgagcgtgagttcaaggctgaggtcgatactatcagcagagtacatcataggcatttggtttctctagtaggctattgcattgcggagggccagcgaatgcttgtttatgattttgttcccaacaacacactatattaccacctccatggtcatccacgtattattcatagagatattaaatcatccaatattttgttggacaacaactttgaagctcaggtttctgattttggacttgcaaggttagcggctgattccaatacacatgttaccacacgtgtcatggggacatttgggtatttggctccagagtatgcattgtcaggaaagttaacagcaaagtctgatgtatattcttttggggttgttcttttggagctgatcacaggaagaaaacctgttgatgcttctcagccgttgggagatgaaagtctggttgaatgggcccgctccgttctgacgaaggcgatcgagcatcgggagttcggggaccttcctgaccccaggatggagaacaggttcgacgaaaacgagatgtttcacatgatagtagccgcggccgcatgcatccggcactcggcggcaatgaggccacggatggggcaggtggttagagcactagatagcttagcggactctaatctgaacaacggcctccagcccgggcgctgcgaggtgttcttggagccgcagtccgaggagatcaggctgttccggctgagggagttcggcagcccggacggtagcgaggagctgagccaggcgagctggaggagccggagagacctgtga

SEQ ID NO: 116779 - DNA, 326 bp, Zea Mays
atgccggagccccaggccatcctcccgctgcgcgctctcctgccggacgcgccgctgcccttccccatccccgcgccgttccacccccaagcccctggccccggtgagaccgccccggccacgcccccaaacccgacccctccgcaaccgttacccccgccgcgccgccttcctcttcgacgcggccgccgcacccatgggagatctccgcgcgagcctggctagagtccttccccgacggacggccgcccaccgagcccgaggtcgacgcctacatcgacgtgcaccgccccgagctcccttccctcccccgctcccagctacac

SEQ ID NO: 116780 - DNA, 127 bp, Zea Mays
tgaactatttattgtcaacaataactcaagagaggttaaatggcttgacgattatatatatatatatatatatatatatttatatcgaaaaaagttgttggatgagattgatctcaatgatataagc

SEQ ID NO: 116781 - DNA, 95 bp, Zea Mays
ctacttctaaataagcatattttacagatgcaagttatattgattgctttggtaatttatgaatttttatctatgtgcatacgattggcattttc

SEQ ID NO: 116782 - DNA, 339 bp, Zea Mays
atggcggcggctgctggcggcgtgcggcgagccctcgcggcgctgcgctccggttccccgtctactatctctgcaacgctctcccgccaggcggcagctcgctctctggagctagcggccgcgtccctgccgcgcgcctctcgccggcgcctcgcgatctcgagggtgccggttgcggcgctcggcggcgtccaggcttcgctgatgccgatgcacaacgccaccgcgtcggcgctgctcacctccatgctcgggcttaaacctggctcttggggctggctctccgaaggcccttttgggatggttattgaggataggctagaaaccaaggacacttaa

SEQ ID NO: 116783 - DNA, 2839 bp, Zea Mays
ggcaccgcagcaacccattccatagccacgcgagtgacgcgacgcgacgcacggcctgcctgaggcagcgcatctgcttggcggccgggagcagccgccgcttcgccttcgtgagggtttaagcgacgaagagaaaggggaggaagcgagcccccagggaggtgcagagggagagggtgggagatggctgcaatggttggagcgcgtagggcgctcttggccgctcggttctctcctcgcggcaccatcgcggcgtcggccgcgccagctcccctctaccggcccatggattcgccactcaggcttccagctgaaagagtttgtctacagtcttgggttccacatcgaggggctggtacctttgcatctgaaaggactgatgaagattatcagcgtgagtggggacaaaacaaagcaggtagctacactgactcccgttggaacggctctaatctccaacttcagagagatgtcacttcagctggttccacaacaggtactcacaaaaataagggtgtggatggtgttggtggcagttctgagcaacattacagaagtggtggatcatatggctttcaaaacaatcatcagccatatactggtacaagagcgaataatgagagatacaatgcatcacaaccttatagaggtagtggtccatacagccagcaaggccttgatggacatttttcaaatgatcgtcaacagtacaatggcacagaagctaatagtacatatagctctggatactacacccaaagtaagcagaagatttatgaaggagagggagctaataatgggcagtatggatatggtccttcaggacaaccatgtccgaacccagttggaaatagccagcgagttcagaaacagcaatatgttgatcatagatctgggggaagttatccagatagatctgggcatcatccctctcaatatgtaaatccaactcattcccgtaaggagcatgttgcagggtttcagcaaggcaacaatagtaattttggatataatgcttcgcaggcatatcaaagcccttatttcactaggcaggctgatacacatagtacttctcaaggatattccatgtacctaaatacagatgtgcaacgcctctctcatggagttcatcaagaaaaacattcacatgcacaatctgctggatcatttgggaaccatgtaaatagtgcacctcatgaatatggcaaatatcatcagtcactacaaggcaacccttcaaatgttggatcgccttacgaagtacctagtgaagctggcagcaaacacaaatgtactgttgaagaactggagaagttttgtgatgatggcaatgtaaaagaagctctggaagttttggctatgctaaaggaaaacagaattgtgctacatgctcctcagtacttcagattgatgcaagcatgtggtgatgcaactgccctttcagaagcaagattaatacatagtcaaatatctgaatcatcacttactgttgacacagattttcaaaacaaaattatggagatgtatgctaggtgtggttctatggaagatgcaaagaagattttcagttctatggatcatcataatttgacttcttggaacactatgatctcaggttttgtgcacaatgttcttggtgaagaagcaatagatttttttgaacggtttaagcagacaggggacaagccagatcatggcatgttcagacatgttttcttggcatgtggaattttgggatctgttaatgaaggaatgttgcattttgaatccatgcagaaagattttggcatacatcccactacagagcattatgcaagcattgttactatgcttggacagtctggctacattgtcgaggcttatgaattcgtggaacggatgcctgtggaaccaagcattgaggtatgggaaaatttgatgaacatgtgtcgacttaatggctttttagagcttggagatcgttgtgctcagatcatagagtgcttggattcttctaggctgaatgaacagtctaaaatgggtctgttccctgtcgatgtgtcagatcttgcaaaggaaaaggaaaggaaaaaggcaagtgtcgccgaagctcggagcaaggtccatgaatacagagctggcgaccgatctcaccctgacactcctaagatctatgaagagctgaggtatttgttggctcacatgaaggaagctgggtatattgctgacactcgatttgttcttcacgatgttgatcaagaaaccaaagaggatgctttactggctcacagtgagaggctggctatcagttacggtcttataacaagtgctccccgctcacctattcgggttataaagaatcttcgatcctgtggggattgtcacacggctttcaagataatctcaaaacttgttggacgtcagatcattgcaagggatgcaaagaggttccaccacttcgaaaatggtgtgtgttcttgcaaagactactggtaaacaagatgaaagaaagtccacatcttggtcaatttttattggcacaagaccgctataggttgtttatgtgctgaaggtaggctgatgcctatctaacatttagttagctaatagtttcatgtgagagacatgctgtatgatgtcgtcagtgagaaacagccaaacaggtcctaagcagctctggtgttctattttgcagctcatacgttaagcctgagcttttactttaacaactgttgtctctgatttgttacttgccaccaaaataaaacagtagaatgtaactgggtagtggtcccttggcatgtaaactttgattcagctgattacaaagctttctgactgcattctggatccattgctt

SEQ ID NO: 116784 - DNA, 1377 bp, Zea Mays
ataaaacgacttggctacgcttcacgcacacggcgtctttgggtgagcacaccgcgcagcaacgagaggggcaaacaagcttgctactgtgatttctcgtccgagcagcggcggaggagagagagagagcatggccgaccacaaggaggagcctgtgccggagtctgtgatggacaagatcaccgagaagttccacggcggggactcgtcgtcgtcgtcgtctgactcggacgacgagaagaaggggtcctcgttggcgtcggcggcggaagccatgaaggccaagatctaccgccttttcggccgggagaggcccgtccactccgtcctcggcggcggcaagcctgccgatcttatcctatggaggaacaggaagatctctggcggggtacttgctggtgccacggccatctggctcctattcgaggtcatggagtaccatctcctcaccttggtgtgccactgtctcatcctctcgctggccatcctcttcctgtggtccaatgcctccactttcatcaacaagtccccaccgaacattcctgaggtcaaaatccctgaggatgtggctgttaatgttgccctgtcactgagatatgagatcaacaggggctttgctaccttaagggagattgggcatggccgtgatctgaagaaattcctaattgttattgcaggtctctggcttctttcagttctcgggagctgctgcaacttcctgacactgttctatattgtctttgtggcactgtacactgtaccagttctgtatgagaaatatgaggacaaggttgatgcttttggtgagaaggctatgactgaactgaagaagtattatgccattttcgatgagaagtgcctatcgaagattccaaagggcccccttaaggataagaagcactagattggtagtaagctttcaccatagttgcctggaagcttgaaatatattatgcgctctatcaatgtcatgtgaactttgtcatgtacctttaatattgatttggcgcctttcgcaagtgctaggttagtgaatgaagtgtgcacatttctgttcaaggtaatgatagtatttgatctagtttgataatgtggtccgttgtcttgaagtgtgcgtgcatcccatatgcatcattgcacggaagttatttgacaaaggtcccagctgaggcttgatatgaaactatgagagctctcaaacgttgtgcccttcacatatggattgtgccatgttgtacaatgcttgaatgttggtccattgtctcgaagtgtgtgtgcatccatatgcatcgtcgtgtgaaagttatttgagtgaaggtcccagcagaggcttgatctcaaagtatgagagctctcaaacaccatatccttcacata

SEQ ID NO: 116785 - DNA, 1430 bp, Zea Mays
gctacgcttcacgcacacggcgtctttgggtgagcacaccgcgcagcaacgagaggggcaaacaagcttgctactgtgatttctcgtccgagcagcggcggaggagagagagagagcatggccgaccacaaggaggagcctgtgccggagtctgtgatggacaagatcaccgagaagttccacggcggggactcgtcgtcgtcgtcgtctgactcggacgacgagaagaaggggtcctcgttggcgtcggcggcggaagccatgaaggccaagatctaccgccttttcggccgggagaggcccgtccactccgtcctcggcggcggcaagcctgccgatcttatcctatggaggaacaggaagatctctggcggggtacttgctggtgccacggccatctggctcctattcgaggtcatggagtaccatctcctcaccttggtgtgccactgtctcatcctctcgctggccatcctcttcctgtggtccaatgcctccactttcatcaacaagtccccaccgaacattcctgaggtcaaaatccctgaggatgtggctgttaatgttgccctgtcactgagatatgagatcaacaggggctttgctaccttaagggagattgggcatggccgtgatctgaagaaattcctaattgttattgcaggtctctggcttctttcagttctcgggagctgctgcaacttcctgacactgttctatattgtctttgtggcactgtacactgtaccagttctgtatgagaaatatgaggacaaggttgatgcttttggtgagaaggctatgactgaactgaagaagtattatgccattttcgatgagaagtgcctatcgaagattccaaagggcccccttaaggataagaagcactagattggtagtaaggtatttgctatgaatcaacatctacattatgtcactagctgtcacctctttctctgaaggatggtgcttggtcctggtctctagttgatagtatataatctgtatgggcaactttggtgtgactgacagtctgctgaaaactgttgatcttgtttttggtttcagctttcaccatagttgcctggaagcttgaaatatattatgcgctctatcaatgtcatgtgaactttgtcatgtacctttaatattgatttggcgcctttcgcaagtgctaggttagtgaatgaagtgtgcacatttctgttcaaggtaatgatagtatttgatctagtttgataatgtggtccgttgtcttgaagtgtgcgtgcatcccatatgcatcattgcacggaagttatttgacaaaggtcccagctgaggcttgatatgaaactatgagagctctcaaacgttgtgcccttcacatatggattgtgccatgttgtacaatgcttgaatgttggtccattgtctcgaagtgtgtgtgc

SEQ ID NO: 116786 - DNA, 233 bp, Zea Mays
cgaccatcttcttttcccagaccgccctccgcctacagtccaccagccgctccacgccgttggatgccgtccaagggccccttcgcgccacgtgtagaatggtcgctgccgctttcctcgcgatctccaccgccctcctgacttgctttgcttgccctgggtccccgttccccgacgacgtgcccgacgccgcggcgcctccttgtccacgcgttcgtgcttcccaattcaag

SEQ ID NO: 116787 - DNA, 1015 bp, Zea Mays
agattctcacatccaagacccgcccgcatcatcgtcctcctccgcgctcccattccagttccagcctccaccccatggcgacggcgacggcgaccgcagtaccgtacaacgccgcggcggcggcagcagcggccgggaaggaggagacgacgaggccgatcgccgtcgcgtccccgaccgtccacccggcggcgacgggggacgaggaggaggccgcgaccgccaccaggcgctggcggccgacgcagtacctccgcaagcggcggtgcttgctctggtgctgcggctgctgcgccacctccgtggtcctcctgggcatcaccgtgctggtgctggcgctgaccgtgttcagggtgaaggaccccgtgctgaccatgaacggcgtgacgctggagggcgtggacggcggccccggctcgacgccggagcacccggtgtccgtgaacgcgacgctcagcgccgacatctccatcaagaaccccaacgtggcgtccttcgcgttcggccgcagcgagacggacttctactacggcggggagacggtgggcgtggcgtacgcgccccggggcgaggtgggcgccgaccgcaccgtgcgcatgaacgtgacgctggacgtgctcgccgaccgcgtctcgcccagcgtcaacgccacggacctcatcttcggcaaggagtacaacctcaccagctacacggagatcgccgggaggatcagcgtgctcggcatctacaagagggacctggacatcaagatgaactgctccatcacgctcgaggtgggggccttcaccaccgtgcaaagcaaagccaccgactgcgttgcaaatgtcagctgatttttttttcggttagctggtcgttagtgctccttccttcattctgtatgtatgcaagatatagattgttgtatgttgcttttcttttttttgtcagagattagtgactgttgtaactcatatacgtctataaatcctgatgttgtgaggcttatgtaagttcaggccacaattaatca

SEQ ID NO: 116788 - DNA, 843 bp, Zea Mays
cagacgattggtattgcttggcttccaaatgaattttcatttatgaagcttatcctctctaaaacttccctgtgatgcatacaactgagggttctgctttcgtacaggcactgagtttgtgcagtaagacttgttgtgcttatacatgttggccttctccaatttagacaaataagttgtatgttagcgtccttgtgatgctgatagacgatgcacctattttgttcaggctgatttggtaagtatgttctatgatgcatttggggagttcctttacctgacacaaagatgtatgctgagggctcttttcttatgaacgtagtgaggttatgtgtttttattattcttctatcaaagaatgtgttgattgtgtttctatgtgttaacagatgaagacaaaagctcccagtttgaacaaagctcttatgttgtgaatcacttgtgggagttatgcgaagagaatgacatagatagtgctactgcacaatgtaattgttattgctctgaaatcatgtaattgtatagggaactgatgctctcaaccccttgtctgcttagggatgttgtaaagttcaccgatttttatgcttcagattgttaaaaataacttgatgttgatccaaatatgtagttcctagagttggaaaagtatgtaacactttttgtaaagagcgttacatagaacatattcagaagctatctgaaaaggtgtgtaatatgcgcttctggttgctgaatcaatttatggactctccacattagagagagagtgcatcacaactttcatgtgaatttggctaccattgcccgcttattcagatattagtccttaagtagatatta

SEQ ID NO: 116789 - DNA, 1858 bp, Zea Mays
gtaaaggtaatgattgttgcctttggaatatttctatttaaactgtttaaaggtcatattgttgtttagaagtcggagtgatgttgatgagacatttgagatagattggggattcttaaatgctcaatggactgatgacatgtgtgcgaatcttcaaattgtgcagacgattggtattgcttggcttccaaatgaattttcatttatgaagcttatcctctctaaagtaaggcttcttcgcacgttgtatgttgatagaaacctagatgattttgataatcaggcttctactatacataattttcttctttttccctttattggtaattgaaccttataattacatagaatggatgataaaaagagtgtgcattgttgttgaactgaattagtagcttttccatttttatgatggcatatgagaagtgtactaaagtccaatgatttttggttgcatatatattcatatatgttcttattcatgctttagatggctcatcccatggtagtgtgcttccatgctgctgtattttcatgtataatatcttgtcatgattagttttgtcaaatagtcatcaaatgtgtatcttgaagatatttgtctgcttattgttttaggtcatatatgacattttttaagtgatgtatgcacaaactcaattatgttctctaattcactcatcctgtgaaactatgctttttataactgcataaatcctatcctcatatatgtagtctgcctgtggtggccctgtgaatgctgtgacaatgctgttgagtatgctggccatgtgactcctttgaccatgttgttgagcttgatggccctgtgaatcctatgaatcttatagacgatgaccaggttttttgtaaactcattcatttagtgtagtttgcactatgatgcataaatctaagggcctttctttgcatagccattgagtttgtgattttataactccacaaattctatcctcatatatgcagtctgctctatgatggccctgtgatgcttggagatgatgaacctgttctgttaactcacttattttgtgcgatctgtcctgtgatggatggagctgaggggcctactttttttataggcattaagtttgtgcagtaacacctgtaatgcttatacatgctgacactatttggttcactcactaattttgtgcagacttccctgtgatgcatacaactgagggttctgctttcgtacaggcactgagtttgtgcagtaagacttgttgtgcttatacatgttggccttctccaatttagacaaataagttgtatgttagcgtccttgtgatgctgatagacgatgcacctattttgttcaggctgatttggtaagtatgttctatgatgcatttggggagttcctttacctgacacaaagatgtatgctgagggctcttttcttatgaacgtagtgaggttatgtgtttttattattcttctatcaaagaatgtgttgattgtgtttctatgtgttaacagatgaagacaaaagctcccagtttgaacaaagctcttatgttgtgaatcacttgtgggagttatgcgaagagaatgacatagatagtgctactgcacaatgtaattgttattgctctgaaatcatgtaattgtatagggaactgatgctctcaaccccttgtctgcttagggatgttgtaaagttcaccgatttttatgcttcagattgttaaaaataacttgatgttgatccaaatatgtagttcctagagttggaaaagtatgtaacactttttgtaaagagcgttacatagaacatattcagaagctatctgaaaaggtgtgtaatatgcgcttctggttgctgaatcaa

SEQ ID NO: 116790 - DNA, 3306 bp, Zea Mays
ccgcaggcacccctttgcacagcagctccgaagccacaccacagttatttattactgttttttcgttgcctccaatccaatagagttgaccgaaccacgcgccgcccgctgacatggacgacgtagtaccagcgacagcgaagcagaccgtcgttctgtaccccggcggcggcgccgggcacgtcgcgccgatgacgcagctcgccaaggtcttcgtccgccacggctacgacgtcaccatggtgctcctggagccgcccatcaagtcgaacgcctccggcgccagcttcgtcgagagcttcgccgcctccaacccgtccatcaccttccacctcctcccgccgatccctccccccgacctcgccagctccaccaagcaccctttcctcgtcgtgctggagttgctgggccagtacaacgacaagctcgagagcttcctccgcaccatcccgcgcgagcgcctgcactcccttgtcatcgacatgttctgcaccgacgccatcgacgtggccgcgaaggtgggcgtccccgtctacacgttcttcgcggcgaacgccggagccctggccgtcttaacacagacggtggcgctgcttgacggccggcaaacgggcctcaaggagctcggggacacgcccatcgagttccttggcgtgccgccgatcccggcgtcgcacatcatcagggagatgctcgaggacgcggaggacgaggtgcgcacggcaatggcgaagatctggaagcgcgacacggacacccggggcgtcctcatcaataccttctactcgctggaggcccaggccctgcaggcgttcagtgacccgctgtgcgtccctggcaaagtgttgcctcctgtttaccccatcgggccgttggttggcaagggcgggagcgggacggacggaggagaggcggcggagaggccgcatgagtgcctcgcctggctcgacgcgcagccggagcgcagcgtcgtgttcctctgctgggggagcaggggcttgctgtcagaggagcagcttaaggagatagccgctggcctagagaagtccgggcaacggttcctgtgggtggtgcgcacgccggccagcagcgacgacccgaaacgattctggctgccacgcccggagccggaccttgacgcccttctgccggaggggttcttggagcggaccaaggaccgcggcctcgtcatcaagtcgtgggcgccgcaggtggacgtgctcagcaaccccgctgttggcgcgtttgtcacccactgcgggtggaactcgtcgcttgaggccatcacagcgggtgtgccgatgctgtgctggccacagggcgcagagcagaagatcaacaaggtacttatgaccgaggccatgggcatcgggctggagctggaggggtacaacacaggtttcatcaaggctgaggagatagagacgaaggtgaggcttgtgctggagtccgaggaggggagggagattaggacacgggcggcagaggtgaagaaagaagcacacgcggcgttggaggacgggggatcatcgaaggcagcatttctccaattcttgtcagatgtcaagaatattaattaggtcgggaagtgatcaatctttaaccgcccgatacaacgtaacacaaactattcaataaaatattagtatacatattgcttaggaaaaaaaatcccataaacaagtaataaagaaaacatgtgtgtagcaacaatatctatatctatactacttattaaggtagcaaggataatctgcctccccgccgttctgccttccaacgatctcaactgtccatccacgcctctgttttcgtcccgtcggatgctgccaacgcccgcgcgcatcccctggtcgtcagccccacccatccgtgcgagcgagcaacccattgcagccaccaccgccctacctactcacctcctcggcgcgaacagccgccgaacccttatcgctcgcccctcgcccgtgccagcaacccccgccaccgccgccgccctgcctctcgtccacccctccgccgcgagatgtcgccggcccctcaccatcctctatccacagcgcgcggggcgtagcccccctctagcgccgctcaagggtgaagggcccatccgcaccctgatgttggccacctccaccatgctctgatgcccatccttcgtcatgaccccctccagttccattactgacggacggtcctcttcataggcaaggtagagatggaggacagcaaaacactaacacccgagccatgccaccaccaatctattcctccaaacccttctgtacatgtgcgctacacatacatgaggctcctcctcctcgtcaaccccacatgatgaggcgtacttcagatgcagcgtgctcaagtgtaggagattgtcaatatcatcttgttgaatcgatgtgggggaggatgtctacttggtgaaacatccaaaaaagggactttgtcctttattttgaatcctttatcattctgttattagtacattggggatgcattatgattgtaataaaatatgttcacatttgttcttaaggtgagccacaagattcaggaatatcattgtagattgtttttgaattaggccacctatcctaatttttcgagtttgcatgggcctgcgatgcattacggaggcatttggaggtagcatttatctttataccaggtcagtagtttttaatggcctctgcttttgttactcaaacatttatgacatgaaaatgcaggaaaggttattcgtgcaccttctggaatgacgcatgagaaaatctctccagttcattatgatgaggaattaggaaattccttattcaatggcttgccaaaatgtcgtgcggtactacaagcagaacgccgatgaaacatggttcgacgtctcgctgaatagcctgcttcccggctcagtcctcaattgccagcgccaggtgtcaggatgtctcatccagaaaaagcctaatggctactcaaagatacgaaatggccaaggactgctgacgatgatgacgacatggccaccatcgccgccctctggacctcaacaaccatccataagagaaacgccaagaaagaagatacaactgtctatagaaacaataaacaatttttcttctcggactgctcaatctgaagagctcgaaagaacacaaacaaatcactctctctagtcactatggtgttgtgtggaatttggagaggatttgatctctttggtgtgtctagagttgaatgctagagctcttgtagtagttgggaagtggaaaacttggatgcaatgaatggtggggtggttgggatatt

SEQ ID NO: 116791 - DNA, 1385 bp, Zea Mays
ccaccgccctacctactcacctcctcggcgcgaacagccgccgaacccttatcgctcgcccctcgcccgtgccagcaacccccgccaccgccgccgccctgcctctcgtccacccctccgccgcgagatgtcgccggcccctcaccatcctctatccacagcgcgcggggcgtagcccccctctagcgccgctcaagggtgaagggcccatccgcaccctgatgttggccacctccaccatgctctgatgcccatccttcgtcatgaccccctccagttccattactgacggacggtcctcttcataggcaagatgaggcgtacttcagatgcagcgtgctcaagtgtaggagattgtcaatatcatcttgttgaatcgatgtgggggaggatgtctacttggtgagccacaagattcaggaatatcattgtagattgtttttgaattaggccacctatcctaatttttcgagtttgcatgggcctgcgatgcattacggaggcatttggaggaaaggttattcgtgcaccttctggaatgacgcatgagaaaatctctccagttcattatgatgaggaattaggaaattccttattcaatggcttgccaaaatgtcgtgcggtactacaagcagaacgccgatgaaacatggttcgacgtctcgctgaatagcctgcttcccggctcagtcctcaattgccagcgccaggtgtcaggatgtctcatccagaaaaagcctaatggctactcaaagatacgaaatggccaaggactgctgacgatgatgacgacatggccaccatcgccgccctctgtattaaagtacacaagtgcataagcgactagatttggagtggtaaagactagaatcaaagagctggtggattagaggtgtagggagatgtatcgtgggggccttgaccgcttcgagaaggcacaagccttgaagcccttctcagtgaagtccaagacaggcaccaacaaggcacctgcagctgcaggaacaactaaagcactggctctattgacgctgccacaaaattctatttttttgctgggttagaatctccaaagtccgcaaaggcaccagctcaagggtggctgggcaagatggtgatgctcccaagcatgttgggacacaggtcggtggagggcagtcgacgtggcaacctctagactgggcgattgagccacgcctaggggtctactatcttgatgtggtgaaagatggataggtctttgataggatcaatctagaaaacatgaggcatctattcgggaggcgggttcttgcttatgacttcgtgttggaccatcagtcaatgtcacgtcagcatgctgctgttattccactcgggaatggaaggttagaatcctcatgttc

SEQ ID NO: 116792 - DNA, 3695 bp, Zea Mays
gcccaccgtactcgccttctcatcctcatatattgctgtctcgttgcgcttcctctttcatcggctcgagctcccgctcggacgcgtcgcgggcgcctttccccagagattccaaggccacccacaaaatcgatccatccagtcgtcgagcgcgtctcctcttcgagcattggactgttccgggagccgcgctggaaagcggcttctgattgggtcggcgatgaggggcgccgccgccccgggccaccagcgatggagcggctcggcggggacgacgccgcggtcactcagcacgggctcctcgccgcggggctccgaacgcagctccgacgacggggaggagctggtcgaggtcacgctcgacctgcaggaggacgacaccatcattctgcggagcgtcgagccggccgcggcggggggcgccaccgcgctgccgctgggcgcgcgcggggaccatgccggcggcgcgtcgtcgtcgtcgcggtccttgtcgccgtcgatcaggcggacctcgtcgcaccggctcctgcagttctcgcaggagctcaaggcggaggccatgtccatcgcgcgccagttctcgcaggacctcaccaagcgcttcggccgcacccaaagccgcgcggaagggcaggggcagcagcagcagccgtcgtcaggcatcgagtcggccctcgctgcccgcgccgcgcggcggcagcgcgcgcagctcgaccgcacgcgctccggcgcgcacaaggcgctccgcggcctccgcttcatcagcagcaacaaggccaacaacgcctggatggaggtgcaggccaacttcgaccgcctcgcttccgagggtttcctctcccgctccgacttcgcggaatgcattgggatgacggaatcgaaagagttcgcgctcgagctgtttgacacattgagccgccgccgtcaggtgcaggttgacaaaatcaacaaggaggagctgcgcgagatctggcagcagatcacggacaacagcttcgattcccgcctccagatcttcttcgacatggtggataagaacgcggacggccggattggggaggaggaggtgaaagagattatcatgttaagtgcatctgccaataagctgtccaggcttaaggagcaagccgaagagtatgccgccctgattatggaggagcttgatcctgaaggacttggctacattgagttgtggcagttggagacccttctgttgcagaaggatacctacatgaactacagtcaggcgctaagttacacaagccaagcactaagtcagaacctagcaggcttaaggaaaaagagtccaattcgcaagataagtaccacattgagttactatttggaggataattggaaacgcctatgggtgcttgcattatggattggaataatggctggactgttcacttggaagttcatgcagtatcgcaacaggtatgtctttaatgtgatgggctactgtgtgaccactgcaaaaggcgctgctgaaaccctgaagctgaacatggcaattatcctcctcccagtatgccgtaacaccattacttggttgagaaatacaagggctgcacgggcattgccatttgatgataatattaacttccacaagactattgcagcagcaatcgttgttggtataatcctccatgcagggaaccatcttgtgtgtgattttccacggcttataaattcatcaaatgagaaatatgctcctctgggccagtacttcggtgaaacaaagccaacatactttacattggtcaaaggagtggaaggcatcactggtgtaattatggttatctgtatgattattgctttcactttagctacacggtggttccgtcgtagcctggtgaagcttccaaaaccatttgacaaactgactggcttcaatgccttctggtactctcatcatttattcataattgtgtatttggctctcattgttcatggccagttcctttacctcattcatgtctggtaccgaaaaacgacatggatgtatctggcagtgcctgtttgcctgtatgtaggggagagggtgctgaggttcttcaggtctggcagttattctgtcaggctattgaaggtggccatatatcctggtaatgtgttgacactgcaaatgtccaagcctccggctttccgatacaagagtgggcaatatatgtttgttcaatgtccagcagtgtcaccctttgaatggcatccgttctcaattacttcagcgcctggggatgattatctaagcattcatgttcgacaacttggtgactggacacgagagctcaagagggtttttgcagcagcttgtgaacccccagtgggcggtaaaagtggccttcttagagcagacgagacaaccaagaaagccttaccaaaacttctgattgatggaccttatggttctcctgctcaggattacagcaagtatgatgttcttctacttgttggattagggattggtgcaactccttttatcagcatactgaaagatcttcttaacaatattataaggatggaggaagaggaggatgcttccactgatctttatcctccagttggtccgaacaagccgcacattgatctcagcacacttatgacggtcacatcaagaccaaagagggttctaaggaccacaaacgcttacttctattgggttacacgtgagcaaggttcttttgattggttcaagggagtcatgaatgaaattgctgaactggaccaaaggaatattattgagatgcacaactaccttacgagtgtttatgaggaaggagatgctcggtcagcgctcatcaccatgcttcaagctttgaaccatgcaaagaatggcgttgacattgtctctggaactaaagtccggacacactttgcaagaccaaattggaaaaaagtcctatctaaaattgcctcgaagcatccatttgctaagataggtgtattctactgtggagctccagttcttgcacaagaactaaacaaactgtgccatgaattcaatgggaaaagcacaacgaaatttgagttccacaaggaacatttctgaattccagtaatacttggtgcgcagaaatgatatattatgtgtgtgtacagcatttttgtcttggtatgttcatctggagttctggacgaacatgagagcaaagtggagaagctaccatcaaatgcttaacagctgacggcctgcactctttgttaactgctcctaaatgaaccagaccaccaagaagtgggatttttgtgtacatatacatgtgatgtccaaacgtccatctgcagattggacccctcaactgtgaagagattcctcccaggtggtcaccaatgtacagagcacacatgaagataaagagtagttgggattgtcggtagcatgctattcgtataggacaggagggataccactagtcacaacacacaaggctatttaattgtatattttcatgcagctgatgccctgcactttctgctgctggccaatgcggcaaggacagaagcattttttctcatttgtaccgcatacagaaaaggcataacaaaaaagaggtgaaagggagaatagcattttagcacacttatgggtccctcgatttatttgaccctgcggtgctacgagcctacgaggaggagatgaagtagaataaaattgtcatttcattaaataaagcaaatgtttagaatatttt

SEQ ID NO: 116793 - DNA, 501 bp, Zea Mays
ccagtaagcagaaatgaataagggcaagattttcaagttggccaagggatttaggggaagggcgaagaattgcataaggatagcaagggagagagtcgagaaagcctcttgcagtattcgtatagggacaggcgtaacaagaagagggacatgagacccctttggattgagcgcatcaatgctggtacacggttgcacggggtgaattatggcaactttatccatggattaatgaaggagaacatccaactcaacaggaaggtgctctcagagctgtcgatgcatgaaccttacagctttaaggcacttgttgatgtatcccgcacagggtttccagggaacaggcctgtcaaaaaggagggtctagcagctatcttgtgaagcatatttttcattgagtcactggattcattatggcattccttccttgcagttcagagttactaatcctagctagtagcttgtgttacctggtgactaatgtagttttgcattactagt

SEQ ID NO: 116794 - DNA, 2292 bp, Zea Mays
ggacaaactctgtccaatgttactgtgttcttgaaaaaacctattttcacacatggacaactatatgttgctttctctagagttacttcaaaaaaggactcagagtgctgattgaagatgatgatggaaaatcaatagatgaaacgaagaatattgtttaccaggaaatctttactcgatttccttcacattaaggaagttctataattgccgcccatgtatagaataatgtctatataagtgagttttatattccattttatatccaagacaagcctattatgtataatatatgcatctactgaagatggtttctatggcttacaacattcctacttcctttattacaggtacatttcattactctctcccccccttttccctccaattacatacaattttacactcttttaactcacttgaaaaaaatagtaaacctatctacatatacaaaattccatttgttttcatcgttttgtataatactatatattaactcatacatatatctcataaataaatttattataggatacttataaacaaaatgctaactacattttttatctgttccatgttacacagaatgcctaataaaccactttcagcattgactctacaagatcgagacatagaaattcaaatagaggtccacaggaaatgggaatttcgaggtgctattgacaatggacccatattacacatagacatgatcctgacggattgcataggcaatgctatccattgtcaaataccatcattcccagcagctaaaagaggtgatgaatttcaagtgggaaaaatatacaagatgtcccgctttccagtagctcgtgcaaaatcttcctacaaacctgttgatggtgatctcatgtttctaacaagttacgacaagattgatccaaatgaaccaaatgcaaggaacttccatgatgtcattagcattattacagaaatctctgcgattaaacctgtgggaaatgcacgcataccctcatcttacaatcgacatgttctaataaaaaacctcagtgatagcattctgaaaattactctatgggggaaacgtgcacaagaattttatttgaccaacacttatgacccacagaaacaaactcttgtcattgtcttatttgttggttgtttaccaaaagaattccaaggggaagtacttttaagtggtggtgcagcctaccattggtacttcaacccatcaattgaagaagctactgctttttacaacaagattgaatctgagaagataaacatagaattacccagccttgacggacaagaaattacacctccacaacttccacaacgagaacatcatgaccttaaatacatattacctctaaacccacatgatgtaccggatgaaggatatgaatgcacagtaaccattacaagtattcctgaaggcaagacttggtattatattgcttgcaatacttgcccaaacaaaccaagcattgatcctatcatccgtcaatgctccacatgtggatcaacaaaatactgcttcaggtacaagctcactttcaaggcatcagatggaactgcagaagctgaaatgtttgctttcgacactgttgcaaggacaattattgggaaaccatgtccaatggttgttgcatcattttccagatgcatcagctatcccacctgaaattacagcaatcgtttcacggaaatacacattcattgtagtgttcaacaaccaatcatacagatttctagaaaaagcattgctcataaaaggaattgtagcatcatatggaagaatgacatcactaccaagagttcaagaaaaacttgatgtgcaccttcctcccaatccagccaaaaacaaactgataacaacagctgctcaatctccctctacagtcatgtctagactttccacggcggactcaccaagtgtgagtcgaaagctaacctattctccagcaaaggataaacctgagacaaaccctcttgatgctgataaaaatagagctcctgcaacaacacttgaatcacctacaaaaaggatcaaacaagaccctaagaatcaacaagagtagacgttgtgtgcaacacagtaaggaatacttctgaacatcacgcccaaacttcaacaaacgaagcatattcctcactattttgtctataaatattatgtgtgccttcttctatgaagcaaaccttaccctcgatatgctatatataatatctatgtattgtcatgtaatataaccatctataaactcatcagttgctacaatatattctaagcaaaccttaccctcg

SEQ ID NO: 116795 - DNA, 1295 bp, Zea Mays
gtccgctgttcttcagggataacactttcattgaaagccaggttcagggagctaatatttgcgagttcatccataaaaagaagagctcagacggttgaatatcgaccatcaacaaagtgatagcattctgaaaattactctatgggggaaacgtgcacaagaattttatttgaccaacacttatgacccacagaaacaaactcttgtcattgtcttatttgttggttgtttaccaaaagaattccaaggattgaatctgagaagataaacatagaattacccagccttgacggacaagaaattacacctccacaacttccacaacgagaacatcatgaccttaaatacatattacctctaaacccacatgatgtaccggatgaaggatatgaatgcacagtaaccattacaagtattcctgaaggcaagacttggtattatattgcttgcaatacttgcccaaacaaaccaagcattgatcctatcatccgtcaatgctccacatgtggatcaacaaaatactgcttcaggtacaagctcactttcaaggcatcagatggaactgcagaagctgaaatgtttgctttcgacactgttgcaaggacaattattgggaaaccatgtccaatggttgttgcatcattttccagatgcatcagctatcccacctgaaattacagcaatcgtttcacggaaatacacattcattgtagtgttcaacaaccaatcatacagatttctagaaaaagcattgctcataaaaggaattgtagcatcatatggaagaatgacatcactaccaagagttcaagaaaaacttgatgtgcaccttcctcccaatccagccaaaaacaaactgataacaacagctgctcaatctccctctacagtcatgtctagactttccacggcggactcaccaagtgtgagtcgaaagctaacctattctccagcaaaggataaacctgagacaaaccctcttgatgctgataaaaatagagctcctgcaacaacacttgaatcacctacaaaaaggatcaaacaagaccctaagaatcaacaagagtagacgttgtgtgcaacacagtaaggaatacttctgaacatcacgcccaaacttcaacaaacgaagcatattcctcactattttgtctataaatattatgtgtgccttcttctatgaagcaaaccttaccctcgatatgctatatataatatctatgtattgtcatgtaatataaccatctataaactcatcagttgctacaatatattctaagcaaaccttaccctcg

SEQ ID NO: 116796 - DNA, 1700 bp, Zea Mays
atcgtctgcaactgcatcgctcgctctctcctttcactgggaacatctatcagctcgcgctcattggccatctttggcttccatggagaggctcattgccggcctacttggcttcctattggttgcatcggtaggaagccatgcagctcgtgctccggatcagtactggaagtctgctcttcccaacactcccatgccgacctccctctcccaactcctcgacgccgctccagccggcggcggcacgaccgtcaacgtcggctggggcggtgttcacgtcgatgctgggcacggtaagcccgggggtacgacggttgacgtaggcaagggcggcgtcggcgtcaacgttaaccctggcaggagcggcaagcccggcggcacgacggttggcgtcgggaagggcggagtcggcgttaacgtcaacccgggatacggaaagcccggcggcaccaccgttggcgtcggaaagggtggcgttggcgttaacgtcaaccccggcaagcccggtggcacaacggtcggcgtcggcaagggcggagtgggcgtcaacgtcaatcccggcaaaccggccggtggtgccggtacaaccgttggcgttggcaaaggcggcgtgggcgtgggcgtcaatcccgggcacggcaagccgggcggcaccacggtcggcgttggcaagggcggggttggcgttcacgtgaacccgggaaagaagcccgtccacgtcaacgtctcccctttcatctacacgtacgccgcgtcggagacgcagctgcacgacgaccccagcgtggcgctcttcttccaggagacggacctccggcccggtaagaagatgaccgtccagttcgccagcaccgggacgaccggcaccaagttcctcccgcggagcgaggccgaggccatcccgttctcctcacagaaggtgcccgagatcctcgcccgcctctcggtggacccggactccgtcgaggcggcggagatggcgcagacgctgcgcgactgcgaggcgcccgcggccaagggcgagaagaaggcgtgcgccacgtcgctggagtccatggtggacttcgccaccgccagcctcgggaccaggcacgtgagggccgtgtcgaccgtcgtggcgaaggagggatcgccgaagcaggagtacacggtgaccggcgtggagcgcgctgccggcggcaccgacgacgacggccgggtcgtggcctgccacgcggagccgtacgcgtacgccgtgttcgcgtgccacctgacgccgcagacgcgggcgtactctgtgtcgatgctcggcagggacggcacggccgtggacgctgtcgcggtgtgccacgccgacacgtccggctggaaccccaagcacgtcgccttccaggtgctcaacgtgaagcccggcaccgtgccggtctgccacttcctgccgcaggaccacgtcgtctggacccgcagcggctgagtctgctggatggccgccgtttgctcgcgtcgcgccgcctggagtgatttgttatgttccagtggcctctaggcatactgtcatattattattataccgaggtatcacgagtttgcttatgtttccagtacttgatgcttgtatggatatggtgtagccagctcagcaagtatcaacccacctgcttaattctgttgtatagttttaaataaacagacaacctctttatggttactgctctcagcct

SEQ ID NO: 116797 - DNA, 518 bp, Zea Mays
acacaggcaccgaacgaacaggacagcgagagaaagcaaagcgagctgctgcttccttatccggttcttcgccgtgagcgctccacagggaacggaacgggaactgggggatcgggatccttacgttgttgtgtgtattatcgagcaagctaagagccatgggcagcgagtgcaagggctacggcgtcggcgtcgccaccagcccgcagcaggagcaggagcaggctggcgccgccgtcgcaccgttcgtggccaagacgttccacatggtgagcgacccggccacggacgccgtcgtgcgctggggtggcgccagcaacaccttccacgtcctcgacccggccaccttctccgactacctgctgccctcctacttcaagcaccgcaacttcgccagcttcgtccggcagctcaacacctacgtgagtgatatgcgcgctacctcctcagctcctctgcccccgctccgctgtccgctcagcgctcactcaggactaactaccactcctcctcgtgtg

SEQ ID NO: 116798 - DNA, 1546 bp, Zea Mays
cgatagaccaacaacacaacacccgctcccgcgaacgtccccgccttggcgccttctctccacagaccagaccacacggcccacgcacgctcagagcagaagcagaggcaaggcaaccggcggaatcaagcaagagcacatctgcgcatgcacctccgcgaggccatggaggactccgtgtcgggcgctggcgctggcgccgggcgtaagaagctgaagcaccggctcgcggcgatgctctcggtgttctcccggcgcgcggggggcggcagcaggaagcgccgcgacggcgaggacgaggcgaagccgccgccgccgctggcattcccgtcgtactccagcctcggcagcggcaagaagcccggaggtggtggtggggtcgccgaccgccgcctgtccctgtccgcgccgctggttcacatcaccatcgactgcgcgggccgccgctccgtcgacgcggcggacccgtccctcctcctctccctcgacgccgccggcaggagggcggaccggcggtccacggccgcggggcccgggctgttgccgcacgagtccggcggcgagtgggagggccgcaagtgcccgccgtcctcgccgtccgtggcgcgcctgccgccgctgccgccgctggcgaggtggaagcaggggcggggctcctcgcgccggccgtcgtcgcgccgcctggccagcagctcgtcgtccgacgacgagtacgacgaggactcgaggaacctcttctcgtcgcggagcttgtcgtccgactcgtccgacttctacagctgcccgcgccggaacgccagcgccagcagggggcgcgcgtccgtctcgggcccgtgccgcgcgctggcgctggcgccggcgccggcgcccccgcgccgcggcgcgtcgcagagctgccggtacagcttcgagctcccgcgcggctcgtcggcgacggacggcgggttcgcggtggtcaagcggtcggccgacccgtacgaggacttccgcaagtccatgcaggagatgatcgcagagtggcccgctggcggggccggaggcggcggcgacgacgaaggcgagcacagcgcggagcggctgctggagacgtacctcgtgctcaactcgccgcggcactacccggcgatcctcgcggctttcgccgacgtgcgggagacgctctttccgtgagcttcgtcagcagcgatcggcaggcggcgccgtgatgttgatagcattaaccttgtcagacgcaagtacgtagtggcgatagaattgagcatgtgcgttgctgtgtgcgtacgtgcctgctaaccgctgcgtaatgcagactctgttccctagtccctgtccctctgatggtaatctcccttagtctcgttaatgttaattttgtgagcttggctgccctgttgtgtacatattgcctcctttttgttgtccttgtctctgcagtctcagtacttagtactaatgtatattacacatttccccctccttttttgtgtataatgaggtatgccgtatgcggcaaaaaggtactatgtggagctcggtgcattctgcg

SEQ ID NO: 116799 - DNA, 2264 bp, Zea Mays
agcaatctcccttctggtcccacccaatccacttcgcaagccccgccgcacacttcttccccctgcctccaaaaactcagaaaaccctgaccgccggcggcggccatgcttctccaccaccgcctcctccctcgcctacttcttgttccttccacacatacctccacactcctctgcccctcccgtttgccgcgccgcctctccctctcgccacgcttctacgcgctgccccacctcgcggcaccccagaccgtcgaccactccgacgatgagggggcaccccagggggaggggcagatcaagctcccgctcgaccatctcttcgtgccgcccggggcaacaatggatgcgggggaccaggaggccgtgagcgcacgggtgcttaagggctccaacatcgtgctgggcccatacgcgcgcggcgacgcacaggtggtcaacgcagattttgtaaagagcagcgtgcgtcccgatgactgccctcgggacggccttccggagtttgcactcgttggccggtccaacgtcggcaaatcgtcgctgctcaactcgcttgtccgccgcaagcgccttgcccttacctccaagaagcctgggaagacccaatgtatcaatcatttcaaagtaaatgacagctggtatcttgttgacttgcctggttatgggtaaactactgaccagaacactttcagttttactagtagtttaaaaaaatcatgtagatgaacataacttggtcgaaatattattcacataggaattgcttaaacaatcccaatcaaacccttttctatttattgttttgaatttttatttatttcataaaaagtcctgcccgtccatttcttggagaaatagagggggagagcagagcgttgctactgcaaatattactggaatggatctggcaacaaagtccaacacatggtctgtccaagaaactagtaagaatgtaagaaagagtattttattggataaacttatgaagcatatggcatcgctactatatgcatgaaggagatacggtttgatacttcaatatacatgtgaaaaaccaccatgtcatctaattggtgtttgtgagttcaaaagtttgttttacagactcacaatattgactaagaatgtgtatgcctaatatttttacgtattctacttcgatctatatctgaaaaactctacgtcactgcatgatcttggacttttctctgggaaaattaatcagactacttgttatttgtcatgattcatgtatataacaatgagacatgaattcacagaaatagaaaataaattcgcatcctattatttggaggacatattagttgaaatatttattcgttttcttgcaataacaagagcttttattggacagatatgcttctgcaccacaggaagctcgtaccaattgggatgaatttactagaaattactttctcagtcgggagaatttggtatctgtttttcttcttatagatgcaagtatacctgccaagaagattgatcttgactatgctagttggcttggccaaaacaaggttcccatgacccttgtgttcacaaaatgtgacaagcgcaagaagaagaagaacggcggcaggaaacctgaagaaaacgtggaaactttccagggcctaatccgcgaatacttcgaggccgcgcctccttggatcatgacgagcagcgtgaccaaccagggccgcgacgagatactcctgcacatgtctcagcttaggaattattggctcaagcattgagatgcaatgataaccaaaccagggcgaagcaactagaacagcatgcaaagcactgtcgtccattgatgcatggacattcagcagtcggcgcctccgcaatcaggcgttcgcaccaactaatccagccttttgagctgttgactgtccaatatggccccctgtacatgattacccaatcaacactctggggatgcggacaaggtgctaaaatcagctgatcatggtttttttctttatttctattgtgtacacgtacaatcccaaccaacgttttccccttgttcccatctgattataggcttgtgtatactgtggggttaaatgattaataaattctggtgttagctaatcaccagcgggaatctcacttttttgtctgccacctatatcatatgctcccttggaccctgcagcatacaaatggcaggaggtgcatgaacctgacctgttaagaactggctttgtggtgtacagaatgtattgagagcgccacattattgggatccc

SEQ ID NO: 116800 - DNA, 1705 bp, Zea Mays
caaggacaatcgcggacgtctcacgcccagcaatctcccttctggtcccacccaatccacttcgcaagccccgccgcacacttcttccccctgcctccaaaaactcagaaaaccctgaccgccggcggcggccatgcttctccaccaccgcctcctccctcgcctacttcttgttccttccacacatacctccacactcctctgcccctcccgtttgccgcgccgcctctccctctcgccacgcttctacgcgctgccccacctcgcggcaccccagaccgtcgaccactccgacgatgagggggcaccccagggggaggggcagatcaagctcccgctcgaccatctcttcgtgccgcccggggcaacaatggatgcgggggaccaggaggccgtgagcgcacgggtgcttaagggctccaacatcgtgctgggcccatacgcgcgcggcgacgcacaggtggtcaacgcagattttgtaaagagcagcgtgcgtcccgatgactgccctcgggacggccttccggagtttgcactcgttggccggtccaacgtcggcaaatcgtcgctgctcaactcgcttgtccgccgcaagcgccttgcccttacctccaagaagcctgggaagacccaatgtatcaatcatttcaaagtaaatgacagctggtatcttgttgacttgcctggttatggtcctgcccgtccatttcttggagaaatagagggggagagcagagcgttgctactgcaaatattactggaatggatctggcaacaaagtccaacacatggtctgtccaagaaactagtaagaatatatgcttctgcaccacaggaagctcgtaccaattgggatgaatttactagaaattactttctcagtcgggagaatttggtatctgtttttcttcttatagatgcaagtatacctgccaagaagattgatcttgactatgctagttggcttggccaaaacaaggttcccatgacccttgtgttcacaaaatgtgacaagcgcaagaagaagaagaacggcggcaggaaacctgaagaaaacgtggaaactttccagggcctaatccgcgaatacttcgaggccgcgcctccttggatcatgacgagcagcgtgaccaaccagggccgcgacgagatactcctgcacatgtctcagcttaggaattattggctcaagcattgagatgcaatgataaccaaaccagggcgaagcaactagaacagcatgcaaagcactgtcgtccattgatgcatggacattcagcagtcggcgcctccgcaatcaggcgttcgcaccaactaatccagccttttgagctgttgactgtccaatatggccccctgtacatgattacccaatcaacactctggggatgcggacaaggtgctaaaatcagctgatcatggtttttttctttatttctattgtgtacacgtacaatcccaaccaacgttttccccttgttcccatctgattataggcttgtgtatactgtggggttaaatgattaataaattctggtgttagctaatcaccagcgggaatctcacttttttgtctgccacctatatcatatgctcccttggaccctgcagcatacaaatggcaggaggtgcatgaacctgacctgttaagaactggctttgtggtgtacagaatgtattgagagcgccacattattgggatccc

SEQ ID NO: 116801 - DNA, 1582 bp, Zea Mays
caaggacaatcgcggacgtctcacgcccagcaatctcccttctggtcccacccaatccacttcgcaagccccgccgcacacttcttccccctgcctccaaaaactcagaaaaccctgaccgccggcggcggccatgcttctccaccaccgcctcctccctcgcctacttcttgttccttccacacatacctccacactcctctgcccctcccgtttgccgcgccgcctctccctctcgccacgcttctacgcgctgccccacctcgcggcaccccagaccgtcgaccactccgacgatgagggggcaccccagggggaggggcagatcaagctcccgctcgaccatctcttcgtgccgcccggggcaacaatggatgcgggggaccaggaggccgtgagcgcacgggtgcttaagggctccaacatcgtgctgggcccatacgcgcgcggcgacgcacaggtggtcaacgcagattttgtaaagagcagcgtgcgtcccgatgactgccctcgggacggccttccggagtttgcactcgttggccggtccaacgtcggcaaatcgtcgctgctcaactcgcttgtccgccgcaagcgccttgcccttacctccaagaagcctgggaagacccaatgtatcaatcatttcaaagtaaatgacagctggtatcttgttgacttgcctggttatggatatgcttctgcaccacaggaagctcgtaccaattgggatgaatttactagaaattactttctcagtcgggagaatttggtatctgtttttcttcttatagatgcaagtatacctgccaagaagattgatcttgactatgctagttggcttggccaaaacaaggttcccatgacccttgtgttcacaaaatgtgacaagcgcaagaagaagaagaacggcggcaggaaacctgaagaaaacgtggaaactttccagggcctaatccgcgaatacttcgaggccgcgcctccttggatcatgacgagcagcgtgaccaaccagggccgcgacgagatactcctgcacatgtctcagcttaggaattattggctcaagcattgagatgcaatgataaccaaaccagggcgaagcaactagaacagcatgcaaagcactgtcgtccattgatgcatggacattcagcagtcggcgcctccgcaatcaggcgttcgcaccaactaatccagccttttgagctgttgactgtccaatatggccccctgtacatgattacccaatcaacactctggggatgcggacaaggtgctaaaatcagctgatcatggtttttttctttatttctattgtgtacacgtacaatcccaaccaacgttttccccttgttcccatctgattataggcttgtgtatactgtggggttaaatgattaataaattctggtgttagctaatcaccagcgggaatctcacttttttgtctgccacctatatcatatgctcccttggaccctgcagcatacaaatggcaggaggtgcatgaacctgacctgttaagaactggctttgtggtgtacagaatgtattgagagcgccacattattgggatccc

SEQ ID NO: 116802 - DNA, 2902 bp, Zea Mays
tagccccagtctgtcattccctctccacgccacacgcacggctccatccttctatctgcgctcgcgccgcccgggagctcgccgtcgtcacctcgtcggggcgccctcgtccagtccggctctcccttcgtcgctccgcggctctgccggcgtctggggccccggtctccgggctttggtggcgccccccaccggcccaccccagcgggcagcggcaactgccactctgcggctctgctaggggcagggaggagcagtggcgactctgctagggacagggaggagcagtggcgggcagcgtccttccttttgtttggcccggggcttcggaattacctggatccgccactgcatctaagtcctcctccgcacactctccaccgatcctcgacgcgcgcgtgagcaacaccaccgtggtatcggcgaccacgagcggcgccttttggattcgcccgtgacttgctcccaccgtgtttgccactcgccaggatgacgctgttgttggcccaacagctactttccttctccttcgcctttccacctctccgcgccctccaccttggcagcccccttaaagcctatccgtcctccaaatgcttcgtctactctcattgcccttcccaattccaaacctggtggcctcgaagtcgcccagccgcccatcctgcgcatagtttctttgaagaacaagaaagcgaaggcagcgactatggggatgaggcggtgggctgcttgggcgaacctgccacacacggcacctgggaggatacggatgacgagggcagctggttgggcccgactcgatgcggcgcctcggaggatgaagacgaggactgtggtgaggaggtgggccactgggacccgcctgtcagccgctttcgaccgcagcgcgaggaaccataccaagcagaagaggacgacgatgaagaatgcgagtggttggacccgacctcctttttgcgatgccaagaagtggtaagcggtgtttgcagcaccacggcagccatggacgaaatcctagcctttgcgaggtgctcagctgcggcgggggaacaaggattcgccgagttcatggccggatacagccacgggaacctcagcgaggaggagtgcattgaattaatgtggaggatgtccaacgaggggcttgcgttgggctgtgcacacctgttccagtggctgcgggagaagcagccggtgccagtatcatcaatggtatggttgatggcttttgtttcgcttgggcgttgtgacatggctgatgtggtcttggagattgtggcaaggttacccttggaaagggatttccgtgaggtagttctttataatgccgcgatatctgctgttgcctactgtaggagatatgatggtgcttgggaaatttttgagctaatggagaagaacaatgttcaacctgatcacggaacatccgctatcatgcttaatattatgaagaagagtaaggtatctgccaaggatgcatgggagtttttcaaacgtatgaacagaaaaggagtcaactggagctttgatgttggtgcagctttaatcaatatcttttgttctgatgggctaaaaaaagaagctctaatcatccagtcagaaatggagaagagaggtattgcatcaaacacaagcatatatgaaacactgatgaaggcatactgtaaatccaaccaaattgaagaagctgaggggctctttgttgagatgaaagaaaaaagtttgcaagcaacaactacaacttacaatatccttatggatgcttacagtagacgattgcagacagaagtagttgaatccttacttctcgagatgcaagatttaggtataagaccgagtgctagatcatacaattgtctcataagcgcctatgggcgccagaagaaaatgagtggaaaggctgaaaatgctttcttgaggatgaagagggatggtattaagccattatcttcttcatataatgcactactttttgcatatgcagctaatggattgcatgaaaaagctcatgccatatacatggatatgaaaagagaaggacttaaacctaccttagaaacatatacagctttacttgacactcttaggagagcaggtgacacagagaagctaatggagacatggaaaactatggttgatgaaaagtttggtggaacacgagtcatattccatatggtaattgattgtttagcaaaacatgggctgtatcttcaggttagggatgttatatatgagtttggaaagatgggcttaaagcctactgtcatgacatataatattttgatgaatgcttatggaagaggtggacaacattacaaattgccccaactcctgaaagagatgacagccctggaactcaaaccagactccattacatattgtacaatgatatatgcatatgcccgtgtccgtgacttctcgagggccttctattaccacaagcagatggttcgaaatgggcaaatacctgatcctaggtcatataaaaagttgttgaatactttggatgtgaaggctgcaagaaagaatataaaggataagagtgccatacaaggaataattaagggcaagtctggcttaaaacctaggaaggaaaagaaagatgagttttggaagaacagaaaaaaacagtctatgctgaaccatggacaccagagaaaagaatttttgtgaagtttatcttatgtgtacattaaattgtgttcaagatttacatcctgtttcatggtcccctggattttcactgttgaaacgttcaagattgagactaaagggttatatacatatgttttagttttctgttctcagtagcctcaatctactttaatgttttgcctttcaacatgatcaactctaaaaactcaaataaatgaacttcatctgtttgttattctttatt

SEQ ID NO: 116803 - DNA, 930 bp, Zea Mays
gcggtctggaggcttgctggcagcggcggcgcggcggcctgcccgacgtttgaaccggcggggcgggcggcggccgggcttcggatgggggttctcggctagctggtccaggagcgtcttgagcgccccggcgctgcggcgggacttggcggggagatcggcgtcgtcgtcgtcgtcgtcgtcggtgccatcgtcggggtcggccgccaccctggacgactcgacggagcggcgcgtggacgggtcccggagcgatcgcgagcgctgcagcgcgagaaggtcgcgcatcagcgacgcggacgccgggctccgcctccggcccgacgacgacgcgcctcccgctcccgcgtgcgcgtgcgcgtggtggtggcgcaggtggatgcagttggtgaggtgcgcgtggccgcggaagtggcccccggcaccgccccccgccgtggcacggtcgggagcgggcattgcgaggcggcacggcgcgcgtctttcccagtgccactctaccttgccctcactgaggcgcgacgcgaggggaaagaaaagagacacccgcctccgctaggccatttgaggagggaaccaggggggaaagccggccctgggccgccggttggcgtgtgtgattatggcggtgtggttcggagatttcgcctttttcgttggatcctggagggtttcacgggaagagcgacggaggtagggggagggcgagtcaagttgggtgaccggagtgggtgtgggtgcctccgcctcgtgccgggtgtgggagcgggcggtgctttcggggggctcgcgagttgcgtccaacggcccaaggcgtcggagtttttttttttttttgtaggacagctaaaatcagaatctagcacatcataatattattgaagttccaaaatcatgccaacgtgatgtccgtataataatgtgatccac

SEQ ID NO: 116804 - DNA, 2361 bp, Zea Mays
tagactttttttaaagaactacatagtgaaattgtactcgcctcgttgtatttggacttgtactccgccatggatagtagatccaatagacaagttttgttagcacgttagcattctaatattttttatactagatatgttgtcgtcaaagtttgctttaaacatctgcaaaagtctctttaactcggtgtggaactattattcagggcaattggatttggaccgtgaatgaatgtatagccttgaccctacacagattgaaccattggacctataaagctatctctagcagcttaccaatccttatacatatatattcaaaccctactctgcgaacaatacagtctacagtgtagaacaatgtttttggataaattttaggtagactgttgcagacggcctaagagatctaatacacacctcaagtccccaatattctttaacatagactttgtttggattcatccactaattattagttgttttgccgaaagagaacttttaatagctagtaattgttattagccaaatgatagctaaaacattagttgaaattagggcgtgtctgaatacatatagctagttactagttgggctagaaatcaacctaaattagtaatggttggttgcctatttgcttaacagttagttaagatttggataaaaaatcaactcaatcgatagccatcttgtttggatggatgtactagagctgatttttagatagctagcaattagctttgagattcaaattattagataaagatttagcaactaactattagcaattagccttgagattcaaattattagctaaagatttagcaactggctgttagttgtacggacatgtcgatgttggatcgttccgattaaagttggaggaagcaaacgcaaacacatgattatcggcagcaaggtggtggatattagcaaacggcagagaaaaatcgcgggagaggagtggccgagaaaaatcaaacaaacacggaaacacctggcgccaagaaaacgggcaggaaaacagagacagagcagggcgaaccccactggatcctcaccgccttctcctcctcttcctctcctccctctctctctcgccggagccagatcaaatacgcgctgccgtcgcatccgatggctcctctcctttccccaccgctgctcgcggacaccgtcaccatcacagggttggctggggccggaagaagagaccggggctggcgtcggagggcgtggggaagaacgagctcgagggtgaaagcggtggcggcggagtcccgcagctcagcggggggaatcgccgaagattattacgctgttcttggcgttatgccagatgcaacgccgaagcagatcaagaaaccatactacaattgcatgaaatcatgccatcctgatctcagtgggaacgaccctgacgtgacaaatttctgcatgttcatcaatgaagtgtacacggtgcttaccgatcccatccaacgagcagtgcacgatgagatacatgggtatgccgcaaccgcgaccaatcctttcttggatgacagtgcgcctcgggatcatgtgtttgttgatgagtttagctgcatagggtgcaagaactgtgctaacgtgtgttctaaggtcttccaaatcgaggaagatttcggacgggcaagagtttacgaccaatcaggcagcacagaactgattcaagaagctattgatagctgcccagttgactgcattcattggactttagctgcgcaactttcgctcctcgaggatgaaatgcgcagagtagagagagtaaatgttggattaatgcttgctgggtgggaggctcaattgatgtgtttcggatggcaagttcacgctggaagaaaagacaagccaaagtcctggagaaggtaagaaggcggatgagccaagatgattccagaaagggtggctcatggagtgacatctggggagcgccaacaagatacgagaagaacgaagcggaggcgaaggagagagcaaagcgagcagcggcggcagcaaggaggtggcgagagtactcaaggaaaggcaccgacaagtatccagcattcaaacttccagaggcagtgcccagcagcaaggagtgagaacccaataatcagaggtcttacgaaacattacagggatacttaacacccccccccttttacttcatgtatagccctaatcatttacagagagctgtagcctgtatagtatttgctcgctgattccacatgatcaaggccgttcctgtaaatcctctgttagtgataggcgctcgggtcgattacccatagaccccgtttattccagatgcaaaacaagtgtacacagaaagcgacacattgctactcttac

SEQ ID NO: 116805 - DNA, 2394 bp, Zea Mays
cgcgggcagccaaagcggcgcgggcccagccgggtcaggccacgtggcggaagcggtgcgggcgatcttcttgtccgcgtccatccacgtcgaccccgtcaaggccggattcttttatcctcctcctccccgcccctgatcgatccctccccgacatcaaccggcgcagcgcgaccatccccagccactattattattaccatcatcatcacctacccgctgcctccatcctcctcctcgcccctgttcctcgcgtcttcccgtcgtctccgactcgcttccagttcccgatttgccgaacgccagcgacgccgtcgcatggagatctccttcgaggcgtgggagggcgtgcagcggcacggccaggacctcgcggaccgcctcgcgcagggcttcacgggcctgctccaggcgccgccgcagttcccgtggccgccggcgccgcacaagcggatgcccttcgacatcgacctccccgtcgtccccttcggcgccggcgtgccgaaaaaggacctccccttcccggccgccgccgccgccgtctcctcggtcatcgacatcggaggcaggctaggccaggccggcgccgagcttggggcgtccgtaggcggggccgtgcagcacgccgtgcgccatctgcccgtgccgttccgcaacgcccagatccggcgccgcacgctaccgccggcgccgcctcaggcgcccctgccgcccgcgacttcggtgggcgagggcgcggcagggcgctccgtcgaaagggctgctgtagataggtgccccctcgaggcggcggccgccgccgccgctgcggccactgggagcgcggctgcgtcgagcgtcagcggccatgttagcggggacgatttggacgaggacgacgaaggcttcggctgcggtattgggactcttggaaactttaagaaggccaacggtactgtaaatatgtcggcaacatacaattccaggagtcaagacatcgagagttctgttgttgcacatggagacctctggaggctagaggcatcgcgtggtggatcaacttctggaaatggcacttcgcctctgtaccttgttcagttggggcctctactttttgttcgagactctacacttctgttgcctgttcatctatcaaagcaacacctgctttggtacggttatgatcgcaagaatggtgtccattcactctgtccagctatatggtcaaaacataggagatggttgatgatgtcaatgatgtgtctcaatccaatagcttgttcgtttatggatttgcaattccctaatgggcaactaacatatgttgctggtgaggggatatcagccagtggttttcttccgttatttggtgggttgcttcaagctcaaggaaaatatcctggagaaacaagagtgagcttttcttgcaagaataagcgtggcacaaggtttactcctatgtttcaatggcctgacaagtctgtttcgttaggagttactcaagccttggcatggaaaagatctggtcttatggtgagacccagtatacaagtcagtgtgtgccctacgtttggaggaagtgatcctggggtacgggcagaagttgtccattcattgaaagaggaattgaatctgatgtgtggcctctcttgctcgcggcatccatcagcttatactgctctatctattggacgatcaaagtggaacggtcaagtgggcagttctggagtggtaatcaccttggaaacacctcttaataacattggaaggccgtcgttatctgttcaactgaatggtggttttgagttgtgattcttcagactccagcgctgaagctgtacataccagtgtgtatatattgccatcaccaatgttcgtgctccatagtttgtggaagtgggctgcagcctgccggcttgcaggtcgtttttgttactgtagtctataggtagtctcaactcagcaaatcagctgccatggtacccaacccatgcgggcacagaagtcaactactttgttgttcaatcattatgacaatccttaggtcttatttggatactctcgtattcacattaatctcacatttattgaagtgaaatttaaattaatttacactccaatcaacttcaatacatatggattgaagtcaatacgagagtatcgaaatacggccttaagggattgtgacgcttgcagcaggtgagctcatattagaagttcgtgaaagtggaggaccacgtaatcatgcaagttgttcatccagaatcacattcttttggtgcaggactggcaggttgggatgtaaacggacggatgatcttgttttaacattataactcggacacgcaaaatgataaaaacgaactaatatgaaaaaatacgtgggtaacggtaaaaaggataacaaagctacaa

SEQ ID NO: 116806 - DNA, 402 bp, Zea Mays
ccggtgacgttgctgcacgccgagaaggcgcccagcatgggccgccccgacggcgcgcgcgccgccagctccgactccagcgcggccaggtccaggaggccgtcggcggcgcgcagcccgacctccaccacctccgcgaggctctcccgccaggtgagcaggttggagtggtgctcgtagggccccacgaagaccacccagcggtcggacgggggcagcgcggccagcaccgcggcgcgcagcgtgggcgccacggccatgcccgtcacctcctgcaggcgcttgatggccgccgtgcaccccgtgccgcagaacagcagcatgtcgcgcggccccgcgcctaggctgcgcttcacgtaccgcgccgcatccccggccagcttgctcgtgtgcatgcccacg

SEQ ID NO: 116807 - DNA, 543 bp, Zea Mays
atgccaaactgtcagaagacgaaacagaagctcgagccggtaaaaacggagaaagacgcgcgcgcttaccgtatggagaatggctcagcggcggcgggcttcggcatcctgccttcctctcacccggggcgcaggtgcgctccgccggcgagagatggggatgggggtctgagcctctggcgagggggagagcagctcgaggctcgagctgggaagggagaagacggaggtggcgaaaaagaaaaacaaaaggcgagtccagaggagcggtgcgtggggcagaccggcagaggtgctgtgggtcccggcgcgcggcggattggacgtcagggttcaccgagtcgcctgctttcaattactgctctgcctcgtgaagcgcgcgtgttcttctttggtggggctggccgcgaccgcgcgtcgtgtacgctgcgcgctgtggtgccgcggcgggccgtgggccggaccgggcgcgcaggcggccttgccctccgggtatcccgcgtccgcgttacaagatttcaaagtttttcaagactgccatag

SEQ ID NO: 116808 - DNA, 156 bp, Zea Mays
atgaccacctacgccgcgtggtacctcgccatcgccgcgctcctcaacggccaggccgaaggcgtggcgcactccggccccaccaagctcgtgctctacttcaccggcgccaccaacatcctgtacaccttcggcggccacgccgtcacagtgtaa

SEQ ID NO: 116809 - DNA, 1753 bp, Zea Mays
tgtgcagtgcaggcggcgactgtgcgtgcactcgctacgctagctcctccatccctggattccctgcacactgcaccaccgcgctgccgccgtcctcgccctgctcctgctgcctatatatactgccgcgtgactcgcagggacggagcagacgttggccgcccgccattggtccgccgatatctctttttccctctctctccttttctgcttaagttcccgtccacgagagcaggtagtagtagctactagtagctagcaagtcggccagcacgctcgctcgctcgcagcagtcgctagccagacagcattggcgccggcccgcgcgtgcgcgccatggaggaggcgaggcaaaggcggcggctgtgcctgtgcctgctggtggcggccgtgagctgggcgctgctggcggcggtggcgcggtgcgacccgcaggtgccgtgctacttcatcttcggcgactcgctggtggacaacggcaacaacaactacatcgtgtcgctggcgcgcgccaactacccgccctacggcatcgacttcgccgccggcccgtcggggcgcttcaccaacggactcaccaccgtcgatgtcatcgctcaacttctgggtttcgacaacttcatcccgccgttcgccgcaacgagcgcggaccagctcctgggcggcgccaacttcgcctccgccgccgccggcatccgcgccgagaccggccagcagctgggcgggcggatcccgttcgcggggcaggtgcagaactaccagacggcggtgcagacgctggtgagcatcctgggcgaccaggacacggcgtcggaccacctgagccggtgcatcttcagcgtgggcatgggcagcaacgactacctcaacaactacttcatgccggccttctacaacacgggcagccggtacaccccggagcagttcgccgactcgctcatcgccgactaccgccgccacctgcgggtgctgtacaactacggcgcgcgcaaggtggtgatgatcggggtcggccaggtcgggtgcagccccaacgagctggcccgctacagcgccgacggcgtcacctgcgtcgaccgcatcgacgacgccatccagatgttcaaccgccgcctcgtcggcctcgtcgacgagttcaacgcgctcccaggcgcgcacttcaccttcatcaacgcatacaacatcttcgacgacatcctcgccaacgccgcctcctacgggttcacggtgaccaacgccgggtgctgcggggtgggcaggaacaacgggcaggtgacgtgcctgccgtaccaggcgccgtgcgccaacagggaccagcacatcttctgggacgccttccacccgtcggaggcggccaacatcatcgtcggccgccggtcctaccgcgccgagtcgcccaacgacgtctacccgatggacatcagcacgctcgcctccatctgattctgattctcatccctccataaatataaacataaaaatatatgatataatccacccaccactgcgcaaaggctgcaatattaaacagggctccaagaggaggtagccgtgcaattctttcctgtgtacaagctcgcgccttatctgtaatttttcatgctttcatacatttgcatcgggtacttagaaaatatccgatcgaatcactttttttttcgttttcaattctcatgcacacctgaattccgcgaaagattccacaagtacaccaccagatttgcagcttcattcaaaccatgctctctctctc

SEQ ID NO: 116810 - DNA, 1474 bp, Zea Mays
ccctgcacactgcaccaccgcgctgccgccgtcctcgccctgctcctgctgcctatatatactgccgcgtgactcgcagggacggagcagacctagcaagtcggccagcacgctcgctcgctcgcagcagtcgctagccagacagcattggcgccggcccgcgcgtgcgcgccatggaggaggcgaggcaaaggcggcggctgtgcctgtgcctgctggtggcggccgtgagctgggcgctgctggcggcggtggcgcggtgcgacccgcaggtgccgtgctacttcatcttcggcgactcgctggtggacaacggcaacaacaactacatcgtgtcgctggcgcgcgccaactacccgccctacggcatcgacttcgccgccggcccgtcggggcgcttcaccaacggactcaccaccgtcgatgtcatcgctcaacttctgggtttcgacaacttcatcccgccgttcgccgcaacgagcgcggaccagctcctgggcggcgccaacttcgcctccgccgccgccggcatccgcgccgagaccggccagcagctgggcgggcggatcccgttcgcggggcaggtgcagaactaccagacggcggtgcagacgctggtgagcatcctgggcgaccaggacacggcgtcggaccacctgagccggtgcatcttcagcgtgggcatgggcagcaacgactacctcaacaactacttcatgccggccttctacaacacgggcagccggtacaccccggagcagttcgccgactcgctcatcgccgactaccgccgccacctgcgggtgctgtacaactacggcgcgcgcaaggtggtgatgatcggggtcggccaggtcgggtgcagccccaacgagctggcccgctacagcgccgacggcgtcacctgcgtcgaccgcatcgacgacgccatccagatgttcaaccgccgcctcgtcggcctcgtcgacgagttcaacgcgctcccaggcgcgcacttcaccttcatcaacgcatacaacatcttcgacgacatcctcgccaacgccgcctcctacgggttcacggtgaccaacgccgggtgctgcggggtgggcaggaacaacgggcaggtgacgtgcctgccgtaccaggcgccgtgcgccaacagggaccagcacatcttctgggacgccttccacccgtcggaggcggccaacatcatcgtcggccgccggtcctaccgcgccgagtcgcccaacgacgtctacccgatggacatcagcacgctcgcctccatctgattctgattctcatccctccataaatataaacataaaaatatatgatataatccacccaccactgcgcaaaggctgcaatattaaacagggctccaagaggaggtagccgtgcaattctttcctgtgtacaagctcgcgccttatctgtaatttttcatgctttcatacatttgcatcgggtacttagaaaatat

SEQ ID NO: 116811 - DNA, 998 bp, Zea Mays
tgtgcagtgcaggcggcgactgtgcgtgcactcgctacgctagctcctccatccctggattccctgcacactgcaccaccgcgctgccgccgtcctcgccctgctcctgctgcctatatatactgccgcgtgactcgcagggacggagcagacgttggccgcccgccattggtccgccgatatctctttttccctctctctccttttctgcttaagttcccgtccacgagagcaggtagtagtagctactagtagctagcaagtcggccagcacgctcgctcgctcgcagcagtcgctagccagacagcattggcgccggcccgcgcgtgcgcgccatggaggaggcgaggcaaaggcggcggctgtgcctgtgcctgctggtggcggccgtgagctgggcgctgctggcggcggtggcgcggtgcgacccgcaggtgccgtgctacttcatcttcggcgactcgctggtggacaacggcaacaacaactacatcgtgtcgctggcgcgcgccaactacccgccctacggcatcgacttcgccgccggcccgtcggggcgcttcaccaacggactcaccaccgtcgatgtcatcgctcaacttctgggtttcgacaacttcatcccgccgttcgccgcaacgagcgcggaccagctcctgggcggcgccaacttcgcctccgccgccgccggcatccgcgccgagaccggccagcagctggtatgtatacacatatccataccatatcactgccaacactacgagctgagctatagccagacgatgctaccgaatgaatgcagggcgggcggatcccgttcgcggggcaggtgcagaactaccagacggcggtgcagacgctggtgagcatcctgggcgaccaggacacggcgtcggaccacctgagccggtgcatcttcagcgtgggcatgggcagcaacgactacctcaacaactacttcatgccggccttctacaacacgggcagccggtacacc

SEQ ID NO: 116812 - DNA, 919 bp, Zea Mays
tgtgcagtgcaggcggcgactgtgcgtgcactcgctacgctagctcctccatccctggattccctgcacactgcaccaccgcgctgccgccgtcctcgccctgctcctgctgcctatatatactgccgcgtgactcgcagggacggagcagacgttggccgcccgccattggtccgccgatatctctttttccctctctctccttttctgcttaagttcccgtccacgagagcaggtagtagtagctactagtagctagcaagtcggccagcacgctcgctcgctcgcagcagtcgctagccagacagcattggcgccggcccgcgcgtgcgcgccatggaggaggcgaggcaaaggcggcggctgtgcctgtgcctgctggtggcggccgtgagctgggcgctgctggcggcggtggcgcggtgcgacccgcaggtgccgtgctacttcatcttcggcgactcgctggtggacaacggcaacaacaactacatcgtgtcgctggcgcgcgccaactacccgccctacggcatcgacttcgccgccggcccgtcggggcgcttcaccaacggactcaccaccgtcgatgtcatcggtaagcagctaatagccagctgctaggccggcggcggtgtgcatgcgtggtcgagctcgatcgagcaggtagaccgacctgggatttattaatacgtagtacgttacgtacgtacgcgcgtcggtggatagagacacgtacgcaggtagatctgtacaggagccaggatagagatggtgacatgcatggagagatccactcccatgtagagatggcaatgggtaaatacccaccgggtattactaccccatacccatacccacgacaaaaaaataaccccaccgggtcacccatatacactggtgggtatggatttacccccat

SEQ ID NO: 116813 - DNA, 1041 bp, Zea Mays
ggccctcagcgatctgcactttgcctagggaaagcccattggttcttggatagtgggccccgatcacgcctttacaaggcctgccaaagtgagcccaaaattgtcggggccgatcaaatcaaacccatcgcattaccacacaaggcctttctaagttcgacttaataataataatcacatacagtaaatcattcgatctccaccggcctcctccaatgaccgtagccggagccatccgccgccggcgagcaccgcggccccatctccctctcttcgtcctcgtcctacttttctctactctaaccccacgcacttcggcgctccgcgtcccgctccgccaggcagcaaccctcgtctccctctcccattcgctcctctcccgcgtcgccatcacacgtgctgctcgtggggacgccgcggcggccgcacgcgtacggcgaatcgcttccctgctgtcgtcccgtggtgcgtggggactcggctgggactacctccgccactacgccttctcctcagccaccggatgcggcctctcctgcgcagccgccgcttctcgtctcatcgccgctgccgcggaggcctcgcgcctacgttccgccactgacgctgcgcagtggatgcgcctacactacggcgacatccgcgacgccgccgcgcagctcctgaacgggcttctcctcgccttctccgaagaggggccattgagagaggtgttcatggatattaagtgggaggtggaggaaggggaattgctgaaggattgcctggaagtgggagctaaggacttaaagggtttgcttgtcattgccaaagacctcttcgctggtgtttcaaggacttctacgcagcatagcgagctctgaggtttggtgactttaagttgccttttctgatcgtttcaggaactcacgcatgcttgtgtaatttagtttactttagaaacctgatgttgatccgtacagaaactaaacccttgtgatatcactgttgtgtctgctactaatgggctttgaattttgagctgtgcataattttgctaat

SEQ ID NO: 116814 - DNA, 1006 bp, Zea Mays
gagagatagagatatgcgcgggagatggacgtttacccgtggtcatgatggccgatcggatcgcggcggagctccagtcggggtgcgcggccttgacgagcgcggcggcggcggaggcgtgcgggcacgacatggacgtccccgacatgatgttgtactgcaccacgcggtggtcgccgtcgagtttcgtcggcgacgacgccccgctccacgccgccaggatgttcagccccggcgccgtgatgtccggctgcatcgagggcaaacggcaaaaaaaaaaaaacagcgcgtacttattacgcgccagtttcttgtatcattcattgtatgcgctgcatctgcacacgtacgtacgtacgtacagtaccttgagaatgctgggctccaggacgttggggccacgcgacgagaactgcgccatcaccggcgacggccggacgtccaccacggtcctggaggggtccagcacggcggtcgggctggagctggagttgatgtagcggaggatggtgtcggcgtcggctgcggcgaccgcggtgcccgggaggacgtgcgcgtcgacggggacttcggagccggaggccgctgggttgccgagcagaatggccgcgccgcccgcgcgcttcacctccaggcccttccccacccgcagcccagcgccccgcaagcacacgacgatcttgcctcgcaccttgtcgctggccagggagttgggcaggcattggctgcgtcgatcgtggacggtggaaccagggctaccaccacttagcactattcaaccatcgatcgaccatcgttataagagaggaaggattgtttgcttacttggaaacattagcgggagtcccaggaacaactgcgtctgccgcataaaccaaaggatagggcttgtcgccggggagctggtacggtgtcacggtttgaccctgcagagtccatcgacagaatgtaaaacataactacatgtctgtgcacgtacattttagtgcttttgcaagttgttcaa

SEQ ID NO: 116815 - DNA, 1211 bp, Zea Mays
gcaggtagtcatggtacgacgtgtcgtacacgaggccagggtcaagcgcgtgcctgggccggatgtggcccgagccgtagtccatgggccccgcgaccgacccgtccccgttcatcagtgggccgccttccgcgtcgctggtcgtggctggaagcgcgaaaggtcggtcggtttatggcttctctgttcgtgtccggagacttgagagagatagagatatgcgcgggagatggacgtttacccgtggtcatgatggccgatcggatcgcggcggagctccagtcggggtgcgcggccttgacgagcgcggcggcggcggaggcgtgcgggcacgacatggacgtccccgacatgatgttgtactgcaccacgcggtggtcgccgtcgagtttcgtcggcgacgacgccccgctccacgccgccaggatgttcagccccggcgccgtgatgtccggctgcatcgagggcaaacggcaaaaaaaaaaaaacagcgcgtacttattacgcgccagtttcttgtatcattcattgtatgcgctgcatctgcacacgtacgtacgtacgtacagtaccttgagaatgctgggctccaggacgttggggccacgcgacgagaactgcgccatcaccggcgacggccggacgtccaccacggtcctggaggggtccagcacggcggtcgggctggagctggagttgatgtagcggaggatggtgtcggcgtcggctgcggcgaccgcggtgcccgggaggacgtgcgcgtcgacggggacttcggagccggaggccgctgggttgccgagcagaatggccgcgccgcccgcgcgcttcacctccaggcccttccccacccgcagcccagcgccccgcaagcacacgacgatcttgcctcgcaccttgtcgctggccagggagttgggcaggcattggctgcgtcgatcgtggacggtggaaccagggctaccaccacttagcactattcaaccatcgatcgaccatcgttataagagaggaaggattgtttgcttacttggaaacattagcgggagtcccaggaacaactgcgtctgccgcataaaccaaaggatagggcttgtcgccggggagctggtacggtgtcacggtttgaccctgcagagtccatcgacagaatgtaaaacataactacatgtctgtgcacgtacattttagtgcttttgcaagttgttcaa

SEQ ID NO: 116816 - DNA, 98 bp, Zea Mays
atctatgcttgctatagttactctaaacaatacatgtggtaactacatttcctgtaaacaagatgttcatagtacctcaacatagaatcattcgttgc

SEQ ID NO: 116817 - DNA, 1914 bp, Zea Mays
atgaagggcaatgcgcgcgcctgcatcgctgcacgtctgcaccccaacgtcatcgcgctgcacgacgtgtacgaggacgcgcgcggcgtgcacctggtcctggagctctgctcgggcggcgagctgttcgaccggatcgtggggcgcgaccaccactactcggagttcgacgcggcgggcgtcgtccgccagatcgcgcgcgggctgcaggcgctccacggcgcgggcgtcgtccgccagatcgcgcgcgggctgcaggcgctccacggcgcgggcgtcgtgcaccgggacctcaagcccgagaactgcctcttcgccgacaggggcgaggcctccacgctcaagatcatggatttcggcctcagctccgtcgaggacttcagcgaccccgtcgtcaccctgttcggctcgatcgactacgtctcgccggaggccctctcgaggcaggatgtctcggctgccagcgacatgtggtctgttggggtgattctgtatatcctgttagccggtgtgtgggaccgtgttcctggagctgctggagtctgcgtcgtgggtcgctttggagaaaatgctaattatgctgcatctgagtatgcctgggagtctgcaacaccacccggtactgcattaatgaagctagatgctgataaaatggttgctgctgcaagttcccgtaatcctacacttgctagcgctctgacaaggcttcaaaggtgtgcatttagtggaagctgggagatccgcattgctgctgtacaagccctaactaccattgcaataaggtctggtgaaccttatagactgcagatatatgaatttcttcatgctttggctcttggaggtgtgcagtcaaacttttcagaattgcagctaagtaatggggaaaatcaaggtgccagtggtactggtcttggatctttaataagcccaatgcttaaggagttaagagatattcgccagcatgataacagcaaacaggaatggagtgatgaggaaatcaagaaactttatgaaacccatgagaggcttcttgattttgtttccttattctgttttgttccaagggctaaatacttgccccttggtcctactagggccatcaatcctcatgcctacaccaatgagactgtgtttgttcaggagagggatgaggaagctctcaagtacctcaaggacatcaagtggaacaatcacttcatgaaggtgaatcccgggaatgctccattggtagtggggcaattacttgatgatgaatgccctgaagattttatcaagggtttgatcctctctgttcgttctctcctccctattgagcctttggttgatgaatgtgagaagagcaacaacaatcctgagcatttccttattaccaacccattttacgactctcgtgttgtgggtaaatattttgaaaagcgggatcctacacttgctgttgttgcttacagacgtgggcagtgtgacgatgaacttattaacgtcactaacaagaattcgttattcaagctgcaagctaggtatgtggttgagagaatggatggtgatctgtgggataaagttcttcagcctgagaatgaatatagaaggcaactcattgaccaagtggtttcgactgcattacctgagagcaagagccccgagcaagtgtctgctgctgttaaggctttcatgactgctgacctgccacatgaactgattgagcttcttgaaaagattgttcttcagaattctgctttcagtggaaattttaatctgcagaacctgctcatctcgactgctatcaaagcagatccatctagagtcatggactatgtcaacagacttgataacttcgatgggcctgctgttggagaagttgctattgatagcatgttgcctttatattgcttgcccaatattgctttcatgcactga

SEQ ID NO: 116818 - DNA, 2259 bp, Zea Mays
ccggcgtccttctagttcttcccttcgcctccgccggctgccactccctcctgtcttgctcactctcgctcccaactgccaccctgtttcccttctcccctgccccgccgttcccactccgcacccgcgcgccgcggcagcttagcttgccgcgagccctgccctgccctgccctgccctaccacccggcgccatcctgacctgtgtgtgctacggcgaggcagcaggagctcgcgctcagctcggtaggttgatgagctagcgacgacggccagtccgcccgaggcagcgtcgcgtaggggcggacgaggcgtctcaacggcaatgagggtgtacatcacggcgacggcgacggcgggcgaaggcgacgcgacgaagcccaaggcgccgccgccgcatcagcagcagcagcagcaggcgcggcgcgggtgccgctcggccgccgccacggggctcctcgccggtctgctcctcttccgcgccgcgctgctcgccatcgaggccggcgcctccctctgcccttccacggcggcagggtgcctggactggcgagcggggctggggcgatggctctacggcgacggcggcgacgcgacggaggaatttatggaggaatggaggcgtcgcagcagggaagccaccctgctggaccctgtggtggtggaagcggcgccggactccatggacgcgctcttggcggagatggccaccatgctggcgtcctacgaccgggttgacgtggaagccgtggcgatcaagatgatggccatgctgtcgaagatggaccggaaggtaaagtcgtcacggacgcgggcgctgctgaaccggcacctggcctcgctgggcgtccccaagagcgcgcactgcctcgcgctgcggctggccgaggagttcgcggtgaacgcggcggcgcgctcgcccgtgccgccgccggagcacgcaccgcgcctcaccgacgcctcgcgcctccacgtggcgctcgtgaccgacaacgtgctcgcggcggccgtcgcggtggcgtccgccgcgcggagcgccgccgacccggccaggctggtgctccacgtgctcacggacaggaagagctacgtgcccatgcactcgtggttcgcgctgcaccccgtggagcccgcggtcgtcgaggtcaggggcctgcaccagctcgcctggcgcgacgccggcgccgtcgcctccgtcatgcggacggtcgaggaggtccggaggagctcgctggattggtatcgacgacagtgcggtggtgggtcgtcggcggaggagaccaggcccagcgcgttctcgctcctcaactacctcaagatccatctcccggagctcttccctgagcttggcagggtggtgcttctggacgacgacgtcgtggtgcgcgaggacttggcagggctgtgggagcaggacctcgacgggaacgtcatcggcgcggtcggcgctcacgaaggcggcggcgtttgcgtcgacaagaccctcggcgaccacctgaatttctccgaccctgacgtgtccggctccggcccactacacagctcgcgatgcgcgtggtcgtggggcgtcaacgtcgtcgacctcgacgcgtggcgacggacgaacgtcaccgagacgtaccagttctggctacagaagaaccgggagtcgggcttcaggctgtggcagatggcctcgctgccgccggccctgctcgcgttcgacgggcgcgtccaggcgatcgacccgcggtggaacctgccgggcctgggctggcgcgtgccgcaccccgacctcgtgcggctctccgccgtcctgcacttcagcgggccacggaagccgtggctggaggtcgcgttcccggagctgcggcagctgtggctcgcccacttgaacgcgtcggacagtttcttacagggatgcggtgtggtcgaatggcagtagatggggtacggacgggaacagcagagcatcagagttgggaggagacgtacagtgatttggtccaggtccaggtccaggtcttcaggatcacggattttaactggggccgccgggagagggaagtaggtgttgcctgcagtctctcctggccttcgggttctacacgcagtccacatatccacattaatctgtacaactgctcgtggtttttcttaagccaatataacattaccacgtccaacgttcacaaacgaatgggtatagagcatttccaatatttatgtaaataactccctaaatatgaatttaataatttttcaagaaaaactcttctct

SEQ ID NO: 116819 - DNA, 2019 bp, Zea Mays
ccggcgtccttctagttcttcccttcgcctccgccggctgccactccctcctgtcttgctcactctcgctcccaactgccaccctgtttcccttctcccctgccccgccgttcccactccgcacccgcgcgccgcggcagcttagcttgccgcgagccctgccctgccctgccctgccctaccacccggcgccatcctgacctgtgtgtgctacggcgaggcagcaggagctcgcgctcagctcggtaggttgatgagctagcgacgacggccagtccgcccgaggcagcgtcgcgtaggggcggacgaggcgtctcaacggcaatgagggtgtacatcacggcgacggcgacggcgggcgaaggcgacgcgacgaagcccaaggcgccgccgccgcatcagcagcagcagcagcaggcgcggcgcgggtgccgctcggccgccgccacggggctcctcgccggtctgctcctcttccgcgccgcgctgctcgccatcgaggccggcgcctccctctgcccttccacggcggcaggaatttatggaggaatggaggcgtcgcagcagggaagccaccctgctggaccctgtggtggtggaagcggcgccggactccatggacgcgctcttggcggagatggccaccatgctggcgtcctacgaccgggttgacgtggaagccgtggcgatcaagatgatggccatgctgtcgaagatggaccggaaggtaaagtcgtcacggacgcgggcgctgctgaaccggcacctggcctcgctgggcgtccccaagagcgcgcactgcctcgcgctgcggctggccgaggagttcgcggtgaacgcggcggcgcgctcgcccgtgccgccgccggagcacgcaccgcgcctcaccgacgcctcgcgcctccacgtggcgctcgtgaccgacaacgtgctcgcggcggccgtcgcggtggcgtccgccgcgcggagcgccgccgacccggccaggctggtgctccacgtgctcacggacaggaagagctacgtgcccatgcactcgtggttcgcgctgcaccccgtggagcccgcggtcgtcgaggtcaggggcctgcaccagctcgcctggcgcgacgccggcgccgtcgcctccgtcatgcggacggtcgaggaggtccggaggagctcgctggattggtatcgacgacagtgcggtggtgggtcgtcggcggaggagaccaggcccagcgcgttctcgctcctcaactacctcaagatccatctcccggagctcttccctgagcttggcagggtggtgcttctggacgacgacgtcgtggtgcgcgaggacttggcagggctgtgggagcaggacctcgacgggaacgtcatcggcgcggtcggcgctcacgaaggcggcggcgtttgcgtcgacaagaccctcggcgaccacctgaatttctccgaccctgacgtgtccggctccggcccactacacagctcgcgatgcgcgtggtcgtggggcgtcaacgtcgtcgacctcgacgcgtggcgacggacgaacgtcaccgagacgtaccagttctggctacagaagaaccgggagtcgggcttcaggctgtggcagatggcctcgctgccgccggccctgctcgcgttcgacgggcgcgtccaggcgatcgacccgcggtggaacctgccgggcctgggctggcgcgtgccgcaccccgacctcgtgcggctctccgccgtcctgcacttcagcgggccacggaagccgtggctggaggtcgcgttcccggagctgcggcagctgtggctcgcccacttgaacgcgtcggacagtttcttacagggatgcggtgtggtcgaatggcagtagatggggtacggacgggaacagcagagcatcagagttgggaggagacgtacagtgatttggtccaggtccaggtccaggtcttcaggatcacggattttaactggggccgccgggagagggaagtaggtgttgcctgcagtctctcctggccttcgggttct

SEQ ID NO: 116820 - DNA, 2062 bp, Zea Mays
atatagtagaccagcagctagtaaggctagctggaaagctcactaccctgtaaacctccagcaagcttcagctagctcattgcctccttgcaaggagtgtggagatggctactaggccggctctcgtgttcgtttgctgctgcctcttgctggcgtacgccgcggcagcgcgtgtgctcgacgagggcgagccttttggccgcctgaagaatgctgcgcgccgtctccgcgatggcgagcctttcggcggccggaaggaccccgccgacccggaccactctcccggctcacacgggactccgccctgcccgccgtccatcggcacctcgccgaccacgccaaccacacccggcggcggcagctactacccgccttcgccagacatcggcacttccccgaccacaccgacagctccaggcggtagcggcgggtacgatgctcccccgtcaccgtccagcgacacctccccgacgacgcccggtggtggctactacggtcccccctcgccatcatctgacacctccccggtgacgcctcctggcggtggcggcggcggatacagtgctcctccttcgccgtccagtgatacctccccatcgacgcccggaggtggtggtggctgtagtgtccccccttcgccgtccagtgatacttctccaccgacacctggaggtggtggtgggtactatgggcctccctcgccgtcctctgacacctccccgaccacgcccggcggtggtggtactggagggtgtagtgctcccccttcgccgtctagtggcagctctccatcaacgcccggaggtggtggtgggtactacggacctccctcgccgtcctctgacacctccccgacgtcgccgcctggcggtgatggtggagggtatagtgctcccccttcgccgtccagtgacacctctccatcgacacctggaggtagtgatggagggtgtagcgcaacccctccgccgtccagtggcacctctccgtcgacgcctggaggtggtggtggagggtgtagtgctcccccttcgccatccagtgacacctctccatcgacgcctggtggtggtggtgggtactatggccctccttcgccgtcttctgacacctctccgaccacaccgtctgcgcctagtggtggctactacggacctccgtcgccgtccagtgacacttcgccgaccactcctggcggcggctactacggccctccatcgccgtccagtgatacttcccccacaacccctggcggcagtggcggcggcggctactatggccccccttcaccgtcctctgaaacctccccgaccacgcctggcggcggtggtgggtacacgccgactccacaagtgccgttaccgcctatcagcacatcaccaccgttctctccactgacgccaacaccgactaccccaacgccgtacgaccccaacacgccgcccttcacgggcccatgcacctactggatgatgcacccgggcgtgatctggggcctattcggtttctggtgcccgctggtgcggctgttcggcccgagcgcggcggtgccgttcgggcacgacctcaccgtaccggaggcgctggcgaacacgcgcgaggacggcatgggcgcgctctaccgcgagggcacggcgtcgttgctcaactccatggtgaacaacaggttccccttcacgacgcaggaggtgaaggacgcattcggtgctgcgctcaactctggtgacgacggcgccgccgcggcacaggcgcgtctgttcaagaaagcaaatgaggggcacgtcatcaggcagaactagctaggcggcagtcgccgtgtgtatgtccgcaatgcaactatgtgcgcggcgagcatgcagggcttgcttaggatctgcacgtatgtgtttgatgatggggtgaagttatcatcacttatctcgatacctctttggatctatcttgtatcagttgcgcatgtggtcttaactcctaaagccctgtttcgatacttctggcttattgtttatgaatggttaataattagtcagcaaataattagctagcaaaaatttgttagtgt

SEQ ID NO: 116821 - DNA, 1550 bp, Zea Mays
atatagtagaccagcagctagtaaggctagctggaaagctcactaccctgtaaacctccagcaagcttcagctagctcattgcctccttgcaaggagtgtggagatggctactaggccggctctcgtgttcgtttgctgctgcctcttgctggcgtacgccgcggcagcgcgtgtgctcgacgagggcgagccttttggccgcctgaagaatgctgcgcgccgtctccgcgatggcgagcctttcggcggccggaaggaccccgccgacccggaccactctcccggctcacacgggactccgccctgcccgccgtccatcggcacctcgccgaccacgccaaccacacccggcggcggcagctactacccgccttcgccagacatcggcacttccccgaccacaccgacagctccaggcggtagcggcgggtacgatgctcccccgtcaccgtccagcgacacctccccgacgacgcccggtggtggctactacggtcccccctcgccatcatctgacacctccccggtgacgcctcctggcggtggcggcggcggatacagtgctcctccttcgccgtccagtgatacctccccatcgacgcccggaggtggtggtggctgtagtgtccccccttcgccgtccagtgatacttctccaccgacacctggaggtggtggtgggtactatgggcctccctcgccgtcctctgacacctccccgaccacgcccggcggtggtggtactggagggtgtagtgctcccccttcgccgtctagtggcagctctccatcaacgcccggaggtggtggtgggtactacggacctccctcgccgtcctctgacacctccccgacgtcgccgcctggcggtgatggtggagggtatagtgctcccccttcgccgtccagtgacacctctccatcgacacctggaggtagtgatggagggtgtagcgcaacccctccgccgtccagtggcacctctccgtcgacgcctggaggtggtggtggagggtgtagtgctcccccttcgccatccagtgacacctctccatcgacgcctggtggtggtggtgggtactatggccctccttcgccgtcttctgacacctctccgaccacaccgtctgcgcctagtggtggctactacggacctccgtcgccgtccagtgacacttcgccgaccactcctggcggcggctactacggccctccatcgccgtccagtgatacttcccccacaacccctggcggcagtggcggcggcggctactatggccccccttcaccgtcctctgaaacctccccgaccacgcctggcggcggtggtgggtacacgccgactccacaagtgccgttaccgcctatcagcacatcaccaccgttctctccactgacgccaacaccgactaccccaacgccgtacgaccccaacacgccgcccttcacgggcccatgcacgtatgtaaacgtaacccccctaagcccttgtacacaaaacccctggcacaccctaacgtatgcaacgtcgctcgtgttttctggcttt

SEQ ID NO: 116822 - DNA, 842 bp, Zea Mays
atatagtagaccagcagctagtaaggctagctggaaagctcactaccctgtaaacctccagcaagcttcagctagctcattgcctccttgcaaggagtgtggagatggctactaggccggctctcgtgttcgtttgctgctgcctcttgctggcgtacgccgcggcagcgcgtgtgctcgacgagggcgagccttttggccgcctgaagaatgctgcgcgccgtctccgcgatggcgagcctttcggcggccggaaggaccccgccgacccggaccactctcccggttcgaggcccacgagccacgacttccagtttcttcgtattctctcaactgacacgacgttgtgtgcgctctttccttgcaggctcacacgggactccgccctgcccgccgtccatcggcacctcgccgaccacgccaaccacacccggcggcggcagctactacccgccttcgccagacatcggcacttccccgaccacaccgacagctccaggcggtagcggcgggtacgatgctcccccgtcaccgtccagcgacacctccccgacgacgcccggtggtggctactacggtcccccctcgccatcatctgacacctccccggtgacgcctcctggcggtggcggcggcggatacagtgctcctccttcgccgtccagtgatacctccccatcgacgcccggaggtggtggtggctgtagtgtccccccttcgccgtccagtgatacttctccaccgacacctggaggtggtggtgggtactatgggcctccctcgccgtcctctgacacctccccgaccacgcccggcggtggtggtactggagggtgtagtgc

SEQ ID NO: 116823 - DNA, 3175 bp, Zea Mays
atggactggcctggtcgctgtgcgccctgtgcgggcttccgccccgaactggggcgggggcgggggcgggggcgaggtgttcgtgggtaagggtcgcgggcgttgtgcggctgggaggcggctaccgaggcgacggaaataaagcagtagtagacgagagagccacgatttataaagcgggttttgtgtgggtgtggctcgctgctcgcctctcctccactcctctcactgctcctcccacctcgcgtttgttcggcgggctcaggtggctgcttgctggccttgctgctgcttcagatccttatcccctccgctacatcgaggccgttcggagctgtcctttctgcttcggatgggagtggcggagcagtgcatggaggtgcggggcgcggcgaatcggaggtgatcccggtcatggggtagagtggagggggcggagtgtgtgtggtatggagccgtcccgtggcgccactggcggcgcgcggcggtggggggaggcggagaccgaggttgatgcggcggaggaagggagacgggcggaggacggcggcgaggtgagcctgcgggagtggctggaccggccgggccgggcggtggaggcggcggagtgcgtgcacgtgttcaggcaggtggcggaggcggtggccgtcgcgcacgcacagggggtggccgtgggcagcgcgcggccgtcgtgcttcgtcgtgtcgccgcccttcgcgcgcgtcgccttcatcgagtccgcctccggctccgacgcctcgggttcgtgctctggctccgacgcctccgaggacgccgacccggacgcctcgcctccgcggcgaggggacggcgccggacgcggcgaggagcgcgcggggaagtcgttcccgctcaagagcgtgctggccatggagctcaactggtacaccagtcccgaggaggcggacgacagcgccgctaccttcgcctctgacgtctatagactgggtgtgctcttgttcgagctgttctgcacattcgaaacaatggaggacaagatgcgggcaatggcgaatctgaggcaccgggtgttgccgccacagttgctgctcaaatggcccaaggaagcatctttctgccagttgctaatgcaccctgtgccagaaaccagaccgaagatgagtgaggtgctgcagagtgaattccttaatcagtcaaggaatagcctggaagaacgtgaagcggcacttaggttacgcgaagagatagaagaacaagaattattgctggattttcttcagcagttgcagaaaagaaagcaagatatggcagacagtttgcaggacactgttgctttttctctcttctgacatcaatgaggtactccaccagcagtctgcacttggccactgtgtgaacttctcaccagatttggataaagaggtgtgctctggaactgttgaagatcagagtgattgtggatccaggaagcgttttagacctgagctgcaaggcgttgatatggaggaaaataatcgtagtgtggaagaatgttcaagaacagtgccgtcctctgagttaatccaggaaaatgttctgtcaaaaagctccaggttgatgaagaacttaaaaaaacttgaaacagcttattttctaacaaggtccaagttggcgaagcaagttggcaaccagataaatagttgtaatcgagttgttaagaggactactggttcagctgttgggacagaagcaagttcaatagatgatttttctttggaaaggcaatatggtagaaggcaaagaggttgggtgaactcttttcttgagggattgtgcaagtacttgtcattcagtaagttgaaagttcgggcagaattgaagcattgtgattcactgaactcatcaaacttagtatgctccgtagggtttgaccgagatagagagttttttgcaactgctggtgtaaataagaagataaaagtgtttgagtataatatgattgtaaatgaacaccgtgatattcactatcctgtggtagagatgtctaatagatcaaaactgagttgtatttcctggaacagttatatgaagagccatatagcatctagtgattttgagggtatagtgcaggtttgggatgttactaggagtcaagtttttgttgagatgagggagcatgagcgacgtgtgtggtcggtggacttctcaattgtggacccaacaaaattggtcagtgggagtgatgatggatctgtgaagctgtgggatatgaatcaggctgggagtattggcactattaaaacaagggcaaatgtgtgttctgtgcaatttcaacctgatactgctcgctccattgccatcggctctgcagaccacaaaatttactgctatgatctacgtcacatacgagctccttattgtacactagttgggcacacaaagactgtaagctatgttaagtatctggatgcatcgacaatagtatctgcatctactgacaactcattgaagctttgggacttatcgatgagtccaggaaggataattgacagtccagttcaaacatttaaggggcatacaaatacaaagaacttcgttggcctttccatatctgacggttacattgctactggctctgaaacaaatgaggtttttgtgtaccacaaagaatttcccatgccagtgttggcctataaattcagcgtgacggaccctatatcagggcaggagattgatgaccagtcacagttcatttcatgcgtctgttggagagggcagtcttcaaccctactttctgcaaactccagcggcaacattaagatcttagaaatggactgaggattggagttgggcatctgctgagtctcagctataaatggactgacttcttaccaagttgtgtgcgtgtgaatttgtggcaacggagttgccaacggtgcgtggtgcagagttgggagaggtaggagtagctgtaacaggtttagcatggtttgataggattaaactagcgtggtagcaaaagtagcataaataggaaacagaattgaggtgtggggtagtactgcaaggaaaggttttgtacatcattggttcgaggtatacttgtacagccaatcaatccagtttttacctagcagcaccaggcttttgctcgtcgtagtgttacttgaaaggcaaaaagtataaagtggtctacatctgttgaatcagataa

SEQ ID NO: 116824 - DNA, 93 bp, Zea Mays
aggtctagtttgggaactccattttcccacgtgtttttcattttcccaagggaacatcatcagtatataaatatctttatatgtagctcatag

SEQ ID NO: 116825 - DNA, 2292 bp, Zea Mays
cctaattctaaaggaaacaaacattcctaacacagcctttaacccagctcgccgcccgcccctcgcggtaatgcggcgcctccactttgcgatgcccgcgtcctcgctcccctccccatcctcctcatctaccgtgctctccattccccacccgctcccaccgccgctcgcagatgccgcccaaggtggtcgccgtcgccgcgggcgaggcccacacactcgccctcacgggtgacgggcaggtgtactcctggggcagggggccgttcggtcgcctcgggaacggccgcgaggacgacaagctggtccccaccgcggtggcgcccgcggtctctgccagcgggacaccgcggcccaggttcgtcgccgtcgcggctggtgcctaccacagccttgcgctggacgatgaaggttcactctggtcatggggttacaatctctatggtcaacttggctatggggaccagaattccctttttccatgtttcgttgagcaatttcaggatttaggttctcctgaaacactgaatgatgaagaccagaacacacgtggtcgcacttgtttgaagctgtcttctgtcacagctggtggcatgatgtcgcttgccatagacagtttggggagcctttggatgtgggggagttgcccacagcagactgatgccggagagttttgtatttcaagtagctctatcccactacctgtgtgggatttccatggacacaccgttgttaaggttgcctgtggtaacgagcatgtagtagctgcagttagtgctggggagacctatactggaggtgaccttgtttgttacgcttggggaaataacaaccatggtcagttgggtctaggtgacaaggaaagtagatctcgtcctgtgcttatttcagcatttagtgaaggatcttcctgggaggtgtatgaaattgcatgcggagcttcccatactgcagtcctcgccaataagaagtccactgaccagatagaatctcggtgctggacatttggccttggtgacaaggggcagcttggccatggaaccacagccaccatttgctcaccacaacctgtcgatggattaccaaccggatccttccttatttctcttgactgtggattgttccacacaaccgtagtctcctctgatggagaggtgtggtgctggggaatggagagaggtcttggattgtgcccagatgctagcttttcgggagttgatgaaggggatgctttatatccaataagagttcagtctcctgagaccaatgggttcaagtttcttggtccagtgcagatcgcctgtggagctgcccacactgttcttgttgctggtgatgggtataggatgtgggcatggggcagaggccgcagtggtgtgcttgggagaggccagactgctgacagttacataccatgcgttgtgatgtggcctcctcttgatgagaactttcatgaggaccaaatgggaggatcaacatcaagagtgaatgatcacactagcactgagttggaacagaagctatctgctgcctcggaggagttacaattccttaggtcaaaactgacactcatggagagatatgccaatatacttcacatctcaatcttccgtaagccacttgatgaacgggcgctaccacgttcacttcaggaatcttccgtctttgatatcagaaaggaatttgagaacattttggatgcagcagatactgatgaacttaatcgtttagagatcttctaccgcagcatgctttctggcgttaaagacaagcttctgaagagaagagtacgagaaatggtccaacaatgcattatttcactcagcagggaggccaaaccctaaagataagtgaattggattattacacttgttaccggactgcaagtgggtacagtatcacctttggtctcactaaaattgcaaaaaaaaaaggtcaacccagtgtcttatctgtttcttcaaacatagtgagtagatctgtcctggcatcaagatcatcacctggccgaccattgcacgaagacagcattactcatactgacatgtaagcatatatgttgtttatgaaattctttatatgataaatgcatcctagataaattgaatcctgtgtaaaggatgtttctgtggattgtcatagacggacaagaatttatggacatatggttaaagtgttatcggaaaagccttaggcaagtagcagtttaaattataaatactagcaactgcataaatagcgtgggtagatagttttttttatcatggtgacatttgagattttttttatttg

SEQ ID NO: 116826 - DNA, 2134 bp, Zea Mays
gggcttcagtactcagtaatctgatgagaggtttcgtggcttctaattgcaggtgacgggcaggtgtactcctggggcagggggccgttcggtcgcctcgggaacggccgcgaggacgacaagctggtccccaccgcggtggcgcccgcggtctctgccagcgggacaccgcggcccaggttcgtcgccgtcgcggctggtgcctaccacagccttgcgctggacgatgaaggttcactctggtcatggggttacaatctctgtatcctttacacctcttgacttaatttctaactttgttagctgcaaatctttcaactgatattcctgtcattattgagtacgtcacttccttaactatttcacggatggtcaacttggctatggggaccagaattccctttttccatgtttcgttgagcaatttcaggatttaggttctcctgaaacactgaatgatgaagaccagaacacacgtggtcgcacttgtttgaagctgtcttctgtcacagctggtggcatgatgtcgcttgccatagacagtttggggagcctttggatgtgggggagttgcccacagcagactgatgccggagagttttgtatttcaagtagctctatcccactacctgtgtgggatttccatggacacaccgttgttaaggttgcctgtggtaacgagcatgtagtagctgcagttagtgctggggagacctatactggaggtgaccttgtttgttacgcttggggaaataacaaccatggtcagttgggtctaggtgacaaggaaagtagatctcgtcctgtgcttatttcagcatttagtgaaggatcttcctgggaggtgtatgaaattgcatgcggagcttcccatactgcagtcctcgccaataagaagtccactgaccagatagaatctcggtgctggacatttggccttggtgacaaggggcagcttggccatggaaccacagccaccatttgctcaccacaacctgtcgatggattaccaaccggatccttccttatttctcttgactgtggattgttccacacaaccgtagtctcctctgatggagaggtgtggtgctggggaatggagagaggtcttggattgtgcccagatgctagcttttcgggagttgatgaaggggatgctttatatccaataagagttcagtctcctgagaccaatgggttcaagtttcttggtccagtgcagatcgcctgtggagctgcccacactgttcttgttgctggtgatgggtataggatgtgggcatggggcagaggccgcagtggtgtgcttgggagaggccagactgctgacagttacataccatgcgttgtgatgtggcctcctcttgatgagaactttcatgaggaccaaatgggaggatcaacatcaagagtgaatgatcacactagcactgagttggaacagaagctatctgctgcctcggaggagttacaattccttaggtcaaaactgacactcatggagagatatgccaatatacttcacatctcaatcttccgtaagccacttgatgaacgggcgctaccacgttcacttcaggaatcttccgtctttgatatcagaaaggaatttgagaacattttggatgcagcagatactgatgaacttaatcgtttagagatcttctaccgcagcatgctttctggcgttaaagacaagcttctgaagagaagagtacgagaaatggtccaacaatgcattatttcactcagcagggaggccaaaccctaaagataagtgaattggattattacacttgttaccggactgcaagtgggtacagtatcacctttggtctcactaaaattgcaaaaaaaaaaggtcaacccagtgtcttatctgtttcttcaaacatagtgagtagatctgtcctggcatcaagatcatcacctggccgaccattgcacgaagacagcattactcatactgacatgtaagcatatatgttgtttatgaaattctttatatgataaatgcatcctagataaattgaatcctgtgtaaaggatgtttctgtggattgtcatagacggacaagaatttatggacatatggttaaagtgttatcggaaaagccttaggcaagtagcagtt

SEQ ID NO: 116827 - DNA, 913 bp, Zea Mays
atattcatcagggtactctacccggtcccggttggacacttggacagcccagcagccaatggcgttggtataaaacacaggtcgcatcgccgctacaagtcgcgcgcacacgataccattatattccatggaccacgacgcgtcacggcaagaagcggcggcggccgtgtggcgcggcacggtgcgcgcggtggcgtcggggccgacgcccgacgaggcgtgggcgctgctgggcgacttctgctcgctgcaccggtgggtgtccacggtgcgggcgtgccggcgcgtggaggtggagggcgcggcggcggcggagccggagccggaggggcgccccgcccccggctgcgtgcgctactgcgagggccccgtgaacatggccgcgccgggggagctcgtgggctggtccaaggagcggctcctggagatggaccacgcggggcggtggtacagctacgagctgctggagagcaacaagggcttcggcaggtaccgggccaccgtgcgggtggagcatgacccggcgggatgcgctgtcaggtggtcgttcgaggccgacccggtgaagggctggacgctcgacgggttcctggggttcctggagaaactcgcgcgtggcgtcgcccagcggctccaagaggagatcatggtgaagccgtgaagtcgcctaggattggtttgtggccgcgcgttcgtttacacttattttcaatccatatggatatggattgaagtgaattgatacagattgaaagatattttgatttactagaaattgaaactctctcaaccctctcaatccatatgaattaggatagaaccaaataagccctaattatacttccgtttcacataaagataagaactcgcaaagttcctttttttaaaaaaaatacaaaacgcatacatgtct

SEQ ID NO: 116828 - DNA, 4522 bp, Zea Mays
atggagacgctgagccgaggcctgcacggcatgtcgagccccgacgccaccccctacttctcgggcgcgtcgtcgcggcgccgcagcggcgccgacgaggtggacgacgaggaggcgctgcagtgggccgcgatggagcggctgccgtccttcgagcgcctgcgcacgggcctcgtgcggccggcggacgcttccgacggcggcagcgacagcggccgccgcggccggaggcgccggcacgcgcatgaggaggtggacgtgcgcgcgatggggctcgcgcagcgccaggccttcgtggagcgcgtgttccgggtcgccgatgaggacaacgagcgcttcctcaggaagctccgcgcgcgcatcgaccgcgccggtatccagatccccacggtggaggtgaggttccggggcgtcaacgtgcaggcggagtgccacgtcggcacccgcgcgctgcccacgctggcgaacgtctcgctggacgtggccgactcgctgctgggacgcgtcggggtcaagctcggcaagaggaagacgctccacatcctcaaggacgtctccggcgtcgtgcgcccgtccaggatgacgctgctgctcggcccaccgtcgtccggcaagacgacgctgctgctggcgctggccggcaagctggaccccactcttgaggtcagcggggaggtcacctacaacggctacgggctggacgagttcgtgccgcagaagacggcggcgtacatcagccagaacgacatccacgacggcgagatgaccgtcaaggaggtcctcgacttctccgcgaggtgccagggtgtgggccagagatacgagctgctcaaggagctggcgaagaaggagaggcagcagggcatatatcccgacccggaagtcgacctgttcatgaaggcaacttcagttcatggagccactctgcagacggactacattctcaggattctcgggctggacatgtgcgcggatatcatcgtcggcaacgagctaatgcgcggcatctccggcggccagaagaagcgcctcacaacaggggagatgctggtcggcccgaccaaggtgctattcatggacgagatctccacgggcctcgacagctccaccaccttccagattgtcaagtgcatccagcagatcgtccacctgggcgaggccaccgtcctggcctcgctgctccagcctgcgccggaggtcttcgagctcttcgacgatgtcatgctgctgtccgaggggcagattgtctaccagggcccccgggagtacgtgcttgagttcttcgaggtgtgtggcttccggtgcccgcagaggaaaggtgtccctgatttccttcaggaggttacatcaaaaaaagatcaggaacagtactggatacaaaatgaaaaaccatatcactatgtatcagtacctgaatttgttgcaaagttcaagaaatttcatatggggaagagcctcaagaaacaactttcggtgcctttccacaagaggaaaatacacaaatctgctttggtcttctctgagaagtctgtctctactttggagcttctcaaggtctcatggtccaaggaatggcttctcatgaagaggaattcatttgtgtacatcttcaaaatagttcagggaattctggttgcgctagtagcgtcaacggtgttcttgcgtacacaaatgcatacaagaaatgaggaagatgggcaaatctatataggagcacttctttatgtcatgatagttaacatgttcaatggttttgccgagtcatctattcttttggcaagactccctgtactgtacaaacatagggattttttgttctatagaccatggactattgtacttccgaatgttctaatgagagttcctgcctccatattcgagtcaataatttgggtagcagtgacttactacagcattggctttgcccctgaagctagcaggttctttaaacatttagttgccgtcttctttatccagcagatggctgcgggtctcttcagacttgtcactggcttatgcagaacagttatcataactaacacggcaggatcacttgcagtccttttcatgtttacgctaggaggattcatcctaccaaaggatgcaatttcaaaatggttgatatgggcctattattgttcacctcttacttatgcatacattgctcttgcctctaatgaaatgcactctccaaggtggatggaccaatttgcacctgatggtaggagattgggagttgcaattttagaaaactcaagtatcttcaccggcaaggaatggtactggattgctactggtgcacttttaggtttcactgttctgttcaatgtgttattcacactgtcacttatgtacctgaatcctgttggaaaaccacaggcaattctgcctgaagaaactgatacaagtctagaggacagtgaggaaggaaagaagatgacagatataacacagagaacgaaaatcccgacaccagaacctttatcctcaaattctatgatcaccttggataaggtacttgaacagttacgtggccagtccccgaatacttctgatagatcacacatgaatgcttctgtcagaattactccaggaagagggatgattcttccattcgaacccctctccatgtccttcaacgagataaattactatgttgacatgcctgcagagatgaagagtcaaggagtaaccgcggataagcttcagctgctgtcagggatatctggggcttttcgacctggtgttctcactgctcttatgggtgtgagtgggtctggaaagactactctcatggacgttttatctggaaggaagactggaggatatattgaaggagaaatttatatatctggttaccctaagaaccaagaaacatttgccagaatatcaggttactgtgaacaaaatgacatccactctccacagatcactataagggagtccctactcttttctgctttcatgcgccttcctaaggaggtcactgaccaagaaaagaagatattcgtggatgaagttatggaactggttgagcttaacggtcttaaggatgctattgtgggtctccctggtgtgaacgggctctcaacagagcaaagaaagcgattaacagtcgctgtagagcttgtggcaaacccctcgatcatctttatggatgaaccaacttcaggtcttgatgcaagggctgctgcagttgttatgagaactgttcggaacaccgtcaatactggacgaactgttgtctgcactatccatcaaccaagtattgacatttttgaagcttttgatgagctgcttttaatgaaaagaggaggccagatcatatactctgggccactgggtaggaactcacataaagttgttgaatactttgaggcagttcctggaatcccaaagatcaaagaggggtgcaaccctgctacatggatgttggatgtaacctcagcttctacagaggttcagttgaatattgattttgcagagcattacaagtcatcaactatgcatcagcggaacaaagcattagttaaagagctgagtaagccgcctcctggttccagtgacctctacttccccactcaatactcgcagagtacctttgatcagttcagattctgcctctggaagcaatggttgacttactggagaagccctgactacaaccttgtcagaatgttctttgcattgtttactgccttgctgctggggattatattttggagggttggcagtaagatgaagagttcatcagaccttttgatcatcgtcggatcaatgtattttgctgtcgcatttattggctttgaaaactgtataactgctcaacctgttattgccgtggaaaggacggtcttttacagagagcgtgcagctggaatgtactcggctataccctatgctttctcgcaggttgttgctgagataccatatgtgttcgtcgagagtgtcatatacactgttatcgtgtacccgatgatgtctttccagtggaccctagcgaaattcttctggttcttctacatttcgttcctctcgttcctctacttcacttactatggtatgatgggtgtcgccataacgccgaaccctcaggtggcttccatatttgccgcttccttctacactctctttaatctcttctcggggttcattgttccaagatcgagaatcccggtgtggtggatctggtactactggatctgtccagtggcatggacagtctatgggctgattgtgtcgcagtatggcgatgtggaggatttgatcaaggtgcctgggaaacccgatcagcaggtcaaagctttcatcaaggactactttggctacgatccggacttcatgggcgtagtggcagcggtgttggctggctttactgccctctttgcttttatatatgtttactgcataaagagatttaatttccaacagagatgatagtacaagtctcagtttgccatgtgccttgagggtgtatgttcgataaaataaaactatatatatctatctagactctaaagtt

SEQ ID NO: 116829 - DNA, 926 bp, Zea Mays
catctgggaggagataagagatatgctagacaaacggctcatgggagaacggaggaggcctcgattctccaaggttctccttgtcgacttcgcgcgcgaatcggaattcgtcacatttttccagtatctccttgatcatgttcatgatttttccaggctatggtcacttcagggtcagaagtcatgctaccagcatcagcaataagctttcctgtgctcaccagcacgaagaaggttttgaaaacatcacccgccgatatctccccagactgtgctagcttcccaccataccagaagtccagtgcccatgacaagaacgagaggcaaggtgacaaccctgtggtgatccctgctacccatgatttcttccttgcttttttcaagggttcctcttgcgcatgctcgaatagctgaagaacctttgatgaacatccaaaggaggttaccatcctgtggttgtaaacagcttctatggcaatctgggtgctttgatgctgagcctttgccaagtcccttgacacatttgagagaaccattttttttgcataataacacatcattgtagatggctgtacagctatcatgacaagagcaagtttccaagctaccatcaggcccattgtcactgcaattataattccagaagctgtttgaagcagtaaggatattctgtctgcaacaagggttttgacaagagaagcctcattgcttagccgagagcacaatgcaccgcttgagttagtttcttcatcaaaccatgctgcctcaaaagttaatatcttctcaagtacttggacccggatgcgcctaacaagatgctcccccatgtatgcaaaattgtagtgctgcaatagattaacaacaatggataccaaggacagtgagcagaagatcaaggcatagcgtctgataattgcattcatctc

SEQ ID NO: 116830 - DNA, 2489 bp, Zea Mays
caggcagcggcagcctccacttgctccatgtctccatccaaccctcttccgccgccgggcgagacgcgcgtcggctgctcgttgccctcaccagtcacccctcaggccatgggcgggggccccgctcgtcatgtggccatgcgcgcccttcgcgctcgcttcctctcggtaacttcgcggtcgacctccccgctcccaaggcccgccaccacaccggctaaagtcttagctaacgccagcagccccacgtctccgcatcgccgttaaataacatcgccatctcgcgttgctcccgcactaaccacgccatcacttctgttaactacattcgcagcggcagcgggagggaggaccagcggcagcgtcgacctggtggtggtgcgcttcgggttcggcgaagggcgacatggagagcacgctcaaggggatacgcggcagcgatgcgccgtgcgttctggacctggacgacgcggccaccgtggcgggcggcgtcgaggacacctacggcgaggatcgcgccaccgaggagcagctcgtcacgccctggaccgtctccgtcgccagcggttacaatctgcttagggatccccgttacaacaagggacttgcgttcacagagagggaacgtgagacgcactacctccgtggccttctgccaccagctattgtatcccaggagctccaggagagaaagatcatgaataatattcgacaataccagttgcctttgcagcgctacatggcactcatggatctccaggaagggaacgagaggcttttctacaagttgctcattgacaacgtcgaggagttacttccaatcgtgtacactccaaccgttggcgaggcctgccaaaaatatggatccatatttagtcgccctcagggtctttatatcagtttgaaggagaagggaaagatccttgaggtgttgaagaactggccagagaggagcattcaggttatagttgttactgatggtgaacgtattttggggcttggagatctcggatgccaggggatggggattcctgttggtaaactttccctttacactgccctgggaggagttcgtccatctgcttgcttgccgatcacattggatgttggtacaaataacgaggagctgcttaatgacgaattttacattggcttgagacaaagaagagccactggccaggagtacactgattttctgcaagaatttatgactgctgtgaaacaaaactatggggagaaagttcttattcagtttgaggattttgccaaccataatgcttttgatcttcttgcaagatatggcaccactcaccttgtattcaatgatgatattcagggaacagcttctgtggttcttgctgggcttattgcagcacaaacattacttggtggttcattggcagatcacacttaccttttccttggtgctggagaggctgggacaggtatagctgaacttatagctcttgagatctcacgtcagacgaaagctcctatagaggagtgccgcaagaaaatctggcttgttgattcaaagggcttgattgtcagtacacgaaaggagtcccttcaacacttcaagaaaccatgggctcatgagcataaaccactcagcaacctcttagatgctgttaatgctatcaaaccaacagtgttgattggcacatccgggaaggggcaaactttcacaaaagacgttgttgaagcaatctcctcatttaacgagagaccaatcattcttgccctatcgaacccaacatcacaatctgaatgcacagctgagcaagcttacacatggagcaagggacaagcagtgtttgcgactgggagtccatttgatcctgtggagtacaatggcaagatacatgttcccggacaggcaaacaatgcctatatcttcccagggtttggcctcggcgtggtgatgtctggagctatccgcgttcatgacgacatgcttctggcagcatcggaggctctggcccagcaggtcacagaagaaaattttgagaaggggctgatttatcctcccttctcaaacatcaggaagatctctgcccacattgcagccagcgttgcagcaaaggcatatgaacttggtttggcaagtaggcgccctcggccaaaggacctggtgaaatatgcagagagttgcatgtacagccccatctaccgcaactaccgttgaattcggatcaactccagttatgtgcaaatcagcagcagctattccgcagcgtttatctcttgcgatgtcatgtaaatcagctccggttagccttttggatgctagtcagtcatggtgctggtgccgtccttccggacaaggataaatttggaataaagtttgagtcgacgattcctccctcggtactgcgtgttcacctgaacgtttttttgcttcacgcagttgctgttgttttcaacaagtgcttggttgtatgcgtgaaggtaagtaggtaacaccaggaaaggttcttctttttttc

SEQ ID NO: 116831 - DNA, 2375 bp, Zea Mays
agaagatggaatcttctagagaatggtaaaaaatggaatttagaggtatataaagagaatccctccggttaatcattgatcacccaagccagtggagccttggcctcgaacagaatagaaccaaccaatcgcgcgggcgcagacagtcggcttccaccaaccacgttgccagcaggcagcggcagcctccacttgctccatgtctccatccaaccctcttccgccgccgggcgagacgcgcgtcggctgctcgttgccctcaccagtcacccctcaggccatgggcgggggccccgctcgtcatgtggccatgcgcgcccttcgcgctcgcttcctctcgcggcagcgggagggaggaccagcggcagcgtcgacctggtggtggtgcgcttcgggttcggcgaagggcgacatggagagcacgctcaaggggatacgcggcagcgatgcgccgtgcgttctggacctggacgacgcggccaccgtggcgggcggcgtcgaggacacctacggcgaggatcgcgccaccgaggagcagctcgtcacgccctggaccgtctccgtcgccagcggttacaatctgcttagggatccccgttacaacaagggacttgcgttcacagagagggaacgtgagacgcactacctccgtggccttctgccaccagctattgtatcccaggagctccaggagagaaagatcatgaataatattcgacaataccagttgcctttgcagcgctacatggcactcatggatctccaggaagggaacgagaggcttttctacaagttgctcattgacaacgtcgaggagttacttccaatcgtgtacactccaaccgttggcgaggcctgccaaaaatatggatccatatttagtcgccctcagggtctttatatcagtttgaaggagaagggaaagatccttgaggtgttgaagaactggccagagaggagcattcaggttatagttgttactgatggtgaacgtattttggggcttggagatctcggatgccaggggatggggattcctgttggtaaactttccctttacactgccctgggaggagttcgtccatctgcttgcttgccgatcacattggatgttggtacaaataacgaggagctgcttaatgacgaattttacattggcttgagacaaagaagagccactggccaggagtacactgattttctgcaagaatttatgactgctgtgaaacaaaactatggggagaaagttcttattcagtttgaggattttgccaaccataatgcttttgatcttcttgcaagatatggcaccactcaccttgtattcaatgatgatattcagggaacagcttctgtggttcttgctgggcttattgcagcacaaacattacttggtggttcattggcagatcacacttaccttttccttggtgctggagaggctgggacaggtatagctgaacttatagctcttgagatctcacgtcagacgaaagctcctatagaggagtgccgcaagaaaatctggcttgttgattcaaagggcttgattgtcagtacacgaaaggagtcccttcaacacttcaagaaaccatgggctcatgagcataaaccactcagcaacctcttagatgctgttaatgctatcaaaccaacagtgttgattggcacatccgggaaggggcaaactttcacaaaagacgttgttgaagcaatctcctcatttaacgagagaccaatcattcttgccctatcgaacccaacatcacaatctgaatgcacagctgagcaagcttacacatggagcaagggacaagcagtgtttgcgactgggagtccatttgatcctgtggagtacaatggcaagatacatgttcccggacaggcaaacaatgcctatatcttcccagggtttggcctcggcgtggtgatgtctggagctatccgcgttcatgacgacatgcttctggcagcatcggaggctctggcccagcaggtcacagaagaaaattttgagaaggggctgatttatcctcccttctcaaacatcaggaagatctctgcccacattgcagccagcgttgcagcaaaggcatatgaacttggtttggcaagtaggcgccctcggccaaaggacctggtgaaatatgcagagagttgcatgtacagccccatctaccgcaactaccgttgaattcggatcaactccagttatgtgcaaatcagcagcagctattccgcagcgtttatctcttgcgatgtcatgtaaatcagctccggttagccttttggatgctagtcagtcatggtgctggtgccgtccttccggacaaggataaatttggaataaagtttgagtcgacgattcctccctc

SEQ ID NO: 116832 - DNA, 288 bp, Zea Mays
atgggagagctttcaacggttctggaggtggcggcggcgggagagctttcaacggtgtcgtacgaggcgacgacggagatgctagggagtgtgaaagtgtgtagtcgtcgtctcctgaaccggatctacggcctcacgttcgccgcgacggctagaggatgcgggaggttgaggccgacaacgggaggttcctccaatggcagatgcgtgcgggaggttgaggccgacagcgggaggttcctccaatggcagatgggaggcgctgcagatcaagttctcgacgactga

SEQ ID NO: 116833 - DNA, 1874 bp, Zea Mays
gtccagtgaaccagtcaccaactcccgtggcagtgataccgttgactgctgagctgtgggcctgaagccgaggggcaaacgcaacgtcgccgatgcggaagccggcggcactggtggtttctacggcggttttcgcagccgcagccgtagtcgccgtgatggcacgccagaggttgcgggaagcgaggcgatgggcacgcgcaggcgccgtgctgcgggacctgcaggagcggtgcgcggcgccggtggagcggctgcggcaggtggcagacgcgatggtcgcggagatgcgcgcggggctggcctccaacgactccgagggagatagcgggagcagcgtcctcctcaagatgctcgtaacctacgttgactccctaccgtccggggacgagaaagggctattttatgctcttgaccttggcggaacaaactttcgtgttttacgaattcagtttgggggcaaggaacaacgaatagtcaagcaagaatctaaaacggtatccattcctcaacatttaatgtccaggggatcaaatgagctgtttgattttattgctgctgctttagcgaagttcattgcctctgagggtgagggcttttatcttcctgagggcatgcaaagacaacttggttttacattctcctttccagtgaagcaaaattcagttgcatctggcactcttatcaaatggacaaagggttttgcaattgatgaaatggtaggaaaggacgtagtggcagaattaaacaaggctatcaaacgccaaggagttgatatggaagtcacagtactggtcaatgatacagtagggacattggctgctgggagatatgtggataatgatactgttgctgcagttatactgggtactggcactaatgcagcgtacatagaacatatggactcaattcctaaatggtgtggcccacctcctgagtctggaaacatggtgataaacatggaatgggggaactttaggtccacccaccttccactgactgaatttgatgtagccttggatgcagaaagtttgaaccctgatgaacagatttatgagaagttgatctctggcatgtatatgggggaaattgtccgaagggtcttgctaaaaatggctcaggatgcttctcttttctcagataatgtacctctggaacttgaggtcccatatatccttagaacatatcacgtgctgatgatgcatcaagacacatcgcctgatctcagaacggttggcaacaagctgaaagaagtcttcaggatagaagacacctgtttcaaaacaaggaaattggtagtggatgtctgcgaggttgttgccagtcgcgctgcacgacttgctgctgctgggatacacggcatcctcaaaaagcttgggcgagacgttgccagcccagacaaacaaaagacggtgattgctgtggatggcggagtttacaagcattatactttcttcgcccagtgcatggagagcactcttagagacttgcttggggagggagtggcgtcctctttagtgataaaacttgccgaagatggctcaggcactggagcggcgctcttgtcagcctcctattctcaacgtctccaggccgtggatgattaatttctgcttgtagttccttcagattctgaaggtatagcaggtatacaattgctccagtggatatttgtctataacggttataacattcaactgccacattcttttttctgtcaggcctgtgctcctgcagtgcccatttttaaggggttgtacacgtcacttaagactccctttcttcttttccttaatataacgcctctgttgtgtatccgacgaagagaaaacctacaatgcctattcagctatagaaaatttggttcaaagtta

SEQ ID NO: 116834 - DNA, 1225 bp, Zea Mays
gtccagtgaaccagtcaccaactcccgtggcagtgataccgttgactgctgagctgtgggcctgaagccgaggggcaaacgcaacgtcgccgatgcggaagccggcggcactggtggtttctacggcggttttcgcagccgcagccgtagtcgccgtgatggcacgccagaggttgcgggaagcgaggcgatgggcacgcgcaggcgccgtgctgcgggacctgcaggagcggtgcgcggcgccggtggagcggctgcggcaggtggcagacgcgatggtcgcggagatgcgcgcggggctggcctccaacgactccgagggagatagcgggagcagcgtcctcctcaagatgctcgtaacctacgttgactccctaccgtccggggacgagaaagggctattttatgctcttgaccttggcggaacaaactttcgtgttttacgaattcagtttgggggcaaggaacaacgaatagtcaagcaagaatctaaaacggtatccattcctcaacatttaatgtccaggggatcaaatgagctgtttgattttattgctgctgctttagcgaagttcattgcctctgagggtgagggcttttatcttcctgagggcatgcaaagacaacttggttttacattctcctttccagtgaagcaaaattcagttgcatctggcactcttatcaaatggacaaagggttttgcaattgatgaaatggtaggaaaggacgtagtggcagaattaaacaaggctatcaaacgccaaggagttgatatggaagtcacagtactggtcaatgatacagtagggacattggctgctgggagatatgtggataatgatactgttgctgcagttatactgggtactggcactaatgcagcgtacatagaacatatggactcaattcctaaatggtgtggcccacctcctgagtctggaaacatggtgataaacatggaatgggggaactttaggtccacccaccttccactgactgaatttgatgtagccttggatgcagaaagtttgaaccctgatgaacagatttatgagaagttgatctctggcatgtatatgggggaaattgtccgaagggtcttgctaaaaatggctcaggatgcttctcttttctcagataatgtacctctggaacttgaggtcccatatatccttaggtatggcattctagtaacagttcagtagtttgtactgctatttgg

SEQ ID NO: 116835 - DNA, 886 bp, Zea Mays
gcactccaatcccaacacagcaaccagcgcaaatcagcacgatgcgtcgcgagggccgccagcacgggtgggtgtttaccgtcgaccccagcctggtcgacgcggagggcaagtgccggtcccgcgcggtgcaggtggagggcgcggcggcggccaacggcggcttcgtcagggcgtcgaggaagcccaccaaccactccaagcccgccgtcggccgcgcgtacaagtccctgatcggcaagggagaggccgggtcgggcaagcagggcaggcacaagttcaagcacgacgaggtcaagatgtactccctctacctcgagggcgcccacgacgcctacgcggatgcgatgctggagttcgactcgtagtcctgctgatgacattgggtgtgtgaatgatgaggtgctggagttcgacatgcgccattgccaggaggtgtagagattcgatgtacgcttctgtgtctgaatccaaatgtgttttgtgatgtgagcagtgaataaacagactggttgtgacgagaatgtcgtgatccggaatgtatctcgaaccggaattcgatcaatcttcatatccaaagttcaaatctgtagagttggaattttatttagccgtgtgagtttccgtttttcggtcctggttattttcaaatgtaatactagcttagtagctttcgtgcagttaaaagacttactttctggcacaaagcgtattgtcattgtcaaacagtatatggcattggatatttaaattctctttaggaccttcgagtttaagaccacgtatcctcagctaagtacaaaggaccatctaatcaacaaaaatacatacacaactctaaggaccatttcaccatcaatcaacaaatacaaaaaacaaacaaaaa

SEQ ID NO: 116836 - DNA, 1181 bp, Zea Mays
ggagccatggggcggtcgccgtgttgcgacaagacgaaggtgaagcgggggccgtggtcgcaggaggaggacgccgtcctcaggagcttcgtccagaggttcggcaatgccggcaattggatcgccctgccgcagaaagcagggctgaaacgatgcggtaagagctgccgtcttcgctggctcaactacctccgcccggagctccggcacggcggcttcaccgacgaggaagacagcctcatcttgtctctctacggcgagattggaagcaagtggtcggtgatagcgtccagactccccggacggacggacaacgacgtcaagaactactggaacaccaagctcaagaagcggtacttggcgtcgtccacgtccacgggagaagcaaggccgccgccgccaccaccagctcctcctagcgctagcggcgacgacagcagcgccgccgccgacagccaccaggcccaacaagacgaaccctctcttccgctgacacctccagccttcagtaccgacctcgatacgacctttgccgttgtcgacgacgacatgctcctcttcaagtccgatcagctgtacgccgagctcgtgggtctggtcgagaagaaatcgcaggccacagctggcccgtccactggtggtggcggggacgaggctaattcgacggccacgccatcgtcctcgtcgtatggaactgggacaacaaacagtcccacggttagcagcagctcaggtagctgcgccctgtggcccacggacgtgcatggcacaacgctgctgtccgaacccaccagcagcagcctgttcgacgacgcttacggtgttggcgacgacgcgttcggagcggcggctctgcctgcgtactccttccaagaccttctggcctcgtcttacgacgatgctactgctgcggtggtgacgcaggagttgatgcagtactaccagtagtagtagtactgtaggcatgtggtcaatctggtgtgatgtgtaactggttaattagttactatatggccagtagagatggtaggtgctaggcagtggttagacgatgaagacggtgatgacggtaaaagacgtcaccatatggtcacaccccctgtcaaaagattacttgaggtcgagagcagaaagattaaatataatggaacctcgatattcatattcgaccaataaagaaa

SEQ ID NO: 116837 - DNA, 876 bp, Zea Mays
atgaagatgtcccggtcctccagcagcctcttcatgcagcagcagcaacggccggacgcgacgactctagcgggtgccgccggcgacgaagacgaagacgcgcgcggctgccggtcgctcaatgccaacggctcgatgatgaaaaccaccttcctgcagccaccacctacgtcgcccctgcgcacctccaccgtctcgccggcgaggatgtgcgtggtcctcgggtcggccccgcgcgagatgacgcaagtgtactcctcgcagtcggcgtactcgctcgcctgtttgcccagggttgcggcgacgacgccggccgacgaggaggcagcagcagcagcctccttcccgcacgccgccttgggcagcgcccgctcgaggaacggcttgatggagtcgacgaacgagctcctgccccctgagtgcagggaaccggtcccgtcggcggtgagggcgtcggcgaggccgaggcaggccctcggcgggctgcacctgatgacgtgcttcaggtccagcggggaggtcgggctccagaccgagtcctccgggtccacggcattgctcgctccgcccttgccgctcagcctcacgaagaggcccgggaccctgaagaagccgacggccgcggggacggtgctccggtggccactggactccaccatggcttggccttggctcggccggctggcggttgccgttctcccaagcgcccaggaggacgagatagcgagatgcccctcgtcgaccgggcggatcgcgcgtggttctcggcgaggcgtcacgggtgtaggcgggcgcgcggcgggtctgttggttggtcctggcccgggccacggggggctgctgcttaaggttaaggagagggccaagcgttattag

SEQ ID NO: 116838 - DNA, 1789 bp, Zea Mays
cttccctgccaaatcgcggtcactgctccgaagtccgaaccttcatacacatcgtctcgtttccgatttccccaaattcaggccacaggcgctacaggacccaggcaccactcggtcggcggccaccgcgtcgccccgcctgctcgattggggtcgcgtgtgcgataggaagtattgtgttgtgtttgcaacgtgatagcttgtactgggaacaaaggtcaagatgggcgccttggacctacaccttgactttgcttctgctcaacatggacaagccaagttaaaggaatatgccaagagctctttgttgtctgatggaaactacaatacagacaagatcaatggttcaaaccctgatgactatgagaaatttgagaaagggataatgcactatgggtgtccacattatagaaggagatgccgcataagagctccttgctgcaatgaaatttttgattgccgacactgccacaatgaaactaagaattccattaaaattgataaaatgaagaggcatgaacttccacgccatgaagtgcagcaggttgtatgctcattgtgtggcactgaacaggaggtgcgacaagtatgtatcaattgcggtgtttgcatggggaaatacttctgtggtttgtgcaaactcttcgacgatgatgtctctaaacagcagtatcactgcaacggatgtggaatatgtagaatcggagggagggagaatttcttccactgttcaaaatgtggatgttgctattcaattgcgctgaagaatagtcatgcatgtgttgaaggggcgatgcatcatgactgtccaatctgcttcgagtacttgttcgattcgacaaatgatgtttccgtcctgccttgtggtcataccattcatgtaaagtgcctgaaagaaatggaagagcactgccagtttgcatgccccctttgctccaagtcggtttgtgacatgtcgaaggcatgggaaaggctcgacatggagctggcaactctgtctgactcctgtgatcacaaaatggtccgcatattatgcaacgactgcggggcaatatcagatgtgcagttccatttgattgcgcacaagtgccagaattgcaagtcatacaacacccgccagatttgaagtaagaatcgcaagtcacacaacaccgtcagatctgaaatagcaaatcctgtgggggtttctgcatttcttcaagaagcgtgatggactgatggccccttcccgtgagctgctgagcaccgggatatctggcaagacactcatcactgtatccactccactgggtcctgcggaggcaaacagctcgagattgtatatctgctgctagctgccgcccttcgttatgcataagcctactcttgccgttttactcctgtcgctccgtgattctagtgtaataatgtcatatttactgttgcttcaagtatggcccgtacggctgcggttgaacggcggcggcggctgctgagccacagtaccttgctgttgctgagactgcacccagccacagtgcgccgccgccgccgcagcttgtagctggacttgatttatgaaggtgccggaagagttcttggttgcgggtagctattaaggccatctcgagtagatgtcctattacatcccttatttcatcctctatttcaaactttatataaatagtattaaatatctcatctacactgccctatctcctgatcttttaagacagtctttagttaggaaaatgtgaacggtgtgcacatgtggttgtacgtcaaatccggatcccattttctatgctta

SEQ ID NO: 116839 - DNA, 2325 bp, Zea Mays
atgaattccgctatatgccccagctatacccagatgagaacaggaagggacagtttgtggactacttgcaggctattgatttatgtattctttggtaaagaatcgggaagggcatttttcttatgcaggttgcataaccactggtgatatgagatgatctctattcgcttggaaagtagagataggttaaatttcggtctgaacggtgaaaccttaaataaaatcttaggatgctgtgtgagagaagcatgctggctccctcaaaggtatgtttgattgaagaatcaacggattgaaaatctcttatggatagaagtgcttattaactaaagattttgaagaagaagctgctgtctgctggagagaatggtgtggacaacgcggtaaatttggtgcagatggatggtgtgttcaaattgatcggagttctctggatggatacctatcgagtagtataattcctctctcagctcactgtccagacaattagtgctatctgtgactgttgggcaatcaggttatcgagattttgctggttggagctgtccggcattgctttcatcttttatcaatatgccggtctttggcagcatatggcgattcagaactgtgcgcagtggtttcctcgaatttaggaccccccaactgcattctgtattgagaacattcctgctaaatacatgatacttgcaggtattgtgttgtgtttgcaacgtgatagcttgtactgggaacaaaggtcaagatgggcgccttggacctacaccttgactttgcttctgctcaacatggacaagccaagttaaaggaatatgccaagagctctttgttgtctgatggaaactacaatacagacaagatcaatggttcaaaccctgatgactatgagaaatttgagaaagggataatgcactatgggtgtccacattatagaaggagatgccgcataagagctccttgctgcaatgaaatttttgattgccgacactgccacaatgaaactaagaattccattaaaattgataaaatgaagaggcatgaacttccacgccatgaagtgcagcaggttgtatgctcattgtgtggcactgaacaggaggtgcgacaagtatgtatcaattgcggtgtttgcatggggaaatacttctgtggtttgtgcaaactcttcgacgatgatgtctctaaacagcagtatcactgcaacggatgtggaatatgtagaatcggagggagggagaatttcttccactgttcaaaatgtggatgttgctattcaattgcgctgaagaatagtcatgcatgtgttgaaggggcgatgcatcatgactgtccaatctgcttcgaggttgctgctattttatttttttctatattcaagatatttatgatctgatcatgttttcatttaattgtgtacagtcagttctcatattttcctactgacctgtttcgtgagtttcagtacttgttcgattcgacaaatgatgtttccgtcctgccttgtggtcataccattcatgtaaagtgcctgaaagaaatggaagagcactgccagtttgcatgccccctttgctccaagtcggtttgtgacatgtcgaaggcatgggaaaggctcgacatggagctggcaactctgtctgactcctgtgatcacaaaatggtccgcatattatgcaacgactgcggggcaatatcagatgtgcagttccatttgattgcgcacaagtgccagaattgcaagtcatacaacacccgccagatttgaagtaagaatcgcaagtcacacaacaccgtcagatctgaaatagcaaatcctgtgggggtttctgcatttcttcaagaagcgtgatggactgatggccccttcccgtgagctgctgagcaccgggatatctggcaagacactcatcactgtatccactccactgggtcctgcggaggcaaacagctcgagattgtatatctgctgctagctgccgcccttcgttatgcataagcctactcttgccgttttactcctgtcgctccgtgattctagtgtaataatgtcatatttactgttgcttcaagtatggcccgtacggctgcggttgaacggcggcggcggctgctgagccacagtaccttgctgttgctgagactgcacccagccacagtgcgccgccgccgccgcagcttgtagctggacttgatttatgaaggtgccggaagagttcttggttgcgggtagctattaaggccatctcgagtagatgtcctattacatcccttatttcatcctctatttcaaactttatataaatagtattaaatatctcatctaca

SEQ ID NO: 116840 - DNA, 2124 bp, Zea Mays
atgaattccgctatatgccccagctatacccagatgagaacaggaagggacagtttgtggactacttgcaggctattgatttatgtattctttggtaaagaatcgggaagggcatttttcttatgcaggttgcataaccactggtgatatgagatgatctctattcgcttggaaagtagagataggttaaatttcggtctgaacggtgaaaccttaaataaaatcttaggatgctgtgtgagagaagcatgctggctccctcaaaggtatgtttgattgaagaatcaacggattgaaaatctcttatggatagaagtgcttattaactaaagattttgaagaagaagctgctgtctgctggagagaatggtgtggacaacgcggtaaatttggtgcagatggatggtgtgttcaaattgatcggagttctctggatggatacctatcgagtagtataattcctctctcagctcactgtccagacaattagtgctatctgtgactgttgggcaatcaggttatcgagattttgctggttggagctgtccggcattgctttcatcttttatcaatatgccggtctttggcagcatatggcgattcagaactgtattgtgttgtgtttgcaacgtgatagcttgtactgggaacaaaggtcaagatgggcgccttggacctacaccttgactttgcttctgctcaacatggacaagccaagttaaaggaatatgccaagagctctttgttgtctgatggaaactacaatacagacaagatcaatggttcaaaccctgatgactatgagaaatttgagaaagggataatgcactatgggtgtccacattatagaaggagatgccgcataagagctccttgctgcaatgaaatttttgattgccgacactgccacaatgaaactaagaattccattaaaattgataaaatgaagaggcatgaacttccacgccatgaagtgcagcaggttgtatgctcattgtgtggcactgaacaggaggtgcgacaagtatgtatcaattgcggtgtttgcatggggaaatacttctgtggtttgtgcaaactcttcgacgatgatgtctctaaacagcagtatcactgcaacggatgtggaatatgtagaatcggagggagggagaatttcttccactgttcaaaatgtggatgttgctattcaattgcgctgaagaatagtcatgcatgtgttgaaggggcgatgcatcatgactgtccaatctgcttcgagtacttgttcgattcgacaaatgatgtttccgtcctgccttgtggtcataccattcatgtaaagtgcctgaaagaaatggaagagcactgccagtttgcatgccccctttgctccaagtcggtttgtgacatgtcgaaggcatgggaaaggctcgacatggagctggcaactctgtctgactcctgtgatcacaaaatggtccgcatattatgcaacgactgcggggcaatatcagatgtgcagttccatttgattgcgcacaagtgccagaattgcaagtcatacaacacccgccagatttgaagtaagaatcgcaagtcacacaacaccgtcagatctgaaatagcaaatcctgtgggggtttctgcatttcttcaagaagcgtgatggactgatggccccttcccgtgagctgctgagcaccgggatatctggcaagacactcatcactgtatccactccactgggtcctgcggaggcaaacagctcgagattgtatatctgctgctagctgccgcccttcgttatgcataagcctactcttgccgttttactcctgtcgctccgtgattctagtgtaataatgtcatatttactgttgcttcaagtatggcccgtacggctgcggttgaacggcggcggcggctgctgagccacagtaccttgctgttgctgagactgcacccagccacagtgcgccgccgccgccgcagcttgtagctggacttgatttatgaaggtgccggaagagttcttggttgcgggtagctattaaggccatctcgagtagatgtcctattacatcccttatttcatcctctatttcaaactttatataaatagtattaaatatctcatctaca

SEQ ID NO: 116841 - DNA, 3259 bp, Zea Mays
accttccctgccaaatcgcggtcactgctccgaagtccgaaccttcatacacatcgtctcgtttccgatttccccaaattcaggccacaggcgctacaggacccaggcaccactcggtcggcggccaccgcgtcgccccgcctgctcgattggggtcgcgtgtgcgataggaagttcgtcatacgcctcgcggtttttctagtttccgttttgatttctatgcgcccaatgttttgtccgattgattgatctgcttaggtacgtgagactgtctctattgttcgtgagtgcgtagatggtgggtgagtctggttgtttagatttgtgactggttgctcgacttgattgtgctgactgattgtttcatctatcgtgtaagctgtattaatgtctaatcccttaattgctttgaaaccactgcatgtgcttgattagtttggtttgtaccgacagcttttggtgcctatttgtgatgagattgaacatcctgctgcttgtgtttaatcttctaggttcgtgttcttgctgtatgcgtggttaatggttgactagtacttctctgatgctgaggatgattgctattgattgactagaatttaacatttccctgtggggaagtaatctcctatgttctgtcgaaagcagcacactctggcaactgtattgctgcatatattttccgtcaaaaaaatatttgctaaacatgaaaaccacacttattttgccttttcatctctccttgtggcacaatactatggcccagttttgaacctatggcccaacactcttagctaataactcaactaattgttaactaactcgcagctaacaattagttcattagctgcctcaatccagctaacaatttgttagctggctaactattagatttaggggttccaaacatgactgtatcaattgacttcctctgttggccgacctttgcatatatcatcaatgagcagaaaaaaaacaggttttgtttttgctaaattaaggagaagtatcgctcgaatttagcatcgtaatgggggaacacatcatcttctcgatgaattccgctatatgccccagctatacccagatgagaacaggaagggacagtttgtggactacttgcaggctattgatttatgtattctttggtaaagaatcgggaagggcatttttcttatgcaggttgcataaccactggtgatatgagatgatctctattcgcttggaaagtagagataggttaaatttcggtctgaacggtgaaaccttaaataaaatcttaggatgctgtgtgagagaagcatgctggctccctcaaaggtatgtttgattgaagaatcaacggattgaaaatctcttatggatagaagtgcttattaactaaagattttgaagaagaagctgctgtctgctggagagaatggtgtggacaacgcggtaaatttggtgcagatggatggtgtgttcaaattgatcggagttctctggatggatacctatcgagtagtataattcctctctcagctcactgtccagacaattagtgctatctgtgactgttgggcaatcaggttatcgagattttgctggttggagctgtccggcattgctttcatcttttatcaatatgccggtctttggcagcatatggcgattcagaactgtgcgcagtggtttcctcgaatttaggaccccccaactgcattctgtattgagaacattcctgctaaatacatgatacttgcaggtattgtgttgtgtttgcaacgtgatagcttgtactgggaacaaaggtcaagatgggcgccttggacctacaccttgactttgcttctgctcaacatggacaagccaagttaaaggaatatgccaagagctctttgttgtctgatggaaactacaatacagacaagatcaatggttcaaaccctgatgactatgagaaatttgagaaagggataatgcactatgggtgtccacattatagaaggagatgccgcataagagctccttgctgcaatgaaatttttgattgccgacactgccacaatgaaactaagaattccattaaaattgataaaatgaagaggcatgaacttccacgccatgaagtgcagcaggttgtatgctcattgtgtggcactgaacaggaggtgcgacaagtatgtatcaattgcggtgtttgcatggggaaatacttctgtggtttgtgcaaactcttcgacgatgatgtctctaaacagcagtatcactgcaacggatgtggaatatgtagaatcggagggagggagaatttcttccactgttcaaaatgtggatgttgctattcaattgcgctgaagaatagtcatgcatgtgttgaaggggcgatgcatcatgactgtccaatctgcttcgagtacttgttcgattcgacaaatgatgtttccgtcctgccttgtggtcataccattcatgtaaagtgcctgaaagaaatggaagagcactgccagtttgcatgccccctttgctccaagtcggtttgtgacatgtcgaaggcatgggaaaggctcgacatggagctggcaactctgtctgactcctgtgatcacaaaatggtccgcatattatgcaacgactgcggggcaatatcagatgtgcagttccatttgattgcgcacaagtgccagaattgcaagtcatacaacacccgccagatttgaagtaagaatcgcaagtcacacaacaccgtcagatctgaaatagcaaatcctgtgggggtttctgcatttcttcaagaagcgtgatggactgatggccccttcccgtgagctgctgagcaccgggatatctggcaagacactcatcactgtatccactccactgggtcctgcggaggcaaacagctcgagattgtatatctgctgctagctgccgcccttcgttatgcataagcctactcttgccgttttactcctgtcgctccgtgattctagtgtaataatgtcatatttactgttgcttcaagtatggcccgtacggctgcggttgaacggcggcggcggctgctgagccacagtaccttgctgttgctgagactgcacccagccacagtgcgccgccgccgccgcagcttgtagctggacttgatttatgaaggtgccggaagagttcttggttgcgggtagctattaaggccatctcgagtagatgtcctattacatcccttatttcatcctctatttcaaactttatataaatagtattaaatatctcatctaca

SEQ ID NO: 116842 - DNA, 2096 bp, Zea Mays
ccgaagcagtttagatatcttcctcccaaccttccctgccaaatcgcggtcactgctccgaagtccgaaccttcatacacatcgtctcgtttccgatttccccaaattcaggccacaggcgctacaggacccaggcaccactcggtcggcggccaccgcgtcgccccgcctgctcgattggggtcgcgtgtgcgataggaagatgctgtgtgagagaagcatgctggctccctcaaaggtatgtttgattgaagaatcaacggattgaaaatctcttatggatagaagtgcttattaactaaagattttgaagaagaagctgctgtctgctggagagaatggtgtggacaacgcggtaaatttggtgcagatggatggtgtgttcaaattgatcggagttctctggatggatacctatcgagtagtataattcctctctcagctcactgtccagacaattagtgctatctgtgactgttgggcaatcaggttatcgagattttgctggttggagctgtccggcattgctttcatcttttatcaatatgccggtctttggcagcatatggcgattcagaactgtattgtgttgtgtttgcaacgtgatagcttgtactgggaacaaaggtcaagatgggcgccttggacctacaccttgactttgcttctgctcaacatggacaagccaagttaaaggaatatgccaagagctctttgttgtctgatggaaactacaatacagacaagatcaatggttcaaaccctgatgactatgagaaatttgagaaagggataatgcactatgggtgtccacattatagaaggagatgccgcataagagctccttgctgcaatgaaatttttgattgccgacactgccacaatgaaactaagaattccattaaaattgataaaatgaagaggcatgaacttccacgccatgaagtgcagcaggttgtatgctcattgtgtggcactgaacaggaggtgcgacaagtatgtatcaattgcggtgtttgcatggggaaatacttctgtggtttgtgcaaactcttcgacgatgatgtctctaaacagcagtatcactgcaacggatgtggaatatgtagaatcggagggagggagaatttcttccactgttcaaaatgtggatgttgctattcaattgcgctgaagaatagtcatgcatgtgttgaaggggcgatgcatcatgactgtccaatctgcttcgagtacttgttcgattcgacaaatgatgtttccgtcctgccttgtggtcataccattcatgtaaagtgcctgaaagaaatggaagagcactgccagtttgcatgccccctttgctccaagtcggtttgtgacatgtcgaaggcatgggaaaggctcgacatggagctggcaactctgtctgactcctgtgatcacaaaatggtccgcatattatgcaacgactgcggggcaatatcagatgtgcagttccatttgattgcgcacaagtgccagaattgcaagtcatacaacacccgccagatttgaagtaagaatcgcaagtcacacaacaccgtcagatctgaaatagcaaatcctgtgggggtttctgcatttcttcaagaagcgtgatggactgatggccccttcccgtgagctgctgagcaccgggatatctggcaagacactcatcactgtatccactccactgggtcctgcggaggcaaacagctcgagattgtatatctgctgctagctgccgcccttcgttatgcataagcctactcttgccgttttactcctgtcgctccgtgattctagtgtaataatgtcatatttactgttgcttcaagtatggcccgtacggctgcggttgaacggcggcggcggctgctgagccacagtaccttgctgttgctgagactgcacccagccacagtgcgccgccgccgccgcagcttgtagctggacttgatttatgaaggtgccggaagagttcttggttgcgggtagctattaaggccatctcgagtagatgtcctattacatcccttatttcatcctctatttcaaactttatataaatagtattaaatatctcatctaca

SEQ ID NO: 116843 - DNA, 3454 bp, Zea Mays
ctccccgaagcagtttagatatcttcctcccaaccttccctgccaaatcgcggtcactgctccgaagtccgaaccttcatacacatcgtctcgtttccgatttccccaaattcaggccacaggcgctacaggacccaggcaccactcggtcggcggccaccgcgtcgccccgcctgctcgattggggtcgcgtgtgcgataggaagttcgtcatacgcctcgcggtttttctagtttccgttttgatttctatgcgcccaatgttttgtccgattgattgatctgcttaggtacgtgagactgtctctattgttcgtgagtgcgtagatggtgggtgagtctggttgtttagatttgtgactggttgctcgacttgattgtgctgactgattgtttcatctatcgtgtaagctgtattaatgtctaatcccttaattgctttgaaaccactgcatgtgcttgattagtttggtttgtaccgacagcttttggtgcctatttgtgatgagattgaacatcctgctgcttgtgtttaatcttctaggttcgtgttcttgctgtatgcgtggttaatggttgactagtacttctctgatgctgaggatgattgctattgattgactagaatttaacatttccctgtggggaagtaatctcctatgttctgtcgaaagcagcacactctggcaactgtattgctgcatatattttccgtcaaaaaaatatttgctaaacatgaaaaccacacttattttgccttttcatctctccttgtggcacaatactatggcccagttttgaacctatggcccaacactcttagctaataactcaactaattgttaactaactcgcagctaacaattagttcattagctgcctcaatccagctaacaatttgttagctggctaactattagatttaggggttccaaacatgactgtatcaattgacttcctctgttggccgacctttgcatatatcatcaatgagcagaaaaaaaacaggttttgtttttgctaaattaaggagaagtatcgctcgaatttagcatcgtaatgggggaacacatcatcttctcgatgaattccgctatatgccccagctatacccagatgagaacaggaagggacagtttgtggactacttgcaggctattgatttatgtattctttggtaaagaatcgggaagggcatttttcttatgcaggttgcataaccactggtgatatgagatgatctctattcgcttggaaagtagagataggttaaatttcggtctgaacggtgaaaccttaaataaaatcttaggatgctgtgtgagagaagcatgctggctccctcaaaggtatgtttgattgaagaatcaacggattgaaaatctcttatggatagaagtgcttattaactaaagattttgaagaagaagctgctgtctgctggaggtaggcttccttgaaatctaacgtcttaatgaacctttaagatcataacaacgtgcacgagtggtacatgctaacacgtcgaaacccttgtcacgaaagaatcatgtttctttcttccttccatttcctggcatttgatgctatgatgtgttcctcttgccagagaatggtgtggacaacgcggtaaatttggtgcagatggatggtgtgttcaaattgatcggagttctctggatggatacctatcgagtagtataattcctctctcagctcactgtccagacaattagtgctatctgtgactgttgggcaatcaggttatcgagattttgctggttggagctgtccggcattgctttcatcttttatcaatatgccggtctttggcagcatatggcgattcagaactgtgcgcagtggtttcctcgaatttaggaccccccaactgcattctgtattgagaacattcctgctaaatacatgatacttgcaggtattgtgttgtgtttgcaacgtgatagcttgtactgggaacaaaggtcaagatgggcgccttggacctacaccttgactttgcttctgctcaacatggacaagccaagttaaaggaatatgccaagagctctttgttgtctgatggaaactacaatacagacaagatcaatggttcaaaccctgatgactatgagaaatttgagaaagggataatgcactatgggtgtccacattatagaaggagatgccgcataagagctccttgctgcaatgaaatttttgattgccgacactgccacaatgaaactaagaattccattaaaattgataaaatgaagaggcatgaacttccacgccatgaagtgcagcaggttgtatgctcattgtgtggcactgaacaggaggtgcgacaagtatgtatcaattgcggtgtttgcatggggaaatacttctgtggtttgtgcaaactcttcgacgatgatgtctctaaacagcagtatcactgcaacggatgtggaatatgtagaatcggagggagggagaatttcttccactgttcaaaatgtggatgttgctattcaattgcgctgaagaatagtcatgcatgtgttgaaggggcgatgcatcatgactgtccaatctgcttcgagtacttgttcgattcgacaaatgatgtttccgtcctgccttgtggtcataccattcatgtaaagtgcctgaaagaaatggaagagcactgccagtttgcatgccccctttgctccaagtcggtttgtgacatgtcgaaggcatgggaaaggctcgacatggagctggcaactctgtctgactcctgtgatcacaaaatggtccgcatattatgcaacgactgcggggcaatatcagatgtgcagttccatttgattgcgcacaagtgccagaattgcaagtcatacaacacccgccagatttgaagtaagaatcgcaagtcacacaacaccgtcagatctgaaatagcaaatcctgtgggggtttctgcatttcttcaagaagcgtgatggactgatggccccttcccgtgagctgctgagcaccgggatatctggcaagacactcatcactgtatccactccactgggtcctgcggaggcaaacagctcgagattgtatatctgctgctagctgccgcccttcgttatgcataagcctactcttgccgttttactcctgtcgctccgtgattctagtgtaataatgtcatatttactgttgcttcaagtatggcccgtacggctgcggttgaacggcggcggcggctgctgagccacagtaccttgctgttgctgagactgcacccagccacagtgcgccgccgccgccgcagcttgtagctggacttgatttatgaaggtgccggaagagttcttggttgcgggtagctattaaggccatctcgagtagatgtcctattacatcccttatttcatcctctatttcaaactttatataaatagtattaaatatctcatctaca

SEQ ID NO: 116844 - DNA, 219 bp, Zea Mays
agcagcagaaagctgcggtcggatcaggtcgccgcgcctggccacagatcgcaaccgacgacgggattaaccatggtgctgcatgcctccagcattgagctctcgcactacttccagttcctcctcaagttcgtgctactcgcgtacgcggtgctgtgcctgaccgagctccttcacagatggtccaacggctccgtcctctccctgtggtctgcatga

SEQ ID NO: 116845 - DNA, 1056 bp, Zea Mays
tcccggagtgaagtgagatattcgaggacggagcttcatgaagtcagggtaaaaggttcacgtgtagtaatgcgcggtgcactccagtgacaggtcgggccgccaccattggtggatcccgtgcgccgtcttgaagtccggcgacggcccgcggttcaccgtcagaacggcagacgggaagaggtgcagcggttcgcagccgctgcgaccctttccaatgcccagcagcaggtccttgaccgagttcctcgtggccagcctccccacggcgccggccccgatggcctccatcttcctgcggtggtcgaagtaccccacgtactcggcgctgatggggtccgccgggttcacgaacagattaggcatccaagccgccatcgccgcgaacgccgcgtcgtgggcgccgccgccggctcgctgcaggacggctgccacaccggccgtgacgaagctgttggcgatgcggatgccctgcctcagccgccggtccccgatccgctccaccggcgcggacacgaacggcgcgttgaagaggaacgtgggcagggcgggggcgcctgccctgaccagggtcttggcacccagcgtcgcaatggcggagcccagcgagtggcccgcaagccagacgcggccgtgctgccccgccgccgccgccagggtgtcttggatcgcctgcatggcggcgcggaaccgggacctgccttccagtccgttgcggacgagctgcaggtccagctccaggtcccgcttcgccgagcccttcttggtaatggtcccgcggaaggcgacgacgtagtgcggggcgctggcggcggccgtggggtcgaggaggtggagcggcggctggaacgcgtacacggcgccgaaaatagagccgtcggcggcgtcggtgagcacctgccgcggctcgaagcggaagaacctccaccacgccggcgcgcgggcgtcggcgccctgcctgttgcactgccggtcgcgctctaggacgtacacgccctgcacaaggctcgccatgacggatcgccggtgatgagggcagttcctggcaggagcaag

SEQ ID NO: 116846 - DNA, 691 bp, Zea Mays
gtgacgtccccttcccgtcccttctcagcgaggcagccgcctcccccaatttccaactcgtgctctcacctcggatctctccatccctttcgtccaaaccaccgaccacaatcagaagcgttggcggcggcgcattccatggcgccgctggggtcaaagctggcgcagctgcagtccacgtggccaagcacggatgctcgtaccacaagacgctcatggagaagaacaaacactatgtcgtcgaccctcccaccattgacaagtgcaaggacctctccaagcagctcttctacacccgactcgctagccttcccggtcgttacgagtcgttctggaaagaggttgatggtgcgaagcttctgtggaagaacggaagccgtctgaagattgaggatgctagtgttgcggcgatgtttggcatcgagttgtatgcgtggttctgcctcggtgagatcgtcggtagaggttttaccgtcacgggctaccatgtctgaagcctgaatgcctgccttacctctatctagcatgggcaaccacattaatccacatttgccgacgaacattatgaaatcagtgttattgatgcaacctcttgctattcggaaccagtattgaatcttgaatcatctcggtggacgagaaatgatgagctaataatttgctatatatcctgctctctttatgcaatatt

SEQ ID NO: 116847 - DNA, 810 bp, Zea Mays
gtgacgtccccttcccgtcccttctcagcgaggcagccgcctcccccaatttccaactcgtgctctcacctcggatctctccatccctttcgtccaaaccaccgaccacaatcagaaggtaaactgaaagaagtcgtcacatcatcctcgaatccacgttttccgtacacctgatttttctcttccccttcataattttcttctggcccgcattgccccgttccgaaccgtgaacagcgttggcggcggcgcattccatggcgccgctggggtcaaagctggcgcagctgcagtccacgtggccaagcacggatgctcgtaccacaagacgctcatggagaagaacaaacactatgtcgtcgaccctcccaccattgacaagtgcaaggacctctccaagcagctcttctacacccgactcgctagccttcccggtcgttacgagtcgttctggaaagaggttgatggtgcgaagcttctgtggaagaacggaagccgtctgaagattgaggatgctagtgttgcggcgatgtttggcatcgagttgtatgcgtggttctgcctcggtgagatcgtcggtagaggttttaccgtcacgggctaccatgtctgaagcctgaatgcctgccttacctctatctagcatgggcaaccacattaatccacatttgccgacgaacattatgaaatcagtgttattgatgcaacctcttgctattcggaaccagtattgaatcttgaatcatctcggtggacgagaaatgatgagctaataatttgctatatatcctgctctctttatgcaatatt

SEQ ID NO: 116848 - DNA, 1166 bp, Zea Mays
tttaggaacatccctactcggaaggctcaccaaatcgtcctacgcttctgcctcctcctccacgaggtgaggaaaccctagcgactgaccatggcgttgctcccgcgcaccgcacggttggccttcctctctaccccgcggtcgtactccgccgccgccgctgccgctgcgggcgcctccccgacctccccagcgccatacgggggcgcgcccccaccggcgatgtcgaagacggccgagttcgtggtctccaaggttgatgacctgatgaactgggcgcgtaagggctcgatttggcccatgaccttcgggctcgcctgctgcgcggtcgagatgatgcacgccggcgcgtcccgctacgacttcgaccggttcggcgtcatcttccgtccctcgccgcgccagtccgattgcatgatcgtcgccggcacgctcaccaacaaaatggctccagccctccgcaaggtttatgaccaaatgcctgagcctagatgggttatttcaatgggcagctgtgccaacggtggtggatactaccattactcctactctgttgtacgtggatgtgaccgtatagtccccgtggacatctacgtccctgggtgcccaccaactgctgaggcactgctgtacggtgttcttcagctccaaaagaagatcaacaggcgtaaggatttccttcactggtggaccaagtgaagcatgcttctgctgttgctcgcttgctacgtttctttgcactcgacctacctgtcttatctgaaataaggacggactttgctcggattcacaaatttgttgtgcctggaaggatgtatgcccaggttgtgacgaacatataacttgtgtacttggagtcagttcgcctgtaatggacaccagacctgctgtgaatctgtttttaagcttccattgtaatacagcaatacaccatatacttgtatgttaatacaccatatacttgtatgttaatgggtatcttccccggttccccctaccattgggttgaccggttgagatacaggcttacaaatcttgtcttttaggccatgtttggtttctttagtctagggactaaagtttagttaggggactaaagtttagttcctaacatgtttggttctaggggctaaaaatagtaaaatgtactaaatgactcataagaa

SEQ ID NO: 116849 - DNA, 92 bp, Zea Mays
agcggacttttacaacttctcatgtccctattgttaggagggttcggagtccggatcgggatttgcgacaaccaggttgttcacactcggaa

SEQ ID NO: 116850 - DNA, 1235 bp, Zea Mays
attgttaggcatctctgtaatattccctcagcatcttttccccgacgccgcccggtaccgtatatatataggccgcggctccctgcttcccttggatccaccgcaaacaaggtcctgacaacccacgccacgacgacacaacaaagcacaagcaccgcagctaaacccatggccggggtcgttgtggtgttcgacttcgacaagacgatcatcgacgtcgacagcgacaactgggtcgtggacagcctcggcttcaccgagccgttcgagcgcctcctgcccaccatgccctggaacacgctcatggacaccatgatgggggagctgcacgcgcacggcaggaccctggacgacgtcgccgaggcgctccgtgcggcgcccgtcgtcgcgggcgtccccgccgccatcaaggccgcctacgcgctcggctgcgacctgcgcgtcctcagcgacgccaacgccttcttcatcgacaccgtcctggcgcaccacggcctgctgggctgcttctcccagatcaacaccaaccccagccaccccgacgccgacgccgacggccgcctccgcatcgggccctaccacgacctgcacgggtgcggcgtcggcacctgcccgcccaacatgtgcaagggccaggtgctggaccgcatcctccgcgaggcgtcgtcgtcggccgccggcaggaagcgcgtcgtgtacctgggcgacggccgcggcgactactgcccggcgctgcggctggcaagggaggacttcgtcatgccgcgcaggggcttccccgtgtgggacctcatctgcgaggaccccgcgcggctgcaggcggaggtgcacccctgggccgacggcgccgagctggaggagacgctgctgcgcctcgtcgggagggcgcgcgtggaggaggccgcactgctgccgccgctcgactgcaagctcgagtccatgcccgttgccgcgcaggagggcatgggacccatcatgccgctcggcgtcaagcactgacgatacacgcagcagtgcagtctctggtttgctggttaatgctggtttggttcgggttggacgaacgattagtaagtagctcgaataattagtataactgtatcggctaattttatgtgtttgtgtgtgtgctgtgtggtgtatgcctccgcatcgagctgcctgtcactgctgaattggctctgcctcgctgtgtatcttattcttacctacagaaagagtaccacgagcaaata

SEQ ID NO: 116851 - DNA, 2193 bp, Zea Mays
ctaaaaaagcccacacatctttctatcagaagttcatccgttcgatttgcagttaacggctcagatgaaaaaaattcccaaacccacgagcatctcagtcccccaaaccgtaaatcctgtaaatttcattccacatataccccttcgatccacggggctatggcaattgcctctcaagctcaagggctcaaggccattagcgtaattgcaaaattgtaattaattctcaatctcaaggttagtaacgtaattctagagcttctgagcagaaaaggtacggagtcggaaggatatgatcgcttaggagtgcggctagggttttttcctgtcacaccttccctcggtcccttccatctcctagccgccgccgccgccgcccaaaaccctacctaccctcttctccccctcactctcctttcatctccattctaatggcggcccaacccgtccggcgaagctgctagtgcttgtatctactatcttcatcaggtacttcgcgatcctactgaagtattccccgccgccgctgccatggccaccctcaaccctttcgaactcctcggcgccgacgacaacgacgacccgtcgctgttgattgcggcggcggcggctgctgctcagaaagccgaggcgaagaagtccgccgtggcgcctgctgggaaggctgcccagcctgcggcgaccaccaagttcccgaccaagcccgctcctccctcgcagacggttcgggatgcacgcggcggtggctcatcagctcgtggaggctttggccgtggtgaacgtggccgtggcagaggtggacggggatatggtcagaaccgtggcttcagtggtgacaatggcaatgagttccagggaggttatggtggcggaggctatggggatggtgctgtaactggtggatctgaaggagaaagggagagagacactcgtcccccgtaccgtggcggaggcagacgtggtggttacaggaatgttgagtttggtgatgactctgagaggccaccacggagaaactatgagcgccacagcgggactggccatggctatgagatgaagcgtgatggcgcagggcgtgggaactggggcactgccactgatgagcttattgcccaggatgcagaggactctccgaagatggaggaggctgctcctgttgctgagaaacaaggtgagcagatcgatgccccagcagcagatgagaacaaagataacaaggatgctactgcaaatgaggaggaagaaaaggaagaggacaaggagatgactctggaggaatttgagaaaataagagaggagaagaggaaagcactacttgcgttgaaggctgaggagaggaaagttgaagttgacaaggatctgcgttctctgcagccactttcaaacaagaaagaaaatgatgaagttttcattaagctggttagtttcctcgtaattaatgctttgataccttaagtttgctgagctttgcatgggttcttcgatattcttttgctctcttagggttctgacaaggataagaagaaggaaaatgctgagcgtgatgagcgtgccaagaagtcggtgagcatcaacgagttcctgaaacctgctgaaggagaaaggtactacggcggccgtggccgtggaaggggccgtggggatcgtggtggttttagaggcggatacggagggggatacagtcgtggcccagctgctgctgctccatccattgaagatcaagctcagttcccaagccttggtgggaagtgaagggcgcccagctgctgctgtcaccgagcgttgtgttgtctgctgttgtcatatttaaattttgtccgacgttacatttctgtgccacggtttaaacggaacaaataatggtgttgcatgtggctatctttggttatgtggtacttgacgttgaataccggagttgtttatcagaattagactccaaattttgtaggccagcttttaccattttgttgtcttagcatgctgccttgtaaccctctcgcagccctcgtccatgctgtgagtcacagtctaccagttcttgctctaagtgagacgaggttgccggtgctgggcttcacaatgccctccacggcagctacagccgagaacgcccagctcagcttgtttggctgcaattaatattagccgcagctagattaaagccgcagcaaacttgtcgcttcttgcttgcct

SEQ ID NO: 116852 - DNA, 2109 bp, Zea Mays
ctaaaaaagcccacacatctttctatcagaagttcatccgttcgatttgcagttaacggctcagatgaaaaaaattcccaaacccacgagcatctcagtcccccaaaccgtaaatcctgtaaatttcattccacatataccccttcgatccacggggctatggcaattgcctctcaagctcaagggctcaaggccattagcgtaattgcaaaattgtaattaattctcaatctcaaggttagtaacgtaattctagagcttctgagcagaaaaggtacggagtcggaaggatatgatcgcttaggagtgcggctagggttttttcctgtcacaccttccctcggtcccttccatctcctagccgccgccgccgccgcccaaaaccctacctaccctcttctccccctcactctcctttcatctccattctaatggcggcccaacccgtccggcgaagctgctagtgcttgtatctactatcttcatcaggtacttcgcgatcctactgaagtattccccgccgccgctgccatggccaccctcaaccctttcgaactcctcggcgccgacgacaacgacgacccgtcgctgttgattgcggcggcggcggctgctgctcagaaagccgaggcgaagaagtccgccgtggcgcctgctgggaaggctgcccagcctgcggcgaccaccaagttcccgaccaagcccgctcctccctcgcagacggttcgggatgcacgcggcggtggctcatcagctcgtggaggctttggccgtggtgaacgtggccgtggcagaggtggacggggatatggtcagaaccgtggcttcagtggtgacaatggcaatgagttccagggaggttatggtggcggaggctatggggatggtgctgtaactggtggatctgaaggagaaagggagagagacactcgtcccccgtaccgtggcggaggcagacgtggtggttacaggaatgttgagtttggtgatgactctgagaggccaccacggagaaactatgagcgccacagcgggactggccatggctatgagatgaagcgtgatggcgcagggcgtgggaactggggcactgccactgatgagcttattgcccaggatgcagaggactctccgaagatggaggaggctgctcctgttgctgagaaacaaggtgagcagatcgatgccccagcagcagatgagaacaaagataacaaggatgctactgcaaatgaggaggaagaaaaggaagaggacaaggagatgactctggaggaatttgagaaaataagagaggagaagaggaaagcactacttgcgttgaaggctgaggagaggaaagttgaagttgacaaggatctgcgttctctgcagccactttcaaacaagaaagaaaatgatgaagttttcattaagctgggttctgacaaggataagaagaaggaaaatgctgagcgtgatgagcgtgccaagaagtcggtgagcatcaacgagttcctgaaacctgctgaaggagaaaggtactacggcggccgtggccgtggaaggggccgtggggatcgtggtggttttagaggcggatacggagggggatacagtcgtggcccagctgctgctgctccatccattgaagatcaagctcagttcccaagccttggtgggaagtgaagggcgcccagctgctgctgtcaccgagcgttgtgttgtctgctgttgtcatatttaaattttgtccgacgttacatttctgtgccacggtttaaacggaacaaataatggtgttgcatgtggctatctttggttatgtggtacttgacgttgaataccggagttgtttatcagaattagactccaaattttgtaggccagcttttaccattttgttgtcttagcatgctgccttgtaaccctctcgcagccctcgtccatgctgtgagtcacagtctaccagttcttgctctaagtgagacgaggttgccggtgctgggcttcacaatgccctccacggcagctacagccgagaacgcccagctcagcttgtttggctgcaattaatattagccgcagctagattaaagccgcagcaaacttgtcgcttcttgcttgcct

SEQ ID NO: 116853 - DNA, 1255 bp, Zea Mays
ctaaaaaagcccacacatctttctatcagaagttcatccgttcgatttgcagttaacggctcagatgaaaaaaattcccaaacccacgagcatctcagtcccccaaaccgtaaatcctgtaaatttcattccacatataccccttcgatccacggggctatggcaattgcctctcaagctcaagggctcaaggccattagcgtaattgcaaaattgtaattaattctcaatctcaaggttagtaacgtaattctagagcttctgagcagaaaaggtacggagtcggaaggatatgatcgcttaggagtgcggctagggttttttcctgtcacaccttccctcggtcccttccatctcctagccgccgccgccgccgcccaaaaccctacctaccctcttctccccctcactctcctttcatctccattctaatggcggcccaacccgtccggcgaagctgctagtgcttgtatctactatcttcatcaggtacttcgcgatcctactgaagtattccccgccgccgctgccatggccaccctcaaccctttcgaactcctcggcgccgacgacaacgacgacccgtcgctgttgattgcggcggcggcggctgctgctcagaaagccgaggcgaagaagtccgccgtggcgcctgctgggaaggctgcccagcctgcggcgaccaccaagttcccgaccaagcccgctcctccctcgcagacggttcgggatgcacgcggcggtggctcatcagctcgtggaggctttggccgtggtgaacgtggccgtggcagaggtggacggggatatggtcagaaccgtggcttcagtggtgacaatggcaatgagttccagggaggttatggtggcggaggctatggggatggtgctgtaactggtggatctgaaggagaaagggagagagacactcgtcccccgtaccgtggcggaggcagacgtggtggttacaggaatgttgagtttggtgatgactctgagaggccaccacggagaaactatgagcgccacagcgggactggccatggctatgagatgaagcgtgatggcgcagggcgtgggaactggggcactgccactgatgagcttattgcccaggatgcagaggactctccgaagatggaggaggctgctcctgttgctgagaaacaaggtgagcagatcgatgccccagcagcagatgagaacaaataatggtgttgcatgtggctatctttggttatgtggtacttgacgt

SEQ ID NO: 116854 - DNA, 1163 bp, Zea Mays
ctaaaaaagcccacacatctttctatcagaagttcatccgttcgatttgcagttaacggctcagatgaaaaaaattcccaaacccacgagcatctcagtcccccaaaccgtaaatcctgtaaatttcattccacatataccccttcgatccacggggctatggcaattgcctctcaagctcaagggctcaaggccattagcgtaattgcaaaattgtaattaattctcaatctcaaggttagtaacgtaattctagagcttctgagcagaaaaggtacggagtcggaaggatatgatcgcttaggagtgcggctagggttttttcctgtcacaccttccctcggtcccttccatctcctagccgccgccgccgccgcccaaaaccctacctaccctcttctccccctcactctcctttcatctccattctaatggcggcccaacccgtccggcgaagctgctagtgcttgtatctactatcttcatcaggtacttcgcgatcctactgaagtattccccgccgccgctgccatggccaccctcaaccctttcgaactcctcggcgccgacgacaacgacgacccgtcgctgttgattgcggcggcggcggctgctgctcagaaagccgaggcgaagaagtccgccgtggcgcctgctgggaaggctgcccagcctgcggcgaccaccaagttcccgaccaagcccgctcctccctcgcagacggttcgggatgcacgcggcggtggctcatcagctcgtggaggctttggccgtggtgaacgtggccgtggcagaggtggacggggatatggtcagaaccgtggcttcagtggtgacaatggcaatgagttccagggaggttatggtggcggaggctatggggatggtgctgtaactggtggatctgaaggagaaagggagagagacactcgtcccccgtaccgtggcggaggcagacgtggtggttacaggaatgttgagtttggtgatgactctgagaggccaccacggagaaactatgagcgccacagcgggactggccatggctatgagatgaagcgttgtgttgtctgctgttgtcatatttaaattttgtccgacgttacatttctgtgccacggtttaaacggaacaaataatggtgttgcatgtggctatctttg

SEQ ID NO: 116855 - DNA, 489 bp, Zea Mays
atgaagcctaaggaagaaagaaattatgtttgtttggaggtagccaagtttttctatgagtgtggcataccattcaatgcagtgaactccaggcaatttgaggaaaactttgatcctttgattttagaagactttgattgggacaatgaatgggttgatccattagctaattcttctcatgttagcaatgctcttggagatgatttcaatttatcatgggaccaagttgatgaatctattggtgcatctgcacatattagaggtcgtaattttcctaggagagttgttggtgggtgtgtcagaaggaatgaagaccttgaggaagaggagactaattcaacaaatgaagatgaggaggatgaggaatatattctcgatgatcttgatctggaagatgaaattgaaggaagcaatagtggaaaagatggtgatgatcaaggcgtggatgctcatggtcttaatattgacgagttagatgatggttgctga

SEQ ID NO: 116856 - DNA, 1666 bp, Zea Mays
gtttctacagctgtgtaggctgctgagcgatttagcatggtacatttttttctgcacaattgtacatggaagcattagtcataggatatcggttgttgaagtacgtcgtcaagtgtacatggaagcattagtgcattgaacggccgaagaatcaccgcaggtacatggctgatgtgttcatcttctagaggatatcttgcaccagagtacaccattcaagggcagctgaacaaaaagagcgacgtctacagctttggtgtgctgctgttggagattgtcagtggcagatgccacactgatcctagattacccgttgacgagcagttcctcctagaaaaggtctggacactctatgagttcgatgatctcgagagcatcattgataggacactaaagcgcgattttgacaccgaggaagcactctggttgcttaaggttgttgattcaatcgtgagggtcctcaattaaggtcgaatggatgcaatcaaaactagaagggtgtgcgccatcgaggatcactgcagctaaggcaatcgtgaaggctggaatcgttgttatggcaccgcaagctattagtgtgctaggtggatttaggcctcaagggaaaacgattgacaatgttgtaaaggttgtggagacaacacttgccatgcaggaggctggatgcttctctgttgtgtattagttgttggcagatgatttataagatattgagatcaaaatcaggatgtttccaaactgtctataatcaggatggctattgtagcttttacagtaggttggtattatatgtttccaatttgtgtttttattaaaccattgtctaattggtgtcaggtcttcttcccatgggcggatcattgtcgactggtggtgtcaggtcttcttcccatgggcggtgccctggagcgcctgattgtctcacgtatttgaccagcaacaagggacgaagattggagctgtgtggattgtgtggaggcgacacgggtcaggagcatttcatctgatttacagagaagtaaagagaagttgtttacatttagtcatcctctgtatctgaaacaagactatgtttctaccttgtctttctcatggttcttagcctatggccgaagcttccatgcttgattcttcaaacatccaatgcagatcccttttctctgatggatatgctgatattcaaggctgtggaagagcaggtcaagaagagagtagagaataaggcaatgatcttcgagcagaatgccactgatagtgagtgcaaggtcgatcctaaagtgctctccaagctatatgatcattgggtggatgccacacaccaaggatgtctgccttgactaatcaccgattagctgtagctgtaaattttatgtatacatggtttcagttgcgctcgatccaattgtcttaaccttgaatggacattttgatgtttctttcatgaatgttcaggtcaacggcaagataaaccaattgcgttgtatgagttttagatcataactcaagttttttgtagatcttggtgctatttcatatgatgtgtcatgtttcagtgattgctttatagtgaacccgtaagatgtaaaatgacctttatgacagaaccatatgtaataacagagtattctgaggaacctttgttgaagtaaatgtaatcgagtttcct

SEQ ID NO: 116857 - DNA, 1440 bp, Zea Mays
gtttctacagctgtgtaggctgctgagcgatttagcatggtacatttttttctgcacaattgtacatggaagcattagtcataggatatcggttgttgaagtacgtcgtcaagtgtacatggaagcattagtgcattgaacggccgaagaatcaccgcaggtacatggctgatgtgttcatcttctagaggatatcttgcaccagagtacaccattcaagggcagctgaacaaaaagagcgacgtctacagctttggtgtgctgctgttggagattgtcagtggcagatgccacactgatcctagattacccgttgacgagcagttcctcctagaaaaggtctggacactctatgagttcgatgatctcgagagcatcattgataggacactaaagcgcgattttgacaccgaggaagcactctggttgcttaaggttgttgattcaatcgtgagggtcctcaattaaggtcgaatggatgcaatcaaaactagaagggtgtgcgccatcgaggatcactgcagctaaggcaatcgtgaaggctggaatcgttgttatggcaccgcaagctattagtgtgctaggtggatttaggcctcaagggaaaacgattgacaatgttgtaaaggttgtggagacaacacttgccatgcaggaggctggatgcttctctgttgtgtattagttgttggcagatgatttataagatattgagatcaaaatcaggatgtttccaaactgtctataatcaggatggctattgtagcttttacagtaggttggtattatatgtttccaatttgtgtttttattaaaccattgtctaattggtgtcaggtcttcttcccatgggcggatcattgtcgactggtggtgtcaggtcttcttcccatgggcggtgccctggagcgcctgattgtctcacgtatttgaccagcaacaagggacgaagattggagctgtgtggattgtgtggaggcgacacgggtcaggagcatttcatctgatcccttttctctgatggatatgctgatattcaaggctgtggaagagcaggtcaagaagagagtagagaataaggcaatgatcttcgagcagaatgccactgatagtgagtgcaaggtcgatcctaaagtgctctccaagctatatgatcattgggtggatgccacacaccaaggatgtctgccttgactaatcaccgattagctgtagctgtaaattttatgtatacatggtttcagttgcgctcgatccaattgtcttaaccttgaatggacattttgatgtttctttcatgaatgttcaggtcaacggcaagataaaccaattgcgttgtatgagttttagatcataactcaagttttttgtagatcttggtgctatttcatatgatgtgtcatgtttcagtgattgctttatagtgaacccgtaagatgt

SEQ ID NO: 116858 - DNA, 1338 bp, Zea Mays
gtttctacagctgtgtaggctgctgagcgatttagcatggtacatttttttctgcacaattgtacatggaagcattagtcataggatatcggttgttgaagtacgtcgtcaagtgtacatggaagcattagtgcattgaacggccgaagaatcaccgcaggtacatggctgatgtgttcatcttctagaggatatcttgcaccagagtacaccattcaagggcagctgaacaaaaagagcgacgtctacagctttggtgtgctgctgttggagattgtcagtggcagatgccacactgatcctagattacccgttgacgagcagttcctcctagaaaaggtctggacactctatgagttcgatgatctcgagagcatcattgataggacactaaagcgcgattttgacaccgaggaagcactctggttgcttaaggttgttgattcaatcgtgagggtcctcaattaaggtcgaatggatgcaatcaaaactagaagggtgtgcgccatcgaggatcactgcagctaaggcaatcgtgaaggctggaatcgttgttatggcaccgcaagctattagtgtgctaggtggatttaggcctcaagggaaaacgattgacaatgttgtaaaggttgtggagacaacacttgccatgcaggaggctggatgcttctctgttgtgtattagttgttggcagatgatttataagatattgagatcaaaatcaggatgtttccaaactgtctataatcaggatggctattgtagcttttacagtaggtcttcttcccatgggcggtgccctggagcgcctgattgtctcacgtatttgaccagcaacaagggacgaagattggagctgtgtggattgtgtggaggcgacacgggtcaggagcatttcatctgatcccttttctctgatggatatgctgatattcaaggctgtggaagagcaggtcaagaagagagtagagaataaggcaatgatcttcgagcagaatgccactgatagtgagtgcaaggtcgatcctaaagtgctctccaagctatatgatcattgggtggatgccacacaccaaggatgtctgccttgactaatcaccgattagctgtagctgtaaattttatgtatacatggtttcagttgcgctcgatccaattgtcttaaccttgaatggacattttgatgtttctttcatgaatgttcaggtcaacggcaagataaaccaattgcgttgtatgagttttagatcataactcaagttttttgtagatcttggtgctatttcatatgatgtgtcatgtttcagtgattgctttatagtgaacccgtaagatgt

SEQ ID NO: 116859 - DNA, 1769 bp, Zea Mays
cccgtctcacgaacccgtcccctcacatccctcgcgttgccattgcttggtcctctccgcgcccgccgcccctgctcggctgctccccatgtcccgcgccgcggtgacaaggatccgagaacacccctgcggacgcatccgggattcaaggcctcccctcccttcccctgcccccaccccctcggtgatgcccggatccacgactgctaccgtccagcctcgttctccgtccgcgaccgcttcacggtggcgcagacgctggaggtgtccacagggggcgacaccgtgaccctgcctccgttcgacatcagcgcccctccccccaccaccgtcgatttgtagaagctcctcgcccgttcttgcttcaccagcgattcggggaggccatgcccccctcggccgcaccccttctcctcctcgccgcatcccgcctctgggcagccgcgccacccctccctccacctcgccgtctcctacctcctccccctcgaccgcatctgcctccctctgtggcctcgctaccaaggtcaagatcgtcgagatttgttagggtttggggtttttgcggttgactctgaatcccgccgccgctgctcgcgcaggaggcctcgagctcccagtgctcccctcctcaaccaccctgggtaagtggctcccagattgatagggaaagagttcggactgtaggggctattgaatacttgattgatgccacaagatctggaaatgtgtcccgctatatcaatcacagaagttgttccccaaatctcagcacccgattggttttggtagagagcaaagattgccagcttgctcacattagcttgtttgctaatcaaaacattgccgtaggagaagaactcgcctatgattaccgacaaaagcttgtagcaggcgatggctgcttctgccattgtgggggccttagtgtaggcgtacaatctacgtcgacgccaaaattaaatcaccttcctacatccatagttgatatgaactggacatgcttaatccagggtacatggctgatgtgttcatcttctagaggatatcttgcaccagagtacaccattcaagggcagctgaacaaaaagagcgacgtctacagctttggtgtgctgctgttggagattgtcagtggcagatgccacactgatcctagattacccgttgacgagcagttcctcctagaaaaggtctggacactctatgagttcgatgatctcgagagcatcattgataggacactaaagcgcgattttgacaccgaggaagcactctggttgcttaaggtaagtcttgtgtgcatcccggatagccctaagatcaagtcctccatgtcaatggttgccaagatgctgcaagggtcctcaattaaggtcgaatggatgcaatcaaaactagaagggtgtgcgccatcgaggatcactgcagctaaggcaatcgtgaaggctggaatcgttgttatggcaccgcaagctattagtgtgctaggtggatttaggcctcaagggaaaacgattgacaatgttgtaaaggtcttcttcccatgggcggatcattgtcgactggtggtgtcaggtcttcttcccatgggcggtgccctggagcgcctgattgtctcacatcccttttctctgatggatatgctgatattcaaggctgtggaagagcaggtcaagaagagagtagagaataaggcaatgatcttcgagcagaatgccactgatagtcaacggcaagataaaccaattgcgttgtatgagttttag

SEQ ID NO: 116860 - DNA, 1516 bp, Zea Mays
gtttctacagctgtgtaggctgctgagcgatttagcatggtacatttttttctgcacaattgtacatggaagcattagtcataggatatcggttgttgaagtacgtcgtcaagtgtacatggaagcattagtgcattgaacggccgaagaatcaccgcaggtacatggctgatgtgttcatcttctagaggatatcttgcaccagagtacaccattcaagggcagctgaacaaaaagagcgacgtctacagctttggtgtgctgctgttggagattgtcagtggcagatgccacactgatcctagattacccgttgacgagcagttcctcctagaaaaggtctggacactctatgagttcgatgatctcgagagcatcattgataggacactaaagcgcgattttgacaccgaggaagcactctggttgcttaaggttgttgattcaatcgtgagggtcctcaattaaggtcgaatggatgcaatcaaaactagaagggtgtgcgccatcgaggatcactgcagctaaggcaatcgtgaaggctggaatcgttgttatggcaccgcaagctattagtgtgctaggtggatttaggcctcaagggaaaacgattgacaatgttgtaaaggttgtggagacaacacttgccatgcaggaggctggatgcttctctgttgtgtattagttgttggcagatgatttataagatattgagatcaaaatcaggatgtttccaaactgtctataatcaggatggctattgtagcttttacagtaggttggtattatatgtttccaatttgtgtttttattaaaccattgtctaattggtgtcaggtcttcttcccatgggcggatcattgtcgactggtggtgtcaggtcttcttcccatgggcggtgccctggagcgcctgattgtctcacgtatttgaccagcaacaagggacgaagattggagctgtgtggattgtgtggaggcgacacgggtcaggagcatttcatctggtgagtaccgagtacatcccaatccttcttttctctgtgaaaattgtagatgtgtatgtccggctgcagagtttgtgtctttctaaaaattgatatgcctgctaaattgttgtcctgtcttttgggcagatttacagagaagtaaagagaagttgtttacatttagtcatcctctgtatctgaaacaagactatgtttctaccttgtctttctcatggttcttagcctatggccgaagcttccatgcttgattcttcaaacatccaatgcagatcccttttctctgatggatatgctgatattcaaggctgtggaagagcaggtcaagaagagagtagagaataaggcaatgatcttcgagcagaatgccactgatagtgagtgcaaggtcgatcctaaagtgctctccaagctatatgatcattgggtggatgccacacaccaaggatgtctgccttgactaatcaccgattagctgtagctgtaaattttatgtatacatggtttcag

SEQ ID NO: 116861 - DNA, 941 bp, Zea Mays
catttttttctgcacaattgtacatggaagcattagtcataggatatcggttgttgaagtacgtcgtcaagtgtacatggaagcattagtgcattgaacggccgaagaatcaccgcaggtacatggctgatgtgttcatcttctagaggatatcttgcaccagagtacaccattcaagggcagctgaacaaaaagagcgacgtctacagctttggtgtgctgctgttggagattgtcagtggcagatgccacactgatcctagattacccgttgacgagcagttcctcctagaaaaggtctggacactctatgagttcgatgatctcgagagcatcattgataggacactaaagcgcgattttgacaccgaggaagcactctggttgcttaaggtaagtcttgtgtgcatcccggatagccctaagatcaagtcctccatgtcaatggttgccaagatgctgcaaggtgagtgtgttgtgggtgataggatcatgaggctggcctgatcacagacgtcatggacctgaaagtcaggatggtagagccggttcagttcagcttgacatcatgctcgagcactatcgcgttgtggcctggggcgcgatgcgcccactccttgttggggatttcccattcagctactacgagtcatgccgtgtaggtacgcggtaggtacgcgatctgtcccctctgttctggataagacgttctgatgtgatagtgatagaaatagaatagaacgatgtggtggtgccacacagcccacaatgtagacgacacttggctatcacgttcgttcgtctcactacagaagggtgtgtcgcggttttcttttttttcactaagcaaatgtgatgcttgttagatttggataagaaaccttttgttttacaatataattcactaattgtatcggccgatattcgattgtttttggttc

SEQ ID NO: 116862 - DNA, 1817 bp, Zea Mays
acaccacgtttttgagaaatcggagcagagatacacaataatggaggcggcaggtggagagcagcacgaaacacgacgacgtgcaggtgcaggcctcgccctcctgggcgtcgtctactcatcgctgctcctgaacgccatcttcgtcgcgcaccacttcctctcgccgtcccggctgctgctccgtgacgacgggtgcgggtgcgggctcacctggtctctgcaggcggccagggaggccgaggcggtggccgccgtggagtgctcgggccacgggcaggtgttcgtcgatggcgtcgccggcgaggacgggcggcccgggtgcgagtgcaacagctgcttcggcgggccggactgctcccttcgcacgcccaactgcaccgccgacgccgacagcgggaacccgttgttcctggagccgtactggcggcgtcacgcggcggccagcgccgtggtgttctccgggtggcaccgcatgagctacaccaccacgggcgggttccagtcggtggagctggagcgccagatccggcgcctgcacggggccgtcggtaacgccgtcgcggacgacaagcacctggtcttcgccagcggctccctgcagctcatcaacgcgctggtgcacgcgctgtcgccggacgccacggccgcctcgccaccgtccagagtggtcgcggccgcgccgtactacccggcgtacagacagcaaacctccatgttcgacggccgcgagtacagatgggccggaaccacggccttgtgggccaactcgtcacgggcgaactccaccgacggcaccttcatcgagttcgtcacgtcgcctaacaacccagacgccctgctccgcgagcccgtcctccgcggctcggcggcggcgatcgtcgaccacgcgtactactggccgcacttcacgcacatcccggcgccggccgacgaggacatcatgatgttcaccgtctccaagccatccggacatgctggaagcagattcggatgggcgctgatcagggacgacgaggtggccaagcgggctttagagtacctgagggacagcaacatgggcgcgtcgcgggacacccagctgcggatgctggggatcttcaagttcatgctggccaacctgcgcggcaaggacgacatcttcgccttcggccacgacgtgatgaggagcaggtggctcaggctgagcgccgccgtgtcgcggacccgccgcatcacgctgcagaagatcgcgccccagtactgcacgtacttcggccgggtcagagagccatccccagcctacgcatgggtcaagtgcgagatggaggaagacgaagactgctacgaggcgctgctgaaggcgaacatcatcacgcgcagcggcgtccagtatgaggcgagcagcaggtacacgaggatcagcctcctcaagtcggacgacgacttcgacgtgctcatggagaggcttgaagatcttgtcgatgccgacaagtacgacgattccaacggttcgagctcaatgtagcaacggtaatccacggaagttcggaagcttggggcggtttagatccacctctctaaattttaagaacactctagctcacattgtatgaggtgggctaaattaaaatgcatatgatcagctaggcgctgattgttctgcgaatgtagtggaacagtcaactagaagttgactgtgttcccacaataaaactacctatattggattggcgcaaattatgcggtcagtatatcattccatatttatagtacaacttacagtttgttggattatttggttcatgttattacaattattctatctttttaggcca

SEQ ID NO: 116863 - DNA, 1956 bp, Zea Mays
acatacaccacgtttttgagaaatcggagcagagatacacaataatggaggcggcaggtggagagcagcacgaaacacgacgacgtgcaggtgcaggcctcgccctcctgggcgtcgtctactcatcgctgctcctgaacgccatcttcgtcgcgcaccacttcctctcgccgtcccggctgctgctccgtgacgacgggtgcgggtgcgggctcacctggtctctgcaggcggccagggaggccgaggcggtggccgccgtggagtgctcgggccacgggcaggtgttcgtcgatggcgtcgccggcgaggacgggcggcccgggtgcgagtgcaacagctgcttcggcgggccggactgctcccttcgcacgcccaactgcaccgccgacgccgacagcgggaacccgttgttcctggagccgtactggcggcgtcacgcggcggccagcgccgtggtgttctccgggtggcaccgcatgagctacaccaccacgggcgggttccagtcggtggagctggagcgccagatccggcgcctgcacggggccgtcggtaacgccgtcgcggacgacaagcacctggtcttcgccagcggctccctgcagctcatcaacgcgctggtgcacgcgctgtcgccggacgccacggccgcctcgccaccgtccagagtggtcgcggccgcgccgtactacccggtcggtgttcagccttttgaatcatccatcacactgcatcatcatcaacgggctaaactaaaacttcaagtctgacaagtcattttctgctgctgaatgaatcccatacggatgtgtacatgtgccgtggtgcaggcgtacagacagcaaacctccatgttcgacggccgcgagtacagatgggccggaaccacggccttgtgggccaactcgtcacgggcgaactccaccgacggcaccttcatcgagttcgtcacgtcgcctaacaacccagacgccctgctccgcgagcccgtcctccgcggctcggcggcggcgatcgtcgaccacgcgtactactggccgcacttcacgcacatcccggcgccggccgacgaggacatcatgatgttcaccgtctccaagccatccggacatgctggaagcagattcggatgggcgctgatcagggacgacgaggtggccaagcgggctttagagtacctgagggacagcaacatgggcgcgtcgcgggacacccagctgcggatgctggggatcttcaagttcatgctggccaacctgcgcggcaaggacgacatcttcgccttcggccacgacgtgatgaggagcaggtggctcaggctgagcgccgccgtgtcgcggacccgccgcatcacgctgcagaagatcgcgccccagtactgcacgtacttcggccgggtcagagagccatccccagcctacgcatgggtcaagtgcgagatggaggaagacgaagactgctacgaggcgctgctgaaggcgaacatcatcacgcgcagcggcgtccagtatgaggcgagcagcaggtacacgaggatcagcctcctcaagtcggacgacgacttcgacgtgctcatggagaggcttgaagatcttgtcgatgccgacaagtacgacgattccaacggttcgagctcaatgtagcaacggtaatccacggaagttcggaagcttggggcggtttagatccacctctctaaattttaagaacactctagctcacattgtatgaggtgggctaaattaaaatgcatatgatcagctaggcgctgattgttctgcgaatgtagtggaacagtcaactagaagttgactgtgttcccacaataaaactacctatattggattggcgcaaattatgcggtcagtatatcattccatatttatagtacaacttacagtttgttggattatttggttcatgttattacaattattctatctttttaggcca

SEQ ID NO: 116864 - DNA, 1409 bp, Zea Mays
cgggaacccgttgttcctggagccgtactggcggcgtcacgcggcggccagcgccgtggtgttctccgggtggcaccgcatgagctacaccaccacgggcgggttccagtcggtggagctggagcgccagatccggcgcctgcacggggccgtcggtaacgccgtcgcggacgacaagcacctggtcttcgccagcggctccctgcagctcatcaacgcgctggtgcacgcgctgtcgccggacgccacggcgtacagacagcaaacctccatgttcgacggccgcgagtacagatgggccggaaccacggccttgtgggccaactcgtcacgggcgaactccaccgacggcaccttcatcgagttcgtcacgtcgcctaacaacccagacgccctgctccgcgagcccgtcctccgcggctcggcggcggcgatcgtcgaccacgcgtactactggccgcacttcacgcacatcccggcgccggccgacgaggacatcatgatgttcaccgtctccaagccatccggacatgctggaagcagattcgggtatgtctgcatatacgaatccatgggcaggccgagtgacattcacctgaccctgacctacctcatgcttgccgcattgcattgcgcaccggccgcagatgggcgctgatcagggacgacgaggtggccaagcgggctttagagtacctgagggacagcaacatgggcgcgtcgcgggacacccagctgcggatgctggggatcttcaagttcatgctggccaacctgcgcggcaaggacgacatcttcgccttcggccacgacgtgatgaggagcaggtggctcaggctgagcgccgccgtgtcgcggacccgccgcatcacgctgcagaagatcgcgccccagtactgcacgtacttcggccgggtcagagagccatccccagcctacgcatgggtcaagtgcgagatggaggaagacgaagactgctacgaggcgctgctgaaggcgaacatcatcacgcgcagcggcgtccagtatgaggcgagcagcaggtacacgaggatcagcctcctcaagtcggacgacgacttcgacgtgctcatggagaggcttgaagatcttgtcgatgccgacaagtacgacgattccaacggttcgagctcaatgtagcaacggtaatccacggaagttcggaagcttggggcggtttagatccacctctctaaattttaagaacactctagctcacattgtatgaggtgggctaaattaaaatgcatatgatcagctaggcgctgattgttctgcgaatgtagtggaacagtcaactagaagttgactgtgttcccacaataaaactacctatattggattggcgcaaattatgcggtcagtatatcattccatatttatagtac

SEQ ID NO: 116865 - DNA, 579 bp, Zea Mays
atgagctacaccaccacgggcgggttccagtcggtggagctggagcgccagatccggcgcctgcacggggccgtcggtaacgccgtcgcggacgacaagcacctggtcttcgccagcggctccctgcagctcatcaacgcgctggtgcacgcgctgtcgccgtactacccggcgtacagacagcaaacctccatgttcgacggccgcgagtacagatgggccggaaccacggccttgtgggccaactcgtcacgggcgaactccaccgacggcaccttcatcgagttcgtcacgtcgcctaacaacccagacgccctgctccgcgagcccgtcctccgcggctcggcggcggcgatcgtcgaccacgcgtactactggccgcacttcacgcacatcccggcgccggccgacgaggacatcatgatgttcaccgtctccaagccatccggacatgctggaagcagattcgggtatgtctgcatatacgaatccatgggcaggccgagtgacattcacctgaccctgacctacctcatgcttgccgcattgcattgcgcaccggccgcagatgggcgctga

SEQ ID NO: 116866 - DNA, 644 bp, Zea Mays
atacaccacgtttttgagaaatcggagcagagatacacaataatggaggcggcaggtggagagcagcacgaaacacgacgacgtgcaggtgcaggcctcgccctcctgggcgtcgtctactcatcgctgctcctgaacgccatcttcgtcgcgcaccacttcctctcgccgtcccggctgctgctccgtgacgacgggtgcgggtgcgggctcacctggtctctgcaggcggccagggaggccgaggcggtggccgccgtggagtgctcgggccacgggcaggtgttcgtcgatggcgtcgccggcgaggacgggcggcccgggtgcgagtgcaacagctgcttcggcgggccggactgctcccttcgcacgcccaactgcaccgccgacgccgacaggcatacgcgcttctccttgccttgcttgcttgtttcagctggggcactcgataagtctctcccggtccacgatggacgcataattatttttccttttctgagtattattaggttgaagcaaattctactttaggttttgtttagatacttacttcagttcacagatattgaggtggatttatgtggaatttaagccaaacatagttgttgtttggttccattccatcacggcaaccttgacacaaa

SEQ ID NO: 116867 - DNA, 1757 bp, Zea Mays
atattacggcttttgaaagcacgccgagacgtacgtccaacaataatccaacaatggaggccgcggaggagcggccaagaagacgccctgccggcctcggcgtcctcgccctactctgctcgtcgttgcttcttaacgtgctcttcctcgcgtactactacttcctctcgccgccgtcccagcttgccgatggtggcagctgcgggctgagctgggcgctgcgggcggccagggatgccgaggcgttggccgccacggacagctgctccggccacgggcaggtgttcttggacggcgtcgtcggcgaggacgggcggcctgggtgcgagtgcaatcgctgcttcgacgggccgcactgctcgatccgaacacccaactgcactgccgatgctaccagcggggacccgttgttcctggagccctactggaagcggcacgcggcggccagcgccgtgctagtgcccggatggcatcgtctgagctacgccaccaccgacggcctcttccaatccgtcgagctcgagaaccacatccggcggctgcacagggccgtcggcaacgcagtcgtggacggcaagcgcttggtgttcggcgccggctccacgcagctcatcaacgcgctggtgcacgcgctctccccggacgccaacgccgccgccgcctcgccaccggcccgcgtggtcgccaccgcgccgtattacccgccgtacagaacacagacagcgatgttcgacgggcgtgagtacagatgggaaggaaccacggcggctgcatgggccaacgcgtcacgaaactcctccagcttcatcgagttcgtcacgtcgccgaacaaccccgacgccctgctccgcgcgcccgttctgcgcggctccgcggtgatcgccgaccacgcgtactactggcctcacttcacgcacatcgcggcaccggccgacgaggacgtcatgctgttcaccatgtccaagccatctgggcatgccggcagcagactcggatgggcgctgatcagggacgagaaggtggccaagagggcgtacgagtacgtgcagagcagcatcatgggcgcgtcccgggacacccagctgcgcatgctggagatcgtgaaggtcatgctggccaacctgcacggcgaggaggacatcttcgcctttgggcacgacgtgatgcgaaccagatggcgcaggctgagcgccgtcgtgtcgcggtcccgacgcatctcgctgcagaggatcaacccccagtactgcacgtacttcaaccgggtcagagagccatcgcctgcttatgcatgggtcaagtgcgagagggaggaagacgacgactgctacgaggcgctgctcaaggccaggatcatcacgcgttccggcgctggctacgacgctagcagccggtacacgagggtgagcctcctcaagtcggatgacgactttgaagtcctcgtggagagggttacggatcttgtcaacgccgagaactacgacgacgatgtgcctcgaggatcgagctccatgtaatgataattgatccccaagttatgaactccatattaaaatgccggacaccacatgagcacttcgagcacgaattagagcggtggccaagttaagaaaaaaagaggacaatgggccggtttgtttcacttttttttttattctagccgccagaagctaaacatccagtctttcagttcgttgctaaaaaccgtctaaaatcaacttgaacacataatcgatcgagtcgtcacgatagaaagaatc

SEQ ID NO: 116868 - DNA, 656 bp, Zea Mays
aaaatgatgtttcaaactagcatacattactgctgccgccgagaagaaaaatgctgcacgcgagacgcgatgtgctgcacagctggagcatggatcagatcagacggtcggtggtgccaattgacagagtcagagccgacggccgggcagaaagaagcggcgcgcggcaactatctgatgctgtgccactgcccctgctacttgtagctgtaggccagagtcttgtgcagtgcagacagcagagcactagtaggccaccagacttctcgcggccggaggtggagaagagcggcggccatcatcctcgagaccacctggacatcgttgttggtctcctttgccgtcttgcgaatgccactcgattacagagacatgctcctcctcctcctgtctcctgatgcagccttctcacgacatgcatgggagacataggcaaaggcttatacatggccgaaggacctacggattgttctcatggccgaaagcttttcagcgaaacctcctgcaccatccgcttggacaaaagggagaggtcgatcctagccactagcgcagcatgggtagggtagatggtcctcgatctacgcccgccagccatgccgccacttgctggattccgatgaagccagcagcgaattcgcaccgctgcttttctt

SEQ ID NO: 116869 - DNA, 2163 bp, Zea Mays
atggcagccgccgcgccctcctcgtcctcgtcctcgtccgcgcgggcgcgcgcgcgcgcgccgccccggccattgcatcccctcgcccgcggcggccccgagcgcgaagaaatggaggccgtcgcggcgacccaccccggcgcgccaccgatgcggcgcaaggggaggaagcagaagcagcggtgctcactcgtgccgtccggacctactacgcagctgtggcccaggaccgtgctgcggaagtggctcaacataaggtcgccggagtccgacttcagcgccgacgagggcgacaccaccggcgacgacaccgacagcgaggtcgattacgaaggaaaccaattgggggtggttccttgtggccttcgtagaaggcgcaagtcagagacccttcgtgctcagtatattgatgtcagggagctcaggatttgtgctggaacatggaatgttgcaggcagacttccacctaatgacttggatatccaagaatggttggatatggaagagccagctgatatatatgttcttggatttcaagaaattgttccactaaatgctgggaatatatttggcgctgaagacaaccgccctgtagcaatgtgggagcatattattcgtgaaactttgaataagatcagcccagataaacccaaatataaatctcacagtgatcctccttctccgtcaaggttcaagccatctgatgatgcttttgttatggaagatgaacttattagtgagtctgatagtgaaggtgatggggaggtgcacccattgaacgaacaagatttggtcgactctgttgatggcattcatggtaacaaatgtgaacctcaaacaattttacaagatgaagagttcagcaggttgccttcagtgaagacttttgacagatccaataacctaagttttaaagaatctaatttggaagagaagatctgccagaagatattaactaaaacattcagtcactcagagaggcttgggatgatttggcctgaaccaccattggatatgtttgcccagtgtcttccagacagcacaaagccatttgcttcaggaaaggttttaagatcatatttgtctttcaagtcggtaaatggagattctggtccatttgctgaggacaattcagttcctgatttttatatgagctgtgcagcagttaaaagaaaaaggccatactttgtaagaataataagcaagcagatggttggagtgtacctatcaatatggagtatttatgttttagcaccaattgtcttccagtctttccattctcatatcactggcatttactttccatcaatacaccaacactacatttggaaaaggggatcaatatcagtaagcatgtccatataccaaacacacttttgctttatatgttgtcacctgacctctggagaaaaggaaggagatgaactaaaaaggaatgctgatgttcaagaaatccaccgaaggacaatatttaatctagtttcgagagtcaacatgcctaaaacgatatatgaccatgaaaggattgtatggctaggtgatctcaactataggatcaacttaccatatgagaagacacacgaactcatatccaagcaggactggaacaaattgtttgggaaagaccagctgaaagtagagctgaagaaggggcatctgtttgaaggatggactgaaggggtcatcaactttcctccaacgtataagtacaaggttaactcagaaaagtacataagtgatgataacaaatctggaaggagaacacctgcatggtgtgaccgaattctttcccatggtaagggtatgagattactgtcatataagacagttgatctcagactatcagatcaccgccctgtgactgctgtgtacatggcagatgtggaggttttctcttcaaaaaagctgcagagagctctgaccttcaccgatgcagaggctgaggaacagctctccttcgaggaagacaatgcttctggaatatacaaccttggactatatgaaagttcaagtgaagtttacaccccattagtaagagccaaagttttcagcaaggttacctggttgaagccgcagccgttgatgcgggcgctgagccggccccggcggaacggactgcccgccgtgtcccggtcattcccaacgctgcgacttcgacgctag

SEQ ID NO: 116870 - DNA, 828 bp, Zea Mays
atggcggggctctacgagaagccgtcggagacgtacgccaagaagcgtccgcagtaccccaaggagtggttctccatgctggccggcctcaccgcggggcaccagcgcgcctgggacgccgggtgcggcaccggccaggccgccatcggaatggcggagcactacgagagcgtggtggcgacggacgtgagcgagggccagatccagcacgccatcgcgcacccgaaggtgcggtacctccagaccccggagcacctgtcggaggacgaggtggtgtccctggtcggcggcgagggctccctggacctggtcgtggtggccacctccatccactggttcgacgtcccgctcttctacgccgtggtgaagcgcgccctgaggaagcccggcggcgtgctcgccgtgtggggctacaactacgagatccacccgttcgaggacgcgctgcacggccagctctacccggccctgcggccgtaccaggacccgcgggcggtgctggccatggagcggtaccggtgcctgccgttcccgttcgagcccgtcggggtgggcgccgagggcgcgcccgccgatgtggacatggaggtggagatgacgctggaggacctggtcgggttcctgaacaccggctccgtggtgaccacggcgagggcgaagggcgcggacctggaggcggtctgcagggacgcgctgaagcgggtggaggacgagtgggccggcgcgcccaccgtacccaggaagctcgtgttcaaggcgttcatgctcgccgggaggcccccaagtgctgaaaagcgatcataccgaaccgaagcaccgagctgctga

SEQ ID NO: 116871 - DNA, 5469 bp, Zea Mays
gtatcatccatggaagtgacaaaagaatttgatccacaaaatctcttggagctgttctccatctttgctatcaatttgagcagtccaaccaaggatgttcagattttaacattgaggattctatcatattttgtgaagatggatcaacgtctaataacggatgaggagcgaccacacaagaggcagagaacagaagtttctggagaggaagctgttgctaaatacgctaatgttgtggatattcttttgattattgagtcaatgccaatttcagtatctactagccgtaaaatttctatcttcatttctcggatacaaatgagtttatcttccaagatggttcatgatgattacatgcctcctctcttacatggtattattggcatattgtacaatatatttagtgatctatggccacaaacactggattgccttgctgttctcattagaaaacacaaggagcttgtttggggtcagtttgttctgttcattgcaactcaccaatcaaaaggactgactgtgaaaaatcaggagaagctggaagctgcaacccaaccacagtctatttttgactgcttcaacgggggcgatgtcggtgaggccgaggcgggagaggccaagtcctgccgggccgcacccggacccgagctccacggcccgagttcccgggaagcggggcacgtcggcaaaggggagggccgggtcgcggatgcagcgctcgacgaacttgacgaggaccagggacgagggccacacagaggtgcccacctcgaaggagtcgttgtcctgctcgaacatcagcaccgcgccgccgaccggaagctccaccaccggagacgctgtgaaccgcatctccgccggcggcccgtgaagacactgaagcaaagcgaccagaaaagacaaccaactgcgaaccccaggcggaggcgggagtcgcgcctcctcagccgctgggtcgcgcgccaggccgaggagatgtggcgcgagctcgagcacccccgcactgacgccgaccaacccttcgaccgcgagccttacccggacaacgccgaccgtgaacacgagcgtgtgcgccagatcgaggggatgacgggggggcgggcagtagcacggtgtcgcccatgtgcacgacgagggggtcgctctgactcggaggccggcgagccgctcgtgctaggcaccgggatgctgctcgtccatctcgggcgcgcctccgtcctcatcctctccttcttccaagggtcgatatgcggcatcacgttcaccttcaccaaccgctgcggcgacacggtgtggccgggcctgctgtccggctcggggacgccgccgctggagaccacgggcttcgcgctcgcgccggggcagttgcgctcgctgtacgtgccgcaggggtggtcgggccgcttctggggccgctccggctgcaccttcgacgcctccggcaaggggtcctgcgccacgggcgactgcggctccggcgaggtcgagtgccacggcgcgggggcgtcgccgcccaccacgctcgccgagttcacgctcgacgacgacggcggcaaggacttctacgacgacaatgtttgccatcgggtgcaaggagaggtgggttccttaaatgatgccaggtacttggaaaatatcctcctccttttgactggtcgacaattggacacggccactgaaattgctgcctcaaggggtgatgttcggttggcaatcttgctaagtcaggcaggtgggtcaatgtcaaatcgatctgaccttgcacaaacactggatcaacggaaaatgaatggtctagattttgattatattgaggaagactggttaaaggccgcttttctagatttaccaattgattggaagaggtaccttggtttgattatgtggtatcaattatcacctgatacaccactcgatattgtcattcgttcttacgatcaactccttgatgaaggaccacttgatgaagcacctcagtggtcctcgggtgaccattttgatatctccttctacctaatgcttcttcatgccaataaagatgagaagtttgggctgctaaagactatgttcagtgcattctcatcttcattcgaccccttggattatcatttcatatggcatcagcgttcaattttggaggctgttggagctttcagttcaaatgaccttcacttgctagatttaagttttgtttatcaattgctttgtcttgggaggtgccattgggctatctatgtcattctgcacatgccgtatcttgacgatgccccatacattcatgagaaattaatcagggaagttttatcacagtattgcgagtcatggagtagagatgatgctcaaaggcagtacattgtagaacctggtataccagaagaatggatgcatgaagctctggctctttatcacgaatactatggagataaacagggcgcactggagaatttgattcagtgtggcaactggaagaaagctcatactattttcgtgacttctgttgctcattctatgtttctgtcattcacttcattcattgttattttggctcagctaaccattaggaggtctggaggatcacaagtgccttggagaaccacaaacttctacgttctgaagaactcaatgcaagaaagaaatgccatggatgattcgggttcactcgaggagatgagtgaatcatgcagaagtttctttggccgattaaacgagtcgttgttagtctggggaagcaaattacctgttgagtcaagggcatgctactcgaagatggcagaggagctatgcgcgcttctggtggacaccccaagcgagacgttgaatctacccatggggtgtcttctaacgatgctcaacgctccacttccggacgagagcaggacgccgctgcggcggcactcgctccggctgctggcgctcgtcgccgaggagcacccgcgggacgccgtcgcgccgctcgtgcccaggctcctggccgccgcgctgcgccgcgtccgggacccggactcctccgtgcgcgcaccgcccgcggcgctggccccgctcaccgacgtcgtgctccacgagcaggaccagtgcgcgcagctggccgcagcgctcgccgccgccgctggagaagaggccatcggggtcgtaggcgtccttgacgcgcaggaagtgcggcaggccggggtatttgcgcgcggcaccgacgaaggcgaggttgcagttcttgccccagtgcggcaggccaccgtacttgaagatgcccatctgctcgacctcctgcagcacgtcctcgaacaggcgcgcccgcccggggtcacggctgcggtagtatgtgatgtcgaagtccaccatgtctcccgacggctccccgcgcggcgcgagcttgcccaggtaggctgtggacgccttcacgtagcgcatgaggatgccgttgtagagctccacgccacacagcgccctgggctccaggtcccgcagccggtgcacctcagcgacgaacagcacggcgcggcgcacggggaggctgaaggtggtctggtggaagagggtgccgccccgcacgcgcgggtcccaggggcacaccgtcagcagcgcgtcctcgggcccaccacgggcgtgagccaatccaacatgatgcgaccgctgctccgtgacccaaccacgctgctcccgtcactcgccgaggcgtcccacctccgcgcgctccacgcgcacctagtcgtatcgggccgcctcgcctccccgtcccacctcgccgccttccttgcttcgctcgcctcctccaaccacctctcctacgctcgcctcgtcctcccgcagcgtcccgccacgctgcttgcgcacaatgccttcatccgcgcgctcgcccgcgggccacgaccgtgccttgcgttcgccgccttccgggacctcccgctcccgcctgaccactactccctcaacttcctcgtccgcgccgccaccgccctggtggcctcggccgcggaagaaaagcacgtgtcggccgaggtgaacgcgaggctgcaagcggtgtccgcgcacggggccgcggtccgctggggccacgcggcggacccgcacgtccagagcggagtgctctccatgtacgccgcgctgggggacgtcgcctcctcacgggctgcatttgcggagatcgcgtgcccggacgtcgtgtgcgtcacggcgatggtggcggcgctcgctgcaggcggcgacgtggacgccgcgcgcgacctgtttgacggaatgccgcagagagaccacgtcgcatggagcgccatgatcgcagggtacatgcacgtaggcaggtcgagggaggcactgatgctgttcgacgaaatgctgagtgctggcactaccgtcggcgaggcgacgctggtgtctgtgctcactgcctgtgcgcaaattggcacattggatcgtggtaagtgggtacactggtatgtacgcagtcgagggatgcagatgtcgatcaagcttggcaccgcgttagttgatatgtattccaagtgtggtgctgtggtgacagcgatggaggtgtttgagagcatggctgaaaggaacgtttatacctggacaagcgcggttagtggccttgcgatgaatggcatggggaccgagtgccttcagctgttcaagcgcatggagggtgcaggaatacagcctaacggtgtcagctttgttgcagtgctgcgtggatgctctatggctgggttggtagatgagggacgagcatgttttgactcgatggacaagtatggagttgatccttggccagaacactatggctgcatggttgatctctatggtcgagcagggcgtctagacgacgccattagtttcatcaatgacatgccaatggagccacacgaaggtgtgtggggagctctactcaacgcttctaggattcataatagtgttgacttgggcaaatatgcattggacaagctcttggcgattgagtctgaaaatgatgcagctcatgtccagctgtctaacatctacgcagaatcgcagaattggaagggtgtctccagggttcgaggcatgatgaaagccaagggagtgaagaaggtgcctgggtggagcaccattgaggttgatggcaaggtacacgagttctatgttgggggcaggttgcacccaagatacaatgagatcgagctgatgcttgcagagatggatcggaggctaagactgcaagggtacactgcgaacaccagagaggttttgtttgatattgaggaagaggagaaagagggtgccatctccttgcacagtgagaagctggcactggcctttgggctgatcgtgttgccagaagacgtggaaattaggattgtgaagaacctaagggtatgcatggactgccatcgttatattaaattggtatctaaggttttcaacagggaaattgtaatgagagataggaataggtttcatcatttcaagggtggggaatgctcatgtagggattactggtga

SEQ ID NO: 116872 - DNA, 3134 bp, Zea Mays
gtcgtggcccgagccggggccgcggagacgccggtggctggcactgacgaggacgctggagcggcgttctccgagacgttccccctgcgccgatgccaagctgtggaagggaaggcgtgggtgagggtggacgcagagccggactccgaaggcaagtgcaaggtcgttgttgggtgtaatgtggcggggaagtgggtactgcactggggtgtctcgtacgatgatgaacatggaagagaatgggatcagcctccttcagaaatgagaccacctggttcagttgcaatcaaggactatgcaattgaaacaccattggagattttgcccaattcagaaggacagcccctttatgaaatgcaaatcaaatttgataaagacattccaatcgccgctgtcaactttgttctaaaggaagaggaaacaggtgcatggtttcagcataagggcagggatttcagaatacccttaaatggatccttcaatgatggcggaaaacaagatattgatatctggccaggagatttggggcatgtattgaagaaatctgaaggctctagttctcagccacaaaacacttcacctgaggatacaggtttgagtggcaaacatatatcagggttctatgaggaataccccatccttaaatcagagtatgttcagaatcttgttactgtcactgtgaggagagacattgaagcgcataaaagacttgtggaatttgacactgatattcctggagaagttatcattcattggggagtttgcagagacaatactatgacatgggagatcccaccagaaccacatccaccaaaaacgaaaatattccgacacaaagctcttcaaactttgctgcagcaaaaagctgatggagcaggaaactcaatttcattctcacttgatgcagagtattcttgtctgttttttgtgctcaaacttgacgagtatacttggttgagaaatcttgagaatggatctgatttctatgtgccacttacaagagtggggcagtatggcagcactcaggatcctgacaaggctgaggcacagaaaatagaggataagtcttcacaggctgatggcttaatcagtgatataagaaatctggtggttggcctatcgtctagaagaggtcagaaagctaagaataaagttcttcaagaggacatcctacaagaaatcgaaagacttgcagcagaagcttatagcattttcaggagccccactattgattccgtagatgaatctgtacagctcgatgacacattaagcgcaaagccagcatgttctggcactggatctggttttgagatattgtgccaaggatttaactgggaatctcataaatcagggaaatggtatgttgagcttggcacaaaggccaaggagttgtcgtccttgggtttcaccattgtctggtcaccaccaccaactgattctgtgtcacctgaaggatacatgccaagggatctatataatctaaactcacgatatgggtccatggatgagctgaaggaacttgtgaagattttccatgaagctggtatcaaggttcttggcgacgctgttctaaatcataggtgtgctcagtttcagaacaacaatggtgtctggaatatatttggtggtcgtatgaactgggatgatcgagcagttgttgctgatgatccacatttccagggaagaggaaacaagagcagtggagataatttccatgcagcaccaaacattgatcactcccaagagtttgtgaggaatgatcttaaagaatggctttgctggatgagaaaggaagtcggctacgatggatggagacttgactttgttcgtggtttctggggtggatatgtcaaggactatttggaagcaagtgaaccatactttgcagtaggagagtactgggactccctcagttatacttatggtgaaatggactacaatcaggatgcccacaggcagagaattgttgattggataaatgctacaaatggaactgctggcgcatttgatgttaccactaaaggaatacttcatgcggcgcttgaaagatcagagtattggcgcctgtccgatgaaaaagggaaaccccctggagtattgggttggtggccttcaagagcagtcacatttatagagaatcatgatactggttctactcagggccattggaggttcccctatggtatggaactgcaaggatacgcctacatcctgacacaccctggcactcccgcagtcttctatgaccacatattttcacacttacaaccagagatcgctaaatttatttccattcgacaccgtcaaaagattcattgccgcagcaagatcaagatactaaaggcagagaggagtttatatgcggctgaaattgatgagaaggtaacaatgaaaatcggatcagaacattttgagccaagcggtccccagaactggattgttgctgctgagggtcaagattacaaaatctgggaagcgtcttcatagacttggcgggctgcgagtgccatataactgctcaaagactaaaaagctacaagaaagcataatgctaggagatggcgcctcagaatggtcagctggcgggagctgctgccgctgccgccatggagcagcaaaattcaacaacataagctatggaagcacttgccacggcgataggattatctaataggactactgttgaacattcgatatatccagaaccacccatcatttgcaggcacattggccattaaaatttagcttcgtcctctattttggagctatgtaaaagcatgcacaactctatttatgtgtgaaataaaatttgaatcttcatcatgggtcaagagatgtattttgccacccacaacatgacttcggtgattctacattcatagcatgcaaccgtaggcagaaatgatatattggacgaaccaaacttgaaaacatcgaaaagataacagtgaaggtgaagattccgagctttagacaatgtgtcaacggagtaatgtacttgatcacattgtcgtttgcagattcagttctcaacatctaaaaccagctagggagaccgcgaactttcaggatgacaccaagttcagagagagctgaggttcagaattatttcactcgacctcaagtattgatac

SEQ ID NO: 116873 - DNA, 3138 bp, Zea Mays
gtcgtggcccgagccggggccgcggagacgccggtggctggcactgacgaggacgctggagcggcgttctccgagacgttccccctgcgccgatgccaagctgtggaagggaaggcgtgggtgagggtggacgcagagccggactccgaaggcaagtgcaaggtcgttgttgggtgtaatgtggcggggaagtgggtactgcactggggtgtctcgtacgatgatgaacatggaagagaatgggatcagcctccttcagaaatgagaccacctggttcagttgcaatcaaggactatgcaattgaaacaccattggagattttgcccaattcagaaggacagcccctttatgaaatgcaaatcaaatttgataaagacattccaatcgccgctgtcaactttgttctaaaggaagaggaaacaggtgcatggtttcagcataagggcagggatttcagaatacccttaaatggatccttcaatgatggcggaaaacaagatattgatatctggccaggagatttggggcatgtattgaagaaatctgaaggctctagttctcagccacaaaacacttcacctgaggatacaggtttgagtggcaaacatatatcagggttctatgaggaataccccatccttaaatcagagtatgttcagaatcttgttactgtcactgtgaggagagacattgaagcgcataaaagacttgtggaatttgacactgatattcctggagaagttatcattcattggggagtttgcagagacaatactatgacatgggagatcccaccagaaccacatccaccaaaaacgaaaatattccgacacaaagctcttcaaactttgctgcagcaaaaagctgatggagcaggaaactcaatttcattctcacttgatgcagagtattcttgtctgttttttgtgctcaaacttgacgagtatacttggttgagaaatcttgagaatggatctgatttctatgtgccacttacaagagtggggcagtatggcagcactcaggatcctgacaaggctgaggcacagaaaatagaggataagtcttcacaggctgatggcttaatcagtgatataagaaatctggtggttggcctatcgtctagaagaggtcagaaagctaagaataaagttcttcaagaggacatcctacaagaaatcgaaagacttgcagcagaagcttatagcattttcaggagccccactattgattccgtagatgaatctgtacagctcgatgacacattaagcgcaaagccagcatgttctggcactggatctggttttgagatattgtgccaaggatttaactgggaatctcataaatcagggaaatggtatgttgagcttggcacaaaggccaaggagttgtcgtccttgggtttcaccattgtctggtcaccaccaccaactgattctgtgtcacctgaaggatacatgccaagggatctatataatctaaactcacgatatgggtccatggatgagctgaaggaacttgtgaagattttccatgaagctggtatcaaggttcttggcgacgctgttctaaatcataggtgtgctcagtttcagaacaacaatggtgtctggaatatatttggtggtcgtatgaactgggatgatcgagcagttgttgctgatgatccacatttccagggaagaggaaacaagagcagtggagataatttccatgcagcaccaaacattgatcactcccaagagtttgtgaggaatgatcttaaagaatggctttgctggatgagaaaggaagtcggctacgatggatggagacttgactttgttcgtggtttctggggtggatatgtcaaggactatttggaagcaagtgaaccatactttgcagtaggagagtactgggactccctcagttatacttatggtgaaatggactacaatcaggatgcccacaggcagagaattgttgattggataaatgctacaaatggaactgctggcgcatttgatgttaccactaaaggaatacttcatgcggcgcttgaaagatcagagtattggcgcctgtccgatgaaaaagggaaaccccctggagtattgggttggtggccttcaagagcagtcacatttatagagaatcatgatactggttctactcagggccattggaggttcccctatggtatggaactgcaaggatacgcctacatcctgacacaccctggcactcccgcagtcttctatgaccacatattttcacacttacaaccagagatcgctaaatttatttccattcgacaccgtcaaaagattcattgccgcagcaagatcaagatactaaaggcagagaggagtttatatgcggctgaaattgatgagaaggtaacaatgaaaatcggatcagaacattttgagccaagcggtccccagaactggattgttgctgctgagggtcaagattacaaaatctgggaagcgtcttcatagacttggcgggctgcgagtgccatataactgctcaaagactaaaaaggaagctacaagaaagcataatgctaggagatggcgcctcagaatggtcagctggcgggagctgctgccgctgccgccatggagcagcaaaattcaacaacataagctatggaagcacttgccacggcgataggattatctaataggactactgttgaacattcgatatatccagaaccacccatcatttgcaggcacattggccattaaaatttagcttcgtcctctattttggagctatgtaaaagcatgcacaactctatttatgtgtgaaataaaatttgaatcttcatcatgggtcaagagatgtattttgccacccacaacatgacttcggtgattctacattcatagcatgcaaccgtaggcagaaatgatatattggacgaaccaaacttgaaaacatcgaaaagataacagtgaaggtgaagattccgagctttagacaatgtgtcaacggagtaatgtacttgatcacattgtcgtttgcagattcagttctcaacatctaaaaccagctagggagaccgcgaactttcaggatgacaccaagttcagagagagctgaggttcagaattatttcactcgacctcaagtattgatac

SEQ ID NO: 116874 - DNA, 525 bp, Zea Mays
atggacgacggctggatcgatgacggtctcatgttcgagcttttcgccgagcaccaaacatgcgacacaagccgacttcacagtctcctttcccaaatccacacagacattgaccaaggcttacgctgcagattttcctacgttgctccacacatgacgcgtttgacggacggcgaacaggacccgagctcgacggtgtccgcggccgaggaaaaccgagctggggactggacagagcgcggacgggcgggattcgacggctgggagtgggacacgccaccatgggcgagcgcagcggcatgcaggcggagctggacgccatggggatggagagggactcggctgggcgcgcacgcagagcatagggagatggagaggacgcagggacgtgcgagatccgacgagtcagccatggcgatcgagtgcggcatcgaggggcaagcaccagggagctctactaggctgaggccgagcgcaggagctggagcagagcgccatgggaaggacctcggcaggcgcgcgtga

SEQ ID NO: 116875 - DNA, 788 bp, Zea Mays
gcgcgaagccaagtctgggcaccagccggcagccgccaggatacttgatggacgactgtggcaaacctttcgtgaagagagagctcagactctccctaaatcctgctccttgcggcgacgacaaccccactactcccaccggagccgcctccgatggcggctcgtcagcctgcacctcggccgtcgcgctgttcgttctcgggctcaacagcgcaatagccatctacggctcgagacacgacccccagtccatactgtttgtggccgtcagcttcttctgcgtcgtgcttctcttccacctgctccgtgcgttcgagagaacgcccccgggatcgccccggaggttgcaggtgaaggcggccatatgggtcgtcaccaccgccctgacggtcatgttctccggcagagttgctccgttgatgcctgcgcccgtggccgccgtcgtctggtccatggccgcggtgacgatccttgcgggcttctacatgttcttcgtatgcccggacgccgccgaagagaggccgaccagcaaagttgttgccgaaggcccgtagatagtttgtgtgtgcgcgcgattccgccatcgaagtatcgtgatgtaaacaactctaaatttaaggtgagcgtccgtgcgtaacaacgggaacatataataatataataacttatatataaaatatatcttttataacaaaatatgtcttatattgttataagaaaatgttttataatctatttgtaatcctagccatacataaattttattatttaatttagctgtttcacta

SEQ ID NO: 116876 - DNA, 704 bp, Zea Mays
cacgagaacagattccatccattttttcttttgtccctgtgccgaatgatggtttgatgagctgtcgatcgagacacgacccgcaaattccttagacaaagcttgcgtccaaccaacgaagctttttatggatcatggggaccctcgtagatagaatcatcacagccacggggcgtcaacgctgccgcactgacctctgcccagcgctgcaaatctaaagtgtcgcaccttcagaggcagaagctgctcttaaatgtggcaaaagaaacaacagtttctatgcacggttctcacgagagttcggaaggaacaccgatcacgaactgtgcagcatataaaaagtactgatcctatgcaagagaactcaatgtacatggtttcacaatccaccaaggacattccaattgctacgtcccctttctaatgagatagaccaaccgtccgtccttcccagcgctaactactgaccaccaagccatcaccgaaatctcttgtccttttgaagcatgatatttgggttccgtgaatgactcttgcttcctgttagctcgccccacctggtcccggctccatgaacacgtgaagaaatgctccagaggatgtctcctgcctgaccagctgcctctttggttggcttcactatagctttggatttcatcagaggatgcttgtttcccttgcccattccagctgcaagcaaccat

SEQ ID NO: 116877 - DNA, 158 bp, Zea Mays
tttttttcttttccttttctaatttgtttttttgtttcaattcaaattccaagataaaaaatgcatcattcaataatgatcgagcatgtaaattagaattttgtactatttattcatttatcttattcacttatccaaatacttttaaatatatagtt

SEQ ID NO: 116878 - DNA, 641 bp, Zea Mays
tttttttgtttgtgcatacttcatacttcagagttgagaatttcagattgagtaataaactatgtccatgtgcagatccatacaaaaaagagaaacagactagagcacaagaggctaaataaattggcctatgtaagctacaacaggaagatggataataggttcacaaatataagagagctaggttccaagggaaagagaagcaatccactgttgcttgaagagtttacatggcaaaatgaatgggttgaagaagaatctgatggtgataacatttgggatgccgtggatgaagctctaggtgcaagtcagggtctccgaggccgaaatttgcctaggactgctactgctggttcctcctctcaaacccagacacaaacctatgttagaaccagaaaaagacccagaaatgcagcagctacagctcaagacatacatgaagaagatgacaattctcctgctgaagatgaacaagaacaagagacagcaagacaaatgaatgatgatgaagatgaaggcgaacaagaatcaggtggaaggggagctgcaggtgatgaatttcagttggatgaagatcttctttaggtaactgggtggtaatgtgtgttgtgtgatactggtatctgggacttgtagtatta

SEQ ID NO: 116879 - DNA, 1416 bp, Zea Mays
acttgatgagtgattaaccttttcttattgctattgactggcgatattgttatgtggtaaacaaatgctctgaagcctctctctcggtgtgtgtaggtggagggatccatgactgtgtcgacgaccagaaagacaagggatcccttcgctattatcaaggccagggaactaattaagcttttgtccaggagcgtccctgcacctcaggcaatcaaaattcttgatgatgagatgaactgcgatattattaagattggtggtcttgtgagaaataaggagcggtttgttaaaaggagggaacggcttttaggccctaacttgtctacactcaaggctattgagattttgactggctgctacatcttagtgcagggaaatactgttgcagccatgggcaactataggggaaggggactgaaacaagtgagaaggattgtagaggattgcatgaagaatgtaaagcatccagtgtaccacatcaaggaactactaatcaaacgtgagctagcaaaaaatcctgctctagccaatgaaaattgggacagatttctcccgaagttcaagaagaagaatgtcaagcagaagaagcctcaaactaaggagaagaaaccgtacacaccctttccaccgcctcaacagcctagcaagattgatcttgaacttgagaacggtgagtatttcatgagtgacaaaaagaaatcagcaaagaaatggcaagagaagctggacaagcaatctgggagagctgaagaaaataaaagaaaaagagaggctgcatttgttcctccaaaggagaacactgcaggtccatccaaatctgacaagaatgccagtgacaacagtgagatagccgatatagcgaagtcattaaagagaaaggcgaaggaatttagaaagaacgaggcccaggagagtgtcatagctgaatcatatatcgcaagtaatgatgaattgcggcaaaaaaagaaaaagaaatcaactaagtccaagtagccctaatcctcatgcataatgacactggcaattgagaaggattgcatgagccatccctataattatgtcattcatgctgtgatcgtattagatgatgaaacaaaattcgaaccttccgctggtctgttgttgcaacagttcatatgcaataggtttttaatgggtaactgccatgataaccaaggaacagaaagagccctcaagcttatcattctccaaagatatatattttcatcctataggttgtgttggttggtagagcctggctggtctaggcctgttgtatcatagtacgttatatgcaggcctcggcatttggtagaatcggtcaagctgcagagttttggttttggcaaaatgttagtcgaatttactgttaaaaaaagctcaacatattttcataaaagaatatccaagcaaggg

SEQ ID NO: 116880 - DNA, 1768 bp, Zea Mays
gcactcgaaaaccccaaacccaaaggcatctcccagtcggagtcgccccatggccccacccacctattctccctgccggcggcagccttaaccctaatctcatcgcctcctcttccttctccagttcctcgaaggcccagcagacaacagcccctctttcttctcagccatgtcggaggacgaagcgaacgctgctgctgcgccggcagagggaaagaactggcggcggaaggggaagcacgacaagcccaagccgtgggacgaggaccccaacatcgaccgctggaagatcgacaagttcgaccctgcctggaacgagggcggcatgctcgaagtcagctccttctccaccctctttccccagtaccgagagaagtacctacaggaggcgtggccggtcgtgaagggcgcattgaaggagtacgggatctcgtgcgagctcaatttggtggagggatccatgactgtgtcgacgaccagaaagacaagggatcccttcgctattatcaaggccagggaactaattaagcttttgtccaggagcgtccctgcacctcaggcaatcaaaattcttgatgatgagatgaactgcgatattattaagattggtggtcttgtgagaaataaggagcggtttgttaaaaggagggaacggcttttaggccctaacttgtctacactcaaggctattgagattttgactggctgctacatcttagtgcagggaaatactgttgcagccatgggcaactataggggaaggggactgaaacaagtgagaaggattgtagaggattgcatgaagaatgtaaagcatccagtgtaccacatcaaggaactactaatcaaacgtgagctagcaaaaaatcctgctctagccaatgaaaattgggacagatttctcccgaagttcaagaagaagaatgtcaagcagaagaagcctcaaactaaggagaagaaaccgtacacaccctttccaccgcctcaacagcctagcaagattgatcttgaacttgagaacggtgagtatttcatgagtgacaaaaagaaatcagcaaagaaatggcaagagaagctggacaagcaatctgggagagctgaagaaaataaaagaaaaagagaggctgcatttgttcctccaaaggagaacactgcaggtccatccaaatctgacaagaatgccagtgacaacagtgagatagccgatatagcgaagtcattaaagagaaaggcgaaggaatttagaaagaacgaggcccaggagagtgtcatagctgaatcatatatcgcaagtaatgatgaattgcggcaaaaaaagaaaaagaaatcaactaagtccaagtagccctaatcctcatgcataatgacactggcaattgagaaggattgcatgagccatccctataattatgtcattcatgctgtgatcgtattagatgatgaaacaaaattcgaaccttccgctggtctgttgttgcaacagttcatatgcaataggtttttaatgggtaactgccatgataaccaaggaacagaaagagccctcaagcttatcattctccaaagatatatattttcatcctataggttgtgttggttggtagagcctggctggtctaggcctgttgtatcatagtacgttatatgcaggcctcggcatttggtagaatcggtcaagctgcagagttttggttttggcaaaatgttagtcgaatttactgttaaaaaaagctcaacatattttcataaaagaatatccaagcaaggg

SEQ ID NO: 116881 - DNA, 482 bp, Zea Mays
ccgtgccacgcctgcctctgctcgcgacaccccagcccctaaaccgcgcccgcaccccatgaaatcgccgctcatcccgcctgcctgccgccgccaccgtcatgtaatcatatcagccctcttggcgtcgtcgccatcgtcatgtaatcatatcagctcccctggcgccggcgccggttcctgccaccggctcccattggaaacggtggacgacaccagcagatacaactgcttcgagcctgggacggtcgtattatggagctcaacaacttgatggtgctcaactggcagcccaggtcgtattcgattgttaatgcattcaataaacagacatccgcaactcttacgtacacttagtttacattttcttttttgctggggggcaattttgtttggagtccagggtatttttgcttcagtgcaattcctgtgagatttgagcaatgcaagtcctttgaatttaagcattcatcattattaaa

SEQ ID NO: 116882 - DNA, 1131 bp, Zea Mays
ctctctttccccgcagcaaggccccagcggcggcacggcgcagtggcgcaccctctggagtcaccttcttcctgcccaatacggccagcggcggcaccccgaccaggttgaccccgccccggcaacgaccagcgggtcgtacagcacgccgatccaattcctccgtgaaggtcgataaactgtgagatactgagattgaagctgcacactgttttagtttcttcaaggacaaggaacattaatatcaccaaatactttcgtcaatggagcttgaagctgatttcgctgatgaagatgtcagttcaaataatggattacaagatctgtggtcacttgacgagatagattcaaagagagcaagattcccgtgctgcattgtttggactcctcttcctgtagtttcatggcttgccccttacatagggcatgttggaatctgtcaggaggatggggctatcttggattttgctggttcaaatttggtgagcatggataattttgcttatggttcagttgccagatacctccagcttgacagaaagaagtgctgccttcctgttaatcttgcagcacatgtatgcaagcagtcctacagccattcagaagttggagcagcgatgtcatgggatgatgctctgcaatcgggcatgagacgcttccagcacaagtactacaatctgttcacctgcaattgccactcgtttgtggcaaactgcctgaaccggctcgcttacaatggctctgtggagtggaatgttttgaatgtggcttcccttgtttggtttcatggccaatgggtggacaaaatgtctttcgctcggtctttcttgcctttcctaactgtgacatgcatcggtattttaatggctggctggtctttcctggtagggatggcagcattctctattcttttgattggatggtttgtttttacggtatactgcgttaagggtttgatatgttgaccggagaagaattactgaaagcactcattagcgcatcgcagtctacatgtaatcgctgtgctagattcaattaaataattgatgtcatcagcttcagtgattcagaaacctgttcaaattcagaccaatttattttgacttatggaggcggtctcgtgaaaaattt

SEQ ID NO: 116883 - DNA, 1026 bp, Zea Mays
ctctctttccccgcagcaaggccccagcggcggcacggcgcagtggcgcaccctctggagtcaccttcttcctgcccaatacggccagcggcggcaccccgaccaggttgaccccgccccggcaacgaccagcgggtcgtacagcacgccgatccaattcctccgtgaaggtcgataaactgtgagatactgagattgaagctgcacactgttttagtttcttcaaggacaaggaacattaatatcaccaaatactttcgtcaatggagcttgaagctgatttcgctgatgaagatgtcagttcaaataatggattacaagatctgtggtcacttgacgagatagattcaaagagagcaagattcccgtgctgcattgtttggactcctcttcctgtagtttcatggcttgccccttacatagggcatgttggaatctgtcaggaggatggggctatcttggattttgctggttcaaatttggtgagcatggataattttgcttatggttcagttgccagatacctccagcttgacagaaagaagcacatgtatgcaagcagtcctacagccattcagaagttggagcagcgatgtcatgggatgatgctctgcaatcgggcatgagacgcttccagcacaagtactacaatctgttcacctgcaattgccactcgtttgtggcaaactgcctgaaccggctcgcttacaatggctctgtggagtggaatgttttgaatgtggcttcccttgtttggtttcatggccaatgggtggacaaaatgtctttcgctcggtctttcttgcctttcctaactgtgacatgcatcggtattttaatggctggctggtctttcctggtagggatggcagcattctctattcttttgattggatggtttgtttttacggtatactgcgttaagggtttgatatgttgaccggagaagaattactgaaagcactcattagcgcatcgcagtctacatgtaatcgctgtgctagattcaattaaataattgatgtc

SEQ ID NO: 116884 - DNA, 111 bp, Zea Mays
tttagttacagcttactcctgacaattttttggtgttccgagctgtcgaaacaggagagtggtatagcgttacctagtctacacttccctcattttttacagttaaattga

SEQ ID NO: 116885 - DNA, 460 bp, Zea Mays
aaaatccagcacgccatgccaatcccaatcccaaacccaaaccaaacaaccacaaacctccccaaccactggcccctttccgctgcagccgccactccacgacatccccaatctcgcacccgatcacggaaggaacggaaacgggtggcaaatcgccgtgcgcgagcgcgcagcagagctcccagagaggagacgggtgagacaaaacttgaacccgctgattgatggattgatccctactgcctagtcgctactcgctagtcggctttgtgcccgtgctctgctccctgctatcccgcccacctgggacttggacccggccgccccatccggccatccccatctgtttactggctccagtccccgccccgaatcttttccctcctcagcaccgccaccaacctcgaccccgcctctgtgctcatgttgagcgtgcagcgtatcggagatgtgatcggag

SEQ ID NO: 116886 - DNA, 2077 bp, Zea Mays
ccagcccaacttacagaagcccataaaatagtcatagcttctgtaactaccggcccaggaagccatccgctcctcttcgaacaatggatctacttctttacaggctatattagaatgtcggtggtccagcccaacttacagaagcccataaaatagtcatagcctctgtaattaccggcccaggaagccatccgctccctctcgaacattggatcctatgctctcctctccctgctcgcagtcagggcacagggactgcctccggagaccggagcaggccgcaagcgtccaggttcgagacgccagcacgctctcgcagtacagcagcattatcagggagcgtgccgtgggagtgggaggttgcctcaggtgcggagcagtcgccggcggcgaccatcggtgtctgagatgaaggagagaggcggctccagggcggcagtggacgagcgctacgcgcagtggaagtcgctcatccccgttctctacgactggtttgccaaccacaacctcgtttggccatccctctcctgccggtgggggccacagtttgagaaagctacctacaagaatcgtcaacgcctttacctatctgaacagaccgatgggagtgtgcctaatactctggttatcgcaaactgtgaagttgtgaaaccaagggttgcagctgctgaacatatctcgcagtttaacgaggaagcacgatcaccttttgtaaagaagtacaagactatagttcatcctggtgaagttaacagaatcagggagcttccacagaacagtaagatcatagccacacacactgacagtccagatgtacttgtttgggatgttgaagcacaaccaaatagacatgctgtcttaggagcttctgaatctcgtcctgatctgatattaacgggacaccaggaaaatgcagaatttgcgcttgccatgtgtccagcagaaccatatgtcctgtcaggaggaaaggacaaatttgttgtcttgtggagcatccaagaccacatatctgcccttggggattcctcgtcttctcccggagcatctggcagcaagcagtctggcaaaattgcaaatgaaaaggagagtcctaaagttgatcctagaggtatattccatggccatgacagtactgttgaagatgttcagttctgcccttccagtgcgcaggagttttgtagtgtgggtgatgatgcttgtcttattctgtgggatgctcgaactggcactgacccagctgttaaggttgagaaagctcacagtggagatgttcattgtgttgattggaatccccttgatgttaactatatcttaactggttctgccgataactctgtccgaatgtgggatcgtcgcaatctgggttcgggaggagctggttctccaattcacaaatttgagggccataaagctgctgttctttgtgttcagtggtcacctgacagagcatctgtttttggaagttctgcagaagatggtttcttaaatgtttgggaccatgagaaggttgggaagaagaaaaattctaatgtcccagctgggcttttctttcagcatgctggtcatagggataagatcgtagacttccactggaattcgtcagatccttggacaattgtcagtgtctcagatgatggtgagagcactggtggaggtggaacactgcagatatggcgaatgagtgatttgatctaccgcccagaggatgaagttcttacagagctggagaatttcaaggctcacctggccagttgcgctccgaggaattgagtcatgtgaaaactctgagtaggttatgtagtttcctggccctaagtagtttcctggccataagtatggccccaattgacattggatctgtcttctcatgctcctagagctgtacccttcgaggtgcttgtgcctttgtgagcttgtgttgaaccatgttgtatgactaaatagtccgcaaacgagtcagctggatggctaatctgtaggccaactattgggatattgttggatattatcaacaaccggttcagattcgtgatgagattgtccgcaattgtttagttttgtgccttcgtgtgtgggt

SEQ ID NO: 116887 - DNA, 2123 bp, Zea Mays
aggaagccatccgctccctctcgaacattggatcctatgctctcctctccctgctcgcagtcagggcacagggactgcctccggagaccggagcaggccgcaagcgtccaggttcgagacgccagcacgctctcgcagtacagcagcattatcagggagcgtgccgtgggagtgggaggttgcctcaggtgcggagcagtcgccggcggcgaccatcggtgtctgagatgaaggagagaggcggctccagggcggcagtggacgagcgctacgcgcagtggaagtcgctcatccccgttctctacgactggtttgccaaccacaacctcgtttggccatccctctcctgccggtgggggccacagtttgagaaagctacctacaagaatcgtcaacgcctttacctatctgaacagaccgatgggagtgtgcctaatactctggttatcgcaaactgtgaagttgtgaaaccaagggttgcagctgctgaacatatctcgcagtttaacgaggaagcacgatcaccttttgtaaagaagtacaagactatagttcatcctggtgaagttaacagaatcagggagcttccacagaacagtaagatcatagccacacacactgacagtccagatgtacttgtttgggatgttgaagcacaaccaaatagacatgctgtcttaggagcttctgaatctcgtcctgatctgatattaacgggacaccaggaaaatgcagaatttgcgcttgccatgtgtccagcagaaccatatgtcctgtcaggaggaaaggacaaatttgttgtcttgtggagcatccaagaccacatatctgcccttggggattcctcgtcttctcccggagcatctggcagcaagcagtctggcaaaattgcaaatgaaaaggagagtcctaaagttgatcctagaggtatattccatggccatgacagtactgttgaagatgttcagttctgcccttccagtgcgcaggagttttgtagtgtgggtgatgatgcttgtcttattctgtgggatgctcgaactggcactgacccagctgttaaggttgagaaagctcacagtggagatgttcattgtgttgattggaatccccttgatgttaactatatcttaactggttctgccgataactctgtccgaatgtgggatcgtcgcaatctgggttcgggaggagctggttctccaattcacaaatttgagggccataaagctgctgttctttgtgttcaggcatgtcaagataatattttgctattttgtactctttatgcagatatggttgcctcctatgatgtttttggatacctttttgccataattctagtctcggattgcagtggtcacctgacagagcatctgtttttggaagttctgcagaagatggtttcttaaatgtttgggaccatgagaaggtaaccactcataaactgaagtatcctatcttttttgaaggaaacctgcacaactattggcgaaggtgattgggttcagttgcccgtgattcctcatgtacctctcttgtctgactaatataagtttttgtaatggcaggttgggaagaagaaaaattctaatgtcccagctgggcttttctttcagcatgctggtcatagggataagatcgtagacttccactggaattcgtcagatccttggacaattgtcagtgtctcagatgatggtgagagcactggtggaggtggaacactgcagatatggcgaatgagtgatttgatctaccgcccagaggatgaagttcttacagagctggagaatttcaaggctcacctggccagttgcgctccgaggaattgagtcatgtgaaaactctgagtaggttatgtagtttcctggccctaagtagtttcctggccataagtatggccccaattgacattggatctgtcttctcatgctcctagagctgtacccttcgaggtgcttgtgcctttgtgagcttgtgttgaaccatgttgtatgactaaatagtccgcaaacgagtcagctggatggctaatctgtaggccaactattgggatattgttggatattatcaacaaccggttcagattcgtgatgagattgtccgcaattgtttagttt

SEQ ID NO: 116888 - DNA, 1753 bp, Zea Mays
agcagctcgagggggtgacgaagtaaaagagaacacgaggacaggactgaaagcaaaagagagcaagatggtcccatgttcgtgttcccatcccagtgggacgtttgaacgggacaagccagcctgtggctactcaattaccatccgtgaaaccatcactgcgacatcggtggatttcacaggtgctaaagcttttgagatatcaggcacgccggttgactgtgtctcgttggccttatctgggaggttgtttccttggtcgtctcctgctttggtgatcagcggtatcaacacaggaccaaactgtgggtttcactcttctgccattgctgctgcaagggaggccttagtgtatggggtgccttcaattgcaatctcattgaattggaagaaggatgaaaccaaagacagcgacttcaaggatgcagctcaggcatgcttaccattgataaatgctgccttggatgacattgagaaaggaactttcctcagaggatgcctattgaatattggagttccaagtgcaccatctgcaattaagggtttcaagttgaccaaacagagtggatatagtcctgctcaaagttggcaagctgtgtcagcaagcaggccctcatctgctactcacttcatgggcatgcaccaaagccttggtattcagctggcgcagcttgggaaggatgcatctgcagcagcagctgcacgtagagttagtggtcaacgaaaggcggtcgaggttgagtctgttgcaactgctggtaaacaagagactcgagaagtagtgaagaagttattccgtgctgagtttgtcgagaggcaacatcaaggtttagatgaggataccgatttgagagctttggagaatggatttgtatcggtcacccctctgaatgttcatgggcaagtggagcctgaaatccaagccccagcttcagattggctctcagcagctgtatcactagagaaagaaaaggaagctgctccagctacagctgaagctcattcagcagcctaacaaacacgcagacatgtacacactccgtaggtgccttagttcctgtggtgatggcgctcttttctctcttccgtttatcagttcagtttgtttagtatttctcccgcaatatttgtttggcgcagtgtctatttttttgttcatcttttcagccgactatcggcttccttggccgtgcaaatgatttgatgcaggtggccctacattttggatgcaaccatgtaggctacggcaactaccagatgaatactgcccagccccccactattttttcagtgtggtttgttctaggaaggtgttgtattcagcatgggatatagttgattttgtcttgcaccggtctgaaccgtggccaccaaatatgttttggccgcttgtaaccagaaatgcaatcgcaaccattcaagggcctgtttgttttatcttaattcacattgatcggagagaattttaggagtttaaatctatagcaaatcaaaatctgtcgacctctcctagtcccctccagtctatatgggatataaataactgaacaaggtctaattctgcaattttacttttgcatttaggtcatggctatcaaggtgattatactattcgttggccttgcaattttgatattaccctttatttttcaactttatgattttacccatcgtgttttgataatgaagttattgtttgccccttcctcttaacgatgttagagaaattcagaattagtgattaaaaaataaa

SEQ ID NO: 116889 - DNA, 1820 bp, Zea Mays
tatttcagtccattcccaccttcgtccaatcgtccccgtcaacaccggcgcttccttccttcctccctccgtacatccctctctctctccctctctcctgccctcttcgcctcttctgcccagccatccctgacgacgcgaggcggcaaataacctctccggggacgaggccgatggagtcgacttccggcgaagacgctccgaagcgcaacccgctcccgtccgcgctcgtctccaacctcgagtctgtgcttgccgcccgccgcccggccgcggccgaggtcagcaccgccgccgcagccggcgaggctgaagcctcggctcccgaggatgccccctctggagatggggcgccggcgaggcccatcgtgctgctgacctgtgccggggggatccggtccgcgggtcttgcggcgctcgtcgacgccctcgttaccggcgcccgctgcgacgtccacgtgtgtgctcccgaatcggacaagccagcctgtggctactcaattaccatccgtgaaaccatcactgcgacatcggtggatttcacaggtgctaaagcttttgagatatcaggcacgccggttgactgtgtctcgttggccttatctgggaggttgtttccttggtcgtctcctgctttggtgatcagcggtatcaacacaggaccaaactgtgggtatgagatgtttcactcttctgccattgctgctgcaagggaggccttagtgtatggggtgccttcaattgcaatctcattgaattggaagaaggatgaaaccaaagacagcgacttcaaggatgcagctcaggcatgcttaccattgataaatgctgccttggatgacattgagaaaggaactttcctcagaggatgcctattgaatattggagttccaagtgcaccatctgcaattaagggtttcaagttgaccaaacagagtggatatagtcctgctcaaagttggcaagctgtgtcagcaagcaggccctcatctgctactcacttcatgggcatgcaccaaagccttggtattcagctggcgcagcttgggaaggatgcatctgcagcagcagctgcacgtagagttagtggtcaacgaaaggcggtcgaggttgagtctgttgcaactgctggtaaacaagagactcgagaagtagtgaagaagttattccgtgctgagtttgtcgagaggcaacatcaaggtttagatgaggataccgatttgagagctttggagaatggatttgtatcggtcacccctctgaatgttcatgggcaagtggagcctgaaatccaagccccagcttcagattggctctcagcagctgtatcactagagaaagaaaaggaagctgctccagctacagctgaagctcattcagcagcctaacaaacacgcagacatgtacacactccgtaggtgccttagttcctgtggtgatggcgctcttttctctcttccgtttatcagttcagtttgtttagtatttctcccgcaatatttgtttggcgcagtgtctatttttttgttcatcttttcagccgactatcggcttccttggccgtgcaaatgatttgatgcaggtggccctacattttggatgcaaccatgtaggctacggcaactaccagatgaatactgcccagccccccactattttttcagtgtggtttgttctaggaaggtgttgtattcagcatgggatatagttgattttgtcttgcaccggtctgaaccgtggccaccaaatatgttttggccgcttgtaaccagaaatgcaatcgcaaccattcaagggcctgtttgttttatcttaattca

SEQ ID NO: 116890 - DNA, 1811 bp, Zea Mays
tatttcagtccattcccaccttcgtccaatcgtccccgtcaacaccggcgcttccttccttcctccctccgtacatccctctctctctccctctctcctgccctcttcgcctcttctgcccagccatccctgacgacgcgaggcggcaaataacctctccggggacgaggccgatggagtcgacttccggcgaagacgctccgaagcgcaacccgctcccgtccgcgctcgtctccaacctcgagtctgtgcttgccgcccgccgcccggccgcggccgaggtcagcaccgccgccgcagccggcgaggctgaagcctcggctcccgaggatgccccctctggagatggggcgccggcgaggcccatcgtgctgctgacctgtgccggggggatccggtccgcgggtcttgcggcgctcgtcgacgccctcgttaccggcgcccgctgcgacgtccacgtgtgtgctcccgaatcggacaagccagcctgtggctactcaattaccatccgtgaaaccatcactgcgacatcggtggatttcacaggtgctaaagcttttgagatatcaggcacgccggttgactgtgtctcgttggccttatctgggaggttgtttccttggtcgtctcctgctttggtgatcagcggtatcaacacaggaccaaactgtgggtttcactcttctgccattgctgctgcaagggaggccttagtgtatggggtgccttcaattgcaatctcattgaattggaagaaggatgaaaccaaagacagcgacttcaaggatgcagctcaggcatgcttaccattgataaatgctgccttggatgacattgagaaaggaactttcctcagaggatgcctattgaatattggagttccaagtgcaccatctgcaattaagggtttcaagttgaccaaacagagtggatatagtcctgctcaaagttggcaagctgtgtcagcaagcaggccctcatctgctactcacttcatgggcatgcaccaaagccttggtattcagctggcgcagcttgggaaggatgcatctgcagcagcagctgcacgtagagttagtggtcaacgaaaggcggtcgaggttgagtctgttgcaactgctggtaaacaagagactcgagaagtagtgaagaagttattccgtgctgagtttgtcgagaggcaacatcaaggtttagatgaggataccgatttgagagctttggagaatggatttgtatcggtcacccctctgaatgttcatgggcaagtggagcctgaaatccaagccccagcttcagattggctctcagcagctgtatcactagagaaagaaaaggaagctgctccagctacagctgaagctcattcagcagcctaacaaacacgcagacatgtacacactccgtaggtgccttagttcctgtggtgatggcgctcttttctctcttccgtttatcagttcagtttgtttagtatttctcccgcaatatttgtttggcgcagtgtctatttttttgttcatcttttcagccgactatcggcttccttggccgtgcaaatgatttgatgcaggtggccctacattttggatgcaaccatgtaggctacggcaactaccagatgaatactgcccagccccccactattttttcagtgtggtttgttctaggaaggtgttgtattcagcatgggatatagttgattttgtcttgcaccggtctgaaccgtggccaccaaatatgttttggccgcttgtaaccagaaatgcaatcgcaaccattcaagggcctgtttgttttatcttaattca

SEQ ID NO: 116891 - DNA, 1469 bp, Zea Mays
tatttcagtccattcccaccttcgtccaatcgtccccgtcaacaccggcgcttccttccttcctccctccgtacatccctctctctctccctctctcctgccctcttcgcctcttctgcccagccatccctgacgacgcgaggcggcaaataacctctccggggacgaggccgatggagtcgacttccggcgaagacgctccgaagcgcaacccgctcccgtccgcgctcgtctccaacctcgagtctgtgcttgccgcccgccgcccggccgcggccgaggtcagcaccgccgccgcagccggcgaggctgaagcctcggctcccgaggatgccccctctggagatggggcgccggcgaggcccatcgtgctgctgacctgtgccggggggatccggtccgcgggtcttgcggcgctcgtcgacgccctcgttaccggcgcccgctgcgacgtccacgtgtgtgctcccgaatcggacaagccagcctgtggctactcaattaccatccgtgaaaccatcactgcgacatcggtggatttcacaggtgctaaagcttttgagatatcaggcacgccggttgactgtgtctcgttggccttatctgggaggttgtttccttggtcgtctcctgctttggtgatcagcggtatcaacacaggaccaaactgtgggtttcactcttctgccattgctgctgcaagggaggccttagtgtatggggtgccttcaattgcaatctcattgaattggaagaaggatgaaaccaaagacagcgacttcaaggatgcagctcaggcatgcttaccattgataaatgctgccttggatgacattgagaaaggaactttcctcagaggatgcctattgaatattggagttccaagtgcaccatctgcaattaagggtttcaagttgaccaaacagagtggatatagtcctgctcaaagttggcaagctgtgtcagcaagcaggccctcatctgctactcacttcatgggcatgcaccaaagccttggtattcagctggcgcagcttgggaaggatgcatctgcagcagcagctgcacgtagagttagtggtcaacgaaaggcggtcgaggttgagtctgttgcaactgctggtaaacaagagactcgagaagtagtgaagaagttattccgtgctgagtttgtcgagaggcaacatcaaggtttagatgaggataccgatttgagagctttggagaatggatttgtgagctctcatttctctctctctctctctttccctcctttcaaatggctaagtattcaccccactctacaggtatcggtcacccctctgaatgttcatgggcaagtggagcctgaaatccaagccccagcttcagattggctctcagcagctgtatcactagagaaagaaaaggaagctgctccagctacagctgaagctcattcagcagcctaacaaacacgcagacatgta

SEQ ID NO: 116892 - DNA, 1343 bp, Zea Mays
gccccttccggtccggccctcgtcgtcttctttataaccacgcgccactgaaagctcgagcgcttctggcacttgaatccgtttgcgtcgtcgtcgttcctgtgtgcagtgcgcggtgcgccactgctagtgagaagagatatagctaggcttcagtgcgacgacgacgacgagatggggcaccactcctgctgcaacaagcagaaggtccggaggggcttgtggtcgccggaggaggacgagaagctcgtcaagtacatcaccgcgcacggccatggttgctggagctcagtcccaaggcaagcagggctgcagcggtgcggcaagagctgcaggctgaggtggatcaactacctgaggccggacctgaagaggggaagcttctcgcagcaggaggaggccctcatcgtcgagctccacagggtgcttgggaacaggtgggcccagatcgccaagcatctgcctggtagaacggacaacgaggtgaagaacttctggaactccaccatcaagaagaagctcatctcccaggccgtgggcagcctccacccagacctgtactacaacattctggatggaggagccgccggagcacaggacctcgcggccgccggatgcgcgccgctgaacggggcggacagcgcgtcagcagcggcggcgcaagcagtgggcgtgacgacgacgcagccttctccttccatggcgcacgtcgaccccgcggcggcgtgggcggcggacttcggctcccagacgctcttcctccccggcggcgcggccgctctccagtacgccgccgccgtcgagggggagttcgtcaagcagtgccgcacggcggcggacgcctgctacccgccggagccggaggacggcggcggcggcgcgaggcagtgcaacaaccaggcagctgccgatgtcgtgacggcggcggtgcaaccggaaggcgccggcctcccggtgttccttgaacccaagtgcgccggcagtttcatgcccgagcctgctctggctccggtgatggacttcatggaagccatcctggggtcgacggcggcggcgtcggctgccagcgcttcgtctctcgacgacacctgcttctcggcgaacgccggcatgcagtcccactgttggattccctgaattattcaccctatttacttccatcggtagatgcatatatacatgcatggatgactcttcatcaagcgcgcgcggagtatcagatatgattaagtatagagtttatgaaataattaatatagatatagtaggtttctctcactctcatcgatcagggtagtaacaacatgggttacatgtaaatatgtttacgtacgtatatataa

SEQ ID NO: 116893 - DNA, 940 bp, Zea Mays
cgtcttcgcagaagcagcaggaggactcgtcgtctgtctaggccctctgacatggagatggtgcgcagaagccagaagcagttcggttagctgttcccgctccgcctaatctgcaatatatagctgttgcacgtccgaccaagtggttgtagatacagtaacttctggcatcaagtcggccagtgacacatccagtaccagctgtagccagcattcatgcatgccagaacgtagtactgcggccatcgcccccatcgtcaccatgatgatttttttctggtaaatctgcggtcagcagaaggttgggtaaggcgaatggtctcttacccaattcgcccagctggcgaatcttaatattctaaaaagttttgggtttccatgcaaaataggcaggccacgtttaccagcaagcctccctcgtcggatcgagggaaaaagaaatacgggacgttcgatttacaacttttacctatactaggacaatgctcatgcgttgcaatgaaaacatataatattacataacttatgaacaaatgtgtattatactgttatgagatagaagatggtgtccttgagctgttcgggatgacgtcgaagcgaaactcagaccacggtcgagcgccaagcctgcggtgcgaggtcgcccgtctacgaggcacgcgaggtggagggtggcagtctcgggaaggaggcaatctccgagggacggtggtggagtagcgacacgcagtcgagaaggtgtacgtgggagccggcggatggacgacacagcgggcggtagagcagcgtcggggtcggtgtccgatggagcttcacgctgcggcgacggaagggagaggcaggtatatgcacgtgcgttgctacgaaatcaatatgataaaatacattgatatacaaaaactctaattgttattctatacttttattagcgtcactaaaa

SEQ ID NO: 116894 - DNA, 112 bp, Zea Mays
aaatatataaacgaaacgacaaatatcactatgatatgtaaaatccgtgtgataaacattatcaatattacacaaattatttctaaagagtcaatttagaattttgtaatga

SEQ ID NO: 116895 - DNA, 1297 bp, Zea Mays
tttaggttaacaattttttccttttgcagccttccttggcaaggtcttaaagcaggaacaaagaagcaaaagtatgagaaaattagcgagaagaaagttgcaacatcaattgaggctctatgccgtgggtatcctacagagtttgcatcatatttccattattgccgttcactgcgatttgatgacaagcctgactattcctacctcaagcgattattccgtgacctttttatccgtgaaggttttcagtttgactatgtctttgactggacaatattgaagtatcaacaagctcaaattgccactgctccaccccgtgcgggccatggcgctgggccttctgggttggcacctgcattacagaatgataggcaaccaggccctgaggaagcaaggactagtggttggtcatcaatggatcggcgtcgtgccccactaccaattacaagtgtggggacattatctaagcagaaagcaccggtagggaatgatgctactgtttctagagacgctgtgatatctggaccaaatttcttgggaaggtcaagtggatcttcaaggaggcctgttatctcgagtagccgcgatgcggtggtcaccgatagttccgagccttcacgagcgcgcacaactgatgcaagccctggggttttccgcagagcctcaggtcctcagagaagctcacctgtccactctgcagaacagaagcgctcatcctcaggccgtcatccatctaatgcgaagaactacgattccgctctcaaaggcattgaaggccttactttagatggcgacgagagggttcagtactagagcggcaagaagaaattctacatcccctgtaaaaaagcataaccaggtggtaagcattgtgtttcctgttgagttttggatcaacaggaaacagaatgatggaaggaggatctggtcacgtgttgtgcggtttcgggttgccttctgagcaaggtaaataaacggtcctgtccgaggcgcttcaaacctagctctcgtaatgttatcgtcatgtatgtaaatgtgtcttatagtgagcctattttgttgttccaatccttacggtgttccattctgaggtgctgaaccttggggcaacaaggctgaagctggtagggacttcaattggagaactggggttcaagcatgtagaattttaaaatcggttcatttgtctggacaatgttcctgactagtaatgtgatcgcaagacaaacgatgttatttctctctgtggttatcgatatgtccatctcttcacacgcctgatagaatattatttgac

SEQ ID NO: 116896 - DNA, 1666 bp, Zea Mays
caacaacggccgcggcagccgcagagagacaaggtggacacgacaggactacaggacaccgccccgaagcggcacctgcaaggcggccgagaaaagcgcagccctgcgcccctgccacgactcggccacctctccctctggtctcctcctccacttgctcctgctcctccagacctccactccacccctccaaaaggtctagtaaaatagaaggaagccgcccccaatcgttcggtcgttcctagcccggcgcacggcgcacgaaggggttcgatcggatcggcgccggcggaggcgagatgtgggagtcggtggcgctgacgctggcgggcaccgccggcaataacatcggcaaggtcctgcagaagaagggcaccctcatcctccctccactctccctcaagctcaaggtggtcaaggcgtacgcgtcgaaccagctctggatcagcggtttccttatggacatgtgcggtgccgcgctcatgctcaccgcgctctctcaggcgccggtctccgtcgttcagcccattgctggttgcggtctcgcaatactctgcgttttctcccatttttacctcaaggaggttatgaacggcctcgattggattgccatcacgctagctggtctcggcaccataggtgtaggtgttggaggtgaggaacagaaagttgaccagatacctcttttaaatataccctggctagtgctctccattgtcatcttgtttgtaggtactgctcaacacttggcttcatatgtataaaaagcaaaggcgtgagcaagagttgactggacctgaagtgattgaggagatcatatatggcttagaatcaggcattttgtttgggatttcttcagtgatctctaagatgggatttgtgatgtccgagatgggttttccaaagattgttgtgcctgctgccatatcttgtagtgtttgctgcagtgcagtgggatttgtgtatcagactcgaggcctcaagcatgggagggcaattgttgtatctacatgtacatcagtggcatctatagtgtccggtgttgttgctggcatgattgcacttgatgaacatctgcctaaagctcccacagctcgatttttcctcttactgggatggttcttcatcatcacaggagtaatactgcttgttagttcaacccgattgattgcgcgtctacctaggcctgttcagaagtttttgaagagcaacatagagcgcacccacagcatcaggaggcctggttcagcacgagggaaggatcccatcccaacaacaacgatccatacgtcgtcactgcacttgcttgcttctccaacaaaggagaaggcctagaaaaatgttggcactagagcaacttcgtttcggcgcctcacgtttgccatgtcattgattgattgaatggttccgtgaacgtagtctagagtagcatcttaaaagcttgggtttggttattcaccatactgccctttataggtctaacagagacttggggaaaaattgctgagtttttatcaggtctcgttttttttgtttggttgctgagtgcaaaatccgaagctgttactctctgacccttcttaactctcgtcatggaaagtatgttggtcaaacttaaagactagatttatagataaatattattaatgtttgtgtttttaaataa

SEQ ID NO: 116897 - DNA, 1477 bp, Zea Mays
gaaaagcgcagccctgcgcccctgccacgactcggccacctctccctctggtctcctcctccacttgctcctgctcctccagacctccactccacccctccaaaaggtctagtaaaatagaaggaagccgcccccaatcgttcggtcgttcctagcccggcgcacggcgcacgaaggggttcgatcggatcggcgccggcggaggcgagatgtgggagtcggtggcgctgacgctggcgggcaccgccggcaataacatcggcaaggtcctgcagaagaagggcaccctcatcctccctccactctccctcaagctcaaggtggtcaaggcgtacgcgtcgaaccagctctggatcagcggtttccttatggacatgtgcggtgccgcgctcatgctcaccgcgctctctcaggcgccggtctccgtcgttcagcccattgctggttgcggtctcgcaatactctgcgttttctcccatttttacctcaaggaggttatgaacggcctcgattggattgccatcacgctagctggtctcggcaccataggtactgctcaacacttggcttcatatgtataaaaagcaaaggcgtgagcaagagttgactggacctgaagtgattgaggagatcatatatggcttagaatcaggcattttgtttgggatttcttcagtgatctctaagatgggatttgtgatgtccgagatgggttttccaaagattgttgtgcctgctgccatatcttgtagtgtttgctgcagtgcagtgggatttgtgtatcagactcgaggcctcaagcatgggagggcaattgttgtatctacatgtacatcagtggcatctatagtgtccggtgttgttgctggcatgattgcacttgatgaacatctgcctaaagctcccacagctcgatttttcctcttactgggatggttcttcatcatcacaggagtaatactgcttgttagttcaacccgattgattgcgcgtctacctaggcctgttcagaagtttttgaagagcaacatagagcgcacccacagcatcaggaggcctggttcagcacgagggaaggatcccatcccaacaacaacgatccatacgtcgtcactgcacttgcttgcttctccaacaaaggagaaggcctagaaaaatgttggcactagagcaacttcgtttcggcgcctcacgtttgccatgtcattgattgattgaatggttccgtgaacgtagtctagagtagcatcttaaaagcttgggtttggttattcaccatactgccctttataggtctaacagagacttggggaaaaattgctgagtttttatcaggtctcgttttttttgtttggttgctgagtgcaaaatccgaagctgttactctctgacccttcttaactctcgtcatggaaagtatgttggtcaaacttaaagactagatttatagataaatattattaatgtttgtgttttt

SEQ ID NO: 116898 - DNA, 1601 bp, Zea Mays
cgacaggactacaggacaccgccccgaagcggcacctgcaaggcggccgagaaaagcgcagccctgcgcccctgccacgactcggccacctctccctctggtctcctcctccacttgctcctgctcctccagacctccactccacccctccaaaaggtctagtaaaatagaaggaagccgcccccaatcgttcggtcgttcctagcccggcgcacggcgcacgaaggggttcgatcggatcggcgccggcggaggcgagatgtgggagtcggtggcgctgacgctggcgggcaccgccggcaataacatcggcaaggtcctgcagaagaagggcaccctcatcctccctccactctccctcaagctcaaggtggtcaaggcgtacgcgtcgaaccagctctggatcagcggtttccttatggacatgtgcggtgccgcgctcatgctcaccgcgctctctcaggcgccggtctccgtcgttcagcccattgctggttgcggtctcgcaatactctgcgttttctcccatttttacctcaaggaggttatgaacggcctcgattggattgccatcacgctagctggtctcggcaccataggtgtaggtgttggaggtgaggaacagaaagttgaccagatacctcttttaaatataccctggctagtgctctccattgtcatcttgtttgtactgctcaacacttggcttcatatgtataaaaagcaaaggcgtgagcaagagttgactggacctgaagtgattgaggagatcatatatggcttagaatcaggcattttgtttgggatttcttcagtgatctctaagatgggatttgtgatgtccgagatgggttttccaaagattgttgtgcctgctgccatatcttgtagtgtttgctgcagtgcagtgggatttgtgtatcagactcgaggcctcaagcatgggagggcaattgttgtatctacatgtacatcagtggcatctatagtgtccggtgttgttgctggcatgattgcacttgatgaacatctgcctaaagctcccacagctcgatttttcctcttactgggatggttcttcatcatcacaggagtaatactgcttgttagttcaacccgattgattgcgcgtctacctaggcctgttcagaagtttttgaagagcaacatagagcgcacccacagcatcaggaggcctggttcagcacgagggaaggatcccatcccaacaacaacgatccatacgtcgtcactgcacttgcttgcttctccaacaaaggagaaggcctagaaaaatgttggcactagagcaacttcgtttcggcgcctcacgtttgccatgtcattgattgattgaatggttccgtgaacgtagtctagagtagcatcttaaaagcttgggtttggttattcaccatactgccctttataggtctaacagagacttggggaaaaattgctgagtttttatcaggtctcgttttttttgtttggttgctgagtgcaaaatccgaagctgttactctctgacccttcttaactctcgtcatggaaagtatgttggtcaaacttaaagactagatttatagataaatattatt

SEQ ID NO: 116899 - DNA, 1941 bp, Zea Mays
gctttgctaattgctctaggagagcatcccacgacaacgatagatctcttgtctccaaattgcccgctgccccctggcgttcccctcccccgcgtcgtcgtctcttctctccccaaaaggatcccccaaaccctaccgccgatccgggcccagatcgccatggccgcccccaacagcaacgacgcggccagcgccagtggcaccggcccggctggtgaggaggacatctccatcgaggcgttggcgcggcgcgtgcaggagcacatgaccctcagttccaaccccgccgctcgccgccacaagttctgggaaacgcagcccgtcggccagttccgcgacgtcgccgacacatcgctaccggacggccccatcgagccgcccacgccactctccgaggtgcgcgccgacccctacccgctacccgccgccttcgagtggctcacctgcgacctcgatgacgacgcgctcctcgccgacctctactcgctgcttgcccacaactacgtcgaggacgacgagaacatgttccgcttcaactactctccggccttcctccgctgggcgctcaagccgccgtccttcttccgggcctggcacatcggcgttcgcgccaaggagtccaagaagctcgtcgccttcatctcgggcgtcccggcccgcatccgcgctcgggacgacgtcgtccgcatggccgagatcaacttcctctgcgtccacaagaagctccgatccaagcgcctggcgcccgtgctcatccgggaggtcacccgccgcgtccaccaggagaacatttggcaggctgcatacaccgcgggggtcgtcctcccaacccccatcaccacctgccgctactggcaccgatccctcaaccccaagaagcttatcgatgttgggttctctcgccttggtccacgcatgacaatgagccgcacggtccggctatacaagctgcctgacgcgccgctcacccctgggttccgcagaatggaactgcgggatgttgctgcggtcacacggctgctgagggcttaccttgcgaggttcgtggtggcaccggattttgatgaggtggatgtggagcactggctgctgccgcaagaggatgtcgtggacagctaccttgtggagagccctgagacgcatgaggtcacggatttctgcagcttttacacgctgccctcgtcggtgctgaacaatgctaactatgcaacgctcaaagccgcatactcatattacaacgtctctaccaaaactgcattgcagcagctgatgaatgatgctctgattgttgccaagcagaagaattacgatgtgttcaatgctctcgatgtcatggagaatgagtcgttcctcaaggagctcaagtttggtcctggagatgggcagctccactattacctctacaactaccgtattcgcaatggcatcaagccctctgagcttggtcttgtgctactatagggcagtctaatcaggacagtcctgagtttacaccttcccttccgcagcagcaccgatgcatttcaccaactcagaaaccaaacgacccgtttgatttgaacgtttgatttgaaggactaaagtctctccattttagtctcatttagtccctaaattgctaaacggtgggactaaaactcgaactaaactgttttagtctatagtccttcaaggggttactaaaagggactaaactatataaattccacttttcactcctttatttcagttgcactcatggcgggagaatgctaaggggtattttagttctcttatgatttatttaatgtgttttgaatagttttagtccctagaactagatagaatagggactaaattttagtctcctaattaaactttagtctctagactaaagaaaccaaacggaccttagtctgctgtatcctctatataaattgatattctagaattgaagctttc

SEQ ID NO: 116900 - DNA, 1229 bp, Zea Mays
aggagccaagaacatgcgttctctttttgatcctggttagaggaaggacaaatggaggaatttaagtttcagtgcaagtggactgggatcaagtaaactgcgggttccaaagataactggaccctcatcttccccatcatctagctcgcagcctctgcttctcccagcggcaaacaaatttactgaagctacactgcctgcagatgctgagaaaaagccacaggatgggaaaactctgccaaagtatggtgccatgatcatggaagctcttttggaattgaatgagccgaatggttcagatattgctgcaatcttcggcttcatagagcaaaggtatgcggtacaaccgaccttcagaagatttctagcctcaaagttacggcgacttgcagactcaaacaaaattgaaaagatcgataagtcctataggctcccagactcccttgcaacaaggactccagctccaatgaatgcttcagctccaaaacagaaggatccatcaaagccatcgaaggtgtcaaaggccataggattgttttctgcctccagccctgcactagaggctgcgatggcagctgctgtcaaggtggctgacgcggaggcaaaagcacatgatgcgcatgatcagacgatggaggcagaaaggatcttcaagatggccgaggataccgagtctctcctcataattgcagcagagatctatgatcgatgttcaaggggagagataaccacgttagttccagtggcacaaagggagatttgagatctattggagtctctcttgtgttgtttgttgtacatggataggttctggaatccagtggcccggattgctcctgttgtatgatgtaaccgtttgtgttatactgtctccgttcttcgatatttatcgtatcctagttcatttttaaaataaaatgcgacaaataaaaaagaacggagtgagtacttaggatgtgccctagggttaacaaaataacatcagcgcaccgcctgccttcaaacttctgtaatatgtaaccccgtctttcccagcctgtcactgcaagctgcgatcgtgtatcctgatgtcagtattgtattttttttttccttggcatgatgagagaatagggaagtgttctaaacaaatgaagtagggtaggaaggtgaagtgttcttggtatgcgataacaataatctgtgccgcactttcaatttgagaatgttgtgttagacccttgttcatc

SEQ ID NO: 116901 - DNA, 1578 bp, Zea Mays
tttctaccacgagcactattacttttatttaaaattataataaaccacgattgtatctatagttagatcataatctaatggatcaggtaattcgcttgcgccgttggatacagatacttctttcgtaacagtcgttctctttttctacaactctactgaagacatgggttagggtttccgcgtcggctagtttggacgcatggctgctgcaggagagtagagaccacagcgcgcgaggcgaggagaataagctatgggcgcgccgaagcagaaatggacgtcggaagaggaggatgcgctccgcgccggcgtgcgcaagcacggcgccggcaaatggcggaccatccagaaggaccccgagttcagcccggtcctctcctcccgctccaacatcgacctcaaggacaaatggaggaatttaagtttcagtgcaagtggactgggatcaagtaaactgcgggttccaaagataactggaccctcatcttccccatcatctagctcgcagcctctgcttctcccagcggcaaacaaatttactgaagctacactgcctgcagatgctgagaaaaagccacaggatgggaaaactctgccaaagtatggtgccatgatcatggaagctcttttggaattgaatgagccgaatggttcagatattgctgcaatcttcggcttcatagagcaaaggtatgcggtacaaccgaccttcagaagatttctagcctcaaagttacggcgacttgcagactcaaacaaaattgaaaagatcgataagtcctataggctcccagactcccttgcaacaaggactccagctccaatgaatgcttcagctccaaaacagaaggatccatcaaagccatcgaaggtgtcaaaggccataggattgttttctgcctccagccctgcactagaggctgcgatggcagctgctgtcaaggtggctgacgcggaggcaaaagcacatgatgcgcatgatcagacgatggaggcagaaaggatcttcaagatggccgaggataccgagtctctcctcataattgcagcagagatctatgatcgatgttcaaggggagagataaccacgttagttccagtggcacaaagggagatttgagatctattggagtctctcttgtgttgtttgttgtacatggataggttctggaatccagtggcccggattgctcctgttgtatgatgtaaccgtttgtgttatactgtctccgttcttcgatatttatcgtatcctagttcatttttaaaataaaatgcgacaaataaaaaagaacggagtgagtacttaggatgtgccctagggttaacaaaataacatcagcgcaccgcctgccttcaaacttctgtaatatgtaaccccgtctttcccagcctgtcactgcaagctgcgatcgtgtatcctgatgtcagtattgtattttttttttccttggcatgatgagagaatagggaagtgttctaaacaaatgaagtagggtaggaaggtgaagtgttcttggtatgcgataacaataatctgtgccgcactttcaatttgagaatgttgtgttagaccct

SEQ ID NO: 116902 - DNA, 540 bp, Zea Mays
ggacttgttgagcaaggacacaggtacttcgattcgatgactcgagttcataagatcacaccacaaaatgagcactatgcgtgcattgttgacaacttgacatgtttgggcgagcatgccttctaactgaggcaaaacaattcattcaccagatgggacctaagccagatgcatcagtccttggggcactcctttgggcttgcatgaactacagggaacttgagatgggtaaggagattggaggaggcaaaggaggtgcggaggtggatgatgtttcaggagttaaggaaggaaaaacaatgcaatttaatcaacaattgagaaccaaatatgtaccttatggatacttcagcaaaggtgaggtttctattgtctcaaggatggtacctacacttgtcaaacataaaagctcgctacctattttatttagacacaattaagatatgccctgaacaacaaatccacgaaccagttagaggatatatcaaatggacccaaggggatgaatggatgtcaatatacattcagagttcctattag

SEQ ID NO: 116903 - DNA, 246 bp, Zea Mays
atgctcgtcgctgcacgccgcttcgcgccgccgccgccgccgggcagcgggaacgccggtggcggtgctgcggttgtcgttgtcgttgtcgccgggtactcatcggtcaccttccttttggcgtggtgcgccgcctgctgggcctgggagttggacgacgcgtggtgggtaaacgtcaacggcggcggcggcgccgtggtcggtgacaccacctcggcgtcatggccgccgccgccgccgctgtag

SEQ ID NO: 116904 - DNA, 1282 bp, Zea Mays
ttgcttcccacggcaacaactcacctcccgggcctaccacgcagaaagaaacatctcctttgtatcggcctcggcaatcctgaccggatcaacaaagacgtagctaccccctcccgcgtccgtcgaattcgcctccgccgcctgctcgatccggtgggaattcgccgctgccgggttgttttcgctggggtgattaaggctcgggattcgagatctacgcgagtcgcgggcaagcagccatgagcgaggtgttcgagggctacgagcggcagtactgcgaggcctccgcctcgctctcccgcaagtgcaccgctgcctccgccctcgatggggagaagaagaagcagaagctgtccgagatccaatccggcgttgaggaagctgaatcgctgattcgtaagatggacctggaggcaaggaacctacagcctagcattaaggctggtttgcttgcaaagctgagggagtataaatctgacctcaacaacgtcaagagtgagcttaagaggatctcagcgcccaatgctaggcaggctacccgggaggagctcctggagtctggaatggctgatactctcgcggtgtctactgatcagagggggagattgatgatgacaactgaaagactgaatcagtcaactgacagaattaaagagagccgaagaactatgttggagacagaagagcttggtgtgtcaattcttcaggatcttcaccaacagcgacagtcactactacatgctcatactactttgcacggagttgatgacaacattggcaagagcaagaagatcctggctgcaatgtcaaagaggatggataggaacaagtggatcattgggggaattatcacggctctcgttctggccatccttctcatactctacttcaagctcgctaattaagcctgcctgcaggtaggttccccctacatatctgtgttcagtaattgtgtgatatgagttgtctgaatgccgtgtattgagcaacacgcagctctccgagcgtcatttgttccccctcaaacctgtaaactcaaaatggcttattctgtgtatagttagttattcccaactatgtaaaatgtctaaagagtaaaaaaataatacttggtgttgagtctcatgtgcacatcgcacgttgttctgtcatgttaaactagagtggttactagagcagtatgtactacctctgtcccaaaacaaatcaacttctaaagttgtcatccctaagtcaaactattttaagttcgattaaatttatagaaaataccagtgtttgt

SEQ ID NO: 116905 - DNA, 654 bp, Zea Mays
atggaccgaaactcactcctagcaaacgtgtgggacactaacatctcgctaggctggtacaaaaccgactccaactcacgatgcaccgaaaaaccggtggtaccacacatgccggacggcgagaagacgaccgaggcaacggccaaggatgtcggcggcggcagccagccaaaaccaccgtcccgccgcggtagcgcccgcttcgagcgcctcctctccgggctgggcgctggtccgctcgtggacgtcgagcccgacaaggttaaggacgagatccggcgatgggccaagaaggtggcggctctggtgcgccagctcagcttcggcgcctgggcggagaagagcgacggcggctcgtcggagaaccacggcgcaggcgatgatggatacgagagctgagcacctagactgcagataactttcgcgggcagtaagccagtaataactccgctgatatggtggcagcaccgggcaaaagcaagcgcaaaattcattctcctttattcgtttgttcgtttctaagggcgctgatactgtatgtgtaccacagtagatcttacctcagttatgtcaaaagagataaaaattagcaaaggccatggatgtaatgattataataaagagctatggatattctccggtacctgttcggtt

SEQ ID NO: 116906 - DNA, 339 bp, Zea Mays
atgcccgacaagaccgtctgcgagaagcactacgtccaggccaagaagcgctccgcctcctccgcgctccgtgcctcgctccgccgctcctcagcctcctccctcgcgcccgccttcccattctcctcctcctccgccgctcgcctccgcgccgccgatgacgaccctcccatggcggtcgcgaggcccctctacggcagggtcaccggggaggcggtgtacgtggctgaaccggtgccggtgcccgcgtggaaggggtcgcctacgaagggctgcctcggtgcaatgcggatggtggcaggaccacggcggtctcaactctcaagtcagtaccagtag

SEQ ID NO: 116907 - DNA, 2061 bp, Zea Mays
gtatcacgctcacaaatcgcagagcgcacggcggccactgcccactggcctcctgaatcctacgctcgccaagtcatcattcgcgaccagctcccgtgatcctcagctcacctgagctccgcgtataaaaagcgcgagctgcagaacccaaccaacaaaagactccacttcgccaagtcacgctcacgcacgcgttttctcggtggacggtgggcacggacacggaggagccgccgcaagcgcagcgcagcagtgggcgcgaaagcaaggcatggcgtggtcggagacggacgccgcgctgttcgcggcggtgctggggcgggacgcggcgcaccacctgagcaccacgccgccgcaccaggacgcgcccgcggcgtcggcccccgagctccaggcgcgcctgcaggacctcgtggagcggggcggggcgtggacgtacggcatcttctggcaggagtcctgcgccggcggccgcgccgtgctcggctggggcgacggccactgccgcgacggcggcgccccgcaccacgacgacgcggaccggagcgtggcgcggaagcgcgcgctgctgcggctgcacgcgctctacggcggcggggacgacgagggggccgactacgcgctccgcctcgaccgggtcaccgccgccgagatgtactttctggcgtccatgtacttctccttcccggagggcgcgggcgggccgggccacgcgctcgccacggcccgccacgcctgggccaccgtcgaccccgcgcccgggtggtacgtccgggcgtccctcgcccagtccgcggggctccgcaccgtcgtcttcctcccgtgcaagggcggcgtcctcgagctcggctccgccgtgcccgtccgcgagactcccgagaccctgcgcgcgctccagaccgcgctcgctgtcgcgcggcccccggcacgcgaggaatgcatgaggatcttcggccaggacctctcccccggcgggagcgcccgagccccgcgcagcgtcgacaattgggctccacatccacacctcgccgcccaagccaccgccgcgtccgcactagccagcaaggaagccgccgcgggacacaaggctccggagccgcccaggagcatagacttcagcaagccagggaagcctgggcacgggcaggccggcggcgaggagcggaggccgcggaagcgcgggcggaagccggcgaacgggcgggaggagccactgaaccacgtggaggcggagcggcagcggcgggagaagctgaaccagcggttctacgccctgcgcgccgtcgtccccaagatttccaagatggacaaggcgtcgttgctcagcgacgccatcgcgtacatccaggagctggaggaccggctccgcggcggcggcggcggcggcggcggctgctcggcggcgcgcccggacagcccggacgtggaggtgaaggcaatgcaggacgaggtggtgctgcgcgtgaccacgcccctgtacgcgcaccccgtctccagggtgttccacgccatcagggacgccgagctgatcgtggcggcgtcggacgtggcggtggcggacgaagccgtcacgcacacgctcgtgctgcggtcgcccggccccgagcagctcaccgcggagacggtactcgccgccatgtcacgggggatgaccagcgccaccccctccccgtgactctgtagcggtagctgtaagtcgtaaaccgtactcgccctcgtgcgtgccggccacatagtaaagccacagaaattgcaatggccaaggcccaacattaaatttactgctcgtttcctagtttttttgcatttggattttaattagatgagatgtgtacacgcaaggcggcaaggcacagtttgttgctcttactagctatagctactttagtttgttgctttcccaacctactagtatttttttctgaacacccaacctactatttctagtggctaactgtactagtagtagttctgttgttttcacagtccacttagcttgtcgtgactcgtttttgagatcaaatctattccattcgatttttggtgtgcaagtgtgtcgaa

SEQ ID NO: 116908 - DNA, 628 bp, Zea Mays
ccatgtataaaaggggcagaagtgtgatagctcgtccccatgaatcctcctaaggcaataacataccagtcgaagagaacaaaatatgcctaaagacacttttgcacttggcatcatccttttaattcttctcttcaatgtatctgcaggccaaactatagttgttgaaaatgataatcctgttactgcaaggttgacaaaggggcatagcagaaagattcttacagaagttcaggattatgattacggaggggcgaattctaggcatgatccacgcagaaggcctgggactgggggcaggaatggctagaccattaaactccttgttatacaattgcatataattgtgtgaagatgctactacacgcggatgaggttatatgagggagactattctcttactaaagctaacctaagatacaaatatttggaatcctgttgagtgcctttatgtatccaattggaacaatgagctgtatggtcgtatagatattcagatctgtctattcgataaactatctagcgggatgaagttgagactagctcatataaacggtgcctatgtgtactttttttggcacccgaaaatgtgtactgctaattgctaaaacatacttgagacagcgca

SEQ ID NO: 116909 - DNA, 1146 bp, Zea Mays
ggacgagcaacaggaccactaattcggggaaaacaatcataatcctatgagttgttaaattgctcaccagcacactcattcatgcacgcgctttgcagacccagtagcgatgccgcctgccgcctgcagtcccgggcatcacaccgtccacatcaattccacccgtgcacgcactcgtcagccagagccctgcctctgctctatatatatacatgcatcatggccgcccaacaacgacacgacacaaccccaagagtattgtagagagcagcaggcagcagcacatcgttcgttccatccattttcgttaagaagagtaacgttctgacgatggcctcagctgctcggtccgccgcgctccgcgtgctgctgctggtggcggtggccatcgccggcgccctctcggacccgacgccgctccaggacacctgcgtggccgacatgcgggccgcgacgccggtcgacgggttcgcgtgcaagccgcagtcggcggtggtggacgaggacttcttctcccgcgccatcgcgtccgccgcgagcaccgccaacccgttcggcgccaactccacgcgcgccaccgtggccacgttcccgggcctcaacacgctgggcgtctccatcacgcgcgtcgacctggcccccggcgggctcaacccgccgcactcgcacccgcgcgcctccgagctcgtcatggtgctgcagggcgaggtcttggtcggcttcaccacgggggccaaccgcctcttctccaaggtggtcagggagaacgagctcttcgtcgtgccccgcggcctgcagcacttccagctcaacaccggcgccggcgacgccgtgttcgtcgccatgttcgacagccagtcgcccggcgtcgtcacgcccaccttcgccatgttctccactaagcctgccatgcccatggaggtgctcaccaagacgttcctcacgggcgaggaccaagtcaatgccatcatgtctaagttcgctggcttctaacatgcaacacaagatacagcctatcagcagtttaattagctgcacatctacccggcccgatccagtcacgttaattagtgtatgtattcattcgtttttacgtatttattctctgttcccctgaaactgttttttctccacaagtttgtattc

SEQ ID NO: 116910 - DNA, 372 bp, Zea Mays
atggaaggggatcctgcaggggggagctctgccatggaaatccagggcggccatggtaggggtagggacgacttctgcgtggggagagatggagggagcggctggggagggaggagatggctgggcgagcagggagggcgcggcatgggagaggacaccggccaaggagcgtccatggatcaagaggtgaaagggaaaaggtgtggggaggaggctggcgccggtcgttctaagccaccacaacgtgagacggcctccagcggcgacgattcttggggttcggagtccatgattattgggcggcggctgtcgttcccgagggaggcattgggtgtgtatggtgagaaggcgtcgcggatggaaacaaaatga

SEQ ID NO: 116911 - DNA, 99 bp, Zea Mays
atttgcgtcacgcgcacatttttgtcatggcgaatgtcgaaggagggggatgcaacatcgacgtcgggtactatatatgaggtgcagcgcccgtgttcg

SEQ ID NO: 116912 - DNA, 398 bp, Zea Mays
acatggtggcacagattctgccatggagtgcgatgtccggcgagggctcgcccagcaccacccctgccaccaccaaattggacgccgagaagacttccgttcaccaccgcgacgagcacatagcagtcctgcgatccatccctcaacttctctctacaacggagctccacacgttcggccgagcgccctcgaccacccgcagactccaaatcggcgatgaaggccagatatggggggcgcacggatccttcgttgttcggcgaaccaccgcactctctcctcacgacacagatgcacacggtggcggtgggtgtccctcgctctccctcaacagcaggcgcagggcgcctgatctcaccggaatctgcaggctcgtctcacttcctaggctctcgata

SEQ ID NO: 116913 - DNA, 398 bp, Zea Mays
acatggtggcacagattctgccatggagtgcgatgtccggcgagggctcgcccagcaccgcccctgccaccaccaaattggacgccgagaagacttccgttcaccaccgcgacgagcacatagcagtcctgcgatccatccctcaacttctctctacaacggagctccacacgttcggccgagcgccctcgaccacccgcagactccaaatcggcgatgaaggccagatatgggggggcgcacggatccttcgctgttcggcgaaccaccgcactctctcctcacgacacagatgcacacggtggcggtgggtgtccctcgctctccctcaacagcaggcgcagggcgcctgacctcaccggaatctgcaggctcgtctcacttcctaggctctcgat

SEQ ID NO: 116914 - DNA, 2138 bp, Zea Mays
cacgtacgtacttgcaccgtactatacgacccctgcgaccggaccaggccggccggatccatgcctgttgccgctgcgggcctacacgcgccgccgacgacgacgaccgttcttgttggttattaatcggcgagcgcaagcaggaggagcagctgcctgtgtagctaagggcaggccatggggaggctcgacggcgggctgggtgcggcgacgccgccgtcgttcgtgcgcgcggcctggcaggcggtgaggtggtccgtggtggttccggcgctgcagctggccgtgtacatctgtgccgccatgtcgctgatgctcttcctcgagcgcctgtacatggcggccgtggtcacggggctctggctgcgccggcgccggcgccaccgcgtcgccggtgacgggcagcgcgtgctggacgacgacgacgacctggaggccgacgccggccgctgctgccccatggtcctcgtccagatccccatgttcaacgagggacaggtgtaccggctgtccatcggagcggcgtgcgggatgtcatggccatcggagaggctggtgattcaagtgctggacgactccacgaaccccgccatcagggagctggtggaggtggagtgcgcgcggtgggcgcgcaagggcgtgcgcatctgctacgagaaccgcagcaaccgcaacgggtacaaggcgggcgccatgcgcgagggcctcaagaagcactacgccagggactgcgagttcgtggccatcttcgacgccgacttccagccggactccgacttcctccgccgcaccgtgccgctgctgcagcgggaccccggggtggggctggtgcaggcgcgctggcgctacgtcaacgctgatgagtgcatcctcacgcgcatccaggagatgtccctcaactaccacttcgccgtggagcaggaggtgggctccgcctgccacgccttcttcggcttcaacggcacggccggggtgtggcgcgtcgccgcgctggcggacgcgggcggctggaaggagcgcaccaccgtggaggacatggacctggccgtgcgcgctagcctccgcggctggcgcttcgtctacgtgggcgacctggtcgtgcgcaacgagctgcccagcaccttcaaggcgtaccgctaccagcagcaccggtggtcgtgcggcccggccaacctattccgcaaggtgctccctgagatcctccgcagcgaccgggtgtcgctggggaagaagttccacctcctctatgccttcttcttcgtcaggaaggtggtggcgcatctcgtcaccttcctcttctactgcgtcgtcatcccggcctgcgtgctggtgcagggagacgtgcgcctgcccaagtatgtggccatgtacgtgccggcgctcatcacgctgctcaacgccgcctgcacgcccaggtcctgccacctgctcatcttctggatcctcttcgagaacgtcatgtccatgcaccgctctaaggccgccatcatcggcctgctggaggccagccgcgccaacgagtgggtggtcaccgacaagctcggcagtagcaaggcagctgcggctgtagtcgcgaagaagaagaaacagcagctggtccggagcaggtgctgcagcacgagacgggagatgcatgtgctggagctcgcgatgggggtgtgcttgctctattgcgctgtctacgacattgtcttctttggccgcgaccactactacatgtacctactcctgcaatcggcggcggcctttatcgtcggcttcggctacgttggcaccacgacaccctcctgactctcatgagagtcaccaacacagccagacgactgtcagtgcctgtgatccaaattaaagtcataatatttcattaaattattcgtagccttaattgtatcgatcgcatgggcaatagtcatgataaatcaggtttttttatagtactacattaaagggaaaaacagattcaacaaaaacaaaacaaaaaaaggcttcctagagccaagctggacctcagtacactgtaggctttacgttaatgtgtcatgtatacttccagtcaaatgaacatgtacttgctagctagctagctagctagctggctcatgtattctgaatgaatatgatttgttcttattacaggc

SEQ ID NO: 116915 - DNA, 713 bp, Zea Mays
tgcactgtactgatgtacatgtcgaaattaattgatcgtatatcgtcgtagaagaatccaggatggatttgtgtataaatacacacacacacacacacacagatcgaccctcttcgtcagtccatagtacacgtacgtacttgcaccgtactatacgacccctgcgaccggaccaggccggccggatccatgcctgttgccgctgcgggcctacacgcgccgccgacgacgacgaccgttcttgttggttattaatcggcgagcgcaagcaggaggagcagctgcctgtgtagctaagggcaggccatggggaggctcgacggcgggctgggtgcggcgacgccgccgtcgttcgtgcgcgcggcctggcaggcggtgaggtggtccgtggtggttccggcgctgcagctggccgtgtacatctgtgccgccatgtcgctgatgctcttcctcgagcgcctgtacatggcggccgtggtcacggggctctggctgcgccggcgccggcgccaccgcgtcgccggtgacgggcagcgcgtgctggacgacgacgacgacctggaggccgacgccggccgctgctgccccatggtcctcgtccagatccccatgttcaacgagggacaggtgagcgagaccgcttattgattgttgcttgcagttgcagttgcagttcgtattctgcttctacctctcgatcatactagctagct

SEQ ID NO: 116916 - DNA, 194 bp, Zea Mays
aggttttgacttaaaatcatccacagatactgtatcttcaagtgttacgtgtgatcttgcatggtcgtttcagaagattcaatcaacgtttcctcgcgtggagcagtggcggatctaggaacggatcaagaggaggctactaattaacctagcaaaccgggacggctagcaaatagatcatcaagccaaaatac

SEQ ID NO: 116917 - DNA, 242 bp, Zea Mays
aatgttccacaaggctcttgcagaacgcaatacatttcacaagttgatggcagtcatgtactgttgtatatcatcgccaattggtcggaccctgctgagtgctgatgctaggatacgtggagctggatccagatgattcaaattcaaacttctctatgttacctttggaaaacatatttcatgtatgctactgaattcagtttcccgttaagggcctttctggattgaaggatttttttagg

SEQ ID NO: 116918 - DNA, 1567 bp, Zea Mays
cgtgtagtcgtgttcttgtgcggccggtgctcccggtgctccccatcacaccaccaaacggaccaggcgaggcgtcctccaggccctagctctgtggtgtgcgcctctgcgatactgcgactgcggggcgccggtgcccgtcccatcggccgccgaactgtgcgccccggttgcccactaggccactactgcagtctgcactctgcagataacacagaggaaggcggaagccgatggccgccgtggcaagccccgccctccggctccgcccgagagccgcctctacgtcggcgacctcctcctccgcccctcctcgctgtcgcttcggctccttctctcactcctgtttcaagtttgggaggtcatttccagttcagagagtcaatggaagcacgatgcagcatttcggtactctaaaagctcaagtttttagcagcactggcgaccatgatggacgatttcatattaagaggactatatgctttgctgctacggacaagcaggagccggtcgtttcacgttactcagacatgccggttttgcatgaggcagaaagtggtactaaagttacccctgcatctgaaaactcctacttcgctggcagaggtgctggaaaaccaggattcatctcttttcaagaaagcaccttccgaaagtcaactgtggagagcgtgccacatcctggcaaggaagcatctcgattagtttggtttattggccctactattctcgtgtctttcttggttcttccatctctttacttgcgcaaagtactctcagcagtgtttgaagattccttgttgacagattttcttatactattctttaccgaggctttattttatggaggagttgcaatttttgtcttcttgattgataaagtctggagacctttgcagcaagtagcaccaaagagttacatttggtcaaaatccagatttttccgtatttcctcagtaacaacaatggttctgagcttgataatacctcttttaacaatgggcatggtatggccctggactggaccagcagcatcagcgactcttgccccttatttggttggactggttgtacagtttgcatttgaacagtatgcacggcatcggaaatcaccttcttggccagtgattcctattatcttcaaggtatacaggctacaccaactgaacagggcagctcagctggtgacggcactcacattttctgtcagaggaacagagacaacaaatcaaaccctagccatcatgaactcattaggagcattactgactgtccttcaaattcttggcgttatctgtgtttggtccctctcaagctttctgatgaggtttcttccctcttcagacattcctgatccctgactcctagacgttttggtagaacttttggagcgtgggcatagcttcccattgtaaattggttacacggaaccagtttcacatgtttgcaatgtttagcatttctttagggcatcttgatgcaatcttcggctgagtaattggaagagaaactgacgctggaatcaaataaacagcaaattaaaaggtccgatgcattgagtgtttcc

SEQ ID NO: 116919 - DNA, 2159 bp, Zea Mays
tatacatactttaatagagtaaatacttatcagttatcggatcacggatacccatttctagtccccatcagaaaaaagctgaaacaagactcggcttccacctgtcaatcaaaaaaaaaaaactccacattggacagcatccaggccccactgtccaggcacccggatccagccctctctcccttctccacttccgtttccggattcttgcgtttccaagtccgatacaaaccagcgccgcgccgcgcgagcacgtcgggcgacgttgcggcaggcgagatccgagaacactcctccctcgcgcccccgcacccgcatggccgccgctggccgcagatagggaggcgcaggcgggggcgtgcagatccagatccggtgggcggcgaggacgagatcgccccctaccaccatggcgggcgccgtgtcggcgctcttcctgctggacattaagggccgcgtcctcgtctggcgcgactatcgtggtgatgtctccgcgctccaggccgagcgcttcttcaccaagctcctcgacaaggagggcgactcggaagtccactcgcctgtggtctacgacgacgccggcgtcacgtacatgttcatccagcacaacaatgtcttcctcctcaccgctgctcgccagaactgcaacgcggccagcatcctcctcttcctccaccgtgtcgtagatgtgtttaagcactacttcgaggaactggaagaggagtcgctcagagataacttcgtcgttgtgtatgagttgctggatgagatgatggatttcgggtacccacaatacacggaggcgaagatcctaagtgagttcatcaagacagatgcgtacaggatggaggtcacacagcgtccacccatggccgtgacaaatgctgtgtcatggaggagcgaggggatccgttacaagaagaatgaagtcttcttggatgtagtagagagtgttaacattctagttaacagcaatgggcagattgtgagatcagatgtggttggggcactgaagatgcgaacatatttgagtggaatgcctgagtgcaaactcggcttgaatgatagggttcttttggaggctcaaggcagagcaactaaaggaaaagcgatagaccttgatgatatcaaatttcatcagtgtgtacgtttagctagattcgagaatgatagaactatatcgttcatacctcctgatggatcttttgatctaatgacatacaggcttagcactcaggtaaaacctcttatctgggtcgaagcacagattgagaaacattctagaagccgtatagaactcatggtgaaggcaaggagtcagttcaaggaaagaagcacagcaacaaatgttgaaattgaagtgcctgttccttcagatgccacaaacccaaatataagaacttcaatgggttctgctgcatatgctcctgagagagatgcaatggtctggaaagtaaaatcattccctggtggcaaggaatacatgtgcagagcagaatttagtcttcctagcataacagcggaagaaggggccccagaaaagaaggcaccaatacgagtgaaatttgagataccatatttcaccgtatcaggtattcaggtccgttatctgaagataattgaaaagagtggttaccaggcactcccctgggttagatatatcacgatggctggcgaatatgagctgagacttatatgagttttctcttttctggctgatggaagacatttatgaagctgcaagatacatatttgctcgagacagcaaccgtatgacatttgaatgttagcctggacgtcttctgccgaccacacaaggttttccccctgggggcttgttcatcttgttaggctcaccttaccttggttattgtacgttacccatcaagtatagtttttgaaaaaaagagaggataattttaattttcatctctcttgtattattattgatttatttttgtgggtaccaaacttggatttgtttcatctgatcgagttcacaaaaacactgccattactgggtgatggttctgaactgcaggttgaaacaattgtgccctttactgtaaatgtcgtcgtcttgtatccaggcaaaagaaaggaaacctaccgagacctattatgacatcaataatttcaacttttttttgtttcaatta

SEQ ID NO: 116920 - DNA, 1568 bp, Zea Mays
tgttcgctcgcattggcaactgaaccgcaccaggcaccacagtcccgtgcggcagtggcagacgcacagcagatcagcagcgcctccctctgcggctctgcctcttgccaaagccccccacagaattcttctccctccccgtctcctctcgcgctcgcgcgtggtgaggtgaggtggagttccgaccccgaggccgcaatggcgacagcggaggtggtggtggccaacggctcgggcggcgccgacaccaagaccgcgtttaaggagatatacagcaagctcaagcaggagatgctcgaggaccccgccttcgaattcactgacgagtcgctccagtggatcgaccgcatgttggattacaatgtgcttggaggaaagtgcaatcgtgggctatctgttgtcgatagctacaagattttgaagggtgttgacgttctgagcaaggaggagacatttctggcctgcacccttggctggtgtattgaatggcttcaagcttattttcttgtgcttgatgatattatggacaactcccagacacggcgtggccagccttgctggtttagagtgccacaggttggtctcattgcagtaaatgatgggattatccttcgcaatcatatctcacgaatccttcaacgccacttcaaaggaaagccatattatgttgatatcattgacttgttcaacgaggttgagttcaagacagcttcagggcaaatgttggatcttatcactacccacgagggtgaaaaggatctaactaaatataacttgacagttcaccgccgcatcgttcagtacaagacagcttattattcattctaccttcctgttgcatgtgcattgctgctggctggtgagaacttggaaaactttgttgatgtaaagaacattctcgttgaaatgggaacatactttcaagttcaggatgactatctagattgttttggtgatcctgaattcattggcaagatcggaactgacattgaagactacaaatgttcctggctagttgtgcaagctcttgagcgtgctgctgagaaccaaaagagcattctgtttgaaaattacggaaagtctgatccagcgtgtgttgcaaaggtgaaggacttgtacaaagagcttaaactggaggaggttttccatgagtacgagagggagagttacaacaagctgattgccgacatcgaggcccagccgagcaaggcagtccaaactgttttgaagtccttccttcacaagatctacaagagggacaagtagacccagatcgtcgacaagctgctccatcgacgcttgcatcaatcaaattactatacttgattgatgcggacgagtaattgtactatgttgttttgtgttttcattctcctgttgtacggtacaccttaatacggagtataataaagcacagtggtactagggatgcaaagccatcttgtgtcaccattcaccaacgcgtccgaggtcgttcgtcactctcgacttccaaaggatctgagaagacgaatgctctgttaacgacagtgtcgagtgttattaatggtggacatcttgataaaggc

SEQ ID NO: 116921 - DNA, 1924 bp, Zea Mays
atgaccagggccgccgcccttgttgcttcccgcctaaacaaaaccaaacacaagccaagcctgaagcctgagcgcaaggagccaggaggaaggaagcatggtggcgagaaggagacggttaggccaaccgtttgtatcctccagcttcacgcacctctccccccactctactcttggcgccaaagcaaagccgttagattattggtcaccatctcgaacccaacccgcgccgcgctctcggtccctccccaccatttatccttcccgaagaaaacaatcgcgccatgccaatgcgcctcgccgcgccgcgccgcaccgccctccccccacgtccggcattgcgtctcagcgatgcggccgccttcctcctcctcctcctcttcgtcgtctccagccgcggttccggagcccggcggccggatgtccgcgctcacgatgcgcgcggtggcgcggatgtcgagggcgcggtggttcgtcttcctgcgccgggtgtaccagtaccagaacggcccgaggtctgacctgggctccaacccgttcaactcgcccggctggctcgcgctcgagctcggcgtgatcgtcgcgcaggtggtcctgaccaccgccgtcgtcgcaacatccgccgcggagcgacccgcgtggccgctccggctgtgggtcgcggcctacaacgtcggcaacgtgctcagcctacccctcctatactggcggcaccgccattcctcctcctcctcctccgccggcggcggccggggcgacctcgagatgcacggcgccaatgacgctccggggaacaggtcgtatctgatgaacaaggcgcgggcgttcctggagctcttcttcgcgatgtggttcgtgatgggcaacgtgtgggtgttcgacgcgcggctggggtcgttccagcgcgcgccgaggctgtacgcgctctgcgtcagcctgctggcctggaacgccgtcgtctactcgctcccgttcctcctcttcctcctgctctgctgcttcgtgcccgcggtcggctacgcgctcggctacaacatgaactcggcctccgtcggccgcggcgcctccgacgagcagctcgccgcgctgccgcggtggcggttcaaggagcccgacgtggcaagggaccgggagcgcgatgaccaggatatactcagcagcaggggcggacccacaggggggtccgggtgggccctggcacaccctaagccaggcccatcggagaccccacccgttcatctgccgagcgctgaaggccgtttcaacttcccgatccttcagcttccagttcccagaatcacgagtgcggctgttcctggcgactggcgactggcgacctcaacctggctggcgagcgcgcgttgcgcggttggacggctgtctgcaggtggcctggctttctgttcctgacgagcacctggcttcctgttcctgacgagcgcgcggctgtagtgctgtggcgagcggccgagcgggtgcctgctctgctcttcgattgctgctgtgataaaatatgaagaagcaaggagatattgcctctctttttcgtaatcatgctgcaaaaaaacagaagtttattgcttcttcattatctccggatgttactcaagcgtcgacacctcaagaacaagagaaagaaagaataaatgaagaaattgtgaatccaatgccatctgcaccgccaccgccaacactttatgatgtcagtcgtcttccacatgatccaggtgaaagacaacctattgcaagttaccatgctaatgatcatgatgcaattcgaagagcatatattcttagaggtccatttcaaccatatgcacatgaattcccaaataggaaaattggagatagagatcgccattttaattttgtgtggtttcaaaattttccttggattgaatatagtgtcaagaaagatgctgca

SEQ ID NO: 116922 - DNA, 1608 bp, Zea Mays
atgaccagggccgccgcccttgttgcttcccgcctaaacaaaaccaaacacaagccaagcctgaagcctgagcgcaaggagccaggaggaaggaagcatggtggcgagaaggagacggttaggccaaccgtttgtatcctccagcttcacgcacctctccccccactctactcttggcgccaaagcaaagccgttagattattggtcaccatctcgaacccaacccgcgccgcgctctcggtccctccccaccatttatccttcccgaagaaaacaatcgcgccatgccaatgcgcctcgccgcgccgcgccgcaccgccctccccccacgtccggcattgcgtctcagcgatgcggccgccttcctcctcctcctcctcttcgtcgtctccagccgcggttccggagcccggcggccggatgtccgcgctcacgatgcgcgcggtggcgcggatgtcgagggcgcggtggttcgtcttcctgcgccgggtgtaccagtaccagaacggcccgaggtctgacctgggctccaacccgttcaactcgcccggctggctcgcgctcgagctcggcgtgatcgtcgcgcaggtggtcctgaccaccgccgtcgtcgcaacatccgccgcggagcgacccgcgtggccgctccggctgtgggtcgcggcctacaacgtcggcaacgtgctcagcctacccctcctatactggcggcaccgccattcctcctcctcctcctccgccggcggcggccggggcgacctcgagatgcacggcgccaatgacgctccggggaacaggtcgtatctgatgaacaaggcgcgggcgttcctggagctcttcttcgcgatgtggttcgtgatgggcaacgtgtgggtgttcgacgcgcggctggggtcgttccagcgcgcgccgaggctgtacgcgctctgcgtcagcctgctggcctggaacgccgtcgtctactcgctcccgttcctcctcttcctcctgctctgctgcttcgtgcccgcggtcggctacgcgctcggctacaacatgaactcggcctccgtcggccgcggcgcctccgacgagcagctcgccgcgctgccgcggtggcggttcaaggagcccgacgtggcaagggaccgggagcgcgatgaccaggagtgctgcatctgccttgcgcagtacggggagaaggaggaggttcggcagctgccgtgcacgcacgtgttccacctcaagtgcgtggacaggtggctcaggatcatctcctcttgccctctctgcaagcaagagctcaagtgactgatgcctactccgctcctacagagagatgtgggtgtattctccctcccttactctgactgcgcctgccgatcagccacacctactacatatataccacgacgaccgccggacgatgcgtgcgtcgcacctctcgcgaggatctctcggcgggcccgtgctgacctctagtagacgctgacaaatgatgtgcagcaggcggcaggtgaattcggtaccttttttttttgtctagactagatcaaatgggaattgtgtaaacaaaaaggtctctttttttttatgtatgtaacaatgtgttgtgcgcccttgcttcat

SEQ ID NO: 116923 - DNA, 873 bp, Zea Mays
ctaaacatatcgacaattcctcctccctcctcccatcgcttgcccctcgctcccctccctctccgcgccgccccctctcgaatcgaaatccctctccgccatgccgaagggcgccaagaagcgcgccaagctcaagaagcagcagcagcagggccaccccgacgatgccggcaacaccaacgccagcaacggcaactgtaacggctgcgatgacaacaacagcgcctcgagcggccgcgacggcgaccaccacctgcggatcccacccaaagtttctcgtggtggagcggggacctgcagtggcagtgattgctccagggcagcgggcaatatggtggaatttctgcggcctttttgatgcctttactggttcagggagatagatgaagggttggaacttgaagccaagaagacaaatgtggtgacgttcagtttaaagctgatgagcagttgtaactagactttttgtttgcatagtcacatgaatgtatgatgaagcagcaggatttcggataacatcgcgctgatgtttacttcctccctgtgtctctgcatgtgtgcaaagttacacaccccccctggtcgtggactcatggttaatatccttaatttccttagtatccccaacgcctagtgccctttgtctagtgtcgtctaggtactgcctggttttgtagcataagagttgaggtgggtcgaccgtaaagaaaattttgttgtttctgcctttatacttattttttctggggtgtcgtctgctatgccccttcctctcatggttgtcacttgtaagatatttattcaaacaatttgagatggttctttgaaaagcctcaattcgagattgctgagtgtcagccaggtttgtcataa

SEQ ID NO: 116924 - DNA, 551 bp, Zea Mays
gaggatgaaatgaaacatatatttggcagttaattgatactaccactagtatttaagcatctcatctaacactctttcttacagggttggaacttgaagccaagaagacaaatgtggtgacgttcagtttaaagctgatgagcagttgtaactagactttttgtttgcatagtcacatgaatgtatgatgaagcagcaggatttcggataacatcgcgctgatgtttacttcctccctgtgtctctgcatgtgtgcaaagttacacaccccccctggtcgtggactcatggttaatatccttaatttccttagtatccccaacgcctagtgccctttgtctagtgtcgtctaggtactgcctggttttgtagcataagagttgaggtgggtcgaccgtaaagaaaattttgttgtttctgcctttatacttattttttctggggtgtcgtctgctatgccccttcctctcatggttgtcacttgtaagatatttattcaaacaatttgagatggttctttgaaaagcctcaattcgagattgctgagtgtc

SEQ ID NO: 116925 - DNA, 1434 bp, Zea Mays
ctaaacatatcgacaattcctcctccctcctcccatcgcttgcccctcgctcccctccctctccgcgccgccccctctcgaatcgaaatccctctccgccatgccgaagggcgccaagaagcgcgccaagctcaagaagcagcagcagcagggccaccccgacgatgccggcaacaccaacgccagcaacggcaactgtaacggctgcgatgacaacaacagcgcctcgagcggccgcgacggcgaccaccacctgcggatcccacccaaagtttctcgtgtggatgcgaacgaggactccatggagagctctgaggagatggtcaccccccgagctgccgcgtcggagccggatgaggaggagactaaggccactgcggccgaggtgcccgtggagcgcaccgtcgacgcggacgtcgccggttctggggaggtcatagtggacgcgtttccgccggaaaccgttggacaggaacgtgagggcaaagtggatgaggcagaggtggaggtgcacgccgtggtggcgcaggaaccggaggtaaaagatgtggtggtggccgaggaatccgtggttcaggagccagtgtctgacgcaccggtggcagaggcttcagaggtgaaggagttggccaaggtgcattcggtgcttgaatctgagccgagggttgatgaagggcgtgatgaagtggtggtggtcgacgaaacacctgtagtgcctgaggtacaggaaccagaggtgaaaggcgttgatgctaccgttgtgttgaaggaacaagagaagaatagtggcaatgtggtggccaaggactctgctgaggtttcgcgctctcaggaggctgctggtgtgcatattacagaggtggagcggggacctgcagtggcagtgattgctccagggcagcgggcaatatggtggaatttctgcggcctttttgatgcctttactggttcagggagatagatgaagggttggaacttgaagccaagaagacaaatgtggtgacgttcagtttaaagctgatgagcagttgtaactagactttttgtttgcatagtcacatgaatgtatgatgaagcagcaggatttcggataacatcgcgctgatgtttacttcctccctgtgtctctgcatgtgtgcaaagttacacaccccccctggtcgtggactcatggttaatatccttaatttccttagtatccccaacgcctagtgccctttgtctagtgtcgtctaggtactgcctggttttgtagcataagagttgaggtgggtcgaccgtaaagaaaattttgttgtttctgcctttatacttattttttctggggtgtcgtctgctatgccccttcctctcatggttgtcacttgtaagatatttattcaaacaatttgagatggttctttgaaaagcctcaattcgagattgctgagtgtc

SEQ ID NO: 116926 - DNA, 1483 bp, Zea Mays
ctaaacatatcgacaattcctcctccctcctcccatcgcttgcccctcgctcccctccctctccgcgccgccccctctcgaatcgaaatccctctccgccatgccgaagggcgccaagaagcgcgccaagctcaagaagcagcagcagcagggccaccccgacgatgccggcaacaccaacgccagcaacggcaactgtaacggctgcgatgacaacaacagcgcctcgagcggccgcgacggcgaccaccacctgcggatcccacccaaagtttctcgtgtggatgcgaacgaggactccatggagagctctgaggagatggtcaccccccgagctgccgcgtcggagccggatgaggaggagactaaggccactgcggccgaggtgcccgtggagcgcaccgtcgacgcggacgtcgccggttctggggaggtcatagtggacgcgtttccgccggaaaccgttggacaggaacgtgagggcaaagtggatgaggcagaggtggaggtgcacgccgtggtggcgcaggaaccggaggtaaaagatgtggtggtggccgaggaatccgtggttcaggagccagtgtctgacgcaccggtggcagaggcttcagaggtgaaggagttggccaaggtgcattcggtgcttgaatctgagccgagggttgatgaagggcgtgatgaagtggtggtggtcgacgaaacacctgtagtgcctgaggtacaggaaccagaggtgaaaggcgttgatgctaccgttgtgttgaaggaacaagagaagaatagtggcaatgtggtggccaaggactctgctgaggtttcgcgctctcaggaggctgctggtgtgcatattacagaggtggagcggggacctgcagtggcagtgattgctccagggcagcgggcaatatggtggaatttctgcggcctttttgatgcctttactggttcagggagatagatgaaggtgagatggttctatacttctatacctcatgattgtgttttctataatactcttgttgattttaattgacacaatttcttatttctaaacacactgtaattattgccaaagaaattggtcttggggaaatatggtcgtgagttttactggttacacctttggaatatgaggtgcatatctgagttcattgtggatagcttaagtggcgagatcattgcaaatgctgttcaacgtcagtgtacaagttataactataatttaacctgcagtttataacatgtaaggaacccataaaattgcaaaacgatggtgtttttgtgggtactgagcaaacgcttttttcagagtgaacttttgggccatgagatgcagttttgtatctctcacacatggtttaaaaatgacttgtgatattgttatgggccttagcccattagctatgtcattatggctaggttagatgcggccactgttcacgtgcggttactgtagcgcgtgaacagtgccggccaaata

SEQ ID NO: 116927 - DNA, 1136 bp, Zea Mays
aagccagcagaaatcgtacgtagagaggcgtagagctagcaagctgtagctaggagctagcgatcgagctcaattcgttctcagtcgagctcgtcggccatcgacgatcagtagtccgttaggacaacaatccatggcgaacgcgggcatgaggccggtggccggcctcctcctggtgctcaacttctgcatgtacatcatcgtggcggcggtgggcggctgggccatcaaccacgccatcaactacggcttcttcatcggcgccggcctgcagctcccggctcacttctccccgatctacttccccgtcggaaacgcggcgaccgggttcttcgtcatcttcgccgtgatcgccggggtcgtcggcgcggcctcggcgctcgcggggttccaccacgtccgcgcctggaacgccgagagcctgccggcggcggcctccgccgggttcattgcctggacgctcaccctgctcgccatggggttggcggtgaaggagattgaactgcacggcaggaatgccaggctgatatgcatggagtccttcaccatcatcctgtcagcgacgcagctcttctacctgctcgccatatacggaggcttgagatgaaatcatcacactggatggaggaagagactgcattggaatggagatttatcgtttccgtacgtatcgaattgagctggtgtgcatcggtttcacgggacagagtgtggctttcctcgtgttttcgttgtgggtttcttccaagctgcagaggcagtacgtatatgtgtatctgtttgtgtgtatttctgtgtgttaattacgtacggagctaaatgcatcggtgaagcctaaacttggaaggttttatttggatactttagttagtatttgtcctaatacatattctaatccacttcaatccatgtgtattaggatatatactataatatccaaacaaagccttagaggataccacttagactcacggactttgtaaatatatttctgttctctaaatttattttatggtgcgccacactgcacatatctaaactagtaaaatagtgtgtcctaggtccatttccggaccataacgaccattgtggtacaccatgtgataattttagggacattggaatatgttttcaaa

SEQ ID NO: 116928 - DNA, 494 bp, Zea Mays
aaccctaactcattctttcacttctccagccgtcacagacaaccggccgccaggaagcatggccgaccgtgccctgctaatcacctcctccctttctgtctttcaatttgttcctgtcgctcactttcgttcggccgccaggaagcaccagcggctggctctggccgactgcgccctgcacagagccacacagccgcccactctctgtttggtttctgtttttttttcgtttctacttgccgcactattactcggtcgccaaggagaactagacatttgcactgtgcaattgaactcgaatttagtcctcatttactcgaatcccttactgtgtgtttaaatatatgagatggatatcttgtaatgggatcgagttttggaggaaaaaaattgtagatccgggccccgcgatatttctgttattttctgtgatgattttagtgcatctatgcacattcacgcggtttaaaaaaaaattagggttctaaccgtaa

SEQ ID NO: 116929 - DNA, 1707 bp, Zea Mays
ccgcgcgagggtccacacgccagtctccccgttccgtcctgttcgcccgcgtagcccacctgcgcatgctttccatgccacagccccgcagaggaatcgtgtacggatggatggaaggcaacagctttggatgtgcttcgctctcgcgcccccgtcttataaatacgcgccctccacttgaaacaagcggcaaaccgcaccacaaaacaaatcggccaaagcgagccaagtgattcaaacagacgagccccgagagaagaggagataaagcagagcgccatggcaacagcggtcagcggcaggtggacgcgcgtccgcacgctgggccgcggcgcgtcgggcgcggtggtgtcgctcgccgccgacgccgcctctggcgcgctcttcgcggtgaagtccgcccccgcgtgggccgcggagcagctgcggcgcgaggggagcatcctgtcgtccctccggtccccgcacgtggtcccctgcctcggccaccgccccgcggccgacggcgggtggcagctgctcctcgagttcgcgcccggcggctcgctcgcggacgtggcggcgaggagcggcggcgggcgcatcggcgacgagcgcgccgtcgcggcgtacgcagcggacgtggcgcggggcctggcgtacctccacgggcggtcggtcgtgcacggcgacgtcaaggcgcggaacgtcgtggtgggcgccgacggccgcgccaagctcgcggacttcgggtgcgccagggccgtgggctccgggcgccccgtcggcggcacgccggcgttcatggcgcccgaggtggcgcgcggggaggagcagggccccgccgccgacgtctgggcgctgggctgcaccgtcgtcgagatggccacgggccgcgcgccgtggagcgacgtggacagcctccccgcggcagtgcaccggatcgggtacaccgacgccgtgccggacgcgcccgggtggatgtccgccgaggccaaggacttcctggcccggtgcttcgccaggaacccgcgcgaccggtgcacggcggcgcagctcctggagcacccgttcctggcgtcagccggccgcggcgtcaaggcggaggaggctgcggcggcgtctcccacgagcacgctggacgccgcggtctgggagcccgactccgatgacgagggcgatgcgtcagagagccccgcccagagaatcaaggcactggcctgcccctgctcggtcctgccggactgggattccgaagagggcgactggattgaagtgctcgacgagcaatgtgaagccaccaacttggtgccggtaccaaccaaagaggcggccggcgatgacgagtgccagctcccgagtgtggcgttggaaacaggggtcgacttcatcgacgccgatgcggagggcgaagatcccgggtgttgtgtagctgtaggatatgatcccgggtgttgtgtagccgtaggattaactactgctttgtcagttgggctgttggaagagcagtgtatgggtgattacagtaacccaactgtatttctcgcttacagtattgaaatatcaaagacctctttactgcgaaactgtcccctctttgtcctgttctactaccactaccgtctaccagtttcacattgtctacatagaaaaagcctctacaactgcctaactggtgcgacgcgacaattccagaaacattgttctagaccgaggcggcgacggtga

SEQ ID NO: 116930 - DNA, 1511 bp, Zea Mays
aactaatccacccacccacccaaattaacttcccctcctcctcctcctcctccacaccttgccgagctttgtatataaacgctcgcaactcacccacatcaagggcaggctcacgattccagctcaggcggccaaacaaacaaaaaaaagaccaccaagaacatcgcaaaaaagacagaaaggaagaaacagaggcagaagcccatggcggcgagcgggcgctggaggaggctgcggacgctgggccgcggcgcgtcgggcgccgtggtgtcgctggcgtcggacgcggcgtcgggggagctgttcgcggtcaagtcagccggcgcgagcggcgcggcgacgctgcggcgggagcatgcggtgctgcgcggcctgcggtcgccgcacgtggtgcgctgcgtgggcggcggcgagggcgcggacgggtcgtaccaggtgttcctcgagtacgcccccggcgggtcggtcgccgacgcggtggccaggggcgggggcgcgctggaggagcgcgccatccgcgcgctcgccgcggacgtgctgcgcgggctggcctacctccacggccgctccgtggtgcacggcgacgtgaaggcgcgcaacgtgctgctgggcgccgacgggcgcgccaggctggcggacttcgggtgcgcgcggacgcccggcttctccgcgcggcgcccgctcggcggcacgccggcgttcatggcgcccgaggttgcccgcggggaggcccagggccccgccgccgacgtgtgggcgctcggctgcacggtcgtcgagatggccaccggccgcgccccgtggggcggcgccgacgccgacgtcctcgccgccgtgcaccggatcgggtacacggacgccgtgcccgacgcgccgtcctggatgtcggccgaggcccgggacttcctggcccgctgcttcgccagggacgccgccgagcggtggaccgccgcgcagctccttgagcacccgttcgtggcggctccctgccacggccacggcgaccacgaggccccgcgggtgtcgcccaagagcacgctggacgccgcattctgggaggccgaagacgacgacgacgacgcggacgaggcagtgtcggcgagtgcgtcggagaggatcaagtcgctggcgtgctccgcctgcgccttgcccgactgggacggggaggacgggtggatcgaagtgctgggtgatcagcagcgggtcgaggtctgcggcgcggtgcaggtggcgcgcagcgcgccaggcaaagtgtccagcgtcctggcggtgccagctggggagatggatgtcggcggcggcggcggcggcggcggtgatgaactggaagcagaggacgtgtcgttcggtggcgaggttccaggatcagcggatgcttcggctgagcgtcagaagaaacgctatttgattttgcgttcgcactactgtcatgtactctcgtgtcagttagtgccctgtaatctaccactagtagttgttaataatgcaataaagttatgggttcccacaaa

SEQ ID NO: 116931 - DNA, 113 bp, Zea Mays
ctaattatcacatgtgtaatagctgttaataaatcctaccaagggctatatggactaccaaacctacatacatactctataacaaaagaagactttgttcaccgttccttttc

SEQ ID NO: 116932 - DNA, 2468 bp, Zea Mays
gaatgggtcgcaagtcgcaacccacgctggctctctcccggctccgaactgctaagccccccgccggatcgggttgcgggtcgccatccccgacccagatccaccacagctcgccgccggtcgccgccgccgcagagtgggtgatagtgtacgtggtaacatgctggagccaacagcaatggaagtggtcgttgctggctcagtgagcaatgcagtggtgcctgcgcctgtggttcacaacccacgggcacgcaagctgcggtctgcagtttggcaggacttcacgaaggagcgtcgtgccgatggtaactgtgtggctgtctgtaaccactgcaagaagcagctcacggcaactagccggtcaggcacaacgcacctccgcaaccatctcgcaatctgcaccaccacctccacacggcgtgctggtaagcgccggaagcttgttgtgcgccgtattctccacaacaaatcctccatcgatgggcgctcgggtgagggtcacgcctcaggtgaggacaatgataatgagggcacacactttgatcaagaactcagccgccgagaccttgtgcacatgattgtccagcatggctaccggttttcgattgtggatgatgtgggcttccaaaagtttgttaagaacctccagcctcagtttaggatggtgtcgtatgaaacagtgagggctgatagcatggaaatatatgaaggtgagaaacttaagctacatgatgttctctttaagatcccctgcagggttagcatatcagttgacatgtggcggtcaaatacacagatggaatacatgtgcttgacttgccactacattgatcatgccaatgatgagtggaaagtcaggaaaaaaattctcaactttgtgcatatggaggcaccttttacacttgatcagatggttaatatcattgtagagaagttgcatagttggggtattgacagaaagctagctgctgttgtgctagacaactgcagcagcggtgaaattgttgctagagagcttcacagagttttccaggctcggaggcttctattgaatggggatttgttccaagtacgctcttgtgcacatattctaaatctcactgtccaagaaagctgggaacgggcatctgatataactgatagagttcgcaagatgattaactatgtcaagtttgaaaggttccaaaagtttcaggatattgcaaaggtattgcgtatggatcaaaagctgctagttattgattctcctgataactggccgtctacgtacttaatgtttgactctgcatgctactatcaagatgtgtttgtgcgcctgacagaacaggaaggtcattatgatgtttttctgtctgctaatgactgggctgatgtgaaagccctcactgaaatactggacgtagtctatcatgctatggagaagtttcctgtagaaaacccaactgcaaacctctatttcaatgagatgtgtgagatccacgtgcttttgaaaacctggtgcaagagtccatctactgttgttgccaaagttgctggccagatgctttctaagtttgaaggttactgggatctcactaggcctgtaatggcatttgcatctattcttgatccccgttacaagatgaagtccctcgaatacttttttcggctcatttattctgatgagcaatttacagcaaagacaatgatagatgtcatccagaatacctttcacaatctgtataatgattataaacatcagtcatcagactcatggaagaatccatctgttctctgttactctagaaacagtaattcttgcatgggctctgtgtacagcaatggggatgattctaagaccttttcgcgtatcacattatctgatgctcgacggggacttgatcagtatatacaagagacctcatcagggcaatccttgaagtctgacttggagatgtatctcgaggaagcagtttttcgtcaaaaagaaggaaatcaggataattttgacattctgggatggtggaagtcctttgccgccaagtatcctgtactttcacaaatggctcgtgatattttagctatccctgtatctatcatccctttggacagtgaagcccgtacactaaatgagtatctcagtactatggatccttcaacggttcagggattagtgtgtgcacaagattggttacgggatgacccagaagttgttgctggttcaggtggtcatggagatgatggagtaccgcgtggtgacgaacttattgtggtgccaaaatagagaatagtactagcaacctggaagtagtatgcattggcagttcaagaaaatgataagttttgccatggagattatatataaactaagttcaatggctgtaatagtatttgtaatgatagaactgtcagtttgtactggatggccattattgatgaaggggacttgcaaaagtgcaaattaccaaaggttttattaggtgtttgaa

SEQ ID NO: 116933 - DNA, 2744 bp, Zea Mays
gaatgggtcgcaagtcgcaacccacgctggctctctcccggctccgaactgctaagccccccgccggatcgggttgcgggtcgccatccccgacccagatccaccacagctcgccgccggtcgccgccgccgcagagtgggtgatagtgtacgtggtaacatgctggagccaacagcaatggaagtggtcgttgctggctcagtgagcaatgcagtggtgcctgcgcctgtggttcacaacccacgggcacgcaagctgcggtctgcagtttggcaggacttcacgaaggagcgtcgtgccgatggtaactgtgtggctgtctgtaaccactgcaagaagcagctcacggcaactagccggtcaggcacaacgcacctccgcaaccatctcgcaatctgcaccaccacctccacacggcgtgctggtaagcgccggaagcttgttgtgcgccgtattctccacaacaaatcctccatcgatgggcgctcgggtgagggtcacgcctcaggtgaggacaatgataatgagggcacacactttgatcaagaactcagccgccgagaccttgtgcacatgattgtccagcatggctaccggttttcgattgtggatgatgtgggcttccaaaagtttgttaagaacctccagcctcagtttaggatggtgtcgtatgaaacagtgagggctgatagcatggaaatatatgaaggtgagaaacttaagctacatgatgttctctttaagatcccctgcagggttagcatatcagttgacatgtggcggtcaaatacacagatggaatacatgtgcttgacttgccactacattgatcatgccaatgatgagtggaaagtcaggaaaaaaattctcaactttgtgcatatggaggcaccttttacacttgatcagatggttaatatcattgtagagaagttgcatagttggggtattgacagaaagctagctgctgttgtgctagacaactgcagcagcggtgaaattgttgctagagagcttcacagagttttccaggctcggaggcttctattgaatggggatttgttccaagtacgctcttgtgcacatattctaaatctcactgtccaagaaagctgggaacgggcatctgatataactgatagagttcgcaagatgattaactatgtcaagtttgaaaggttccaaaagtttcaggatattgcaaaggtattgcgtatggatcaaaagctgctagttattgattctcctgataactggccgtctacgtacttaatgtttgactctgcatgctactatcaagatgtgtttgtgcgcctgacagaacaggaaggtcattatgatgtttttctgtctgctaatgactgggctgatgtgaaagccctcactgaaatactggacgtagtctatcatgctatggagaagtttcctgtagaaaacccaactgcaaacctctatttcaatgagatgtgtgagatccacgtgcttttgaaaacctggtgcaagagtccatctactgttgttgccaaagttgctggccagatgctttctaagtttgaaggttactgggatctcactaggcctgtaatggcatttgcatctattcttgatccccgttacaagatgaagtccctcgaatacttttttcggctcatttattctgatgagcaatttacagcaaagacaatgatagatgtcatccagaatacctttcacaatctgtataatgattataaacatcagtcatcagactcatggaagaatccatctgttctctgttactctagaaacagtaattcttgcatgggctctgtgtacagcaatggggatgattctaagaccttttcgcgtatcacattatctgatgctcgacggggacttgatcagtatatacaagagacctcatcagggcaatccttgaagtctgacttggagatgtatctcgaggaagcagtttttcgtcaaaaagaaggaaatcaggataattttgacattctgggatggtggaagtcctttgccgccaagtatcctgtactttcacaaatggctcgtgatattttagctatccctgtatctatcatccctttggacagtgaagcccgtacactaaatgagtatctcagtactatggatccttcaacggttcagggattagtgtgtgcacaagattggttacgggatgacccagaagttgttgctggttcaggtggtcatggagatgatggagtaccgcgtggtgacgaacttattgtggtgccaaaataggtgaacacgttggaggctctgcgcttctttcagtttatttccaatataaatttatcttatcccctgttgagcatgagcatgcatgagatattctagcgagaaaaacgttgacacaaaaggctttttacaagaaaagttgaaagaagctggttatgcatacttctttgatgtttgtctgtatgcatggttaataaaagttaaaaagcacaaatcgtgcatttaagatgttaaataatatacgatagctttaaggatcttcagcacttgttagagtgatacttaccttatgtcttaagcagagaatagtactagcaacctggaagtagtatgcattggcagttcaagaaaatgataagttttgccatggagattatatataaactaagttcaatggctgtaatagtatttgtaatgatagaactgtcagtttgtactggatggccattattgatgaaggggacttgcaaaagtgcaaattacc

SEQ ID NO: 116934 - DNA, 2669 bp, Zea Mays
ttgagaccggctaatcgaaagaaaaaaaaaaacagccgccacggatctcctccgctgagtcattttgtagccgaaaccctagcgctccgccgaggcgccgagcaccaggctccagcctcgcctaagaaaaagccgaggccgagacaaactacttgtactaactcagctgctatgccatggatctggagatcgttgggcggtgtgccttactgttcgacgatgacgcgacaacggaggtcgtcaactccggcggttccttgtcccctgggcggccatcggcgcagcagacctcctcctcgaccgccacgacatccgccacctccttgaccgcgtgccccctcccccgcgtcgcgcctactcagtggccctcctctccacgccctcccccgacggcgtctctgagagtctgagaccgagcccgatcgcgagcgctatctggacgtcccggctggcgacggtgaatacgagggttctggagatgcagccccctcagatgaactaaattattcggacttgtgttatcctcctccattttatgtgccagaaagcttgttgaataagctgatggttggagacttggagcagagatgaagttcctactagtgatgcacattgtttccctgcaatgtatcttgatgtaaggaatataggcagtccaagtcacatggtagaagtcctaaccacaaggacaaaagagattcttgtgaccggaggaacagaagaaatcctgagagtgacgacagaagctctcttgagtgcgctgacaacggttctcgtgagtgtgccgactgaagatgatcaatggagcgcaaaaacagcagttatggcatggtatccaatatccattgcttctgatagaagctcagctgggccatcagagaagcagctgtatgacaagcaagggaacagtagattccatctggttgtggggttaaaactatctccagcagcttatctatccccatacatatatttaaactctattttgcgaacagtgcaaaacaatgtttttgggtaaactataaatagactgctgcaaacggtctaagaaggaacctattcggaaagtcaatgtaaatgaagcggctgctatagtaatggtaatggtggctacttgtggactgggtgctgcaaatgactcacttaacaccatgaaaggaaccaaggacaatgttcgcacccattttagtcatgatccttcttccagctttggatatttctcatcttaacaggatcaagatgcactgtccgaacgcatttcaaatggtgaggctgatgcttcacttacaggtagtggacacaaccccaaagggaacgttttggaattataaattattgatgatgattggattgcaaacactattgcaaaagctgctgctgcagtagcctccaaagaggcagattcttcagaagcttccatgacaaaggagcagaagctgaaagctgagaggcttcgccgtgcaaagatgtttgctgcaatcattaagagtggagacaagaagatgaatgatttagctgtgtttgctgcaatcattaagagtggagacaagaagatgaatgatttagctgcatcatcggatccaactagtgaagctgccaaggcaattcctgatatgaatgtgtctggacttgatcagcaatctgtggctaaggaacgtgaaggtagttctgatccgtttgaacatgagggaccaaacttgacaaatcataataaagactctgatgatgaaccaaacagagtgcggaagtatagaaagaaacatcgagaatcccatgaggaaaaagatgaatcggaggatatctataagcactcgaggaagaggcatcacccagagcattcaagaggccctagcaaggatgttcacaaacataagcacaagagcctcaaggtcgcacagaagtgtccgcgtctggatcaggtgccaagtttgaatcagacaagctgctcgatgacattgcacaatcaactcaggtaacaactgaagtgccgagtgaactgagagcaaaaatcagagcgatgttgctcgagagactgtagtattcaacgttatgtccttaggcctctgatctgtagccaactgctctgtcgatttctgtatttgcttcgaacgctccaactgtgcccattttacttgaaatcagtgacctgcacgccaagttcgttggcctgctccacatgttgaagtttctgctgcacgcataggtttgaacgtcttgaactcttgatgaatcagtggtccgcctgcaggctgcagcgtcatatttctacgggatatttctagcggatttctgcactgatggaataattaatgtggtcttcatgtggaggacagcatctctgttttgtggtgttgaggacagcagcatcaacagtcttttgactgttgtaggacagcaggcagcagcagtctttttgactgtactttagcatctagagtacaacacatgtgtgctgcagtagcatctaaaggataacatatttgtgctgcagtgtgtagtgtggtatgtagtgtagtccctagagctataaataacccttctaaaggtatgttattttgagtagtgtgtgagtaataaatcaaaaattgcttcaactcgtagtgtcatccgagtaagaattccattgcttacaaagacaactattttgttctattatagtgattttagtg

SEQ ID NO: 116935 - DNA, 444 bp, Zea Mays
tctattctacgcagacgaggctcaatgcttcctcctccgtgtcaccactgctccgcccgttccctggcgacgagagcgggttagggtttctgtacctagagccaccacctcctctgtcgtgtcctctgccgcctccaccttatggttggtgttcaggccttcgggacttctgccggcatcgcgcacccaccagaccggatcgcagcatgtcaatgactctgtctacatgtcaacatggtctaattcgtgaggcaagtgtgtggatcttggtccaattcagttcagacttcatctacttgttaacaacttcagaaattttcagtaattacaacagatgggcaagacctgtacttagctcagcaacctcagttcctctctatcgacaactgtaggtcatggttatctttatatcctgttcggtgcgttatctgggtgcctcaagta

SEQ ID NO: 116936 - DNA, 1701 bp, Zea Mays
ggccgcaggaaaggcttcgcgcatgcttctataaaaaagcgtcacagcagaaacgtaccaacgcagatcgatgggtggggaaatggaggccaccgccgccgagacggggctcgcccagagaccggttgtgctgtacccgtcaccagggatgggccacctggtctccatgatcgagctcggcaagctcctcggcgcgcgggggctgcccgtcacaatcgtcgtcgtcgagccgcccttcaacacgggcgccacggcgcctttcctcgccggcgtctccgccgccaacccgtccatctccttccaccgcctgcccaaggtggagcgcctccctctcgtcagtaccaagcaccaggaggcgctcaccttcgaggtcatccgcgtctccaacccgcacctccgcgagttcctggccgccgcgaccccggccgtgctcgtcgtcgacttcttctgcagcatcgcgctggacgtggcggaggagctccgcgtgccggcctacttcttcttcacctcgggcgccgaggtcctggccttcttcctgcacctcccggcgctccacgagcgggccacggcgagcttccaggacatgggggaggagcccgtgcaggtgcccggcatcccgccgttcccggcgacgcacgccatcctgcccgtcatggagcgcgacgacgcggcttacgacggcttcgtcaagggttgcgccgacctctgccgctcccagggcgtcctcgtcaacacgttccgcctgctggagcagcgcgccgtcgagaccgtggccgcgggccactgcacgccccccggcctcccgaccccgcccatctactgcatcgggccgctcatcaaatcggaggaggtgctgggcaagggcggcgaggagtgcctggcgtggctggacgcgcagcccagggccagcgtggtgctcctctgcttcggcagcatcggccggttcagcgccgagcagataagggaggtggcggccggcctggaagccagccggcagcgcttcctgtgggtggtccgggcgccgcccagcgacgatccggccaagaagttcgagaagccgccggagccggacctggacgcgctcctcccggagggtttcttggccaggaccaaggacaggggcctcgtcgtcaagtcgtgggcaccgcagcgggacgtgctagcgcacgcgtccgttggcggcttcgtcacgcactgcggctggaactcggtcctggaggcgatcatggcgggcgtgccgatggtggcgtggccgctctacgcggagcagcggctcaatcgggtgttcctggagaaggagatgcagctggccgtggccgtggcagggtacgacagcgacaagggcctcgtgccggccgaggaggttgctgcgaaggtgcgttggatcatggactccgaaggcgggaggatgctccgggagcgcacgctggcggccatgcggcaggccaaggacgcgctgcgcgagggcggtgaatcggaggccacactggccgggctggtggacgactggaaacgtacttgacgtggttgctgtggattatgttggaagggggtgggggttacgcgacactgttcgccatctatggactttacatcggaacgagaccttctagatgatcaattatgtcctggtaccagaaactgttctagatgattaattattatataaattaaactattatttaaagtggaattgttccg

SEQ ID NO: 116937 - DNA, 186 bp, Zea Mays
gtacgaagacgcaagccaagtggccaccgacgcagtcagcagtatcaggaccgtagcttctttctgtgctgagaaaagagtgacgacgatttacgatgacaaatgtgaagcctcgaagaaacaaggggtcagaacagggatggttggaggcctcggtttcggcttctcgttcttgatgctgtacct

SEQ ID NO: 116938 - DNA, 1170 bp, Zea Mays
attgttgagcagacacttggggctataaaaacagttgtctccttcaacggggagaagcaggctattgcactgtacaataaactcatacacaagtcatacaaagctgctgttgaagaagggatcaccaatggttttggcatgggttctgttttctgcatttttttctcgagctacggtttggccatatggtatggcggaaagttggttcttagtaaaggttactctggaggagatgtcatcaacatcttgtttgctataatgaccggggcaatgtctttaggtaacgcaacaccctgcatggcagcctttgcagaaggacaatccgcggcatacagactgttcacaacgatcaagaggaaaccagagattgacccagacgaccaaaccggtaagcagctagaagacatcaagggtgacgttgacttaaatgacgtgtacttcagctacccggcgagaccagaacagctaatatttgatgggttctcgctgcatgtgtctagcggcactacaatggccatagttggggagagtgggagtggcaagtcaactgtgataagcctcgtggagagattctatgatccacaggctggtgaggttttgattgatggggttaacattaagagtttgcagcttgattggataagagggaagattggtttggttaaccaagagccgttgctctttatgacatctatcaaagataatataacatacgggaaagaggacgcgacgattgaagagatcaaaagggcagctgagcttgctaatgcagcaaatttcatcgataagttgcccaatggctatgacacgatggttggtcagcgtggtgctcagctatcagggggacaaaagcaaaggatcgctatcgcaagagcgatcatcaaaaaccccagaattctcttgttagacgaggctactagcgcactggacgtggagtcggagcggattgttcaggaagcgttgaataggatcatgctggacaggacaacacttgtggttgcacatcgcctgagtactgtgagaaatgctgattgcatatcagttgttcagcaagggaaaatagttgaacaaggtccccacgatgagctggtaatgaaccctgacggtgcttattctcaactcattcgtctccaagaaagcaaagaagaagaggaacagaaaccagagcgg

SEQ ID NO: 116939 - DNA, 207 bp, Zea Mays
ggcgacgccgggaagaaggtgccgttcacggggctgttccggtacgccgacggcacggacgtgctgctcatgctcctcggcacggtgggggcgctggccaacggcgtctcgcagcccgtcatgacggtcatcttcggccaggtcatcaacgccttcggcgacgccaccatcgacgacgtcctcaaccgcgttaaccaggtgagttaa

SEQ ID NO: 116940 - DNA, 1629 bp, Zea Mays
cgacgagggtgcgctgcttgctgggagcctgggagtgtgcaggagatggccttcgccgtcacgctcacgccgcttcgggcaactgctgtccttgccggatggaggcggcgcccaggggtgactcctccgcggttcgccgtagtcctggcgacgtctaccggagtcggcggcgaacggaccccgccgacgttcaggcgcctaagggaggagctcctccagctccacgccgaagccgacctcacccaatccaaagcaaatagcgagagggtaagacttgtgcggttgactgaggcggctgagaatcttaagaagcgagctgcaaccagtgtccgaatgggcaaagagagcgaggctgtggatttacttgtgcagaagaagaaattgaccaaagccctagagaacattaaagagcgcattgaggtgcttgacatgctttcggcaaagattagtgaggtaatttcgatgaagcaaaacatgttaattgagtatgccttgcgtccagagacatctaatggtgaagactctgatgacaagataagggttttctccagtacagtcaatgttggaaccaatggagctgggagtagcgattcacacccaaaatcagttgaaaaggaatcttttgagttgagaaatgaggcacatgcaattgcaagcatggctgacgacgctgagcaaagtgcacttcagatgtctgatagcttctcatttttgaacaatagtgacccagcaaactacataaagaatcattcagcatacgatgaccttatagagcatattaatttgcagatgaaatcattggaatatgaaattgaacagttcatcaattcccaatcagttgaagaggtgggcagtgagaagcagagaagtgacaagtggcaaaggttatctgacatacagatgcttataaaggaaactagagaaaagattgcgaggattttgggtatgatagtagaagagactgaatctgggacttaagatgatagcaaactacaaaacagtgaattagtgtcatccatccaccatctttttcgtgggtaggtacccaagttgacaatggcttaccagtagttggatcttgcaagttggtcccagtgccatattccgcaggactactccgcctaacaactagagggaatgcggggtaaccttcttctctggatggaagcatttcgatttgttgctgtgctgagatcgcattgtcggctatggatatacagtacaggtcgcacttactgaaagcttctgaagccgaaaaatcttgaccggatgagcttggttgccgaccatatccaggtcatccctctgcgtgcatttgcatagagaaggctgcaggcctgcagcctagatatttcacgagcacttcataattttcaatgccatccaatgcttcaagctttctgacatgagtgtgcagatgatgaaaaactccaagatgggtctctgtacctactatacaacaagaagaatccatgtactaaatgagaatgcgagattgttaatttgttattatatgctccttgataatttttttctggttctattttgtttcctgaaccttgcataccgcatgtattatgttactagaaatagaacgtctatcagcacagcagacagcagctccctttc

SEQ ID NO: 116941 - DNA, 832 bp, Zea Mays
cgacgagggtgcgctgcttgctgggagcctgggagtgtgcaggagatggccttcgccgtcacgctcacgccgcttcgggcaactgctgtccttgccggatggaggcggcgcccaggggtgactcctccgcggttcgccgtagtcctggcgacgtctaccggagtcggcggcgaacggaccccgccgacgttcaggcgcctaagggaggagctcctccagctccacgccgaagccgacctcacccaatccaaagcaaatagcgagagggtaagacttgtgcggttgactgaggcggctgagaatcttaagaagcgagctgcaaccagtgtccgaatgggcaaagagagcgaggctgtggatttacttgtgcagaagaagaaattgaccaaagccctagagaacattaaagagcgcattgaggtgcttgacatgctttcggcaaagattagtgaggtgaatggcatggttttttatcttgtaaaatgtgactaatttatttttctagaatgttgtgtattcgttagcttcattccagttactaaattactgaacaagccattgtttgcatttgtgtaagataatttgttgctcccttttgaacttttgctgcagcacagaattggtattttggtcagctcttgctgtccatctatagtactgtagaggtatgtgaataggccatccttctagtggcatacatcagccatgtagtagtagttgggtgctgagctaagtcatgtagtagtgtaccatagaggcgctagatttgtatatatactagccgattactaggcgatgcaatagagcaaggcagttcatttgctgcacattc

SEQ ID NO: 116942 - DNA, 4634 bp, Zea Mays
gcaagcaccagtagtgcaaacaaacagctaggatccagccatagagagagaagggattcatggctgggggagcgagacacggtagcgaggacgatgccgagacgacgacgacgaacgagggacgccgcagcagcgaccacgcagccggggccacgaccaactattcggagcacaagcagctggtgccgttccttgacatgctcaagtatgccgaccgcacggacgccgcgcttatggcggtcggcacggtggccgcggtggccaacggcatgacggagccgctcatgaccgtcgtcttcgcggccgtcatcgagtgcttcggcgccggagacgacgccaccatcctccaccgggtcagcaaggtgaaggcttgcgggcactcgcgcttgaagaactccgaaacttggagcctttgtatatacaatccagacatgctaataattcttccggtgaagttatcatgtactacatctacctgggaattggaactgcagtttcttcctttctccgtgtcatgctggacggtggctggagaaaggcagtcaacacggttgcggtcattataccttgaagctgtgctgaggcaagacattgcattctttgacgtggagatgacaactgcagaagcagcctcaagaatgtctgcggacactgtactcatccaagacgccctcggtgagaaggtagggaagtacatacagcttttgacaaccttcgtcggtggctttatcatcggattcattagaggctggatgctggcccttgttatgctcgcgtgcatacctccaagcattttatcctttgcaacagtctcccggttgcgagctcaaatatctcgaaagaggcaagaatcatatgaagatgcagggaatattgtcgagcaaaccattggagcaataagaacagttgtatctttcaatggagagaagaaagcaattgcaatgtacaacaatcacataaaaaaggcatacaaggctacaatcatggaagggatcatcactggtcttggagtaggctccatattttttgttgtcttcagcagttactctctagctttctggtatggtgccaagttaatcatcagcaaaggatatactggagggcaggtcatcaatatcgtatttgcaatcttagttggctcaatggctataggtactgcatcaccatctatttctgcaattgcagaagggcagtctgcagcacaaagattgtttgagattatcaacagaaaaccaaatattgacattaacgacacttccggaatagtattagaagatatcgagggagatgttgagctcaaggatgtgttctttaggtaccctgcaaggcctgagcagttgatacttgatggcctgtgcctgcaagtacctagtggtactacaatggctatagttggggagagcggaagtggtaaatccacagtgattagtatggtggagagattttatgacccacaggctggtgaagtgttggtagatggagtcaacatcaaaagtctgcaactccaatggttaagaggaaagataagtcttgtcagccaagaaccattgctttttatgacctccatcaaggataacataacctatggtaaagcggatgctacaattgaagagatcaagagagcagctgagcttgcaaatgcagcaaccttcattgaaaagctgcctgacgcatatgagacaacggtaggtcagcatggttctcagctttctggggggcaaaagcaaaggattgccatcgcaagagcaatcctcaaaaatcccaaaattcttcttttggacgaagccacaagtgctttagatgtagagtctgaaagggtagttcaagaagcactaaataggataatggtagggagaactacactcattgttgctcaccgcttgagcaccatcaggagcgcagactgcatagcagtagttcatcaagggaaagtagttgaacgaggtgtccatgacaagctaattaaggaccctgatggagcttattctcagcttattaggttacaacaggcacatgctacagaaaggcatgaggttccagatactgacgtgtcaggttcaatctataaaagtagaagtttacctttggaacaatcaacaggcagagattctcccaggaacaaaggacatcattccttcacaaaaaccactgggctgtctaaagaattgaacaggcaagattttacagacagacaggaagaccaggaacatggtaatagcaaggctcctaagaaagcaccaattggacgactattcaaacttaataagccagaagcaccagttctcctattagctgctatagttgcctttgtgcatggtcttctgttcccctcgttcagtataatgatgtctggtggtataagaactttctactatccaccacaccaacttcgaaaagattctcggttttgggcactgacgtgccttctgtttgcagtcattgccctgatttcaatccaactggaatactttctgtttggggttgctggtgggaaacttatacaacgtgtccgctctttgtctttccagagcatagtacatcaagaagttgcttggtttgatgagccttcaaattctagtggggcccttggcgcgagactctatattgatgctttgaacatccgacgccttgtcggagataacttggccatactagtgcagtgtatagtaacaatagcggctggtttttccatagcatttgcttctgactggaaactcacgctgatcgtcatatgtgtgattcccgtaatgggctcacaaaattatattcaagtgaaattcttgaaagggttcagtgaagatgctaaggtgatgtatgaagatgcaagtcaagtcgtaaccgaggcaattggtagtattcaaacagtagcatctttctgtgcagagaagagggtaattacatcatacatccaaaaatgccaagcttcaatgaaacatggcattagaagtggaatggttggaggccttggtttcagtttatcaaacttaattatgtatctcacatatgctctttgtttctatgttggtgcactgttcgtacacgaaggaaaaacaacttttaaagacgtttttagggtctattttgctctgattttcacagcttttggagtttcccaaacaagtgcaacggcaacagattcaacaaaagcccaggaatccacaatttcaatactaactattatagacaggagatctaaaatcaactcgactagtgatgaaggcgtgattatagaaaaagttgatggcaacatagatttcaggcatgtaagcttcaaatacccatcccgcccagacgtccaagtgctcagcaactttactttggccattccagcaagaaagactgttgcacttgttggagagagtggtagtggtaagtcaacaataatttctttgctcgagagattctacgatccagattctggtacaatctcactggatggaacagaacttaaaaaactaaagctgagttggttaagagaccaaacgggcttagtgagccaagaacctgtacttttcaacaacacaattcgcacaaacatagcatatggaaaacaaggagaagtaagagaggatgagatcgttgctgcggccaaggcagcaaatgctcatgagttcatatctagcttgcctcagggatatagcactattgtcggcgagaggggaacacagctctctggaggacaaaaacaacgggttgctattgcaagggccatcttgaaggacccaaaaatacttctactcgacgaggcaacaagtgctctggatgctgaaggagagcacattgttcaagatgcactggaccaagtgatggttagcaggaccaccattgttgtggcgcaccgactgtccacaattaaaggggcagatatgatcgtagtcatgaaagatggtgaagttgctgagaaggggaagcatgaataccttgtgggaaagggtggagtttatgcatcgctggtagaactacactccaagtcagcataaggatatatgggaacttcgatggattatttggtattacaaggagagcatttgcagtaggaggtagtcatgcaacgaaaacaaatccatgtgaaacttgtcaattcatacttctggtttgttattatagggcagtgagtcttatcctaaactccatgccgacaaagatagcattggcatcaccgtatttcatatgctgcagtgcacttgattatcaataaattaatggtaaaaaggagaacaaatcaacctaatcactgagctgttattatttagtcgacgagcagaagcatttctgcgattccagagcacaagactacatgacaaatacactacaactttgcacgcattggaaagggcgagttcggatcaaatgcagctacccgtcagcgaattggttcaaaccaaaaagttcaggcgtatccagaacttaaaccggcgtacctttcgtgcgccgaggtcccctttggtcgtcatgatccaaccgacgctagcctagacttgacgttacgacggtaacggtgcccactggcgcggccaccatatctggctgctcgcttcctttccgctccccaccagcgaagacacgccgccgccgttccatagctacgccgccgcgccgcgtgcttttcccattctaccgtccgaaaacaaaat

SEQ ID NO: 116943 - DNA, 3921 bp, Zea Mays
atggctgggggagcgagacacggtagcgaggacgatgccgagacgacgacgacgaacgagggacgccgcagcagcgaccacgcagccggggccacgaccaactattcggagcacaagcagctggtgccgttccttgacatgctcaagtatgccgaccgcacggacgccgcgcttatggcggtcggcacggtggccgcggtggccaacggcatgacggagccgctcatgaccgtcgtcttcgcggccgtcatcgagtgcttcggcgccggagacgacgccaccatcctccaccgggtcagcaaggtgaaggcttgcgggcactcgcgcttgaagaactccgaaacttggagcctttgtatatacaatccagacatgctaataattcttccggtgaagttatcatgtactacatctacctgggaattggaactgcagtttcttcctttctccgtgtcatgctggacggtggctggagaaaggcagtcaacacggttgcggtcattataccttgaagctgtgctgaggcaagacattgcattctttgacgtggagatgacaactgcagaagcagcctcaagaatgtctgcggacactgtactcatccaagacgccctcggtgagaaggtagggaagtacatacagcttttgacaaccttcgtcggtggctttatcatcggattcattagaggctggatgctggcccttgttatgctcgcgtgcatacctccaagcattttatcctttgcaacagtctcccggttgcgagctcaaatatctcgaaagaggcaagaatcatatgaagatgcagggaatattgtcgagcaaaccattggagcaataagaacagttgtatctttcaatggagagaagaaagcaattgcaatgtacaacaatcacataaaaaaggcatacaaggctacaatcatggaagggatcatcactggtcttggagtaggctccatattttttgttgtcttcagcagttactctctagctttctggtatggtgccaagttaatcatcagcaaaggatatactggagggcaggtcatcaatatcgtatttgcaatcttagttggctcaatggctataggtactgcatcaccatctatttctgcaattgcagaagggcagtctgcagcacaaagattgtttgagattatcaacagaaaaccaaatattgacattaacgacacttccggaatagtattagaagatatcgagggagatgttgagctcaaggatgtgttctttaggtaccctgcaaggcctgagcagttgatacttgatggcctgtgcctgcaagtacctagtggtactacaatggctatagttggggagagcggaagtggtaaatccacagtgattagtatggtggagagattttatgacccacaggctggtgaagtgttggtagatggagtcaacatcaaaagtctgcaactccaatggttaagaggaaagataagtcttgtcagccaagaaccattgctttttatgacctccatcaaggataacataacctatggtaaagcggatgctacaattgaagagatcaagagagcagctgagcttgcaaatgcagcaaccttcattgaaaagctgcctgacgcatatgagacaacggtaggtcagcatggttctcagctttctggggggcaaaagcaaaggattgccatcgcaagagcaatcctcaaaaatcccaaaattcttcttttggacgaagccacaagtgctttagatgtagagtctgaaagggtagttcaagaagcactaaataggataatggtagggagaactacactcattgttgctcaccgcttgagcaccatcaggagcgcagactgcatagcagtagttcatcaagggaaagtagttgaacgaggtgtccatgacaagctaattaaggaccctgatggagcttattctcagcttattaggttacaacaggcacatgctacagaaaggcatgaggttccagatactgacgtgtcaggttcaatctataaaagtagaagtttacctttggaacaatcaacaggcagagattctcccaggaacaaaggacatcattccttcacaaaaaccactgggctgtctaaagaattgaacaggcaagattttacagacagacaggaagaccaggaacatggtaatagcaaggctcctaagaaagcaccaattggacgactattcaaacttaataagccagaagcaccagttctcctattagctgctatagttgcctttgtgcatggtcttctgttcccctcgttcagtataatgatgtctggtggtataagaactttctactatccaccacaccaacttcgaaaagattctcggttttgggcactgacgtgccttctgtttgcagtcattgccctgatttcaatccaactggaatactttctgtttggggttgctggtgggaaacttatacaacgtgtccgctctttgtctttccagagcatagtacatcaagaagttgcttggtttgatgagccttcaaattctagtggggcccttggcgcgagactctatattgatgctttgaacatccgacgccttgtcggagataacttggccatactagtgcagtgtatagtaacaatagcggctggtttttccatagcatttgcttctgactggaaactcacgctgatcgtcatatgtgtgattcccgtaatgggctcacaaaattatattcaagtgaaattcttgaaagggttcagtgaagatgctaaggtgatgtatgaagatgcaagtcaagtcgtaaccgaggcaattggtagtattcaaacagtagcatctttctgtgcagagaagagggtaattacatcatacatccaaaaatgccaagcttcaatgaaacatggcattagaagtggaatggttggaggccttggtttcagtttatcaaacttaattatgtatctcacatatgctctttgtttctatgttggtgcactgttcgtacacgaaggaaaaacaacttttaaagacgtttttagggtctattttgctctgattttcacagcttttggagtttcccaaacaagtgcaacggcaacagattcaacaaaagcccaggaatccacaatttcaatactaactattatagacaggagatctaaaatcaactcgactagtgatgaaggcgtgattatagaaaaagttgatggcaacatagatttcaggcatgtaagcttcaaatacccatcccgcccagacgtccaagtgctcagcaactttactttggccattccagcaagaaagactgttgcacttgttggagagagtggtagtggtaagtcaacaataatttctttgctcgagagattctacgatccagattctggtacaatctcactggatggaacagaacttaaaaaactaaagctgagttggttaagagaccaaacgggcttagtgagccaagaacctgtacttttcaacaacacaattcgcacaaacatagcatatggaaaacaaggagaagtaagagaggatgagatcgttgctgcggccaaggcagcaaatgctcatgagttcatatctagcttgcctcagggatatagcactattgtcggcgagaggggaacacagctctctggaggacaaaaacaacgggttgctattgcaagggccatcttgaaggacccaaaaatacttctactcgacgaggcaacaagtgctctggatgctgaaggagagcacattgttcaagatgcactggaccaagtgatggttagcaggaccaccattgttgtggcgcaccgactgtccacaattaaaggggcagatatgatcgtagtcatgaaagatggtgaagttgctgagaaggggaagcatgaataccttgtgggaaagggtggagtttatgcatcgctggtagaactacactccaagtcagcataa

SEQ ID NO: 116944 - DNA, 2091 bp, Zea Mays
aaacatcgccatgattcggtggttctgaatgcatctcctgtaaccaccgggcccggagcttctcccaagcccgcgtcgccgtcgagggctgttaacctggcaacactctcaccaaccaacaaacaaacgcgcggggtcgctgtaatggccgccgccgccgccgctgtgaatgaccgcctagacgtgcatgagaggaaggcgcagaagagctactgggaggagcactctggggagctcaacctcgaggccattatgctcgactcccgtgccgccgaactcgacaaggaggagcgccccgaggttctgtctttacttccttcatatgaagggaaatctatactggagctgggagctggaataggtcgctttactggtgaactggctaaaacatctgggcatgtttttgcagtggatttcgttgaaagtgtgattaaaaagaatggaagtataaatgatcactatggcaacacgtcctttatgtgtgctgatgttacatccacggacctgatgattgaagcaaactccattgatctgatattttcaaactggttgctgatgtatctttcagatgaggagattgacaagttggtagaaagaatggtaaaatggttgaaggtcggtggttatatcttctttagggaatcttgcttccatcaaactggagatacagaaaggaaatttaacccaacacactatcgagaaccaaggttttataccaaggtatttaaagaatgccaaacctttaatcaggatggcacttccttcaaactttctttgattacattcaaatgcattggagcttatgtaaacatcaagaaagatcaaaaccagatatgttggctatggaaaaaagtaaactcatcagaagatgggggatttcaaagttttttggacaatgtgcagtacaaagccactggaatactacgctatgaacgtatctttggagatggctacgtgagtactggtggagctgagactacaaaagaatttgtggagaaactgaatcttaagcctgggcagaaggtgcttgatgttggatgtggaattgggggaggtgacttttatatggctgagaagtatggtacacatgttgttggtattgacctttccattaacatgattatgtttgcccttgagcgttccattggatgtaagtgcttagttgagtttgaagttgctgattgcaccacaaagacatacccagaccacatgtttgatgtcatctacagtcgtgacactatccttcatatacaagataaaccctccttgtttaaaagtttcttcaaatggctgaaacccgggggaaaggttctaatcagtgattactgcaagagtcctggaaaaccatcagaagagtttgcaacatacattaagcagaggggttatgatctccatgatgtggaggcttatggacagatgctcaagaatgctggtttcagtcatgtcattgctgaagaccgaactgaccagttcctcagtgttttacagaaggagctagacaaatttgagaagaacaaagatgatttcctgtctgagtttgcccaggaggattatgacgatatcgtgaatggatggaaggcaaaactgcagaggagctctgctggtgagcagaggtgggggctgttcgtcgccaccaagtgatgcgcgtgcgtgtggctttattacaaataacatttggagctctgctggtgagcagaggtgggggctgttcgtcgccaccaagtgatgcgcgtgcgtgtggctttattacaaataaatttgaagctctgctggtgagcagaggtgggctgttcgtcgccaccaagtgatgcgcgtgcgtgtggctttattacaaataaatttgcttctgcaattcaccgatgggattcgcttcataacgtgattttacataactgaactcagagagcctatcctattgctttgtgttttgggacaatgagactgatataacttttacggtcctgttaaatatagagtgtgctgtactgatgctcctcatggctgtggctacatggttgacacgtgacatgagatttgttattttcatatttttttagaaaaatattttgcatctcaacttttgaccaatgt

SEQ ID NO: 116945 - DNA, 2129 bp, Zea Mays
cgcgcccgaaatttcacaacaccaaacccgcaggggggagaagcgcaaagccacgaggagtgcgaggcgagggccgacaccggggacaagcacggcgcggcggcggaggcagcaatggcggcgctgcagagttggcgcaaggcgtacggcgcgcttaaggacaccaccaccgtcagcctcgccaatctcaactccgacttcaaggatctggatgtcgcgatcgtgagggccaccaaccacgtggagagcccgcccaaggagcgccacctgcgcaagattgtggcggcgacgtccatcgcgaggccacaggcggacgtcacttactgcatccatgcgcttgcccgacgactcgccaaaaccaggaactggatcgttgccctaaagacacttgtagtgatccataggcttcttcgtgaaggtgaccctgcattccgcgaagagtttctaacatttacacagagagtgcggattttgcagctgtcaaacttcaaggatgattccagcccagttgcttgggattatgcttcatgggttcgcacatacggtttatttttggaagaaaaactagaatgcttcagggttttgaagtatgacattgaagctgcacgtttatcaaagcaaggtcaaggacctgaaaagggccacagtagaactacggaattgaattctcaggacttgctggagcaattgccagcactgcagcaattgttatatcgacttattggctgtcgagcagaaggagctgcaaaaaacaattatctggtgcaatatgctctagcccaggttcttaaagaaagcttcaaaatttattgtgcaataaatgatggaattatcaaccttattgacaagttctttgagatgccaaagcatgaagcactaaaagcccttgacgtttacaagagggctgtccaccaggctgggaacctatctgacttctatgaaagttgtcagggtttagagcttgcaagaaatttccagtttcccactttgagggagccaccacaaacattcctttcaaccatggaggagtatgtgaaggaggctccgcgtatgatgccagttgtagagccactggagcttcctgagcggcttcttctgacatacaaaccagaagaagaagttcatgataccgttccaattgtagcggagaaactgcaagttgttgaagaaattgctccagttccttcttcccaaatagctttgcctcccaagcctgagattgcagatactggtgatttactggggttaggtgattcaacccctactgtgttggcgatagaggagagcagtgctttggccttggccattcttccgacaggtattgataactcaacaacaactacacagcaagatagtggatttgatccaacaggatgggaacttgctcttgttactacaagcagcaatgcgactccactgtctatggagagtaatttgggtggtggatttgacaagctcacattggacagcctatacgatgatggaacctacaggcagatgcagcaacaacagctatacggatcagcccctcccaatccattcatggcaagcgatcccttcgccgtatcaaatcaagtagctcccccaccatcagttcaaatggcggccatggctccacagccccagcatttgcccatgatgattgaaccaaatcccttcggaccaccacagcagcatcacgcgggcgtcgctcctgcagcaaaccccttcctcgacgccgggttcggtgcgttcccggcagtaaatggaatgcatccacagaccaaccccttcggaggcgccgcacaacttctctagtcatatatactttgcaaagtttgcattacaattacatagaagatgtgcaatctgtagatacccacgcaacgatgcaagacaagcaattgacgtctgtggaatcgcttttctccgtcagaccgttaccaatcagggaatcgccatgttgcaccagcctcttctcgcccttccttaggctttggccgcttggcctttcttgtgtagctttctgttttgctgtgtctggttttccatcttccgtggcgagccattgcacccattgtaaagaaatttgtttcatcaggctttgggctgataaaatcatgagtacgtgccaataaggcaataaccca

SEQ ID NO: 116946 - DNA, 135 bp, Zea Mays
atggagctcgtcgtcgtcaggagtcgacaggggaggcgcggggctaggggcctcggcagggccgtgaaggagcagggtgcgcggctccgcatcatctgccgctgcgtcgcgctgctcgtcttctaccgcgactga

SEQ ID NO: 116947 - DNA, 98 bp, Zea Mays
ctgggcaaggtgttatgcatattccgctgattaacaaaggaagaaagaggtgtccgaagattgggatatttattcaacataaattcaagttgtggtgg

SEQ ID NO: 116948 - DNA, 803 bp, Zea Mays
taatggtcatttggatcattacaaactccaatgaaacctaccggaaaatgaaatcaaagaaataaacaaatatgatgcattgacccgatgtaaaatattttccttgattaccaggtcaccgcaggaaattgctaacgacagcgattatgtgtttgctaacactagtagcaaaactcaattaactaatgtacagaagttgttacaacaatggttagactaaatcggtcaaatgcctgctccctataaaaggaatgcagcagctgtaatctgacttaggaaaacagttaagatggggtaatatggactttcctgtaatcatcctccttgcgtcttcttcgtctctgcctgcaagggccagactcccaggaccacgacgacgggactacattttgccacagcagtaaagctactatacaagttggatgacttccgttccgctggagcaaactctccaatctccaggacagacaggatctcacgccatacaatcacctcggtggcttctgtcaacatctctttctccatgcggagtagcttataatcaacccgtcattgcaaaatagtatacatcagaggggcggcaatcttcattgacacagatctgtctgttctgcgtactaatgtctacaaagatctgtatgtgcatcgacctttcttgcatctgatggcttccacagtatattcacatcagagttgcaccaggaagagaggtggttgcatccgctgtttgtaatgtagctgtcacaaatgccatcggtgcctgctgtgtttcactaaaaatacccagaatgttcaaaatctgt

SEQ ID NO: 116949 - DNA, 2382 bp, Zea Mays
gtctccgcctagtcgctcgccatactacctcctcagacaccggcggcggccatgccgcctccgcgtccgacgcaccccccacttccctctcctctgccgcccgggccgcctcccctaagcgcccgtcgtctccctctcccgcccaaccgcccggcccccacgtctctcctcctcgcgccgccctcctccccagcccgtgccctcgcgcttctcttccccgactcctccgcccatctcttcccgtccctaccctccgtctcccccttcgccacctcttatcccgctcacacccccgtcccatcaccactcgccgccgccgcctccttcgcgctcctcctgccgtcgtcacacctcatcttcctatccgcgcatccgtccccttccaactcctctgtccacctccgcgcctattccctcgctcccgcgcccgctttcccgcgctttgcgcccgcctcgctctccttcaagcgccatgcctcagctgcaggcctgccgctccaggacctacccttcggcattggcgtccgcctggccggcggggtcaacgccgtctcgctgctctcactgtccaccggccagatctgggtgctctctccgaagctggccgcggacggccggacagtggagctgcacaagtgcgcggtcgtcgagctcgagccggcgcggcccgtgtacgcaatggaagtcgcaatgggaaggctgctgctcggggaggttggcggtttgcgcgtcttcccgctacggggtttgatgaagggtggaaaggagagggatgtgaagaaggaagttgctgtggtagtaggaaggaagggctgccacaagaagaatgggatgctgaatggcttagttgtgccagttaatcgtgttagctatgggggcaatggtgaaggtgattttgtttcgacttgtaagctcacaactctgagggtaaaacagagttcaggaagctattgttctttttcgttggcatttcaaaatgatgatcaaaagtcagaaggcagcatggaattgctgaattcagtgaaagctatttcgatccatcctctttccaataacaagtttttggtactggattcatctggagtgttgcatgtcttcattttttcaacaacacaaatggtctcaagaggtgccatcaagcaatgttctgaaaatatccatacatatcgcttgcattatcccatgaaagtgcaattatctgctgtcttttcagttacctctataaagtgtttgtgcagagacacaatttttttgggtttcagatggtggacatactgtacatgttatgtccgcagttgagactgaatcccctaacggtgataatggagacgttactggagaaagagagttagcacctatcaagctttcagctattgaagcaatctttacaagcgaaagagttgaggacattgtatctatctccaaggattcagttcttatccttggtcaaggcaacatgtttctgtatggaacttcttgaatttggttctttatcatgcatggtaagtataatcaaatcaccgtttttgcgtgttactaacaacaattgcttcagcatacgcccttgagtttcatttgatatcaggtggatacctcactgttctttagggcatggttcaagactttgcagctttggatggtcttttggctaaagacaggatgagttttggtgattttgaagatgaacttatccaccagtccttgaagtcgtgagctttactatttattaatcacagtaagcagatgaaaaaagctcatgttttttcagaggacagcaagaatctgaaggtgacgccagattatggacggaccacgccgtaatgaccctattgctctgcatgcgtactttacatgcaaagactggcacaattcttgttgatatgacttggaaagagcaatgctgccaaatctattcccagtctcagttgtcgtggaaagtggatcaccatgagggccattcagctatggaataatacagctggtgctagactgctagtgtaattcagggactggacttgcggtgtggtggagtcgaggtttgggcatgttacttactgcatactacctctgttcttaaatatttgtcacccgctagtcatttttgaattaaacggtgacaaattaaaaagaacggagggagtatatcaaaaaaggaataatgtagtactcttgtaagagttaagatggaatgttgaaaggcgcgactttgagccattcttatcattggttttttattgctgtattttttttgtgacattccactattccggtatacccaaatcattcctggttggttgtgtaatcacgctttaggctgtcctcactggtaagtggtggaccccccattttagtgagtgctcacaacttgacatgtttattgga

SEQ ID NO: 116950 - DNA, 2141 bp, Zea Mays
ggcggcggccatgccgcctccgcgtccgacgcaccccccacttccctctcctctgccgcccgggccgcctcccctaagcgcccgtcgtctccctctcccgcccaaccgcccggcccccacgtctctcctcctcgcgccgccctcctccccagcccgtgccctcgcgcttctcttccccgactcctccgcccatctcttcccgtccctaccctccgtctcccccttcgccacctcttatcccgctcacacccccgtcccatcaccactcgccgccgccgcctccttcgcgctcctcctgccgtcgtcacacctcatcttcctatccgcgcatccgtccccttccaactcctctgtccacctccgcgcctattccctcgctcccgcgcccgctttcccgcgctttgcgcccgcctcgctctccttcaagcgccatgcctcagctgcaggcctgccgctccaggacctacccttcggcattggcgtccgcctggccggcggggtcaacgccgtctcgctgctctcactgtccaccggccagatctgggtgctctctccgaagctggccgcggacggccggacagtggagctgcacaagtgcgcggtcgtcgagctcgagccggcgcggcccgtgtacgcaatggaagtcgcaatgggaaggctgctgctcggggaggttggcggtttgcgcgtcttcccgctacggggtttgatgaagggtggaaaggagagggatgtgaagaaggaagttgctgtggtagtaggaaggaagggctgccacaagaagaatgggatgctgaatggcttagttgtgccagttaatcgtgttagctatgggggcaatggtgaaggtgattttgtttcgacttgtaagctcacaactctgagggtaaaacagagttcaggaagctattgttctttttcgttggcatttcaaaatgatgatcaaaagtcagaaggcagcatggaattgctgaattcagtgaaagctatttcgatccatcctctttccaataacaagtttttggtactggattcatctggagtgttgcatgtcttcattttttcaacaacacaaatggtctcaagaggtgccatcaagcaatgttctgaaaatatccatacatatcgcttgcattatcccatgaaagtgcaattatctgctgtcttttcagttacctctataaagacacaatttttttgggtttcagatggtggacatactgtacatgttatgtccgcagttgagactgaatcccctaacggtgataatggagacgttactggagaaagagagttagcacctatcaagctttcagctattgaagcaatctttacaagcgaaagagttgaggacattgtatctatctccaaggattcagttcttatccttggtcaaggcaacatgtttctgtatggaacttcttgaatttggttctttatcatgcatgggcatggttcaagactttgcagctttggatggtcttttggctaaagacaggatgagttttggtgattttgaagatgaacttatccaccagtccttgaagtcgtgagctttactatttattaatcacagtaagcagatgaaaaaagctcatgttttttcagaggacagcaagaatctgaaggtgacgccagattatggacggaccacgccgtaatgaccctattgctctgcatgcgtactttacatgcaaagactggcacaattcttgttgatatgacttggaaagagcaatgctgccaaatctattcccagtctcagttgtcgtggaaagtggatcaccatgagggccattcagctatggaataatacagctggtgctagactgctagtgtaattcagggactggacttgcggtgtggtggagtcgaggtttgggcatgttacttactgcatactacctctgttcttaaatatttgtcacccgctagtcatttttgaattaaacggtgacaaattaaaaagaacggagggagtatatcaaaaaaggaataatgtagtactcttgtaagagttaagatggaatgttgaaaggcgcgactttgagccattcttatcattggttttttattgctgtattttttttgtgacattccactattccggtatacccaaatcattcctggttggttgtgta

SEQ ID NO: 116951 - DNA, 672 bp, Zea Mays
ctccatggcccgacaccaatcctggtctcatcccttctggattgaaccctgctgtgatgcgagacagcgcaatgctggcggcgcgggaggcgaataagcggccgcgcgcagcgccgacgacgaccctccccattgccttctcactgatccctacaacaccaattatagttggggaaggtgaacctccctcttgggatccggtaccaactctaaaagttctacaatgagtatgtcattacgagatcatattagaaagaggagggaagaagaagatgatgacatgatgttgtttattttccctgccttatatctgatgggttcaactagaagtgggggacaaaagaagaaacgccatacatcagatgagacaactccgtatgtgtattgtcaagtattgggaagacaactccgtaggtgtgaccattgttattactgtatttgcttatgtagctgattacttatatatctgtttcttggcgagtatgcgtgaacaattgcaagtctttttgttattactgtatgtattaaattgatttgaacagattgagtgcatcctgattgtgtacatgtgctgaaatcctgcaatgttaggattctaggatggcgcaatggtatgctgctctggttttgcactggtttgactgtatggaatggaaccgaattgaactacaa

SEQ ID NO: 116952 - DNA, 602 bp, Zea Mays
ctccatggcccgacaccaatcctggtctcatcccttctggattgaaccctgctgtgatgcgagacagcgcaatgctggcggcgcgggaggcgaataagcggccgcgcgcagcgccgacgacgaccctccccattgccttctcactgttctacaatgagtatgtcattacgagatcatattagaaagaggagggaagaagaagatgatgacatgatgttgtttattttccctgccttatatctgatgggttcaactagaagtgggggacaaaagaagaaacgccatacatcagatgagacaactccgtatgtgtattgtcaagtattgggaagacaactccgtaggtgtgaccattgttattactgtatttgcttatgtagctgattacttatatatctgtttcttggcgagtatgcgtgaacaattgcaagtctttttgttattactgtatgtattaaattgatttgaacagattgagtgcatcctgattgtgtacatgtgctgaaatcctgcaatgttaggattctaggatggcgcaatggtatgctgctctggttttgcactggtttgactgtatggaatggaaccgaattgaactacaa

SEQ ID NO: 116953 - DNA, 423 bp, Zea Mays
atcctggtctcatcccttctggattgaaccctgctgtgatgcgagacagcgcaatgctggcggcgcgggaggcgaataagcggccgcgcgcagcgccgacgacgaccctccccattgccttctcactgatccctacaacaccaattatagttggggaaggtgaacctccctcttgggatccggtaccaactctaaaagaagtgggggacaaaagaagaaacgccatacatcagatgagacaactccgtatgtgtattgtcaagtattgggaagacaactccgtaggtgtgaccattgttattactgtatttgcttatgtagctgattacttatatatctgtttcttggcgagtatgcgtgaacaattgcaagtctttttgttattactgtatgtattaaattgatttgaacagattgagtgca

SEQ ID NO: 116954 - DNA, 644 bp, Zea Mays
catactagcctggtggaaagcacacaaagaagaatatcctatcttgggccagcttgctcgtgatgtcttagctatgcaagtgtcaacagtagcttcagaatctgcttttagtgcgggtggtcgtgtacttgatccatttcgtactcgccttgaccctaccatggtagaagcgcttgtctgcaccaaagattggatagctggagcaagaaaaggttccaaggctaagagtgttgctattcctaatatggtttgtgaaatggaggaacttgaggctcttgatagaaatctttcacttgaggatgaagacctagatgatgatcatgatgatggaccagaggcatcgttgtaagcttgttgatgaagacctagatgatgataatgcaacatgaatgctctgaatgttttcattgtacttgttgcgtaatgctttgtgatcttgcgaacttgggacttgtggacttgtggttgtgtactttgtgatctgtgtgatgaacttgttatattgtgaacttgtgatctgtgtgatccacttattatattgtgaacttgtgatcaacttgttatattgtgaacttgtgatctgtgtgatccacttattatattgtgaacttgtgatcaacttgttatattgtgaacttgtgata

SEQ ID NO: 116955 - DNA, 118 bp, Zea Mays
gccttgtcattttgtcgcaactcatcgccgcttgcttgccctctcctccacccgccgccgcccctgaatcgtcaccggttgctcgccctctcctccactagatgccaccccggctcgc

SEQ ID NO: 116956 - DNA, 2509 bp, Zea Mays
cgtttcttcctcctcctctttcggccgtccggcggaccaaatcacacggacaatacggccattgccacgccactacctgctccagggatgctacgctgcacgcgctactcgctccagctgctccaaccccatccctccttccccggtggcgccacctgctcttgctcatgcccgtgctccccgccttcttcctccttcggcaaccagcaccagaggctccatcagccagccgctctgtccccagctacttcccgctccagcacaccactcacccacgcgcctgaccatgacgaagatggtccctccgacgacgccctcctggcgctcctccgcgcccatgacaccgatgccgcctacagcctcttctcctcgaagccgtctctcctcccttcctcccccaccacggcgtctcgcctcctcgcgcagctctccttcaattccaacggccccgatgggtttccccgcgccgcccgcctcctccagagcctccgcgcccgcggtgccctcgacctcctcgacgccaactccctctccctcgcggccgcggcagccgcccgctgccgtgacgcccgtctcgcccattccctcctcctctacatgctccgccagggcctcctccccgaccgacgcgcatacaccgccgccgtctcccgcctcacgccgcccaccaaggcgctccgcctcttcgacgccgtcctccgcaacctccgcagcgcaccaccagagctcgtctccccctcctgcctccccgacgcggccgcattcaacgcagccctcagcgcctgcgctgacgcgggggattgccgccgattccggcagctgttcgacgcaatgagcgaatggagcgccgccgccgatgcgctcacctacaacgtcgtcatcaagatgtgcgcgcgcgccggccgaaaggacctcgtcgcgcgcgtgcttgagcgcatgctcttctccggcctcaccccctgcgccaccactttccactccctcgtcgccgcgttcgtcggcttcggtgacatcgccacagcggagaggatcgtccaggcgatgcgggaagagcgcaaagacatatgcttactgctcagggctgtctctatggactgcgacggtgtgaccgacgtcgaggagggtgccgtgctgctcgacgacattgttgccggggccaaacagggacagggctcggatgaggtgccgctgctccccaaggcttatccgcccaacgccagggtgtacaccacgctcatgaaggggtacacgaacgcaggccgcgtcgacgatgtcctggccgtgctgcgcgcgatgcggcaagaggcgcagacggcacccgcaagccggccggaccatgtgacttacacgacggtgatatcagcgcttgttggtgcgggcgacatggcgcgcgcgcgcgccgtgctgaacgagatggctgcggccagagttccagccaaccgtgtcacctacaacgtcctgctcaagggctactgccagcagctgcagattggccaggccagggagctctttgaggagatggtgacggacgccggcatccagcccggcgtggtgacgtacaacaccctcatggacgggtgcgttctcacggacgacagcgcgggcgcgctagccttcttcaacgagatgcggtcacggggcatcgcgccgtccactgtgagctacacgacgttgatgaaggcgttcgccgtgtcggggcagcccaaggtagcgcacaaggtgttcgaggagatggagcgggaccccagggtgacggtggacagagcggcgtggaacatgctggtggaggggtactgccggctgggactagtggagacagcgaagcaggttgtggagaggatgaaggagcgcggcgtgcagccggacgtggcgacgtacggcagcatggcgaagggcatcgcggtggcgcgcaagccaggggaggctcttgtgctctggaacgaggtgaaggagcggtgcctgaaggaggccgacgaggaactgctgggggcgctggcggacgtgtgcgtgagggcggccttcttcaagaaggcgctggagatcgtggcgtgcatggaggagaagggcatcgctcccaacaagaccaagtacaagaagatgtacattgagatgcactccaggatgttcaccagcaagcatgcatcgcaagcgcgccaggaccggcgccgagagcgcaagcgtgccgccgaggccttcaagttctggcttggcctgcccaactcctactatggcagcgagtggcagatcgagcctctgctggatggcgatgacctaagttgagccacccaccaccgtttcttctatgaacactgtaccctgctgcatgaagggatttctttttgccacacttattacaaaagaaaaaaatattggcaataggcgtatgaaggttaatttataacccaatttcatgcaataaacatattggcaagagtcatatgatattcatcttttggtgtagctccatttattagatctctaaaagcaatgcacactgtcaacttcccgg

SEQ ID NO: 116957 - DNA, 690 bp, Zea Mays
atggcgtggccatatccggcaggcacccgtgcccaggctctaagccaacagacggcagtggctagtcagccaggttgcccactacaaggtactagccgcttaccatcagatagagagaccagggaaactcaattcgcagattatgttattgcaggcacgtgtccatacatagttgaaacaactctggaggctggtggaaacttggactgctctacaaggactagaaatgaatcacacaaagagaaacatcaaaaaatggtggaccgaaataactcaaacataaccccatggaaacactcaagatgcacagggggggctgtaattgtagtgtattcagcctggaatttatggaaagaaagatgctggcgagtcttcggatacaaggcaaaagacacaactgctggaggccattcaagaagactagctatcgatgaagcagcctacataggcagaaacgctgcaagtagaagccctacgaagagccacggcttccgcgagccgccgtcaccagcgcccgcggctgatgaagaagatgcccgacaggcgagggaggaggatgggacgcatcttgtccttgcgcggggttgtaagaaaagggaagagggaaggcgggacgccgaggcggcagatggcaaccgcatcgccgtcgctgccgccgtcgccgcagcgccgcagctcctcggagaatga

SEQ ID NO: 116958 - DNA, 2198 bp, Zea Mays
gctcggcaaaccatagtactagtagcttccccgttgctcattgtgctcagtggcatctcgatttcagagagcgcttcgaacacgatgatcgtgccgcccagctctgctctatgtctgtccgttctgtttctcctcgcggtttcatgctcggccgacgatgtcgacttcatctaccaagggttccagcacgcgaacctgaccctggacggctccgcgtcggtgctgcacggaggcgcgctccagctcaccaacgacagcaaccgcctcgtaggccacgcgttccacggctctcccgtgcgcttcctcgaggtcggcggtggcgggaggccgccgtcgtcgttcagcacggccttcgtcctcgacatcgtcaccgtcgggagcggcggcggccacggcctggccttcgtggtggccccgtccaccgtgcttcccggggcgtcccccgaggtctacctcggcgtcctcggtccgaccaccaacggcaaccccgccaaccatgtcctcgccgtggagttcgacaccgtgttggacctggagctgaacgacaccaacggcaaccacgtcggcgtcgacgtcaacagcctcgtctccaacgtgtcggagcctgtcgcgtactacgccggcggaaacgccaaggtgcccgtgatgctggagagtgcgcagccaatccaggcgtggatagactacgacggcgacagcggcgtcctcaacgtgaccgtggcccctgtgtacgtggcagaccgacctcttcggccgctgatttcaacaaaactcgacctgcgaccgatcttgagggaggagatgtatgtcggtttctcctcggccaccgggaagctggcgagctcgcactacatcttggcgtggagcttccggaccaatgggctcgcgcgatccatcaatctccggcggctgcccaaagttccgaagccgcgcgcagcgctttccaagctcgtaatcatcaagctcgccgccgtggcatgcgcggggacactcactctgatcgccgcggccatggccatcctgttctggcttcgaaagagggcaaagctcgctgacacactggaggactgggagctgaagcaccctcacaggttcgcgtacaaggacctctacaaggccaccaaggggttcaaggcaagcgagcttcttggcgcgggcggctttggccaggtgtacaaaggagtgctccggccgcgctgcggccgcgacgaggtggccatcaagcggatgtccgccggcacgacgcaagggatgaaggagttcgtcgccgagatcgcgagcctcgggcgcatgcgccaccgcaacctggtcgagctgcgcgggtggtgcaagcacggccaggacctgttcctcgtctacgagttcatgcccaacggcagcgtcgacgcgcacctgttcggcacggaccgcagggcgcctctactgacgtgggcgcagcgattcgccgtcctcgggggcgtcgcccgcggcctgctctacctgcacgaggagtgggagcacgtggtcgtgcaccgcgacgtcaaggccaacaacgtgctgctcggtgccgacatgggcgcgcggctcggcgacttcggcctcgcgcgcctctacgagcacggcgcgaaccacgcgacgacgcgcgtggcggggaccctcgggtacatggcccccgaacttacggtgacaagccgtgccacgacggccaccgatgtgttctccttcggcgccctgctgctcgaggtcgcgtgcgggcgccggccggtagtgccgccgagcgaggcgacggacgactcggacgtgatcctggtgaggtgggtccgcgcctgcggggtcgacggcgacctgctgcgggctgtggacccgaggctggaggggtgctacgacgagggggaggcgaagctggtgctgtggcttggcctgatgtgcagccaggctcgcccggaggcgaggcccagcatgcgacaggtgtgccggtatctgagcggcgaggaagcattgcgggaggatgcggcgctcgttttctccggcgccgactcggtcgagttcatcgggtcgtcgctctccatagcgtggtcctccggcggtaccatgtctgccggctccgtgaatggtggtcggtgaactactctagatcgtattcgtatacgtagaaagctgttaaggtgcacacacgacacatatcgtggtggttctttgtgtaattaagatgtagagat

SEQ ID NO: 116959 - DNA, 130 bp, Zea Mays
ttttttattattattttagacgcagtttctagctcttatttaacatttttttatataaatattacttattttattaccagagatactcagcggcggccccagggccgggctttgctgttgtcgctgtgtc

SEQ ID NO: 116960 - DNA, 395 bp, Zea Mays
ccattcatgtctgtaattacaatgttcaagaccacgtcgaaatacatagtaaaattcccagactggaactaaagtcccataggccatatcattagaagcacaggggagactaatcttgctggttgctggcacctcgccgaccccgtatgaaaccttaagaaccgatgtacgtacgtatgtaattgaatttgaggttgcaaatgtagtttcaactacttttgaagggttcgtgagtggcgtggtcacatgcacgtttcagccggttgactgtatgagatgaatgcagtgtagctgtagttgcacggcggctctcagcggcaacggttgtggacaagaactcgtgtctatgttgcagttccacaaccaaagacaggcgcactgcacagatctccacc

SEQ ID NO: 116961 - DNA, 1361 bp, Zea Mays
gggtgaggattgaggaaaggatggggacgacacacgcacaccagaactcagggtctcaaccgccgaggccgatcgagcgaggcagaccgacaccatgtggctgccgcacgcgtccgacctccgcgccttcctcgcggctgctgccgtcgcgcatctctcctcctccagggcctcccgcgcctccccgtgcgcgaccccgccacctccgcggttccgcgcgttcgcctcctcccgcgcgtcgccgccgccctcgccctcgcaaacgggatcaatcgcctctgccgccgcagcagcatgcgagcatgtggcggagaagcccgctacatgcacggccgacgagctgcactacgcgcccgtaccgggcaccgagtggcggctcgcgctatggcggtaccttccgccgcctgaggcgccaaagaggaatcacccgctgatgctgctgtctggagtggccacgaacgccattgggttcgacctgtcgcctggggcatcatttgctcgtcatatgtccatgcaaggatttgatacatggattgttgaagtgcgtggtgctggcctaagcacgcgtgaatcagaactagctgcaactaacaccaagtctgacatcactcctgatcctaattttgatgaaagttctacaacaaaagcaagtattgctgttcctgctgagaatatgtccagttctcaacctcaaatttctgaagttccagtaataacagataagaacatggtaggaacaagtatatcagaagaaccacagctggtgacaaagttgtcaaatgctttggcacaattgggtgaaacattctcaggttatgtaaaagatagccggctgaaaaacatagctgacagtttttttgatcgagtgtcagaacttgctcctgctgcctccgtagctagccttgaggaggtttcacaaaggattttaggtttgttggaattgccacagacatcagtgatatctgatcaaattagcaatttaagccagcgccttgtgaagattctgggggaaaaccaacgaagtgtttcccctaagctgtttggctggcaagaacggctctcggcaaccatagaagacctacagaaacagttggagcttattataagctatgattgggactttgaccattatctggaggaggatgtacctgctgcgatggattacataagaaaacagagtgtaccaaaggatgggaaattgcttgctattggtcattccatgggaggaatcttattgtatgcaatggtttcaaagtgtggatccaaaggggctgagccagagctggcagcaattgttacattggcttcatcagttgactacacaacatccaattcctcactcaagttgctattgccgtttg

SEQ ID NO: 116962 - DNA, 1447 bp, Zea Mays
gggtgaggattgaggaaaggatggggacgacacacgcacaccagaactcagggtctcaaccgccgaggccgatcgagcgaggcagaccgacaccatgtggctgccgcacgcgtccgacctccgcgccttcctcgcggctgctgccgtcgcgcatctctcctcctccagggcctcccgcgcctccccgtgcgcgaccccgccacctccgcggttccgcgcgttcgcctcctcccgcgcgtcgccgccgccctcgccctcgcaaacgggatcaatcgcctctgccgccgcagcagcatgcgagcatgtggcggagaagcccgctacatgcacggccgacgagctgcactacgcgcccgtaccgggcaccgagtggcggctcgcgctatggcggtaccttccgccgcctgaggcgccaaagaggaatcacccgctgatgctgctgtctggagtggccacgaacgccattgggttcgacctgtcgcctggggcatcatttgctcgtcatatgtccatgcaaggatttgatacatggattgttgaagtgcgtggtgctggcctaagcacgcgtgaatcagaactagctgcaactaacaccaagtctgacatcactcctgatcctaattttgatgaaagttctacaacaaaagcaagtattgctgttcctgctgagaatatgtccagttctcaacctcaaatttctgaagttccagtaataacagataagaacatggtaggaacaagtatatcagaagaaccacagctggtgacaaagttgtcaaatgctttggcacaattgggtgaaacattctcaggttatgtaaaagatagccggctgaaaaacatagctgacagtttttttgatcgagtgtcagaacttgctcctgctgcctccgtagctagccttgaggaggtttcacaaaggattttaggtttgttggaattgccacagacatcagtgatatctgatcaaattagcaatttaagccagcgccttgtgaagattctgggggaaaaccaacgaagtgtttcccctaagctgtttggctggcaagaacggctctcggcaaccatagaagacctacagaaacagttggagcttattataagctatgattgggactttgaccattatctggaggaggatgtacctgctgcggtttgtaggcattctttcatgtatactactcaaatggtacattggaaacacctttaagaagcgtgcaatattttctgtttgttcagatggattacataagaaaacagagtgtaccaaaggatgggaaattgcttgctattggtcattccatgggaggaatcttattgtatgcaatggtttcaaagtgtggatccaaaggggctgagccagagctggcagcaattgttacattggcttcatcagttgactacacaacatccaattcctcactcaagttgctattgccgtttg

SEQ ID NO: 116963 - DNA, 2474 bp, Zea Mays
aggccagcgacagacaagagcagcgtggatagagcgggatcaagtgtgtgctgtgtggtagtgagcgccctgagccctggcaatcagaggataggcttcaagtagcacttgccctcgtttaattgcacgcacataaagaaattctctccctctgaacaaaaaacttcctcccgcgcagttctgcggtggccttttaatcttggtgagcttcagttttttgtttcttggactcttcttcttgttaggttgcgttgcgtcctgtgcttctgattggaggccgccatggatgaggtccccggaaggagcagctccgtgagagctacaaggagcatctttggcgaaagcatcggtgggaggaagccggagatgaacagggcaaggaatgttttaggacaagagaatctgcggccagagatgaagcagctagcaaaatccagcatagataagctgagtgaacgcaagaccgccgtggacagagaaagagccggcgccgagtccgagctgtcgagggcgcgcgccatggcgaaggagctggagcgccaaatagagcaggccaaggcccgggcgtcgtccaagaggtcagagcctcacacaatgcggccggcgaccagggcaagcaagacgggacacggtgcgccgcgctcgcagggggagcggcgcgacgctgccgagtacgcggaggtgtcgcgggagctgaaccgtgccaggcaggagctgctcaggctgcggctggaggtcaagtccgcggcggaggccaaggccaaggccgagagcgacatcgtgtcgtcggcgataaacatccagtctaacctgctcgctgccgacgagatgaagcggctggtggacgaggcgaacgaggagcacgtcctggtggagctcgcgcgcatcgaggccgagcgggagcgccgcgagatcgacgcccagcggtgtgccgaggccgagcggttcgcccgggaaatggaggccaccagggctaagatcgaggcgctacggaaggacctgagccgcgcccgggaaatggaggcgaagctcgcggtgacgaacgctgacgtggaggtcctacaggccgagatggagctggtccgtgccatggagaggaacagtgtcaagaacgacggcactgcggacgtggaggctgaggacaaggcgctgctgcggactgcggaggccgagctggatgccgccaagaaggagctggatagcatcaaggccgggagcttccagttcatgacgtccatggacagcgcgcgcaccgagatcatgcgggtctccgaggaagtgaaccggctcaaggcgcaggagaagaaggcggacgcgcaggtgcagcagctgaacgccaagttgctgaaggcgagggcccggctggaggccctcacggagaccagcgagcggtccaaagcgatcgtttcaaatatgacgtcggcactgcagcagctgcaggacgagaagaaggcggcgatgaaagaggaggagctgaacgagcttgagcaacggtgcgtgcgcgccgagaccgagaacgcgaacgccgagatcgcagcgaccgaggcacggatgcagcagtctgtgaaggagctcgaggcggcgaagacggccgaggccgcggcgatgaagaagctcaaggccgccgtggaaggcacaatgcaggcgagggcgtcacggcggtcggggaccataaccatctcgcggttcgagtacgagtacctgagcgggcgcgcggcgctggtccgcgtggtggccgacaagaaggtgtccgcggcgcaggcgtgggtgcaggcgctcaaggccggcgagaaggagctggcggcgcgcgcggaggccacggagcgcgtgacagccgagctgcgcgccagggaggccgaggcggcggcggaggcggagagcgcggcgggcgagcagaaggcgctggagcaggagctatacgacctgaacgcggtggcggagcgggacgggctgctgtgcgcgtacccgcgacggcggtcgaccagggtgtcggcgacgatgcggaggacgagggcgcggcggtcgtccgtgtcttcgtcggcggggatccggaacccgcggacgccctcgttcaccatcaagaggaagaagaaggtgatgcccagcctcttcaagctgatcaaacagaggaaagacgagcgcgcgagctgagagatgtgcctcgccaaagaaaaatgcatttgtcagttcttttttctgctcgtacatgtcatgttagacgtcactgttgtgcaaaatgtacaaaaaatggattgaccgtgcttagcaacggatgccataaaaaatattcctatagttcgcccacgttcgaaagagcatattcatagcttgattaatggatgtaagttataattaatggatgtatatttaattaaaacgaattatattttagaatgaagtgagtatataaagcttccaccgtgtctcttattttccttgatcagcattaaaataggtctcgtttggtttctcct

SEQ ID NO: 116964 - DNA, 1272 bp, Zea Mays
gagagacggaagattgagaggatgataaggcgactcgagaagcaacaacgttcaaatggtgatggtgtcaacaataatctgtcaaaattgcgagaagatcttgaatatgtcagattcttccctaagaatgagaaatatgtctcgctgtttcactagcgggaatagtcaagatattgttcaagagaggaataaatggcgcaaacagatcaaggagaatctcatggctgctgcagcaaacggaaaagatttagaagagacagcaagcgacgaactgaggcaaaactacaggttgccgatcaatattgttttgtggctcataaccggaagcataatcagcatcagcaagaagcaaaagtcaccacaacagacgagctaaataaggcagagataaatcagaaacttaatccttttggtgcaaatagtaaccggtccagtcgatatggttctgaaatagagaaaaatcatactactgatgcaaatttgagttctgtccattgctcgctgtccagtagacaacgaggcaccccgacatttagagcatcacttaacctttcccgtgctcacagcagatctccttctgggtccaggtctcgatccccacatgattgggcacctaggaacagaggcaagatcatggcaaatggaggttcaactttatggaagcatagtagatctccacctaatcacatgactaaaggtgaaattggtagaatggcttcacctcggagacaacctggtcctggatatgatgatcgagctatgtgttccagtccactatcaagaaacaacacttactccaagaatgcttcgacatgggttgatggaaggaatggttcagcagtggatatttctgatgatcataataaaaggtattcaaggagaagctcacctctgagaattacctcacggaatgacagatttgatgtcatggactcccaaggacgaccaaggtctggagaattctaccgtctgacacaaggaagacttctttatggttacgatagggaaaataagcatggcagaaatggtgaagatggaagggaatgcactgatagatatgcgaataattctgtcaagcgatatgaccggagtggtgcagaaagcaatttagaaataatactggtgataaatttcggactcgtatttctgctcccagatcgccagatctccaaagggggtgagtcctcggagatttgacagaagctttgagaggtagctgactagctggctgtgaatttgccttatagaactaaaatggaaaataaagacact

SEQ ID NO: 116965 - DNA, 1531 bp, Zea Mays
agtccgagaagaaaaaggaaactgaagaagagacctcgtcgtctcgtgcagccgcaagcacgaggctgtgagcgagacagccaaggtgctcatcgactccagccagccgcccaaagccagccgcccaaaaagccaggcgcaaatcacaacctcgcctcctgtcccctccccggctcctcgttcccctctcgccgctcgcctccccgccgagatcgaggaggcgccaatagcgagagggtttcctcttccctccacggctccaacgagcccccggcccctccgcctcaaatcccacgcgcccggttggccgccgcccccgccatggatgtggatctgtggatctccaaggtcaaggagggccagcacctcgccgagcacgagcttcagtcgctctgcgaatacgtgaaggagatcctcatcgaagagtcgaacgttcaaccggtgaatagccctgtgacggtttgcggtgacatccatgggcagttccatgacctgatgaagctcttcgcgacggggggccacgtcccagagacgaactatattttcatgggtgattttgtggaccgtggcttcaacagtctggaggttttcaccatcctgttgctactaaaagcgaggtatcctgcacacataacccttctgcgtggaaatcatgaaagtaggcagttgacacaggtgtatggtttctatgatgagtgtcagaggaagtatggcaacgccaatgcatggcggtattgcactgatgtttttgattaccttacgctatcagcaatcattaatggtcaagtcctctgtgttcatggcggtctttctcctgatgtacgtactattgatcagatacgaacaattgatcgcaattgtgaaattccccatgaaggtcctttctgcgaccttatgtggagtgaccctgaggagatagagacatgggctgttagtccccgtggagcaggttggctgtttggatcgcgcgtcacagcagagttcaactttgttaacggtatcgagctagtttgccgggctcaccagctggtccaggaaggcttaaagtacatgttccaggagaagggccttgtcactgtgtggtctgcacctaattattgctacagatgtggcaatgtcgcttctatcttaagcttcgatgagaagatggaaagggatgtcaagttcttcacagagacagaggagaacaaccagatgcgaggcccaaggaccgcagtcccatatttcctatgacttcaattgtacaattttagaagtctattcgaatctgtaagggctaaagatcaatcagatgtgtttattgttttaggtccagattatagtgcaatctgatgcgtttgatttctgttttcctttaaccacatgtacaatagaccatcgggacagtcatatgttcctgtatctcttcggtgacactgccaaagttttgtttgtgattttgttcccgtgctatccattttggactgtgcttgcgttgtgcagcagaagagtcaggctggttatatcttttatctcatttgagattgttcat

SEQ ID NO: 116966 - DNA, 589 bp, Zea Mays
ttttattattatggattgtttttttattctctccttgtggatgtcaccttttgccatgcagttcaactttgttaacggtatcgagctagtttgccgggctcaccagctggtccaggaaggcttaaagtacatgttccaggagaagggccttgtcactgtgtggtctgcacctaattattgctacagatgtggcaatgtcgcttctatcttaagcttcgatgagaagatggaaagggatgtcaagttcttcacagagacagaggagaacaaccagatgcgaggcccaaggaccgcagtcccatatttcctatgacttcaattgtacaattttagaagtctattcgaatctgtaagggctaaagatcaatcagatgtgtttattgttttaggtccagattatagtgcaatctgatgcgtttgatttctgttttcctttaaccacatgtacaatagaccatcgggacagtcatatgttcctgtatctcttcggtgacactgccaaagttttgtttgtgattttgttcccgtgctatccattttggactgtgcttgcgttgtgcagcagaagagtcaggctggttatatcttt

SEQ ID NO: 116967 - DNA, 1867 bp, Zea Mays
cgcaaatcacaacctcgcctcctgtcccctccccggctcctcgttcccctctcgccgctcgcctccccgccgagatcgaggaggcgccaatagcgagagggtttcctcttccctccacggctccaacgagcccccggcccctccgcctcaaatcccacgcgcccggttggccgccgcccccgccatggatgtggatctgtggatctccaaggtcaaggagggccagcacctcgccgagcacgagcttcagtcgctctgcgaatacgtgaaggagatcctcatcgaagagtcgaacgttcaaccggtgaatagccctgtgacggtttgcggtgacatccatgggcagttccatgacctgatgaagctcttcgcgacggggggccacgtcccagagacgaactatattttcatgggtgattttgtggaccgtggcttcaacagtctggaggttttcaccatcctgttgctactaaaagcgaggtatcctgcacacataacccttctgcgtggaaatcatgaaagtaggcagttgacacaggtatattcttgtatgtgaaaaacattaattctgtacagttcatagtttttctgatttaggccactttggttgcaactaaatgccttgagtggctgagtccaatatatgtctccatgattctttgttctgctctttacttgtgagctcaaaaggtgttgtattcatctggtcaccctccactgtgccctcagaattgtgaatagggatgcaaggtacacatatggttattgaagtcttatgattctcaagataatattatctggtaatcggcctgtgtgttatgcttaggttttctttagccagtgcctgttaaattacctgtcaacattgttcttgttattttcccccctggttatgactctatatggctatctcttttaactctcaatttacattgcatgtttgtatccatactgtaccacaaatggctgaaaacacttgacatgtcttagcttaccatgctggcatactaataataatgtgacttatccttaggtgtatggtttctatgatgagtgtcagaggaagtatggcaacgccaatgcatggcggtattgcactgatgtttttgattaccttacgctatcagcaatcattaatggtcaagtcctctgtgttcatggcggtctttctcctgatgtacgtactattgatcagatacgaacaattgatcgcaattgtgaaattccccatgaaggtcctttctgcgaccttatgtggagtgaccctgaggagatagagacatgggctgttagtccccgtggagcaggttggctgtttggatcgcgcgtcacagcagagttcaactttgttaacggtatcgagctagtttgccgggctcaccagctggtccaggaaggcttaaagtacatgttccaggagaagggccttgtcactgtgtggtctgcacctaattattgctacagatgtggcaatgtcgcttctatcttaagcttcgatgagaagatggaaagggatgtcaagttcttcacagagacagaggagaacaaccagatgcgaggcccaaggaccgcagtcccatatttcctatgacttcaattgtacaattttagaagtctattcgaatctgtaagggctaaagatcaatcagatgtgtttattgttttaggtccagattatagtgcaatctgatgcgtttgatttctgttttcctttaaccacatgtacaatagaccatcgggacagtcatatgttcctgtatctcttcggtgacactgccaaagttttgtttgtgattttgttcccgtgctatccattttggactgtgcttgcgttgtgcagcagaagagtcaggctggttatatcttt

SEQ ID NO: 116968 - DNA, 1591 bp, Zea Mays
agtccgagaagaaaaaggaaactgaagaagagacctcgtcgtctcgtgcagccgcaagcacgaggctgtgagcgagacagccaaggtgctcatcgactccagccagccgcccaaagccagccgcccaaaaagccaggcgcaaatcacaacctcgcctcctgtcccctccccggctcctcgttcccctctcgccgctcgcctccccgccgagatcgaggaggcgccaatagcgagagggtttcctcttccctccacggctccaacgagcccccggcccctccgcctcaaatcccacgcgcccggttggccgccgcccccgccatggatgtggatctgtggatctccaaggtcaaggagggccagcacctcgccgagcacgagcttcagtcgctctgcgaatacgtgaaggagatcctcatcgaagagtcgaacgttcaaccggtgaatagccctgtgacggtttgcggtgacatccatgggcagttccatgacctgatgaagctcttcgcgacggggggccacgtcccagagacgaactatattttcatgggtgattttgtggaccgtggcttcaacagtctggaggttttcaccatcctgttgctactaaaagcgaggtatcctgcacacataacccttctgcgtggaaatcatgaaagtaggcagttgacacaggtgtatggtttctatgatgagtgtcagaggaagtatggcaacgccaatgcatggcggtattgcactgatgtttttgattaccttacgctatcagcaatcattaatggtcaagtcctctgtgttcatggcggtctttctcctgatgtacgtactattgatcagtaagaatgcttatcatcaatgaactagcattgctgactcattttttgaagaatactgagcacatgattctggggttgatttgatacgaacaattgatcgcaattgtgaaattccccatgaaggtcctttctgcgaccttatgtggagtgaccctgaggagatagagacatgggctgttagtccccgtggagcaggttggctgtttggatcgcgcgtcacagcagagttcaactttgttaacggtatcgagctagtttgccgggctcaccagctggtccaggaaggcttaaagtacatgttccaggagaagggccttgtcactgtgtggtctgcacctaattattgctacagatgtggcaatgtcgcttctatcttaagcttcgatgagaagatggaaagggatgtcaagttcttcacagagacagaggagaacaaccagatgcgaggcccaaggaccgcagtcccatatttcctatgacttcaattgtacaattttagaagtctattcgaatctgtaagggctaaagatcaatcagatgtgtttattgttttaggtccagattatagtgcaatctgatgcgtttgatttctgttttcctttaaccacatgtacaatagaccatcgggacagtcatatgttcctgtatctcttcggtgacactgccaaagttttgtttgtgattttgttcccgtgctatccattttggactgtgcttgcgttgtgcagcagaagagtcaggctggttatatcttt

SEQ ID NO: 116969 - DNA, 1366 bp, Zea Mays
agtccgagaagaaaaaggaaactgaagaagagacctcgtcgtctcgtgcagccgcaagcacgaggctgtgagcgagacagccaaggtgctcatcgactccagccagccgcccaaagccagccgcccaaaaagccaggcgcaaatcacaacctcgcctcctgtcccctccccggctcctcgttcccctctcgccgctcgcctccccgccgagatcgaggaggcgccaatagcgagagggtttcctcttccctccacggctccaacgagcccccggcccctccgcctcaaatcccacgcgcccggttggccgccgcccccgccatggatgtggatctgtggatctccaaggtcaaggagggccagcacctcgccgagcacgagcttcagtcgctctgcgaatacgtgaaggagatcctcatcgaagagtcgaacgttcaaccggtgaatagccctgtgacggtttgcggtgacatccatgggcagttccatgacctgatgaagctcttcgcgacggggggccacgtcccagagacgaactatattttcatgggtgattttgtggaccgtggcttcaacagtctggaggttttcaccatcctgttgctactaaaagcgaggtatcctgcacacataacccttctgcgtggaaatcatgaaagtaggcagttgacacaggtgtatggtttctatgatgagtgtcagaggaagtatggcaacgccaatgcatggcggtattgcactgatgtttttgattaccttacgctatcagcaatcattaatggtcaagtcctctgtgttcatggcggtctttctcctgatgtacgtactattgatcaggtcggtgacttctcttccataactttattataaccatctgtgaacacatttgtttataaatgaataaacccttaagtatgacccttccaatctcatcgggtgctgagcttcgtgtcttgtagtttgccatacatgacagatacctcaagaattacagttgtttgaaaacttcactgttatcggtgataaataaaatgcttcagtggataaaaatttcgacctgcggggggtaagacagcccccgagcattgcattaagagaagactttcttacacaagtcggaaaaaaccctgaacccctgtcccacccatacataatggcaccgtagcccatgtgagaagactgcatggtttttaaagtggtaaggcgagacaaggtgttggaccaccgcctgaacgcctaggcgaggtaggcgggcaaggtgcctaggcgttggaccaccgcctggacgcctaggcgacgccttaagaacagtggaagactgtgattgtcgccggaccttacacctgtgctttagcatgggaaaaaa

SEQ ID NO: 116970 - DNA, 1486 bp, Zea Mays
agtccgagaagaaaaaggaaactgaagaagagacctcgtcgtctcgtgcagccgcaagcacgaggctgtgagcgagacagccaaggtgctcatcgactccagccagccgcccaaagccagccgcccaaaaagccaggcgcaaatcacaacctcgcctcctgtcccctccccggctcctcgttcccctctcgccgctcgcctccccgccgagatcgaggaggcgccaatagcgagagggtttcctcttccctccacggctccaacgagcccccggcccctccgcctcaaatcccacgcgcccggttggccgccgcccccgccatggatgtggatctgtggatctccaaggtcaaggagggccagcacctcgccgagcacgagcttcagtcgctctgcgaatacgtgaaggagatcctcatcgaagagtcgaacgttcaaccggtgaatagccctgtgacggtttgcggtgacatccatgggcagttccatgacctgatgaagctcttcgcgacggggggccacgtcccagagacgaactatattttcatgggtgattttgtggaccgtggcttcaacagtctggaggttttcaccatcctgttgctactaaaagcgaggtatcctgcacacataacccttctgcgtggaaatcatgaaagtaggcagttgacacaggtatattcttgtatgtgaaaaacattaattctgtacagttcatagtttttctgatttaggccactttggttgcaactaaatgccttgagtggctgagtccaatatatgtctccatgattctttgttctgctctttacttgtgagctcaaaaggtgttgtattcatctggtcaccctccactgtgccctcagaattgtgaatagggatgcaaggtgtatggtttctatgatgagtgtcagaggaagtatggcaacgccaatgcatggcggtattgcactgatgtttttgattaccttacgctatcagcaatcattaatggtcaagtcctctgtgttcatggcggtctttctcctgatgtacgtactattgatcaggtcggtgacttctcttccataactttattataaccatctgtgaacacatttgtttataaatgaataaacccttaagtatgacccttccaatctcatcgggtgctgagcttcgtgtcttgtagtttgccatacatgacagatacctcaagaattacagttgtttgaaaacttcactgttatcggtgataaataaaatgcttcagtggataaaaatttcgacctgcggggggtaagacagcccccgagcattgcattaagagaagactttcttacacaagtcggaaaaaaccctgaacccctgtcccacccatacataatggcaccgtagcccatgtgagaagactgcatggtttttaaagtggtaaggcgagacaaggtgttggaccaccgcctgaacgcctaggcgaggtaggcgggcaaggtgcctaggcgttgga

SEQ ID NO: 116971 - DNA, 2992 bp, Zea Mays
tgcttcgctgaatcgtattctcaacagttctcaccgcgacaccgcccatcctctctccgacatcgattcgcgccgagccgccgaccacctgccgccgtctcctccttggtcccagccatggccggcggcgacggcgatcggcatcgcgcgccgaagcggcacaagtcctcgacgccgtcgaaagcggccctggtggacgagagcgccgagttcgactacgctgatgactttgatgacgacgcccacgatgctgatacggaggttaagaagagggattttacgaagctcgagttgaaggtggaccacgcgagccgtccgctctgggcgtgcgccgacggccgcatcttcctcgagaccttctcgccgctctacaagcaggcttacgattttctcatcgccatcgccgagcctgtgtgcaggccagaatctatgcatgaatacaatctaactccccactcattgtatgctgcggtctcagtgggacttgagacaagcactatcatcagtgtcttgagtaaactatctaaaaccaagttgccccgtgaaataattgatttcatccatggatcaactgctaactacggcaaagtcaagcttgtcttgaagaagaaccgatattttgtcgagtctccatttcctgaggtattgagtacccttctgagggatgaagttatatctagagctaggatatctcctgaggattcccttggggcaccttcatttactgttagcaagacatctggccaaatagctagtggacatgaagacctgttaaatggaatggaaattgctgctgcaactgaagacaaggaaacacattcttttgagattgatccttctcaggttgagaatgtcaagcaacggtgcttaccaaatgcattgaactatcccatgctggaggagtatgatttcagaaatgacactgtaaacccagatttggatatggagctaaagccgcaagcacggcctaggccatatcaagaaaagagtctcagtaaaatgtttgggaacggacgagcaaggtctggaattattgtgctaccttgtggtgctggcaagtccttggttggtgtatctgcagcctgtcgtattaagaagagctgtttatgtttggccacaaatgctgtctccgtagatcaatgggcatttcagttcaagctttggtcgaccataaaagatgagaacattagtcgttttacatctgataacaaggagaagtttacagggatggctggtgtggttgttactacatataacatggttgcattcggtggtaaaaggtctgaagattcggagaagatcattgaagaaatccgaaacagagagtggggcttgcttctaatggatgaggtccatgttgtccctgcacatatgttcagaaaagtcatcagcattactaaatctcactgcaagctgggtcttactgctacccttgtgagagaggacgaacgtattactgacctgaattttctaattggaccaaaactgtatgaagcgaattggttggatttagtcaaaggtggatttattgcaaatgtgcagtgtgcagaagtatggtgtcctatgaccaaagagttctttgctgagtatttgaaaaaggaaaattcaaagaagaagcaggtactgtatgtcatgaatccgaacaagttcagggcttgtgaattcctgattcgattccatgagcaacaacgtggagacaagataattgtgtttgctgataatctgtttgcactaactacttatgcgatgaaactgcgcaagccaatgatttttggtgccacaagccatgctgagaggacaagaattctctaccaattcaagaacagtccagaagtcaatacaatttttctttcaaaggtcggtgataactcgattgatatcccagaagctaatgttatcatacaaatatcatctcacgctggttcgagacgtcaagaagctcagcgtctgggccgtattctcagagcaaagggtaaacaccaagataggatggctggaggaaaagaagaatacaatgcttttttctattcccttgtatcaactgacacacaggaaatgtactactcaacaaaaaggcagcagtttcttattgaccagggatatagcttcaaggttatcactagtttgccgccggctgaagaaggacctaatctgagctattacacacttgatgaacaacttgagctcttgagcatggtggggcatttctgtactcactggtcgtagttttgttggctattattaatcgtgtgcagatggccccattcacctctaccaacaggcgctgaatgcaggggatgacatgattggtgttgagcgcttagaagaagattctgatggcaaggctcttattagagcacgacgctctgccggatcaatgagtgccttctctggagctggtggaatggtctacatggagtacagcactgggaagggaaagggtgttcagaagaaacacaaggacccgtcaaagaggcatcatctgttcaagaaacgctatgcgtagcctgttgtgctttgctagaaatgatttggttcatgacaaccttgttttggcatcaaagtcgttggtttaaacacacaagcccatgttatgcacagttgttgctcttggttaggaccatcctaaagcaattgttttctctgtttgagcaaggttactgagctactgtagcgaagaacaattttggtctcaggtttacacatgctgcttaaagttggcatacccggctttcgggcgggacaacaggacgtgtcttcttgaattgccttgtattatacaagtataaacaaacaaacgctaaatcgcaacgcttcttatgtgctgctggttctggcgtgctgtatttcacctgattagtttccgatcatcttgtgtatgatgcgggattgtctatggttcttcctatggttcagttccataatttgtaatggattacgactaacaatgtagtatttgctcggtttttaatcagttttcgatgttaaaaaa

SEQ ID NO: 116972 - DNA, 2907 bp, Zea Mays
tgcttcgctgaatcgtattctcaacagttctcaccgcgacaccgcccatcctctctccgacatcgattcgcgccgagccgccgaccacctgccgccgtctcctccttggtcccagccatggccggcggcgacggcgatcggcatcgcgcgccgaagcggcacaagtcctcgacgccgtcgaaagcggccctggtggacgagagcgccgagttcgactacgctgatgactttgatgacgacgcccacgatgctgatacggaggttaagaagagggattttacgaagctcgagttgaaggtggaccacgcgagccgtccgctctgggcgtgcgccgacggccgcatcttcctcgagaccttctcgccgctctacaagcaggcttacgattttctcatcgccatcgccgagcctgtgtgcaggccagaatctatgcatgaatacaatctaactccccactcattgtatgctgcggtctcagtgggacttgagacaagcactatcatcagtgtcttgagtaaactatctaaaaccaagttgccccgtgaaataattgatttcatccatggatcaactgctaactacggcaaagtcaagcttgtcttgaagaagaaccgatattttgtcgagtctccatttcctgaggtattgagtacccttctgagggatgaagttatatctagagctaggatatctcctgaggattcccttggggcaccttcatttactgttagcaagacatctggccaaatagctagtggacatgaagacctgttaaatggaatggaaattgctgctgcaactgaagacaaggaaacacattcttttgagattgatccttctcaggttgagaatgtcaagcaacggtgcttaccaaatgcattgaactatcccatgctggaggagtatgatttcagaaatgacactgtaaacccagatttggatatggagctaaagccgcaagcacggcctaggccatatcaagaaaagagtctcagtaaaatgtttgggaacggacgagcaaggtctggaattattgtgctaccttgtggtgctggcaagtccttggttggtgtatctgcagcctgtcgtattaagaagagctgtttatgtttggccacaaatgctgtctccgtagatcaatgggcatttcagttcaagctttggtcgaccataaaagatgagaacattagtcgttttacatctgataacaaggagaagtttacagggatggctggtgtggttgttactacatataacatggttgcattcggtggtaaaaggtctgaagattcggagaagatcattgaagaaatccgaaacagagagtggggcttgcttctaatggatgaggtccatgttgtccctgcacatatgttcagaaaagtcatcagcattactaaatctcactgcaagctgggtcttactgctacccttgtgagagaggacgaacgtattactgacctgaattttctaattggaccaaaactgtatgaagcgaattggttggatttagtcaaaggtggatttattgcaaatgtgcagtgtgcagaagtatggtgtcctatgaccaaagagttctttgctgagtatttgaaaaaggaaaattcaaagaagaagcaggtactgtatgtcatgaatccgaacaagttcagggcttgtgaattcctgattcgattccatgagcaacaacgtggagacaagataattgtgtttgctgataatctgtttgcactaactacttatgcgatgaaactgcgcaagccaatgatttttggtgccacaagccatgctgagaggacaagaattctctaccaattcaagaacagtccagaagtcaatacaatttttctttcaaaggtcggtgataactcgattgatatcccagaagctaatgttatcatacaaatatcatctcacgctggttcgagacgtcaagaagctcagcgtctgggccgtattctcagagcaaagggtaaacaccaagataggatggctggaggaaaagaagaatacaatgcttttttctattcccttgtatcaactgacacacaggaaatgtactactcaacaaaaaggcagcagtttcttattgaccagggatatagcttcaaggttatcactagtttgccgccggctgaagaaggacctaatctgagctattacacacttgatgaacaacttgagctcttgagcatggcgctgaatgcaggggatgacatgattggtgttgagcgcttagaagaagattctgatggcaaggctcttattagagcacgacgctctgccggatcaatgagtgccttctctggagctggtggaatggtctacatggagtacagcactgggaagggaaagggtgttcagaagaaacacaaggacccgtcaaagaggcatcatctgttcaagaaacgctatgcgtagcctgttgtgctttgctagaaatgatttggttcatgacaaccttgttttggcatcaaagtcgttggtttaaacacacaagcccatgttatgcacagttgttgctcttggttaggaccatcctaaagcaattgttttctctgtttgagcaaggttactgagctactgtagcgaagaacaattttggtctcaggtttacacatgctgcttaaagttggcatacccggctttcgggcgggacaacaggacgtgtcttcttgaattgccttgtattatacaagtataaacaaacaaacgctaaatcgcaacgcttcttatgtgctgctggttctggcgtgctgtatttcacctgattagtttccgatcatcttgtgtatgatgcgggattgtctatggttcttcctatggttcagttccataatttgtaatggattacgactaacaatgtagtatttgctcggtttttaatcagttttcgatgttaaaaaa

SEQ ID NO: 116973 - DNA, 240 bp, Zea Mays
gctagagggacttcaatctcgtcaacttccatgatgcgacggtggacatcgtgtgtgccttggcgcgtgctccctcgtcaggggttctccctatcgcttcccgcacaagaacttgccgaagctgttgcagccattgctgctcttcccgagcttggcgtgcagctcacgaagctgctcgaggtgggctatgtgactccccgcgtgggtctaagccgcaccctgctcccttggctctccagc

SEQ ID NO: 116974 - DNA, 1777 bp, Zea Mays
agaaaagctcgcaggagtgacctccctctgtgtctctccgctcggcgctcggaccaccgcggaacggcggaaccctccgatagaatcatagaaccaaaccctcctcctcgcaccgcgccgctgcagctgaccaccctacttgaccggccggggagagagatagagataaagacatagacaaacagacggcgggcaggcatgggcggcgtcacgtccaccatcgccgcgcgcttcgccttcttcccgcccacgccgccgtcctacaccgtcgtggtcgccgacgctgcgacaggccgcctcgccatcccggagatctcacgggccctctcgcgccgccggaggcgggacggcgccggcgctgggggctcctcctcggcctcctccgtcgcggccgccgagaacgaggagggcgcggaggtggtgcgcctccggacccgccgcgggaacgagatcgtgggggtgtacgtgcgccacgcgcgggcctccgccacgctgctctactcccacggcaacgccgccgacctcggccagatgtacggcctcttcgtcgagctcagccgccgcctccgcgtcaacctcttcgggtatgattattctggttatgggagatctacagggaagcccactgagtgtaatacatatgcagacattgaagcagcatataactgcctcaaggaaaaatatagtgtcgcagatgaggatataatcttatacggccagtctgttggaagtggtccaaccattgatcttgcttcacgattgccagacttgcgagctgtggttttgcatagtcctattttatctggagtaagagtactatatccagtcaaacggacgttttggttcgacatttacaagaacatcgataaaattggtttggtaaattgtccggtgcttgtcatccatggtacatcagatgatgtcgttgactgctcccacggtaaacagctatgggaacattgcaaagtaaaatattctccactgtggttaaatggtggtgggcactgcaacctcgagctatatccagattacattaagcacttgaagcagtttgtgtcaagcgttagcaaaaaaacatcaaagccggaccagaaagagataatggcaaaggatggcactaccagtaaagaaagagaggaagcatactcggagaaacctcagccggcagctaagtgctcacagtcacagatctcacgtaagagcatagatagccgagttgggaaatccaaaacagtggatgttcctgataaatcacggatgagctcagatgacatcgacaagttccggaggagaaggtgcttggtttggtgatgcctatgttgtgcacagattgtcgaacagtacctgagtgaggatactatagcatggaaatcaagcaactttattacatacatcatgctgcgaggaatggcatcagccgttcctgcagtggagaggaaagaactgttaaataagaaaaggaaccagaaagctaccatcatcatccatcagagacaaagccacttgactgaaagctggtagtttcccagttaatttaacactgacactgacaccgtcgacatgttttgcagcaccggttagggtttccccatcatctaaaagtgtacaattattgtatgtaatcacgagggacctatacaaacatttacagccgctctgtgcaaagtctgaaagcctaggagcaccatagtttatcctcggtgcatcagcatcgggcccacatgcgttgtggaaccatttggctatgtgagctctgcatactgatctactccagcct

SEQ ID NO: 116975 - DNA, 1021 bp, Zea Mays
ctcgtctcactgcctgatcaatttttaggacgcctggctttcgtccgcgctgggcctgctttcatcctcggccctccctgctttcctccaccgcccgccgccacggcgttccccggcaagcggaccgccgcagccagccagcccgccctgcgccacgcggcgcccgctgcctctgcttctcacgttgcgttgcctcgcctcgcctcgccgcagtgcgcggacggtccgtcggtcgcgaggagtcatgccggcgaccgcggatccgagggcggagccgccgccgcccgcggcgtcgcaccacctcaagccgtgggcgcccccgtcgcctcgcacccaccgcgtgccttcttccctcccggccccaggccctgcagttaccgggggaggcgccgcgcgcgatcggcgccgctcgtcctcttcgtcgcaccgacgtgtcggcgccgtgcagcagcaggagatgccctgtgacggccgggtaaaagatctccgcgctaagctcatgggccacctccgcgacgccgccgaccgcctccatctgccgcccccgtcgtcgccgcgtaggccgcagccgcagccgcggtcgccggaacccgagccgccagcgccgccaacgcggccgacgccgtctcagaaggaggaggctacggccgccaggccgtggaacctgcgtgaccgcaagtgccgccgaccaacggcgcgcggggcggccgcggccgcggcactcgaactcgacgcgtctcccgcgtgggaggccggggtggagaaggctcggcggtccgtgccccgagagcgcgcgccgttcgccctggcgctgacggcgggggaggtggaggaggacgtgtacgcgctgaccggcgcccggccgcggcggcgtccccggaagcgtcctcgcgtcgtgcagcggcagctcgattcgctgttccccgggctatggctgaccgagatcaccaccgacgtctacaaggtccccgacgagtagcaaagcccgccacctgctccgagcctccaacccagcggccgt

SEQ ID NO: 116976 - DNA, 346 bp, Zea Mays
atccacaagagaagaaacaatcgaatagcaacactatcttctcttataacatagtacaacgaaggttactcgcatggcaacttccattccatgggttgtctcgtcttgctctcccttgtttctcccctcttccttcccagtgccgtccttggccacccatggggtggcagttctatgaccattcgtgccccaaggcaaaggagattgtgcagtccattgtggcacaggctatggccaacgggaccaggatggcggcatctttagtcagagtgtcagactgcattttccgtgactgctttgtcaaggttcaactctgcttcctctgtcataactttttaagccacca

SEQ ID NO: 116977 - DNA, 1672 bp, Zea Mays
gatttgggctccaccactgcacatgaatcatgatgcagcagcgagcagcctatacggcttactgggccggccgccgatcgcgagcaaacacttccgcagctctggaattcggaggctcaggaatcatgatgcagcagcctcaggcgcatgcgtcggcacttgcggtggcgcacccgcacgatccggcgggcggggacgcgccgccgaagcaggtggctcaggcgatggagcggctgggccgtgcgggccgtctcatcgcagacatccggctcggcgcggaccgcctcctcgaggccctcttcgtctccggcgacgcgcccccgtacagcgtgcgccagcacgtcgacaggatggagcacattatcgtcaaggaggatgccgccatgcgcctccacttccaggacctacgcgccctcggcaggcaactagaggagtctggagttcttaatggggcccttaaagctcgaggcaattcatggggcttgcacatgccacttgtttgtccagatggtgctgttgtagcttatgcttggaagcgacaactagcgggtcaggccggtgcatctgctgtggacaggactaggttagctctcaaggccttcactgaccagaaaagaagattcttccctcatctagaagatgaagttgttagccatctccatgatggtgaacctggtggcaccaaaaagccaaagttgtttaccagcaatggagatctagaggaaaaatctttgtctgacatactgaaaaatttagaacatgaagcatctaacataaaaatattcacatactggcatctggattggtcaaaaagagcttcctcattagcatctctgttggatgatgactttgtggatccatctaaagagctgaacctgcaaaatatgggcaaatcgagatctggtgctctgacaacttccatagaccaagtcgcagttattgaattgctggttccttcagtatttagagctgtagtgtcattgcatcctgctggatctactgatcctgatgcagtggcattcttttctcccactgagggaggaagctatcttcatgcaaggggcacgtcggtacataatgtgtttaaacatgtaaaggaacatgctgacaaggcattgcagtacttcatcagtgtggagccgagtaaagcactacctcttcttttgcgttggattgccagctatcagactctgtttacgaaggtttgcagcaaatgcggacggcttctgatgatggacaagtctttggctttgctgttgcctcctgtccaccgcccctatcaccagacttcaaatattggaccagatcttcaagaggcctaccacattggatgttcctcctacgacggctagctggtgcttctaagaaacacccgagactattttggtagcacaggatgtttctcgcgttgtcatcgacgaagcacgtgtacaacagtccttgtgtgtaaaacattgtcctttctggaatgtatccaacccatcaggtgtcctttttgtactttggttagtgtatgcatattgtcatgtgctgtacaaatatattagcattgctactttattacgggtggggcctagcccaaacttgatacagctaggataaagttagagcagttgctacagtttctagctagctaccttattctatacgcatcaccctagctgactgctgc

SEQ ID NO: 116978 - DNA, 857 bp, Zea Mays
cattccacaactttctaaagtgtatatataagcctatctcaaattcatgggagatggaaattaattctatagatttacatgttacttttctaatgtacaatcaatagcacactcttttacttgtttctctataacataaatgtagtgtataactatctatctgatatgatttaggataacatacaaatacaatacataaataaacatattaactcaattagttttgtttaaattataattattagaatataattcaattccaacgaaacaaacaggaccttaatagaatgttttgatgattatgaaggaacatgctgacaaggcattgcagtacttcatcagtgtggagccgagtaaagcactacctcttcttttgcgttggattgccagctatcagactctgtttacgaaggtttgcagcaaatgcggacggcttctgatgatggacaagtctttggctttgctgttgcctcctgtccaccgcccctatcaccagacttcaaatattggaccagatcttcaagaggcctaccacattggatgttcctcctacgacggctagctggtgcttctaagaaacacccgagactattttggtagcacaggatgtttctcgcgttgtcatcgacgaagcacgtgtacaacagtccttgtgtgtaaaacattgtcctttctggaatgtatccaacccatcaggtgtcctttttgtactttggttagtgtatgcatattgtcatgtgctgtacaaatatattagcattgctactttattacgggtggggcctagcccaaacttgatacagctaggataaagttagagcagttgctacagtttctagctagctaccttattctat

SEQ ID NO: 116979 - DNA, 1559 bp, Zea Mays
gatttgggctccaccactgcacatgaatcatgatgcagcagcgagcagcctatacggcttactgggccggccgccgatcgcgagcaaacacttccgcagctctggaattcggaggctcaggaatcatgatgcagcagcctcaggcgcatgcgtcggcacttgcggtggcgcacccgcacgatccggcgggcggggacgcgccgccgaagcaggtggctcaggcgatggagcggctgggccgtgcgggccgtctcatcgcagacatccggctcggcgcggaccgcctcctcgaggccctcttcgtctccggcgacgcgcccccgtacagcgtgcgccagcacgtcgacaggatggagcacattatcgtcaaggaggatgccgccatgcgcctccacttccaggacctacgcgccctcggcaggcaactagaggagtctggagttcttaatggggcccttaaagctcgaggcaattcatggggcttgcacatgccacttgtttgtccagatggtgctgttgtagcttatgcttggaagcgacaactagcgggtcaggccggtgcatctgctgtggacaggactaggttagctctcaaggccttcactgaccagaaaagaagattcttccctcatctagaagatgaagttgttagccatctccatgatggtgaacctggtggcaccaaaaagccaaagttgtttaccagcaatggagatctagaggaaaaatctttgtctgacatactgaaaaatttagaacatgaagcatctaacataaaaatattcacatactggcatctggattggtcaaaaagagcttcctcattagcatctctgttggatgatgactttgtggatccatctaaagagctgaacctgcaaaatatgggcaaatcgagatctggtgctctgacaacttccatagaccaagtcgcagttattgaattgctggttccttcagtatttagagctgtagtgtcattgcatcctgctggatctactgatcctgatgcagtggcattcttttctcccactgaggaagctatcttcatgcaaggggcacgtcggtacataatgtgtttaaacatgtaaaggaacatgctgacaaggcattgcagtacttcatcagtgtggagccgagtaaagcactacctcttcttttgcgttggattgccagctatcagactctgtttacgaaggtttgcagcaaatgcggacggcttctgatgatggacaagtctttggctttgctgttgcctcctgtccaccgcccctatcaccagacttcaaatattggaccagatcttcaagaggcctaccacattggatgttcctcctacgacggctagctggtgcttctaagaaacacccgagactattttggtagcacaggatgtttctcgcgttgtcatcgacgaagcacgtgtacaacagtccttgtgtgtaaaacattgtcctttctggaatgtatccaacccatcaggtgtcctttttgtactttggttagtgtatgcatattgtcatgtgctgtacaaatatattagcattgctactttatta

SEQ ID NO: 116980 - DNA, 1547 bp, Zea Mays
gaattcattctttttcaaatgcgcctgacttataatgacattggaaatatcacatttttttatttcgtaaccatgtttggatgttagaactttgcagtgtttgcaatcacctaccagtctatatgaagaggacaagagttcaacacaaccgtgttcctgtttacttttgtacagcagacaaaaagtatctagaaattatacaccatttatggttattccatttcgggataagcaaaaattccagtttacgtcaccccactatcatgtgtgtttaatttcaatcccgtcaaccaaatgaaaacaactaatcaattgacacccacctgctgccacccctctacccaacacagacacgcacatgcacacacatcaatggtgtttttagagggttttgcggaaccggtgtcctatctgggtggtcctctcatcgcaatcatggactccagctatccttactgtctatgatgaatagaggtggtgtttgtggcgattttggatgccacccaatcatctcctactattttggagacttgacggaaaactggagaaatgatcactaaatttgcattattcatttaagatgtgcccaagttttttacaattttgagcttacccatgctttcaggttagctctcaaggccttcactgaccagaaaagaagattcttccctcatctagaagatgaagttgttagccatctccatgatggtgaacctggtggcaccaaaaagccaaagttgtttaccagcaatggagatctagaggaaaaatctttgtctgacatactgaaaaatttagaacatgaagcatctaacataaaaatattcacatactggcatctggattggtcaaaaagagcttcctcattagcatctctgttggatgatgactttgtggatccatctaaagagctgaacctgcaaaatatgggcaaatcgagatctggtgctctgacaacttccatagaccaagtcgcagttattgaattgctggttccttcagtatttagagctgtagtgtcattgcatcctgctggatctactgatcctgatgcagtggcattcttttctcccactgagggaggaagctatcttcatgcaaggggcacgtcggtacataatgtgtttaaacatgtaaaggaacatgctgacaaggcattgcagtacttcatcagtgtggagccgagtaaagcactacctcttcttttgcgttggattgccagctatcagactctgtttacgaaggtttgcagcaaatgcggacggcttctgatgatggacaagtctttggctttgctgttgcctcctgtccaccgcccctatcaccagacttcaaatattggaccagatcttcaagaggcctaccacattggatgttcctcctacgacggctagctggtgcttctaagaaacacccgagactattttggtagcacaggatgtttctcgcgttgtcatcgacgaagcacgtgtacaacagtccttgtgtgtaaaacattgtcctttctggaatgtatccaacccatcaggtgtcctttttgtactttg

SEQ ID NO: 116981 - DNA, 1505 bp, Zea Mays
gatttgggctccaccactgcacatgaatcatgatgcagcagcgagcagcctatacggcttactgggccggccgccgatcgcgagcaaacacttccgcagctctggaattcggaggctcaggaatcatgatgcagcagcctcaggcgcatgcgtcggcacttgcggtggcgcacccgcacgatccggcgggcggggacgcgccgccgaagcaggtggctcaggcgatggagcggctgggccgtgcgggccgtctcatcgcagacatccggctcggcgcggaccgcctcctcgaggccctcttcgtctccggcgacgcgcccccgtacagcgtgcgccagcacgtcgacaggatggagcacattatcgtcaaggaggatgccgccatgcgcctccacttccaggacctacgcgccctcggaaggcaactagaggagtctggagttcttaatggggcccttaaagctcgaggcaattcatggggcttgcacatgccacttgtttgtccagatggtgctgttgtagcttatgcttggaagcgacaactagcgggtcaggccggtgcatctgctgtggacaggactaggttagctctcaaggccttcactgaccagaaaagaagattcttccctcatctagaagatgaagttgttagccatctccatgatggtgaacctggtggcaccaaaaagccaaagttgtttaccagcaatggagatctagaggaaaaatctttgtctgacatactgaaaaatttagaacatgaagcatctaacataaaaatattcacatactggcatctggattggtcaaaaagagcttcctcattagcatctctgttggatgatgactttgtggatccatctaaagagctgaacctgcaaaatatgggcaaatcgagatctggtgctctgacaacttccatagaccaagtcgcagttattgaattgctggttccttcagtatttagagctgtagtgtcattgcatcctgctggatctactgatcctgatgcagtggcattcttttctcccactgagggaggaagctatcttcatgcaaggggcacgtcggtacataatgtgtttaaacatgtaaaggaacatgctgacaaggcattgcagtacttcatcagtgtggagccgagtaaagcactacctcttcttttgcgttggattgccagctatcagactctgtttacgaaggtttgcagcaaatgcggacggcttctgatgatggacaagtctttggctttgctgttgcctcctgtccaccgcccctatcaccagacttcaaatattggaccagatcttcaagaggcctaccacattggatgttcctcctacgacggctagctggtgcttctaagaaacacccgagactattttggtagcacaggatgtttctcgcgttgtcatcgacgaagcacgtgtacaacagtccttgtgtgtaaaacattgtcctttctggaatgtatccaacccatcaggtgtcctttttgtactttg

SEQ ID NO: 116982 - DNA, 504 bp, Zea Mays
atgtctttcatcttaattcgcattttaggcatacctgaaattgtcccacaacatctagcactgggcatcaaagtggcaactcgcatttctatgagggaaggggcaaagaaaaggcacgctcatatccttcggatatctcaaaagaaatcgtcacaaaatgagaacacaaatatgggactccacgcaaaaagcacactaaaattcgcgaattacaatccaccctttaaatcaaaacgtgaaatttgccgcgaaggtagagattcgctaatcgtgattggatgtgaagagaaggctaaccattttgtgccgaaggtggagcggttgaagagcgagttgagagacgacatcgtcggcagcctcgtcaaggctgtccgcagatgcacccgcagatgtcaacagctcgatatctgtagcgtgcgaaacaagggggccgtaaggcctttaaaggtcaacctcatacactacgggattaaacccactgagaccttaagctcaagaaattaa

SEQ ID NO: 116983 - DNA, 1477 bp, Zea Mays
accaatcttttctttccagcctcaaatcccgtttttcccatcccgtgaagaaccatggcacggtactccccaccgtcgctgcgctgcttcttccgctgcgccgccagctccgcctcccgagccgtaggcagcggcactcggaagaagaaccttgtattcttgggctctccccaggtcgccgcctcggtcctggacaagctgctgggcgcgtccggctccccggaatccgcatttcaggtggctgccgtcgtgacgcagccgccggccgccaagaacagggggaggaagttgatgccgtcggccgtcgcgcagttagcgctcgatcgcgggttcccagaggaactcatcttcacgccagaacgagcccgagaagagtcgttcctgtcggccttgaaggaagtggaaccggatgtttgcataactgctgcttacgggaacattctgccccagaaatttcttgatatcccatcgtgcggcacagttaatatacacccaagtttgttgcctctatatcgtggtgcagctcctgtgcagagggcactgcaggatggtgttgcagaaacaggtgtttcccttgcatatactgtccgtgcattggatgcaggtccagtgattgcgtgtgaaaggttttctgttgatgaatgtattaaggcaccagagctactttctatgctgtttcatttaggatccaagctattgattaatgaacttccatccattcttgatggttcggctaaagataaggcacaaccacaggatgactccaaagctacactggcaccaaagttaaattctgaggagtcatggctatcgtttgacgaagaagctaaagtgctgcataacaaggtgcgggcatttgcaggatggcctgggacgcgcgcaaagctgcaactcataaaccaaaacagtgtacccgatgtactagagattaaggttatcagcacgaaggtttcaacatcatgtgtcaaagttggagatgaaaacgagatactattctctgggagctcgttgctgattccttgcagtggttcgacctggctcgaggtgttggagcttcaactccctggaaagaaagtaacaaaggcacaagatttttggaatggtttgcgtggtcagaagctgatgaaattgccatagggggatatctgcattcgcagcacaggagtgtgcctatatgcatagcaagggttattgaggtcagtcattgcgcgaacataagcagggtagtgctagaagcctatatgcggagatctcggttttatgactaccttttccttctggtaaacttggtgctataaactcgtaactcagttacattaggcatgccatttgtattgcttcctcaatttcagaaaacacactgctgtaactatttcagttattcaatttttcactgtcataactgagctacaaacatttgagaaataatacagttatgtggtgagtaataaggcaataatttgccgtaccttcttga

SEQ ID NO: 116984 - DNA, 1532 bp, Zea Mays
accaatcttttctttccagcctcaaatcccgtttttcccatcccgtgaagaaccatggcacggtactccccaccgtcgctgcgctgcttcttccgctgcgccgccagctccgcctcccgagccgtaggcagcggcactcggaagaagaaccttgtattcttgggctctccccaggtcgccgcctcggtcctggacaagctgctgggcgcgtccggctccccggaatccgcatttcaggtggctgccgtcgtgacgcagccgccggccgccaagaacagggggaggaagttgatgccgtcggccgtcgcgcagttagcgctcgatcgcgggttcccagaggaactcatcttcacgccagaacgagcccgagaagagtcgttcctgtcggccttgaaggaagtggaaccggatgtttgcataactgctgcttacgggaacattctgccccagaaatttcttgatatcccatcgtgcggcacagttaatatacacccaagtttgttgcctctatatcgtggtgcagctcctgtgcagagggcactgcaggatggtgttgcagaaacaggtgtttcccttgcatatactgtccgtgcattggatgcaggtccagtgattgcgtgtgaaaggttttctgttgatgaatgtattaaggcaccagagctactttctatgctgtttcatttaggatccaagctattgattaatgaacttccatccattcttgatggttcggctaaagataaggcacaaccacaggatgactccaaagctacactggcaccaaagttaaattctgaggagtcatggctatcgtttgacgaagaagctaaagtgctgcataacaaggtgagtatctgattctcaatgtgtccaacaaagcttttgccaaccaactctggtaggtgcgggcatttgcaggatggcctgggacgcgcgcaaagctgcaactcataaaccaaaacagtgtacccgatgtactagagattaaggttatcagcacgaaggtttcaacatcatgtgtcaaagttggagatgaaaacgagatactattctctgggagctcgttgctgattccttgcagtggttcgacctggctcgaggtgttggagcttcaactccctggaaagaaagtaacaaaggcacaagatttttggaatggtttgcgtggtcagaagctgatgaaattgccatagggggatatctgcattcgcagcacaggagtgtgcctatatgcatagcaagggttattgaggtcagtcattgcgcgaacataagcagggtagtgctagaagcctatatgcggagatctcggttttatgactaccttttccttctggtaaacttggtgctataaactcgtaactcagttacattaggcatgccatttgtattgcttcctcaatttcagaaaacacactgctgtaactatttcagttattcaatttttcactgtcataactgagctacaaacatttgagaaataatacagttatgtggtgagtaataaggcaataatttgccgtaccttcttg

SEQ ID NO: 116985 - DNA, 507 bp, Zea Mays
accaatcttttctttccagcctcaaatcccgtttttcccatcccgtgaagaaccatggcacggtactccccaccgtcgctgcgctgcttcttccgctgcgccgccagctccgcctcccgagccgtaggcagcggcactcggaagaagaaccttgtattcttgggctctccccaggtcgccgcctcggtcctggacaagctgctgggcgcgtccggctccccggaatccgcatttcaggtggctgccgtcgtgacgcagccgccggccgccaagaacagggggaggaagttgatgccgtcggccgtcgcgcagttagcgctcgatcgcgggttcccagaggaactcatcttcacgccagaacgagcccgagaagtaccttcctgacaaccattatggagtctttattgatgctggatttgggttctactgatttctggagcaatgcaggagtcgttcctgtcggccttgaaggaagtggaaccggatgtttgcataactgctgcttac

SEQ ID NO: 116986 - DNA, 1764 bp, Zea Mays
agaaaacccaaacaaacgcagtctacctcgacagtcgacactcgagagtcgagaccctctcccagcatcaacccgccccgcgctgccctcgtcccgatctccgacccaaatacccgatccaccatggccggaataaggcttacgcccgaggaacccgagatgcccgttggcacgccaccccgcccccagctcccacccttcgtcgccgcggcaggcggtggcggcggaggtctggaaatggcgtcggacgacgagcggtccattgcggcggattcatggtcagtgcggagcgagtacgggagcacgctcgacgatgaccagcgctacgccgacgctgctgaggtgctcgccgcttccgcgtcctccgccaacttcccctccgccgcctccgattactgctctgataaggatgatcaagatcctggtgatgttgaaggatcaatgctgggtcttcaaagttattgggatgcttcttatttggaagatcttgcaaattttcaggaacatgggcacactggagaaatatggtttggtgcagatgtaatggacacagttgctgtttggacgaaaagtttgtgtaacattattgaaggcaagattccatctggtcaagacaacatcaaaagtgaagtcaatgaaaatttattctccaactaccctgttcttgatgttggaactggaaatggtcttcttttgcaagcattggctaagcaggggtttacagacttaactggaacagattacagtaaaggagctgttgaacttgcaagaaacctagctgctcgtgatggcttctcttcaataaactttttggttgatgatgtacttgagacaaagttagataggaaattcaaaattattacagacaaagggacattggatgccatcggattgcatccagatggtcgtgcgaaaagaatggtatattgggaatctgtatcaaacttggttgagcctggtggcattgtggtcataacgtcatgtaatcacacaaaggatgagcttctgcatgaagtagaagatttcaccaagagaaaatttggcaaggagaacgtggatgaaggtgcacgagatgcgtctgagatcttccggtacatagaccatgtccgaacatatcctaccataatgtttggaggaattgagggctctcaagtctgcactgtggcctttcagcgggtgtgactgaaagctgaggcacacatagttcttggcctgacgtgtcacgttgggtccagaagaaatggataaaaaattttgtgcttcgcctgtgggactgttcctaccgtattaaggaacagtccaaactgtgtcttcttctgttgttagctcatctatccaggatggtcgtgtaattttagatggaccagactatgagacgaatcagtcctgtattgttgtcaccgtgaacatttccttgtatttccgttcctcttatacatactctagccttaatttattactctttcttgtaaggaggtttcaacttgctaccagtggattgtttaagtgatcatcatcttgttatattggctagatcagaggaacgagttttcttgtctcggatcccaggactgctggacggctgtcagcttgcctgctccataatgttggacacagtctgctggactgctggacacagtctgctgcaacttgcctgctccgttctcttcccgtatgtattaaattgatgtaatggtctagaaaatcaacaaggttctccaaaaaaaatctgaacgcaaaaatcatcatcaggggataaaaaaa

SEQ ID NO: 116987 - DNA, 1597 bp, Zea Mays
agaaaacccaaacaaacgcagtctacctcgacagtcgacactcgagagtcgagaccctctcccagcatcaacccgccccgcgctgccctcgtcccgatctccgacccaaatacccgatccaccatggccggaataaggcttacgcccgaggaacccgagatgcccgttggcacgccaccccgcccccagctcccacccttcgtcgccgcggcaggcggtggcggcggaggtctggaaatggcgtcggacgacgagcggtccattgcggcggattcatggtcagtgcggagcgagtacgggagcacgctcgacgatgaccagcgctacgccgacgctgctgaggtgctcgccgcttccgcgtcctccgccaacttcccctccgccgcctccgattactgctctgataaggatgatcaagatcctggtgatgttgaaggatcaatgctgggtcttcaaagttattgggatgcttcttatttggaagatcttgcaaattttcaggaacatgggcacactggagaaatatggtttggtgcagatgtaatggacacagttgctgtttggacgaaaagtttgtgtaacattattgaaggcaagattccatctggtcaagacaacatcaaaagtgaagtcaatgaaaatttattctccaactaccctgttcttgatgttggaactggaaatggtcttcttttgcaagcattggctaagcaggggtttacagacttaactggaacagattacagtaaaggagctgttgaacttgcaagaaacctagctgctcgtgatggcttctcttcaataaactttttggttgatgatgtacttgagacaaagttagataggaaattcaaaattattacagacaaagggacattggatgccatcggattgcatccagatggtcgtgcgaaaagaatggtatattgggaatctgtatcaaacttggttgagcctggtggcattgtggtcagtactttctcctataggcttttaaaattatattaagattccttcatcagttgaagttttatctttatgcttgtaccctcattatctgtaagggcatgaaactttcggttgcatctctcctcaggtcataacgtcatgtaatcacacaaaggatgagcttctgcatgaagtagaagatttcaccaagagaaaatttggcaaggagaacgtggatgaaggtgcacgagatgcgtctgagatcttccggtacatagaccatgtccgaacatatcctaccataatgtttggaggaattgagggctctcaagtctgcactgtggcctttcagcgggtgtgactgaaagctgaggcacacatagttcttggcctgacgtgtcacgttgggtccagaagaaatggataaaaaattttgtgcttcgcctgtgggactgttcctaccgtattaaggaacagtccaaactgtgtcttcttctgttgttagctcatctatccaggatggtcgtgtaattttagatggaccagactatgagacgaatcagtcctgtattgttgtcaccgtgaacatttccttgtatttccgttcctcttatacatactctagccttaatttattactctttcttgt

SEQ ID NO: 116988 - DNA, 675 bp, Zea Mays
agaaaacccaaacaaacgcagtctacctcgacagtcgacactcgagagtcgagaccctctcccagcatcaacccgccccgcgctgccctcgtcccgatctccgacccaaatacccgatccaccatggccggaataaggcttacgcccgaggaacccgagatgcccgttggcacgccaccccgcccccagctcccacccttcgtcgccgcggcaggcggtggcggcggaggtctggaaatggcgtcggacgacgagcggtccattgcggcggattcatggtcagtgcggagcgagtacgggagcacgctcgacgatgaccagcgctacgccgacgctgctgaggtgctcgccgcttccgcgtcctccgccaacttcccctccgccgcctccgattactggtacgagaccattttctgccgaatggcctcatccgtgtgcgaattggatgctactgacctcgagatatagatctagcaaattgcggggatccgacaatgcttgatatcgtagagagcttgttcgggttgtggtctcttgtggctgctgttagtaccttttgttttgtgcacaatgttttgttatgtttagcattgaatctgtggaaattgagggaatatgatggatgccttttggcaacttgtcgattagtatcattgaagacagttgcatgcccga

SEQ ID NO: 116989 - DNA, 122 bp, Zea Mays
attaggttctccgatgtctgaatatctgcttgtgcttccaaattctattttctttatgctcagtatcagtcggtgcaaaataaaagttcgattacctaattgaatgaaccaccactaaaaac

SEQ ID NO: 116990 - DNA, 963 bp, Zea Mays
gaacgcacgcaatctcgcagcaaaccgccgggcccctcgcgcgcacacacctcagctccctcgtaccggggctccatgggcaacttcgcatcgtgcacgctggcgaggacggccggggccgggagggccagcggctcgaccgtcgtgctcccggacgggcgggtgcggcaggtggccctcccggccacggcggccgagctgatgctcgacgcgccgggccatttcctggcggacgcgcgggcgctgcggcccgggcggcggatcgaggcgctcgcggcggacgagggcctcgtgcgcggggcgctgtacgccgtgctccccatgaagcgcctgggcgcccccgtggcgcccgccgacgtggcgcgcctggcggccgcggtggtggccagcggggagaaggcgcgggccacgagggggaggacgcggccggtgtcgtcccccgccgccacggccaaggtcgccgccgtcttcgtcgcgccgcccgagacgctcgaggccgcggcccttgagctccaggagacggacgcgtccaagccgagggccccgaggctggaggagatggccgtcgacgacgcagcggccgcggccgagatcgaggagctcaagcaacgcctcagcggcggcgggcggcggtccaggcggcccacgctggagaccattcaggaggagagctacgtgccagcgagatgctgacgatgccagtcaataatggccaaagccaaccaaacagagagatggcaaaggctgtttctctgatagcctcattttagttgcgtaccgtaggtgtgttcgcccccttctctattcgtactcaccttgtgtaaatagcactacttccttttttttcccctttggtgctgtctcattttccatttatttttggagagagaggaaacggactggatcaatataattttgaaaaagcggtaaacataaacgaaggggatttcacagtttcagtta

SEQ ID NO: 116991 - DNA, 2634 bp, Zea Mays
ttgttgcctctcccgacgcccctccctaccctacttcaaaacatttcaaaccactctacgcgactacgcctccttcctctcctcaccccctccccctccactcgctcgccactgaggcgcctgaccagtgatcgtaccatctcccctcgaccacagtccaccgcccgtcaccgccccgccccgcccgctcgacgaggccgcggccgccgcgccgggtggtgaagaggtgagtatcctacttgcgattctcccgggtgctgctatgagtagcgctgtgaaggaccaactgcagcagatgtcgacgacgtacgattctctcctgttggagctcaacatgatttgggatgaggtcggtgagcccgacatggcgagggaccggatgctgctggagctcgagcaggaatggctcgacgtctacaggaggaaggtcgaccaggccaatcggtgcagggcccagttgcggcaggccattgcggatgcagaggccgagctcgctggcatctgctcggccatgagcgagccaccgatacatgttagacagtcaaatcagaagttacatggtttaagggaggaattgaatgcgattgtcccatacttggaggagatgagaaagaagaaagttgaaagatgggaccaatttgttgatgtcatagagcaaattaagaaggttgcatctgaaatcaggccttcagattttgtacccttcataattcctgtggatcagtctgatctgtcattaagaaagctggatgagctaacgaaagagctacaatcccttcagaaggagaagagtgatcggctgaagcaagtgatggaacatcttagcactttgcatttgttatgcgaggtgcttggtgtagatttcaaacaaacggtatacgaggtgcaccctagcctgggtgaggctgatggatcaaagaacctaagcaacagtacaattgagagacttgcatcagctgtaaacagattgcgtgaattgaaagtccagaggatgcaaaagcttcaagatttggcatctagcatgcttgaactttggaatctcatggatacaccgcttgaagagcagcagatgttccagaatttaacgtgcaatattgctgcttcagaacatgaaataactgggcctaacaccctctctactgacttcctcagctacgtggaatctgaagttttaagacttgaacagcttaaagcgagcaagatgaaagacctcgttcttaaaaagaagacagaactggaagatcataggagacgtgctcatttgattggtgaggaaggttatgcagccgaatttagcgatgaggctattgaggcaggagctgtcgatcctgcgctggtgctggaacaaattgaggctcacattgccacagtgaaagaggaagcttttagccgtaaggatattcttgagaaggttgaaagatggctgaatgcatgtgaggaggaagcttggctggaagattataacaaagacgacaatcgttataatgccgggaggggggcccacttgacactcaaaagggctgagaaagctcgtattttggttaacaagatcccaggactggtagatgttttgaccacaaaaattgtagcttgggagacagaaagaggaaaggagttcacatatgatggtgtccgcctgcggtcaatgcttgaagactacataatcattcgccaggagaaagagctagagaagaagaggcaaagggatcagaagaagatccaggatcaactcaaagctgagcaggaagcgctgtatggatcaaaaccaagtccatctaagactcaaagcacgaagaaggtgcctagacaatccatgggtggtgcgaaccgaagactgtctcttggtggagccacaacgcaagcccccaaaacagatataatgcactccaagacagctcgtgctgcgaagaaggctgaagatttgggcgctttatctcctagtagcagaggcttggacattgccggtcttcccatcaagaaactatctttcaacgcaagcactctgcgagaggcagaaacaccacgcaagccttttgcccagatcatgccaggaaacaatgtctcgtcgatgcctgcgcggcccatctccaacgacacagaggaagagaacaaaacccccaaaacatttgcagggctcaatccaaaaacgccggtgacagtgacggctcctatgcagttggcggtgacaccagctgtggccaacaaggtcatagccactcctgcaacccttttccaggagaaggcagagtcgccagcgctgcctggggacatcgagtactcgttcgaagagaggcgactcgccgtttacctggccaggcaagtggcattttttgttcattcaccttctcccagttgcgctaatacccagctattacttagttgaaagctgagctgactgcgatttctcggcagaggccaatgttacctgttggtcgatactcgatagtagtgggcctcggtcttactttgcactactattcattcatagccatattgctactagccagtaaagggagtttttagtcttgagagcttgtggtctgcatcgtaagttgtatagctttatacggtgcatcgtcgatgacctgttattgttattatatggtttattactgttatccaaatatcttgtct

SEQ ID NO: 116992 - DNA, 395 bp, Zea Mays
acatctggactgttagtgtgagtggctatgatcttactgttctgtggaagttccctgattctgttaacctgtttgcaaggtaaagacataaaatgcatcaaggttgaaaaaaaattgagcttgaggttcacattgcttgaggttctaattctgatctctcttaaactgaaaggtagagatccgggcatttatacattaaaaaagggaaaaaatcatccaatccagaaaccaaacaagctgaaacctaaaactaataaaaccttttggcgaatttctagcccaaggtagttctgactcttgccagaattcttcgcgtgccaaatcaagaacctcccactccctggacatcaagattccctaagaacatcctccttcaagcaacccattgctagtat

SEQ ID NO: 116993 - DNA, 2276 bp, Zea Mays
ggtccagccgcgaattcctcccgtccccaccctcctccatattccccacccaatgtcccgaccggccaacccccgaccccgaagccccaaacccctaccaccatttcccgggagtctcctttcccggagagtggatccgccactccaatctgcaccattctataaggaaaacctagatccggactcctagccgtcggccatggccacgcgccgggccttctcgtccatcctccgctctgcctctcgcattcgctccgcctcaccgtccccatgcccgcgtgcgccgctccaccaccgcccgtcccccgcgggcttcatactcaaccgtgtagccgcctacgcctcctccgccacggcccaggccgcgcccgctccgccacctccttcaaccggcaagaaaaccggtggcggcaagatcaccgatgagttcaccggcgctggcgccatcggccaggtgtgccaggtcatcggcgccgtcgtggatgtgcgcttcgacgaggggctgcccccgatcctgacggcgcttgaggtgctcgacaacaacattcgcctcgtgctcgaggtggcgcagcacctcggggagaacatggtccgcaccatcgccatggacgggacagaggggcttgttcgcggccagcgtgttctcaacaccgggtctcccatcactgttcctgttggtagggcaacgcttggacgcattataaatgttattggtgagcctattgatgagaagggagatataacaacaaaccacttcctccctattcatcgtgaagccccagccttcgtcgagcaagctacagagcagcaaattcttgttactggaatcaaggtcgtggatcttcttgcaccttaccaaagaggtggtaaaattggtctctttggtggtgcaggggtgggaaaaactgtccttatcatggagctgattaacaacgttgccaaggcccatggtggtttctctgtctttgctggtgttggagaacgtactcgtgagggtaatgacttgtacagagaaatgattgagagtggtgtcattaagcttgacgataagcagagtgagagcaagtgcgctcttgtctacggtcaaatgaacgagccacctggtgcccgtgctcgtgttgggctgactggtttgactgttgctgagcatttccgtgatgctgaaggacaggatgtgcttctcttcatcgacaacattttccgtttcactcaggcaaactctgaggtgtctgctctgcttgggcgtattccatctgctgtgggataccaacccactcttgctactgatcttggaggactgcaggagcggattactaccacaaagaagggttctattacatctgttcaagctatttatgtgcctgctgatgacttgacagatcctgctcctgctaccacctttgcccatcttgatgctactactgtgttgtcacgtcagatttctgagcttggtatttaccctgccgtggatcctctggattccacatccagaatgttgtccccccatgttctgggtgaggaccactacaacactgctcgtggtgttcagaaggttcttcagaattacaagaatctccaagatattattgccattctgggaatggatgagctcagtgaagatgacaagttgacagttgctcgtgctaggaagattcagcggttccttagccagcctttccatgttgctgaagttttcacgggtgcacctggaaagtacgttgagctgaaggagagtgttaaaagtttccagggcgttttggatggcaagtatgatgaccttccagaacagtcattctacatggttggaggaatagaggaggtcatcgccaaggcagagaagattgccaaggaatctgcatcataaggggtctacaggcaacgcaaaattaacttttggaggtcaacgtgatgtgctttttatcctgtgttatcaagaacttacgtgcaggagaccctgccctgcagaaggatgtttctctcctccgtccccccaccccacaccccaaaataaggattcgcagtgacattttaatttggtttactgccctttgaggaagaattaccttttttgatgaggtgaaactataaccttgttaattctcaaacaaatactcttctcccatgttcatagccattatgaggtcgcctgttcaatttatttttctgagccgaatagccgcttctacagttcgttatctgtgtatagtctagttttgtgatccgtttccaactccagtgtttggttggtaggacgataacggatgaaatgtgtttgg

SEQ ID NO: 116994 - DNA, 76 bp, Zea Mays
gtccgcacgcgcgttttcgtcgtcgtgatcatgacgacgacgacgacgagggccggcgaggcggcggcggcggcga

SEQ ID NO: 116995 - DNA, 1005 bp, Zea Mays
gcgtccaagctgcccgggcggacggacaacgacgtcaagaactactggaacaccaagctcaagaagaaggcgatcgccatgcagcagcagcagcagcagcagcaagagtactaccagcagcagcacagctcaggaggccgcggccgccgcgccgccgccgccgccgccgctccccgaagccaatgcgcctccgtgcagccgtcgcccgcgtccgcctcgtccgccgtcaccaccgcgagcgccagcgacgcgtgcagcttcggggccatgtacccctccccgtcggcgctgcaggccgctccggtgctcgcgcgctacgacagcacggcggcggcgccagcaccactgtctctgccgcagcaggcgtcttcgctcgccgccgagttcgtccctcccgcgccaccacccgtcggcgccagctgggccggcgggctgcccctcgacgacatgttcctgcccgagctcctcggggacagcgagttcccgcccggcgacggcgacttcttcggcgccggggccggggccgggctcctcgccccgctgctgctgcaggacagatttccagcggcgtccctgcaggagctctccgcgtgctacttccccaacgcgccggccgagatgtgggcggccgcggaccacgcccatgccaagccgccggccggcctctgccacagcctgacatgaccgcggagacaacactggcgcgcgctcgatccgtcttgctagctagctagtcatccttggctctctcgatccctgtcctgtccatcgtcgatacgcatgcgctctctctatatatgggtgaggtcatcacatgtacattatcactttccatatggcctgcgatgcgactagctagcatcatgcatatcatagaaacattactagatgtggatcgccattgctttgtttggcttctcttctgcgtgcgtacgtacacgaacacgattacacgaccactggactggacagccagtcactgtgtgcaaaaatattcttcagtgc

SEQ ID NO: 116996 - DNA, 1061 bp, Zea Mays
cggccggagagacagcatataggcaggcaggcaggcgcggtgagaggaatcggcatcagaggtacggtacgatgttccgggaggagcagctggacctggtgctggtgccgctggccctggcggcggtggccggctaccacctgtggctcctctgggcgatcctgcgccatcccacccggaccatcatcggcctcaacgccatcgcacgcaagcgctgggtcgccgccatgatggccaacacggagaagaacggcgtgctcgcggtgcagacgctgcggaacaacatcatggcgtcgacggtgctggcgaccacggccatcacgctggtctccgtcatcagcgtcttcatcggcgtcacgtctccggcctcctcctcttcctcgccgtcctccaaggcgccgcggctggtgtacgggagcaaggccggggaggtgttcgcggccaagtacctggccgtgtcgctctgcttcatgctcgccttcgtctgcaacgtgcaggccatccgcctgtacgcgcacgccagcttcctcctgggcggcctgccgcccgggcccggcgacgaggcgcgcgaggagttcgcgtcgtacgtggcgcggacggtgaaccgcggcagctacgcctggtcgctcggcctgcgcgccttctacgtctccctcgcgctcttcctctggacgttcggccccataccgatgctggcctgcagcgtgctcatgtgcggcctgctctacttcctcgacaccaccagcagcgccgaccacggccacgcgcacggccagcaacgggccggcgccgcccgaaaggatagcacagtctgatctcaatctacttctttacaagaatgccagctttgagaaactcgtatctcaaaacatataatatataatatcagctttgagaaaatgctatctctgtttctgtctcttctcttcactacatcttctttatttctgtagcctctacaacagatgtagtccctacagggatcaagtatgtaagggagaaaataccttgtcgttagaccgtgtgctcggcagagcgtgtatatagttgtgtataacacc

SEQ ID NO: 116997 - DNA, 1236 bp, Zea Mays
ggcttcttcagatgacaacactgagttcatgattgacatgttacgggagtgcggactagctcacaagacaatactatttattctagaagaattcgacctctttgctcagggtaaacagaggttgctttacagcttacttgatgcaatgcaatctctaacatcccaagctgttgtcattggtgtgagttgccgcttggatgcagatcaactcctagagaaaagggttagatcccgattctctcataggaaacttttatttatttcgccttcgttggatgatatacaacggttggtggagcatttgcttatactggccaaagactcaggtttaccatcaaagtatatcgccgattataactcaagacttactagcatttttagtgataagaaattcaaaggttgtctcaactccctcatggatgctgatgcaacaacgagcaacattcaaagatttcttttcagagctgtgtcatatatggacatggaatctggattcctgtcggtagaaagcttcctaaaggccctttcttccatgcagaggcaacctaagatggacagcttacaagatctctcgattttggaattatacattcttgtgtgcatgcacagattagaaagtaaggagcaaacctcatacaacttcaccagcataatgaaagatccatacaagacgcctataagacttctgataaatatgcaagcaccgtttgttttagggcctttgagcacctttcggatcgtgagctgattagttttggtgacaatagatggagaaaccaggcgcttgaataccgacctgttaagctcctcatatcctcccgcgagctcgctgagtccctcaagctgaacaccacctgccccgctgtactgcagaagctgtttgatcgtgaaagatacatgtagaatctcctttcagatggccgcgcttcacctgacttgagtcgccgctttcatgtttcaccgggttgtcaagttcatgtttcactgtaaaccggcgattgtattagtatcttgtccactgttcgctggaaaaggtgtgggccgtgtggccaactgcccagcgtgagtcgtgacctgcctgtcaatcgcttgagtcttgaccataggccacacggaattagatatctgtggtgcactgattttgggctaacgacccgatttctatctcgcacaagtttagcagcgtggtgacagtattttggtagctttgaaatgaatgcgctattcggagtttac

SEQ ID NO: 116998 - DNA, 1243 bp, Zea Mays
ggcttcttcagatgacaacactgagttcatgattgacatgttacgggagtgcggactagctcacaagacaatactatttattctagaagaattcgacctctttgctcagggtaaacagaggttgctttacagcttacttgatgcaatgcaatctctaacatcccaagctgttgtcattggtgtgagttgccgcttggatgcagatcaactcctagagaaaagggttagatcccgattctctcataggaaacttttatttatttcgccttcgttggatgatatacaacggttggtggagcatttgcttatactggccaaagactcaggtttaccatcaaagtatatcgccgattataactcaagacttactagcatttttagtgataagaaattcaaaggttgtctcaactccctcatggatgctgatgcaacaacgagcaacattcaaagatttcttttcagagctgtgtcatatatggacatggaatctggattcctgtcggtagaaagcttcctaaaggccctttcttccatgcagaggcaacctaagatggacagcttacaagatctctcgattttggaattatacattcttgtgtgcatgcacagattagaaagtaaggagcaaacctcatacaacttcaccagcataatgaaagaatacagatccatacaagacgcctataagacttctgataaatatgcaagcaccgtttgttttagggcctttgagcacctttcggatcgtgagctgattagttttggtgacaatagatggagaaaccaggcgcttgaataccgacctgttaagctcctcatatcctcccgcgagctcgctgagtccctcaagctgaacaccacctgccccgctgtactgcagaagctgtttgatcgtgaaagatacatgtagaatctcctttcagatggccgcgcttcacctgacttgagtcgccgctttcatgtttcaccgggttgtcaagttcatgtttcactgtaaaccggcgattgtattagtatcttgtccactgttcgctggaaaaggtgtgggccgtgtggccaactgcccagcgtgagtcgtgacctgcctgtcaatcgcttgagtcttgaccataggccacacggaattagatatctgtggtgcactgattttgggctaacgacccgatttctatctcgcacaagtttagcagcgtggtgacagtattttggtagctttgaaatgaatgcgctattcggagtttac

SEQ ID NO: 116999 - DNA, 434 bp, Zea Mays
ggcttcttcagatgacaacactgagttcatgattgacatgttacgggagtgcggactagctcacaagacaatactatttattctagaagaattcgacctctttgctcagggtaaacagaggttgctttacagcttacttgatgcaatgcaatctctaacatcccaagctgttgtcattggtgtgagttgccgcttggatgcagatcaactcctagagaaaagggttagatcccgattctctcataggaaacttttatttatttcgccttcgttggatgatatacaacggttggtggagcatttgcttatactggccaaagactcaggtttaccatcaaagtatatcgccgattataactcaagacttactgtatcctttctacgacctgactgttatggtgcatatctcatcttatttgagtacttagctatta

SEQ ID NO: 117000 - DNA, 641 bp, Zea Mays
cagtcttcgagcagcgtcgttccaaaaagaaaaaagaaaaactcagccgccggccgctgcccctctcggctgcacgacgtccgtgagggcgtgccccctggccccgtcccttgtcgcctgcccgccggtgcccgcacaggctgccagtgccatactgccatccctccgtccggccgtctgcccaggctgcctgcccggcgccctggcctcccggtcgctggctctctgcccaggcgccaggccgcaggtcccaccgccccagaccacccgcgaaccagtccgctgcaggctgcaggccaccgtccctccagttcgccggtcagattattaaccattcagataccccagctccgcctagacgcgaatcctccgccactatggtggcagcggtgtccctgccgagccaagcacaggccgtgcttcggagccggctctgcgacccggtcttcatccactccgccctcagtagctccctggacactaattacagcaagctgaagtacctcgtcgccagctcggtctccgaggcctgcaacaattctgtcctcctcttgggtccccgcgggtgtggaaaagcagcggtggtcgacatggttcttgatgatctgaaggaggagcacccagatgcgatttccgtggta

SEQ ID NO: 117001 - DNA, 705 bp, Zea Mays
ggtcaaagttagagaagtctaacgtaggagaaagcataaggaactacaatttgaatagagggaatatgttagtaacttactattgttcacattaatgtgcattatgttgacttctaaattgcccaggcggaggctggagaagcgtatttatatcccacttccagatttcgaaagcagaaaggcacttatcaacattaatcttagaacagttcagatagctgcggatgttaacatcgatgaggttgctcggaggacagaaggctatagtggagatgacttgacaaatgtttgccgtgatgcttcaatgaacggtatgcggcgcaagatagcaggcaaaacccgcgacgagatcaagaacatgtcaaaggacgatatagccaaggacccagtggccatgtgcgactttgtggaggctctggtgaaggtccagaagagtgtctcgcctgcagacatagaaaagcacgagaagtggatggctgagtttggatctgcctgagacctcggtcatctccttcaacattggtttctgtggttgacacgacaagtgtatgttgatatccgctgaccgctggtgcatagatcagaggcacgaactatcttgtatattttcagggatactacaaattaagttcacgattatttcatttcaatccctgatatgtacattctagctgtgaaacgtgtctcatcaattagccgtggcaa

SEQ ID NO: 117002 - DNA, 1959 bp, Zea Mays
aaccgaaagtccatttcgtccccaaaatttcgattttcgaaaccaaaccaaaccactctcctactacagctctcggcctccctcgcgttctctccatcgaactggcgaactgctcctgctcgtctcttcccacaccacgcattttgtcgggattcgggaaccctatcgccggatcttcgcggcggcggcggaaatggcgaatcccctcgcggggctgcaggaccacatcaagcttgcgcgggattacgcgctcgagggcctatacgacacctccataatcttcttcgacggcgccattgctcagatcaacaagcatctaactactttggacgatgctttggttcgtacgaaatggatgaactgcaagaaagcaatctctgaagaagtggaaagtgtgaaacagttggatgctcaattaaagtcccttaaagaagctcctgggacgaggcggtcctcatcacctcctattcgctccaataaatcatttgttttccaaccgttggacgagtatccaacatcttcaccagctccttttgatgatcctgatgtgtgggctccaccaagggatacaccgacccgaagaccaacaagaggtcaatctagtgcaagaaaatcctcccaagatggagcctgggcacgtggttcatcaaggactggaacacctagccgaagctcaaaacctaatgggagtaaaggaggctctgtggttaaatcatcaactgcctctaacagttctgtaaggaaaggaaaaccaagttcaagcaaggctgattcagcgagtagtgatgctgaggaaggtaagtccaagaagggtcaatatgaagggccagatatggacttagctgcaatgcttgaaagggatgttctggattctactccaggagtaagatgggatgatgttgccggacttagtgaggccaaacgactcctcgaggaagcagttgtgcttcctctctggatgcctgaatattttcagggtattcgtcgaccttggaaaggagttcttatgtttggtccaccaggcacgggaaagactcttttggcaaaggcagtggctacagaatgtggaacaacattcttcaatgtttcctctgcaacattggcctctaaatggcgcggcgaaagtgagcgcatggttcgttgtttatttgatcttgcgagggcctatgctccaagtacaattttcattgatgaaattgactccttatgcacatcacgtggagcatctggtgaacatgagtcgtcaagaagggtgaagtctgaacttctagtgcaaattgatggtgtaaacaatagctccaccactgaagatggtcagccaaaaattgttatggttctagctgcaacaaattttccatgggatattgatgaggcactgaggcggaggctggagaagcgtatttatatcccacttccagatttcgaaagcagaaaggcacttatcaacattaatcttagaacagttcagatagctgcggatgttaacatcgatgaggttgctcggaggacagaaggctatagtggagatgacttgacaaatgtttgccgtgatgcttcaatgaacggtatgcggcgcaagatagcaggcaaaacccgcgacgagatcaagaacatgtcaaaggacgatatagccaaggacccagtggccatgtgcgactttgtggaggctctggtgaaggtccagaagagtgtctcgcctgcagacatagaaaagcacgagaagtggatggctgagtttggatctgcctgagacctcggtcatctccttcaacattggtttctgtggttgacacgacaagtgtatgttgatatccgctgaccgctggtgcatagatcagaggcacgaactatcttgtatattttcagggatactacaaattaagttcacgattatttcatttcaatccctgatatgtacattctagctgtgaaacgtgtctcatcaattagccgtggcaa

SEQ ID NO: 117003 - DNA, 1486 bp, Zea Mays
aaccgaaagtccatttcgtccccaaaatttcgattttcgaaaccaaaccaaaccactctcctactacagctctcggcctccctcgcgttctctccatcgaactggcgaactgctcctgctcgtctcttcccacaccacgcattttgtcgggattcgggaaccctatcgccggatcttcgcggcggcggcggaaatggcgaatcccctcgcggggctgcaggaccacatcaagcttgcgcgggattacgcgctcgagggcctatacgacacctccataatcttcttcgacggcgccattgctcagatcaacaatgatgctgaggaaggtaagtccaagaagggtcaatatgaagggccagatatggacttagctgcaatgcttgaaagggatgttctggattctactccaggagtaagatgggatgatgttgccggacttagtgaggccaaacgactcctcgaggaagcagttgtgcttcctctctggatgcctgaatattttcagggtattcgtcgaccttggaaaggagttcttatgtttggtccaccaggcacgggaaagactcttttggcaaaggcagtggctacagaatgtggaacaacattcttcaatgtttcctctgcaacattggcctctaaatggcgcggcgaaagtgagcgcatggttcgttgtttatttgatcttgcgagggcctatgctccaagtacaattttcattgatgaaattgactccttatgcacatcacgtggagcatctggtgaacatgagtcgtcaagaagggtgaagtctgaacttctagtgcaaattgatggtgtaaacaatagctccaccactgaagatggtcagccaaaaattgttatggttctagctgcaacaaattttccatgggatattgatgaggcactgaggcggaggctggagaagcgtatttatatcccacttccagatttcgaaagcagaaaggcacttatcaacattaatcttagaacagttcagatagctgcggatgttaacatcgatgaggttgctcggaggacagaaggctatagtggagatgacttgacaaatgtttgccgtgatgcttcaatgaacggtatgcggcgcaagatagcaggcaaaacccgcgacgagatcaagaacatgtcaaaggacgatatagccaaggacccagtggccatgtgcgactttgtggaggctctggtgaaggtccagaagagtgtctcgcctgcagacatagaaaagcacgagaagtggatggctgagtttggatctgcctgagacctcggtcatctccttcaacattggtttctgtggttgacacgacaagtgtatgttgatatccgctgaccgctggtgcatagatcagaggcacgaactatcttgtatattttcagggatactacaaattaagttcacgattatttcatttcaatccctgatatgtacattctagctgtgaaacgtgtctcatcaattagccgtggc

SEQ ID NO: 117004 - DNA, 572 bp, Zea Mays
atcccctcaaacacacaatcgttcctgtgcatctcccaggccaccaaaataaacaaggatagacccttcttcagccttacagagaattaatgtgaaactacaaattacactgaactattggtgtcaaaatcattgattattttaccagggaaaaaacagatggttattttggcagttttggtccattgatgtatataggatactgttttataataacaggcatggctgcaaatgaaaaggctatgcaccacctcctgcctggtttcaccccagatggtatttttgttgaaatttggtggggatctgacatcatgcataacagttctacgaaccattggtatcccttttttgggcaacattcatgtctggtagtttcctgctttatgtagacactatttatgtctggtagttcaatagaattttgcctatatctatactagcggcatttacctgctagttataatttactctagatatttatcttcacacatgagaatactatttttttctcattattatttttcaccaggctattcccatgtatgctgctactattgccattgctacttctc

SEQ ID NO: 117005 - DNA, 1178 bp, Zea Mays
cctgatggatcgagggaatcactaaaggagatgtttcaacctagacggggcctgaatctgattattagtttacatgaatcatgaatggacagcatagcaagttcagttcacatttgataaacgggagttttttttttgtctaacacagatcggggtcagcgctccccaaggaagtggaaagacgactctggtcttcgcacttgattatctttttcaggttgctggaaatccgccacattgtctatagatgacttctatttgacagcaaaagagcagaatgaactgagggacagataccctggaaatgctcttttggagctccgtggaaatgctggaagccacaatctccaattcagtgttgaaacacttgagtcactgatgaaactaacaaaagaaggcatcaagatgaaggttccacggtatgacaagtctgcttttgggggaagaggtgatcgtgctgatccttctgtgtggccggaggttgaagggccgttagaggttgttttctttgaaggatggatgcttggatttaaacctcttccaaatgaagttgtgaaagcagtggatccccagctcgaggtggttaacaacaaccttgaagcatactatgacgcttgggacaggttcatcgactcgtggatcgttataaaaataagagaacctagttctgtctatcagtggaggctgcaggcggagatagctatgagagcagatggaaaacctggaatgtctgatgaggaggttatggattttgtatcacgctacctaccagcataccacgcatatttgcccaagttgtacaaagagggaccgaatggttcaaagccagaccatctactggtcatcgacatagacgaagggaggaatcctagatcctaatgagggctcatttgttttgctctcagttcatgtgaattgggtggaattgagtgggtttaaatcctaaacaagtcaaaatctttcatatattttttaatttcatctaatccacatgggatagaaataaccgaacaatgtctaagtgtttttcatgtacaatgtacattttctgaaatacagagtaggacttatgacccccacagtggagcatgggcaaatattaatagcctctcgttttctagacttagttcaaatatgtcctaattatgcaaatttcatgtatgttcgatttctcccat

SEQ ID NO: 117006 - DNA, 1578 bp, Zea Mays
cgacgataagcgtgcttgagcggcagagactagtttattttttctatctctctcccttttgatatttttccagctgtccaccacctccctcgctcgagtacattttgttactattatttgattatttctgcccttggtatacaatgttcgatgatgcgctataaacaaaaaaatatcccgcacccactctgtcgctaaactaatatactggagaaccgatcttctgttagccgctcctactaatatactggttagccgatcgattgttcaggtcctcggatcttgactgtatggatgcgttcttgtcatgcctggacgacggcccgacggcttcgccgccgcgcgccgccccgccgccatccccggcgcttagcgcgcgggacctctacagcttcatatgcagcggtccactggtggacaggatcggctataccaaagagaaggtcgccgactccatcggccggtggcttcgctgcggggttgacgtggcgcgcctcctccgcctcgacgagctccagctgtcggaggccgagaaggcccgggtttaccagttctacatccccgtcttcctctggtgcgaggaccaggtcatagagcacagagccaagtacagcgagggcgacgacatcccgccattggtgatcggggtcagcgctccccaaggaagtggaaagacgactctggtcttcgcacttgattatctttttcaggttgctggtaggaaatccgccacattgtctatagatgacttctatttgacagcaaaagagcagaatgaactgagggacagataccctggaaatgctcttttggagctccgtggaaatgctggaagccacaatctccaattcagtgttgaaacacttgagtcactgatgaaactaacaaaagaaggcatcaagatgaaggttccacggtatgacaagtctgcttttgggggaagaggtgatcgtgctgatccttctgtgtggccggaggttgaagggccgttagaggttgttttctttgaaggatggatgcttggatttaaacctcttccaaatgaagttgtgaaagcagtggatccccagctcgaggtggttaacaacaaccttgaagcatactatgacgcttgggacaggttcatcgactcgtggatcgttataaaaataagagaacctagttctgtctatcagtggaggctgcaggcggagatagctatgagagcagatggaaaacctggaatgtctgatgaggaggttatggattttgtatcacgctacctaccagcataccacgcatatttgcccaagttgtacaaagagggaccgaatggttcaaagccagaccatctactggtcatcgacatagacgaagggaggaatcctagatcctaatgagggctcatttgttttgctctcagttcatgtgaattgggtggaattgagtgggtttaaatcctaaacaagtcaaaatctttcatatattttttaatttcatctaatccacatgggatagaaataaccgaacaatgtctaagtgtttttcatgtacaatgtacattttctgaaatacagagtaggacttatgacccccaca

SEQ ID NO: 117007 - DNA, 2009 bp, Zea Mays
cccagacgggcccaaatctatcgcaaacaggcctcgtctcgtcctcgtcctcgtccgccgccaaatcgaacccccccaaaccctagctacccggcgcaacgtccccttcccgcctctccgcggcgctgcgtgacacccggcctccgctacgaaacaccggggcgggtgtagcctagcgggcgggccatggcgtcaacggtgctggaggcgacgcgggcggcccatgaggatctggagaggctggagcggctcgcggtgagcgagctgcaacgggagcccgctaacccgcgtgaccgcctctttcagtcccaccgcgtccgccacatgctcgacctcgtcgtctccacctccggcaagctcgtggaaatttacgaggacaaggacaatgctaggaaggatgagatcaacactcatcttactgcacccacgcaaagtggactgtttagcaagtactatgaaaggctcaaagagatccgtgaatatcatcggcggaacccatctgcccgctttgttagtacaactgatgactatgaagagcttctaaaggaggaaccagttattgaattcactggcgaggaaacttttggccgttaccttgacttgcatgagctttataatgagttcataaattccaagttcggaacactgatggaatattcagcttatgttggctgtttctcccagacggacaagatctcacatagtcataaagctaccagaaaatacagagaatacttggaacatattttggaatatctgacatcatttctgtatcgcacagagccattgcaagacattgataagatttttttaaagctggagagtgaattcgaggaacaatgggccaatgaaggaatacttggatgggggaataaagggacagaaaaagagtctgaaatagatctcgattactacagcacagttgaagaacttgttgagcttggcccagaaaaattaaaacaggctttagctgctcgaggtttgaagagtggcggtactgttcaacagcgtgcagatcgtcttttcttgttgaaggttacaccgttggaacaactagataggaagcattttgccaaagttccacatactaaagatggctcaaacacagctcctaatggtaatgctttcaaggaggatatgaagaaagaaattgcattgatggaagtgaagatgaaacgtctttgtgagctgctagatgaggcctttgtaaggacaaaggaaaatgcggagaagaagcttactttgacatatgaagagatggaagcagaacgggaagaggaggaggtacaagttgacactgagagtgatgacgaagagcaacaaatctacaatcctctcaagttgccgatgggttgggatggcaaacctatcccctactggctgtacaagctacatggccttgggcaggaattcaagtgtgagatatgtggaaaccatagctattgggggcgaagggcttatgagcgtcatttcaaggaatggcgtcatcagcatgggatgcgatgccttggcattcccaatactaagaatttcaatgaaattacatccatcgaggaggcgaaagcgctctgggagaaaattcaagcacgacaaggggtgaataagtggcggccagacctagaggaagagtatgaagatcaggaaggcaacatctacaacaagaagacctacactgacctgcagcgtcaaggcctgatctagggctcctgctggttaaagttgtcgggatttgttcagaacttatctcatgtagttgtaactctgaaaatattggcccatctggcatacattttatgtaataacatgattctccggaactcatgtgcttttcccggttgtcatggttgtctcgtgtgtctgtttgcccagcttggtcgtccgtagctatgttatgttttatataatcgtaaatgtgttattgtattaagcacaagttggtgtttgcatcacgtaaaacatatttttataaaaaaattagaaaaaaataaaactaggctgtttttggtcta

SEQ ID NO: 117008 - DNA, 216 bp, Zea Mays
cacagttttttcaaactgcagtttttcaaatagtaaagcatgctttagtcatgacattactacagtttacaatacttcagttttcgaatacaacagtatccaatacatcaaggtgtttgggaaaaactttggttgagaccaatcagccagagcgggacccagctggcgctctctttacagagaaaaactttggctgagaccaaagtttccaaaact

SEQ ID NO: 117009 - DNA, 1744 bp, Zea Mays
tataaagacgtctttggtaaagttctctctctctctctctctccgtatctcgcttcgccaccgccggcgagagctagggtttcgtgcgccaccgtcacttccgcccgccatggccgagacctccacgtatcagattctggtgcgtctcctcgacgggcgtaccagatgtctccgcttctccacgcccaccgtttccggcgccgtgctcctcgacgccgtcgcgtcgatctctcgcgttcccgccgccgctctccgcctcgtcaccggcggcatcgacgtatcgccctcttccgtcctcgcctcagcagctgatggccagttcccctatgcgtcagcgctcctccgccttcgaggaggcaagggtggattcggctccctcctcagaggggctgcctccaaagcgggtcagaagaagaccagcaactttgacgcctgccgcgacatcaacggccgccgcctccgccacgtcaacgctgagcgccgcctcgaggaatggaaggccgaagccgccgaccgccagctagaaaagctcgccgagaacttcatcaagaagaaggccaaggaagcgggccgcggtggcggaccctcaaccgctgaggtggacaaatatctagagaagtaccgcaaggatgctgagatctgcgtcaacgtggttgaggaatccgtgcgtgcatcacttggaaagaggaagaccgcacctaagctgccctctggcgcagacgctaagaagcttaagttttggttaggaaagaacaaagtagaagaagatgaaagtgatagtgacactgatgtggatgatgaggacattgaagatcttaagagcgcagatgcaaaatctgtagtagttgatgaaggcaattactcaaatggatgcagaaaaaatgaggagaagcttgatcttggttctgtttctgggtcatcacattcagaaggagagtcttcaggagaaaagtcccaactgacaacaagttcaggagctgaaggtggtgactttgaatctggtgatagtgcagagcttgaggtaggaatgttggatcatcccatttctgttgctgctgcttcagaagaagtgacagcagatgaggataacactgctttagctacttcaaaccaaaataatccagaggtaccacaagttgaagaagtgcggaaagcagacaaggataacactgcttcagctacttcaaaccaaaacaatcaagaggtgccacaagtagaacaacatgttggcatcagcaactcttattcagagccgttggaccttgcaaagtacagttcatctgcagaattggaggtgcttggtctggagaagctaaaaatagagctgcaatctcgcggattaaaatgtggtggaactttacaggagcgtgctgcccgactcttccttctgaagacaactccattggacaagttaccaaagaagctgcttgcaaagactaatgggcggaagtgagaagttgtaccaatatatataaagaagtaccaatgatgcaacgtttaagattttctttgtcaatatatggaaatctgttgtggtgtaatcatgtgttataagctcttggcttggtttgacaattaatgagatgtctgtacgtgctatatgttaaccgttacttggaaggcgctcagtttgggctagcgtttgaattcgttttagtttttgatgttttagtgtatgtttggaacagcttcaccaaccaaaaaaaagtagtaagatttatctggatctattatagagcaaaga

SEQ ID NO: 117010 - DNA, 276 bp, Zea Mays
atgagacggatgcctatttcgcatctgctgcttgcgtctagaacaagagaacaaacatgtagcctgctgtggcgatggtggtggcgcggggttcaggtctctaccgggatccgccagtccatcgctcgctactcatgcctgacaaacggtggaatccggagccccatggcggaaagaggtcgtgggaggtgcgagtgcgggccccctgattcagtctcacttcgatcaacagggacaagcaattctacgaggagggggaagggttgtggaacttaa

SEQ ID NO: 117011 - DNA, 195 bp, Zea Mays
agaagaaaaccgaggtgttgagtggagtttcgaaaactccaaaaatactgcagttttgggtaaaccatggtatttaaaactgagttttgactttacaaaccaaacaccttttgagctccaatactatagtatcattaaataccatagtattatttcaaaactataaaaatactacaattccaaacaaggccttaa

SEQ ID NO: 117012 - DNA, 1030 bp, Zea Mays
taggcccagccgcccagccagctcgtcggatacagaagactcctctcccttctctgcatccgttccccgccctctcgcgcatccaccgccaccgcgccgctccatgaaggacccgttcgaggcggccgtcgaggagcaggactcgccgccggactcgccggcgccgcccgaggaggaacccggcgccgcgggcctcgcggacgacgccgaggactacgacggcggcccgcccccgcgccagccgtcggcgccggcgtcgcacgcagcatcggccgcggccaaggccaagggccgggtccagagggagcagcaggaggatgacgacgacgacgaggaccagatggaggttgacctcgacaagcttcccagcagcactggcgaccctgacaagctcgccaagatgaatgctatactgtcccagtttacacaacagcagatgaaccgttacgagtcattccgaagatccggatttcagaaatctaacatgaaaaggctattggcaagcatcactggaagtcaaaagatttctatccctacatcaattgtggtatcaggaatagcaaaaatatttgttggtgagctaattgaaacagcaagagtagtcatgagtgagaggaaggattcaggacccatcaggccttgtcacatcagggaggcatacagaagattgaagcttgaagggaagatcccacggcgctctgttcctaggctcttccgctagaactgacacacatcaggcaggagtcgggacagatgtgggacaatcgttttccacgtaactgcggacctcgtcatacgtaccatgggaattgaaaacctgtgtactgtaaagttagccccccgttttgacttcatactagccgctgatgcgctgaataacaggtggtggctcctgtcacgagctagatgtcttgaaatgggtttggggaatgatttagcaagaacaaggttaggattacagggtcgggcatgcggctgggacctgcgagacgaggatctattcgaaatgcagtttgttagaatttactta

SEQ ID NO: 117013 - DNA, 1296 bp, Zea Mays
ccaccgcactctcctcacgcctcacctcgcccatcacaaccaactccgctctccaatgcccaccaccaccaccaccaccaccaccactaccccggccccactcctcgacatgccggagccttggacggacgccacggccaatgatggcgcggcgagtcgtcgtcgtcgtcgtcggctgctgctgctgtgcgccaactacgccgcgcttctcggtggctccgtggcgtccagcctgctgtcccggtactacttcgcgcacggcgggcgcgatcggtgggtggccacgctggtgcagtcggtcgggttcccagtcctgctcgtgcccgtctacgccggccggtccgcctcccagccccggccgttcgcgtggttcacgcggcggctgctggccgcgtgcgtggtcatcggcgtgcttatgggcgtgaacaacctgctcttctcgtacagctcctcgtacctgcccgtgtccacctcctcgctgctgctgtccacgcagctggccttcacgctcgtgctggccgccgtcatcgtgcgccacccgctcaccttctccaacctcaatgccgtggtgctcctcacgctcagctccgtgctgctggcgctccggtcgtccgactcgggcgagcgccccgacggcgggagccgggccaggtacttcgcgggcttcgcggtgacgctcggcgccgcggggctgttcgcggcctacctgccggtgatggagctggtgtaccgcagggcggtgtccggcgggttccgcatggcggtggaggtgcaggtgatcatgcaggccgccgcgacggcgctggcggtggccgggctggccgcggctggcgggtggcgggaggagctggcgcgctgggacctctcgccggccgcgtactgggccctggtggccgcgctggttgtgacgtggcaggcctgcttcatgggcaccgcggggatggtgtacctgacgtcgtcgctgcacagcggcgtgtgcatggccgccgtgctgaccgccaacgtgatcggcggcgtggtggtgttccgcgacccgttcggttgggagaaggccgtggccacggcgctctgcgtctggggcttctcctcctacctgtacggtgagtacagcagcacgcagcaggcgcaggacggcgacggcaaggtggcggcggcggccgcgtccaacggaggcggcggcgcggggcacaagagtgttggtagtggtggcgcaggaggaggcggaggtgcagttgaaaccgtttgatgagctcgctggacgctggcctttctcattgctacagcacatagtacatg

SEQ ID NO: 117014 - DNA, 1203 bp, Zea Mays
actttctcaatcctgcaaaacattgatcttgccatcttggcccttgccccataaatgtgaaaacttactttcacatgcttgttctaatgctagacacctggtgcttccataacaaaaggatatcttccatatagcaagtctgtgatgcacactaataaccaagaaaaaaacagtgtttatcaaagcaaaggcatcaatgtgaaagaaagtggcagaagctggaacagccgagagaagcttgggagaagtaagctaaatggacagggtgattctgaatctaatgagaacaaccataccgataacctgaaacatagtttgagccatcggtctgatgttgttggattgtcaagtgcaggggatgccaatgctagcataccttcacctgttgcaataagcaaaaatgcatgcaatctttcagatttcgttacaaagtatgaacaagctctattctttgtaattaagtcctacagtgaagatgatattcacaagagtgttaagtacaatgtctgggcaagtactcctaatggaaataaaaggcttgacaatgcctatagggttgcacaggaaaggatagcagaaaaaggaaccaaatgtcctgttttccttttcttctcagttaatgcaagtggtcagttctgtggcgtggctgagatggttggtccagtagatttcaacaggaacatgaacttctggcaacaggacaagtggaatggtttcttctcggtaaaatggcacattatcaaggatgttcccaatccacaatttcgccatataattttggagaataatgagaataaacctgtgacaaacagcagggacacacaagaggtcaatttttcacaaggtacagagatgttgaacattttcaagaacttcacatgtaaaacatcaatactggatgactttgacttctatgaaaatcggcagaaagtaatgcaggacagaagaggcaagctgcttactacatcgtttgatcacccattgccaaaagctgaaaaatctccagaaattaaaagccaaacacaattgataagtggcccagaagttggtagagccaagagtgatgaggggcagggcaacaatgttgggatggtacttgatacaaccaagaaaaatgaggagcagagcagcaatgttccagaaatactcgatgcagcctgtagtaacaaggagcaacccaacaaaattgcaatagaaggatga

SEQ ID NO: 117015 - DNA, 2061 bp, Zea Mays
atgcctaactggcgcctcgtttatctcgccctgcagcggtggacggagcaggctaggttgccggctgcccccggtcgtccctccttcgccgtcgagctggaggacacgcgtagcaacgccgggttcttctgcggcgagctgtggtgtggcctcatggagcccaagggcgagttggctcagaagcgtatccttccttctcgtttcgctcacccgtacgctattgaagaagcaatcaacagcttggaaattgatgctagcacgaaggcaagcaatgtcaacttgcctgctaagaaagacgcaagttcttcagatgcagtatcttgcatttcctccggcgatgcagctagtactgccaaggaaagtgaaatgaaccgagaaacttcttttggggaccaagggatgtattactatgggtattattatcctggttcatacggaggatgggatgagaatggctactttgttggatataatggcgtagaggtgcacccagcagtggttcaaactgacaatggttcatatctgtgtcatcttccgggatatgaaaatggatatgcttcttatagtcaggttgttcctggaggcattgctagtgtggatggtcaatatgtcagcaaagaaccatattattccactgcacttccaattcaggatcctaggacacctggcatttttgctcagccaattgcttacagaactgaactagcatctgcatactcatgggacccttctttcgttcttctggatggggttcagggacatccagttggtgtgcatcaaacaaattatgctgcaagaccaaaatattcttttaataagcatgttattccttcttcgaaagccacccgcagtgcaaaatccgcagcagatactgtcaaaggctcatcatcagctctagaaactgtaacaaatgctgtcaatagcagcccaccatcaaagagtgcaaataagacacctggtgcttccataacaaaaggatatcttccatatagcaagtctgtgatgcacactaataaccaagaaaaaaacagtgtttatcaaagcaaaggcatcaatgtgaaagaaagtggcagaagctggaacagccgagagaagcttgggagaagtaagctaaatggacagggtgattctgaatctaatgagaacaaccataccgataacctgaaacatagtttgagccatcggtctgatgttgttggattgtcaagtgcaggggatgccaatgctagcataccttcacctgttgcaataagcaaaaatgcatgcaatctttcagatttcgttacaaagtatgaacaagctctattctttgtaattaagtcctacagtgaagatgatattcacaagagtgttaagtacaatgtctgggcaagtactcctaatggaaataaaaggcttgacaatgcctatagggttgcacaggaaaggatagcagaaaaaggaaccaaatgtcctgttttccttttcttctcagttaatgcaagtggtcagttctgtggcgtggctgagatggttggtccagtagatttcaacaggaacatgaacttctggcaacaggacaagtggaatggtttcttctcggtaaaatggcacattatcaaggatgttcccaatccacaatttcgccatataattttggagaataatgagaataaacctgtgacaaacagcagggacacacaagaggtcaatttttcacaaggtacagagatgttgaacattttcaagaacttcacatgtaaaacatcaatactggatgactttgacttctatgaaaatcggcagaaagtaatgcaggacagaagaggcaagctgcttactacatcgtttgatcacccattgccaaaagctgaaaaatctccagaaattaaaagccaaacacaattgataagtggcccagaagttggtagagccaagagtgatgaggggcagggcaacaatgttgggatggtacttgatacaaccaagaaaaatgaggagcagagcagcaatgttccagaaatactcgatgcagcctgtagtaacaaggagcaacccaacaaaattgcaatagaaggatga

SEQ ID NO: 117016 - DNA, 867 bp, Zea Mays
gatccattcacaccaaactttgatagcataaaccatcccacacatgaatgacacattcacgtggcgctcgccgtaagaaatccgaagacggtaaagaaaaaaccagataaagcacaaatcaatatgccggcacagatcaatatctaagtagtaaaataaacgccaacagtgcataatcataaggttcaacgacataactgtttcccccagcaaccaaaataaacaagagtattttgttaacatcatcacgcttctggtccattagtcatggagaacatgcagaatcctgtcaccagcgttgccttcagcattacccaaggaggggtaatgaagcagcgccctcagcgatgcctcctcaggtagcatgccgcaacggtcaacaaccaccttctgcaaggtggaagcatgaatctctggatagataccaataaagtctgtaatatcttggatagaaggaaatttaacagggcatgggaagttgagaccggacacatcatcaagcatggggggcatatggtggccctagtgtcaaaggagactttgaagcccagcatacgggccttgatcctctcacttcttcttggttggatggtttgcagttttctggtatactcgttcttaacaggacgactgctcttctttcgatttttcttagcccgataccccaatcttctctggtaaaccttttggatcacctgccacttctttatctggtcttggtggctccatccaaaaatgtccgggggtgggcaatcaacaggggcaacatcagatagcagatcatccgaagtcctcggagtaggaagtgccaagatcaagcagggatattcagaattctcctccacctcatcaatctgcactgaggag

SEQ ID NO: 117017 - DNA, 652 bp, Zea Mays
gcgatgtttctctcgcgagaaaatcttcccttcggctgccaaattcttagagctttttctttggcttacggatcggcggtggtgggtggctgcagccagtgatctcgtacacgcagaagacgtggaagacggcgtctggcgagccgatgcacgccgagagcgggtactggcggccccgccctgacggctccgtcgacgtggtcatcgctcagagcactggcctcgccgaggtccagaagggttcatttgatgctgaaaagaaaacagtgacactccaaagcgaactcgtagggaatgcatcaaaggtgaagcagatcacgagaacttttcaggtggcagatggggagctctcgtacgtcgttcagatggcaacgatcacaactagcctacagccacatctcaaggcccttcttaggaggatttgaagttgaccggcaaaatctcctacaacgacgtcgctgcggctaaccacaaccgagggacacctgtaatacagagcatacttctggtgattactacgtagttattagtgaatgaacttacaggttaaataaagctcattttcaaaaacagaggttccgctgataggaactaccgtatatgtaaacggcttaccattcagcccatgctccacaaatcgagattattattt

SEQ ID NO: 117018 - DNA, 801 bp, Zea Mays
ggtgctgagtgctgagttgttgaccaacgggaagtccagtacccaagcggagccaccaaggaaaggaggaatggaagccaccggcgcagcctcgcagccctcggcgccgcagacaactcacccggcggtggcgccgctggccttcctactggggaagtggcgcggggaaggcgagggcagcttccccaccatatcctccttccggtacggcgaggagctcctcttctcgcatcatccctccaagccagtgatctcgtacacgcagaagacgtggaagacggcgtctggcgagccgatgcacgccgagagcgggtactggcggccccgccctgacggctccgtcgacgtggtcatcgctcagagcactggcctcgccgaggtccagaagggttcatttgatgctgaaaagaaaacagtgacactccaaagcgaactcgtagggaatgcatcaaaggtgaagcagatcacgagaacttttcaggtggcagatggggagctctcgtacgtcgttcagatggcaacgatcacaactagcctacagccacatctcaaggcccttcttaggaggatttgaagttgaccggcaaaatctcctacaacgacgtcgctgcggctaaccacaaccgagggacacctgtaatacagagcatacttctggtgattactacgtagttattagtgaatgaacttacaggttaaataaagctcattttcaaaaacagaggttccgctgataggaactaccgtatatgtaaacggcttaccattcagcccatgctccacaaatcgagattattattt

SEQ ID NO: 117019 - DNA, 421 bp, Zea Mays
tgccgtgaccgtgagtgactaaccgccacccattttccttgcgggcgtgcaggtacaaggacgggtcggcggcgcgcggcacggtgggcaccgactcggcgaccatcgcgctgtcgtcgtcgtcggcgcggccggccggcaagaagcggcggcaggcgcaggccaagctgcagggcgtcgtgctgggctgcaccacgtcctacgacggcgagagcttcctggcctccgacggggtgctcagcctcggctacagcaacgtctccttcgcgtcccgcgccgcggcgcgcttcggcggccggttctcctactgcctggtcgaccacctcgccccgcggaacgccaccagctacctcaccttcggccccaacccggccgtgtcctcggcctccgagacggcctgcggtggctcgggctcgggctc

SEQ ID NO: 117020 - DNA, 186 bp, Zea Mays
ggtgcatacactattcagaaattagtagtatgctcaatcacttgtaaaacagtttcattgttcgtaagtagcattctgctcgatctcttgtagtatgattgtgcaatttcccttatgcaaaatggttgatagtgacctaagtgagtaattaattattttaagggctcatttggactggaggaattt

SEQ ID NO: 117021 - DNA, 609 bp, Zea Mays
atgtcgaacagagctgtgggacattgggcgagcaaattctcggtgtggcaaggtggctcagagccaggggaagagtgggtagcagtgcgcaggacgagagcaccatcggagaacggggccgtggggcttggggcgcgtggattctcggcgctggcatgcgactcagtgccgaggccgcggggaatgggggcgggggggggggagcaggagtggcagtcgtggcgggacgagcgggcggaagcacatccaaagagtgcgttaattagtactagtattactcatacggcgagccaaggatgtcgaggaccaaagtcggcatcagcgggggccgggaagggcgcgaatggtcagtcggtggtgcagcggctgcaatcggagctgttggcgctgttgatgggcgacgacccaggcgtgtcggcgttccctggggcgacaacatgctccactaggtgggcaccatctcgggatggttcttatggattgtgctgtccctacgctattgctgtagcggaggtcgtgacggggtcaatgacgtggttcgggaggggctctcctgcatctccagctctgcgcagaggagggacagcgatgccacgcctaggcagatag

SEQ ID NO: 117022 - DNA, 2781 bp, Zea Mays
atggcagctcacaactcggctgcttgcagcctttgcgtcctcctcctcctcctgtccactgccactctctccgcctcaggttcccccctctgcaccaagccctcccctactcccgaaaacctgccagcagacggcgaggacgccctcccgctcctccgctccttggagctcaacaccggctacttcttcggaggcaaagatatcgagttcaaagacgagagcaacgtgacatcctcctactcctatgtcacccgctcattctctctgctcccactccacgccgatcggacatccaacaccgccgtcttccacgtcgtcgccatgttgaccctttccggcggccgcgaccgcgagaaccactatatgggagcccatcggcggcgacgccaccatcgctacgtgggcagtcactctgtcaccttctcctttgacggttactactccaccggcaccacttccggggagctttgcatgactggctcaggctcctatcccgaggagaacggctccaccaaacgcctccgcgacgtcgccctccacctccgcgtccccaacccatctagcatcacggaccccttcatcaccggcagcctcaagggcgctggcttcgacgccatctctctcgtcgcgtacgccgaaggcgacacctaccgctatggcaagcgcgcctcctgctcgccgctgccgccatcttctgccgcggccgcgaggggcgcgctccaggctattggcgccaacttctcgtgcgcgcacctgaaagaccatctggcggcatcttacaagctgcaggagcaggacggcggcggcgggcacgcgccggtctccccgccggatcggtgcttgcacatcagcgaggtgcagtgcgccgcggacgggtccgtgcgcgcatacgcgtcgttctccaacgacacggagatggggaggcacctgccgccacgcccaccattcatggtcaaagatgaggcggtcgtcgccgaagggcactgggattcagctcggagcatgctctgcctcagggcgtgccgtgtggtggtgggctcaggggagtccatggcggtggacgaggagtgcgacatgggcatgagtttctggttcccgggagtctggacgattcgggaccggagtgccgtcgccggcatgctctggaactcgagcaaagcgggtgatggctctggtgtcagtggtgttgtatcagcgtcgagcgtcgatggcagcatccatagaggcaacatctctgaagtgaagtacgagtacaactacacgatggtggaggaggcgaaaaagcattgtctccaggatcccgcatcgagcaagcccaagaagaaggttaaggggtcgttcgtcgctcctaataactacaccgatcatgacctcgagttccatttcttcgacaccaaagacggcacgatgggtagtgggatcgcctacccggttgctatcggcccggcgatggtctatggtgatcagctggccgccgacgattccttctcacggaaggccgtggtcgacatgaatacggaggagctgttgaacgtcagctacgacatacgtgagcatgttccacctgcgggctgggtgcgtcccaagaacgggtcgtacatgatcagccttgaagaacggagaatggcagcagagggtgtctttaatccgaagacgggcatcctgtccatgatcgcctgccgagagtacaacagctcgacgacggactgccagatactgatcaccgtttatctagcctcgctgatggacgggaaggcgcaaggccatggaaggggagcgatcagcagcctgagaaacaagacggcggcggaccctctcttcttcgagaaggtcgacatcatgttgtccgggatgtactccgagcagatctcggagtcgatctcgaggatggacttcgagagcatcctgctggtggtctcgacgacgctgccgtgcgtcttcaccgtcctgcagatcttccacgccaagaggagaagcgaggcagcagcggccacatcggtcaccatgctcgtcgtcctggcgctggggtacgtcgcgcctctggtggtcagctccgaggctctgtttctgagcaggaggaggcagtacgcgccgctgctgccgttccggagctacgtgccgtacgagctgagccaggcgatgctgagggcgcccactctgatcgccctgctgctacagctgcgcctcattcagctggccttgtcggcgcggaaggcggacgccgagcagagcaaggccgagtcgtcagcgtcgcgcgccgagaggagagcgctctggctgtgcgcgccgctgtacctgatcggcggagcgctgaccatcgtcgtccacgtcgtgaacgcgctccgagcagcgcgggagaactccctcaccgtccgcatcggcccggagccggcgacgctgtgggaggacctcgtgtcgtccgcggggctggcgcaggacgcgttcctgctcccgcaggtcgtcatgaacgcgctctcgcccggcggcgtcagggccggagccctgacgccgtggttctacatcggcagcaccgtggtccgcgcgatgccccacgtgtacgacgtgatcagggcgcagggctacgtgccgagctccaggccgtccatcgtcttcgcgagcccgcgttacgaccggtacggcgtcgcctgggacgtcatcgtgccgtgcacggcgatcgtgcttgcggccctggtgttcttgcagcagcgggttggctcggcggcaccattgttccgttcgcggaggaggttgggtgagtacgagatggtctctcctctttag

SEQ ID NO: 117023 - DNA, 2769 bp, Zea Mays
atggcgcggcctcagaggaccgacgcctcctccgcccatcaattccttctcctctccctcctccgtctcctgctgctgcttccgtccgccaaggccgcgtccttctccacgctctgcggctccgctcccccgcgcgacctccccatcgccaagcactcgcgctctgaccttccatcaccgccggcccacggcgcctaccggtctctcccttcgatcaccgccggccacttctccggcggccgcgacctccgcttcgcccgcgaccgtccctacacccgcgctctgaccttctacccgcgcggcggctcggccagggccacctccgaccccgccgctacccacctctccgccacgctcaccctcgcggggacccgcgaccgcgaccgcgacggcgcccgcccccactccgtgtctttcgacctcgacggctactactactcctcctcctcctcctcctcctccaccgccgccgcttccaccgcggaactctgcatggtcggctccggctcctacgccgaggaagacggcttcggtgtcgtcgtcctctccgacgtcgtgctccgcctccgcctgccgcacccgtccaacctctcccggcccttcgtcacgggcagcgtcgcgggcgccgacttccgtcccatcgccctcgtcgcctacgccgaggatggctacgcgtacggagaggccgaggccgcctcctgcccggcgccgcccgtcccagcgcgtgccgtaggacaggtgctcggcgcggggcaccgcacgtgccaccgcttcagggcgctgctccgaagctcctacaacctggagtacaggtccaacgagcacgacggtgctagcagcagcagcagcagcttcccgctgcggccgcgccacgggattatgtacgtcaaccagatacgctgtgccgccggcggtgccgtgcgcgcgtacatggtgttctacgccaaccaatcggtcgcctcaccatacacatacagcaactacacggcagtggggaggcgcactctcgtggtcggagacgaggcgctcgtcgccgacgggctatgggacccgtcgcgaacccagctctgcttgcgggcgtgccgggtggcgagttctggctctggcagggctcgtgccgacctacaagtccgcgagtgcgggatcggggtcagattctggttcccggccgtatggtcgatccgggaccgccggagcgtcgtgacggggacgatctggaacacgagcggaggagacaccgcaggcgtgatctcggtgtcgagaaccgggagctacaggggcatcctctccggcatcagctacaactacacactggtggaggaggccaagaggcactacgactccatcccggcgttgagcaaggagcgcaggggcaggttcccgggtaactactcgtacagggacttcaattttcagttcttcctggagaaacaagtattgcccgggtatgcctgggcggtcaccattggctccgccttggttgaaggggacgagttgatggctgactcggctttctctctgcatggagcagcagagctgaacaagcagaggctgttgaatgtcagctacggtttcgaataccaggttgcatctgtgaagcatgcgaatttctcgccgccggagatgccccctcggttgcaacgcatctccgcagagggtgtgtatgacattgagacaggctccctgtgtctggtggcctgccaagtgggcagcggttcatccgactgcgacgtcctagtgaccttccagttcgctccggtgaactccgtggagggagagcgcggcgttgggacgatcaagagcctgagaaagcggagcgaccctctgttcttcgaagcagtggacttcgtctcgtacgggatgaccgcgcaggaaatcgtgcagtccagctcgaggatggacatggagagcgtcatgctggtggtgtccatggcgctgtcctgcgccttcaccgccctgcagctgcgccacgtgagcaagcaccccgaggcgctcccggccacgtcggtcaccatgctcgtcgtcctggccctgggctacgtgatccccctcgtgctcaacctcgaggacaggtacacggacagccgcaggcggtacatgctccagctgacgagcgccgggtcgctggacctgaacgagttcatgctgagggccagcaccatgctggcgctggttctgcagctgcgcctccttcagctcgccctgtcgcggagatcgacgggtcaagcggggagcacgatctggatatgcctgccgctgtacgtcctcggtgcggtcgtggtctggatcgtccacacgagcgacggccaccaccacggtccacgagcgaccgcgctctctgtttctgccccttcggggccggcgttagtggacgacctcgcggcctacgcggggctggtcctggacgggttcctcctgccccaggtcgtctccaatgctttctcgggctccagggtgagggccctctcgccgtggttctacgccggcggcaccgtgatccgcgcggcgccgcacgcgtacgacgtgttcaggaagcacagctacgtgccgagctggaacgcgacgacgtatgtgtacgcgagccctcgcgacgacctctacggcgtcgcgtgggacatcgccataccgtgcggggctatgctgctcgccgcgcttttgttcctgcagcagcggcttgggggcgcgttcttgtgccgtctaaagagcagacggtcgggatcgggcgagtacgagatggtctccacgtcgaccacgattagctcacagtaa

SEQ ID NO: 117024 - DNA, 1626 bp, Zea Mays
cgcttctggtgagaaaaaaagggagggcgcaccacgcgcacgtactcccccctctccccccgcgcaggcgcagaccgcagatgccaaacccagccaatatacagcggccatcgaccgctcagtcgcgagaggtaccggccggcgcacgcaacactgcgatccgcaccccccacttcgatcggttaccaaggaggcgaggtgcctgtgcgagaggaaggaggacgatgcaggaggcggcgacgtcgtcgtctccgctgccgtcgctgagcaacggctaccagccgctcccgccgctgtacctggggttcctggccatatgggcggcgtctggcttctcctgggccttcaccacgtggaggaaccgccattaccaccaggcgaacaacctgcagtggatcctgtccctggtgccgctgatcaaggcgctccagatggcgctctcgttcctgttctggtactcgtgcgtgcagctccagacgtgctcgctgtggatgtcgttcggcgcgtacgtggcgggggtcctcttccagacggcctccttcgtctgcttcgtgctcatctcccacggctactgcatcgtgtgcgagcgcctctccatccgggagaggcgcaccacggccgctctcggctgcctcctgtacctcagcctcatcggctacaaggctgcggttccctatttcacagccattcttctcgtcaactacttcgcgtcgttctacgtcatattccggcgcacgtcccagaaccttgtggctctacaggagcagctcagtctcgtagaagaggaaggcatccattcgttgcatggcgcgctcaacacaaagtataccatgttcaagaggtttcagggaacgatgcaggtggccgcagtggcattcatcatggtatacatgagggctgacgacacgccagataactactggtttcgcgtgctagtgcgcgagtgggtacagttctgcatcttcatgtacattgggtggaacttccggatccctgaggcgtcactccatctgcctgccatgccccttgtgaagtcagcatgggagatcaccatgcctccgcctatttacagcgtggagatggacgcagccgatttcaagggtctagtctcggatcagtggcatgttggagtgaggacgactgaagagtcaggctgttctgcacaacaaccgctactggtgctggttcagaacccaacccaacgacggcttgtccttccggtacaagtttcagttaggcacaaccaggtataaagttcgtgaaaccgggttgctgaagattgccgtcgaccaactgacgcgcgcgctacaaagctggcgcaaaatatagctcagttgacggagaaatacttcttgcgaaagaatcgacaatgtccatggacgtacgaacagtcagacactcacagcttcagcaatgaacgaaccacctttcggcatcttttagaccttttgttttcctccttggaagaaatactgaaaaggtgtatagatatagaaatggaaaaaatggtttgtagctagattggattgaaaaacaatcttatttgccagacaattagtggaaacaagatcaaccggaaggttgatgttcctggattgacgcgatggattaactgttgattatgct

SEQ ID NO: 117025 - DNA, 2326 bp, Zea Mays
ggccggggaccagggaaaccacttggggcagcctcgaggttctctccgacaatgggtcctctcctccgcgccgccgcgctctccgtcgcgctcctcgccctcgccgccgtgggcgaggcgcacagcgccaccgaattcctcaacatcttcaagccgcggaacgagcacgactacttccacaacgcgaaccaggaggaggatgtgatgccccgggccagcgaccagcagaacctcataacggcgccggtgaccaagagcggcctcatgaaggtgccgccccggtccgcgcccaccgcggttgcgcaggacacggtggtgctccccgtggacaacgccgcggggttccccggcgcttggtccatcatcagcgagaacgcgggcgtgtccgcgatgcacctggtgatcatgcggagcgacaaggccatcatgttcgacacggtcaccacggggccgtcgctgctgcggctgcccaaggggaactgccgcctcgatctccgcagcaagcaggtcggcgccaaggactgcgccgcgcacgccgtcgagtttgattacgcgacaggcggtgtcagggccctcaaggtcttgacggacgtgtggtgctcgtcgggcgcgctcgacgccgagggcaacctggtgcagaccggcggctacttcgaaggggagaaggttgtgaggtacctgagcccatgcggcaactgcgactggagggagttcccagggagcctggccgaaggaagatggtacgggacgcagcagctgcttccggacggccgctccatcgtgctcggtggccggcgtgcgttcagctacgaattcgttccggcggaagggcagtcgaatgcccaagccattcccctccagatactccgtgacaccaccgacgacgtggagaacaacctgtacccgttcgtccacctccttcccgacgggactctgttcatcttcgccaacgaccgctccatcctgttcgaccccaggaacggccaggtcgtccgcgagttccccgtcctcccaggcggggggcggaactaccctgcctccggcatgtcggcgctcctgcccctcgacctccgccgcggcgacgtcctcagtcccgaggtcatcgtctgcggcggctcccccaagaacgccttcacgctcggcgagtccaacacgttcccgcccgccctcaaggactgcgcgcgcatcaaccccttgaagcccgacgctcggtgggcgctggaccagatgcccgtggcccgcaccatgggcgacctgctgatcctgcccaccggcgacctgctcattctgaacggcgcggccaagggctgctccggctggggcttcgggcggcagcccgtgctgagcccgctcctgtactctccgcgccaggcgcggggctcgcggttccgggcgctggcgccgaccaccatcccgcgcatgtaccacgccaccagcgcggtgctgcccgacgccaccgtgctcgtggccggcagcaacaccaactcggcctacaacttcagcggcgtcgacttccagaccgaggtgcgcgtcgagcgcttcaccccgccgtacctcgccccggagcgcgcggccaaccgccccgcgatcgacgtggccaccgtccccggggacggcatggcgtacggggccaagttcacgttccagttctcgacgcccgtgcaggccgtggccgagcccgacctaaaggtgaccatgtacgcgccaccgttcacgacgcacggctactccatgaaccagcggctgctggtgctgtccgtcaccgcgttcgcggccaacgggcagaggtacacgataacggtcgacgctccgggaaagcctgagctcgcgccgccgggatactacctgttgtacgtcatagcgaaaggcgtgccgagcaaggccgcgtgggtgaaggtacacaaatgagaacgaaggcggctcggagacgaatgccagtcgcgtttggcacgacaatacacaagtgtccaccggagtagctggacctctcacaaccgcacggtaggaggacgtgcggcggtggctgcgcctgtgcatcggatttcgtttgttttctccatgaattttgcatcgcgtgttagtgctccctaatatttggggcaaaacatatgtttagtagagggatatgggtcgactcagattaagtaattagcgagccaaatgtggtatcgtcgtccggttattgataatgtatctgctgtggtataaatgtatctgctgttggtatatatacattatgaaatcacattttaattttctatgtagagaccgacgggccattttatcctcttgtacatcacatgtgtgaaatgaaagtgtgggatct

SEQ ID NO: 117026 - DNA, 1086 bp, Zea Mays
tcccttccattttataagggtggtctcgtgcatcattcaatcaactctctctctctctctctctcccactcccacacacatcctgtccctctctctctccactctacctagctttgttcatcttgttctcccaaaagtcttctttctagctaggtcttcggtctcggacatgagcgggagaaactttggggacagcatggagttgagcagcagtgggagatcgtctggctcgagaaggggcaagagaggaggcggcggcggcggcaccgacaggcccaagcagccgcagcgagggctcggcgtggcgcagcttgagaagattaggttacagagcgaaatggtggagtacttccatcctctcggccagcaccccagcttgatccacagaacgggcagcctcagcttggaggatgcacgggcgtcgacgtcctcgctgtcgtcgtcgtcgccatcttcctccttccatgctaccgccatctcgccgccgttctccatccatccaaatctcgcgatgccatacggagagagagacgtacggtacagtgaattccaagctcccatcataagatcaccgagcagcagtgctgtccatggcaccccacattacgcgcagcatcctaacaacatcacactgtctctcttcgaaccacaggaatccgcccgattgaagggacatcacgatcgaagtcagtcagcagattcaacaagcttgaactccgacgatccacaggacgtggaccttgagctcaagctatgatcctagctcaaatgtttcctcctttatttctcctctccttcgatgtgatgtggtagatttgttagtcttcatgggccttttcgcttgtggtgcagtaaaggtctgtttggtttctggataactgtcacactttgcctaacctttgacagaaaagttagataaagtatgacaagttagacagcgaaccaaatataaccttaagtttctgaattggtgccactagctagtcacaaactcacagtgcaaccaatgcaagaggatttgccgccttttctgtaatgatatgatgcctgccagaagagagaaatagtaccgggcttttttttaat

SEQ ID NO: 117027 - DNA, 853 bp, Zea Mays
agaccactcatcccgtcatccgtcatggcggcatccttcctcaggcccttcctccctgcccaacccctcctctccgcccgcagaccccacctccccgccgctcccaccacgagcaccaccaccgtgcgctgcaccgccacgcccaaaccggcaacctcgacgccgaaacccatcagccaggaagaggccaatagccgagagcagcaacgcccgcaagaacccaacgccgccgccgctccggacgaggcgaacggcaaccccaacagcatcccagacgaggagaccccggcctccgcggcggtaaccacgtcgttcgcggtggcccggcggctgccgtccgccatctcgccggaccggcggccgcggacggcgctgacgcaggaggagccgcccaactacgagatcgggtggaagcgcagcaagaagctgccgctggagaagccgcggggctgggccatcgccgacttcctggagaagctggagggcctgctggcgcgcgggcggtacgggtccgcgcagctgctgggcaccgtggccggcgtggtgacggagcgcgcccgcgaggaggcggaggtcctggcggccgagggcggcgtggaggagcgcgtcgtcacggagctcttccgcgtgctgcgactggtggagatggacgtggagatggtgaaggccgccgtgaaggaggagaccgtcagggagcgcgtggagacggcgcgcgcccgctgccggcaggccatcctcgtcgccctctcgctctgaagctgatggcagttatactatacacgccttctttttaataacaaaataatcagccgaggttagcgtgatggtattggtttattcggttactggaaat

SEQ ID NO: 117028 - DNA, 1546 bp, Zea Mays
cacaatgcacaaaccgaccccgcccagcaccagcagactccctcccacacatcgagaccacagaccagcggcggcgacccaaccaaccaagcacaaagcaccgcgcgacaagacgacaaggctcccggaaaagagagaaaaaacaggcgagagaaattcgttaaaaatcctcccggtcggccacttttattaccagcactctagcagcaagtcgtcgctcccaccccacctcaccatctccactccaaacaaggggaaggcgagcgacagacaaacccaccctatcgcccctcctctgtctcctctcttgcccacccgccccaatgtcgccgcccctcgagccccacgactacatcggcctctccgccgtggccgcggccgcgccgccgaccccgaccccgacctcctcctcctcttcgtcctcctcgccggccccccgtctcacccttcgcctcggcctgccgggctccgagtcccccgaccgcgaccgggactgctgcgaggacgtcgccgccacgctctccctcggcccgctgccggcggccgccgccgtctccgccaagcgcgccttcccggaccccgcccagcgccccggcgcttccaaggctagcgacgccaagcagcaggcttcccccgccgcgccgccggccgccaaagcgcaggtggttggatggccgcccgtgcgcaactaccggaagaataccctcgccgccgcgaccgcctccaggagcaaggcgccggcggaggaggccgcgtccggagctgggcccatgtacgtgaaggtgagcatggatggcgcgccctacctcaggaaggtggacatcaagatgtactccagctacgaggacctctccctggcgctcgagaagatgttcagctgcttcatcgctggtcaaagtggtctgcataaatcatcgagcaaagacaggctcactaatggctcaaaggtggatgctctcaaagatcaggagtatgtccttacatatgaggataaggatgcagactggatgcttgtcggtgatcttccctgggattattttacctctatctgccggaagctcaaaatcatgaggggctctgatgctgttggaatagctccacgaaccgtcgagcagacaggtcagaacaaataagctttggcctttgcctgcatccaaggaagacatctgagctagctgggagactatgttgaaggctgaagcctgaaatagttgccgggaatcgtcaaaacccgtcaagtgtttagtgtagttttcacgtgtccttgagacatgtgcatttgtatgtctgtgacgtgatccgttagatcgtgcaatcgtaggttgctgttcttgtgccctttgaaggccagacagatcagggagctctctgcttccttagtgcacttgctttgcagcattccttgttattctactctgaaatcatacatcatgccacaagaaccgatggttcgtgatgtcaagagagctgccctaattgttccattgtaacctcgtaattgtgttcttccgcaggagaaattggtgctgcactcagcttcctacca

SEQ ID NO: 117029 - DNA, 1823 bp, Zea Mays
cactcccaaattcatttttctaaattaaaaagggggaaagggaaagattatcttctccgtcccctcccccctcccctcccgtacagctgtctgtctcggagcagcgggcagcggcggccggcaggcaatgcaatgaagaaatgctcggcgttggcctcggcgtccgactgatggtagctgttgcccctgcgcctccagttccagccccaccaggcaaaccgccccttcctctctgctcctctctccgccaccgctcctccggctggtggttctccaacggcgacgcccatggaagagacagcaccgccgccaccacgagcagcagggcgacgaggcggaagtggtggtccgaccccgacggcagccaagaagactacggttcctcttctctagaggaggacgagtacggttacggttacgactacgattacgaggatgaggctgcgttccccggatttggaggggctggggagatgttcgacgagccctggttctccaaggtattcaagacgtacggattcatgctaccggtgatgcttgcatccatgtttgctgtaacagggctaaaggcctttctaatggccatggcgatcccgctcggtcagtcggccatatcatttataattgacgctgtatggccaaggagaaaaggcaaccgtgacgacaggtggaggagaccagtccaagaggaggaggaggaggaggaagatttccctagggacgccactgactttgcaacaggtggtcgaggcagatacagcagcagctattatgaggggaggagagggaggcagagctaccagtcaagtgtctctaacgattttgctgatgctgcctcagctgctgttggagctgatgatagcaccaagagcagcagcagtggagatggcggaggcaacaaaagcagcggtggatatggaggatgggatgagcttctggacaacaataacaacactgctgctgcccgggaggcaaagaggagcagcaactcattctcagctggcaacacttattacagcacgaaatcgcggccttcggcgactggggaggcagatgcggattataccgccgctggcggtggcggaagagcggagcagggagtaggagctcctccggaaagaatgagaatgagacgacggcgggtgccgagaacgatggggctgggcagtaccaggtacaagcaggcgccactcttgatgcgcctgttggtggcagtattcccattcctgggatcatggttcagtgtgctctgaactgtgctccttcgttccaaattataagacgttttggttgtcggctttctctagattcatagctttttgctatgtacttggatatacactatgtctacaaacgttataaaagcaatgtgtatagaaatgtcataatttggaacaagcaatgtatatagaaaagtcatgatttggaatggagggagtagtattatatattagcccatgttggctcactcatgaattcacatacaagtaaccagtggcagtaagcaaaagattatgattgtgaaactgccttcatccggtctccaggcagtcgcagaagtttgattcaatcataggctggagccgaatggaatcagaagtgaagctgtggattggaaggaagacaagtgtcgtgaagaagatcgattgattcaggcagtgtgcctgcagcatcagctaagcggaaaagtatgtacgtaccctgttgctctagcgcaatggttttcacttgcactatatggtagtgatacatagacagttgccttgtcattttttttcgtgtcacaatgaaatggaacagtaaagaaggccttcgttttatag

SEQ ID NO: 117030 - DNA, 841 bp, Zea Mays
cactcccaaattcatttttctaaattaaaaagggggaaagggaaagattatcttctccgtcccctcccccctcccctcccgtacagctgtctgtctcggagcagcgggcagcggcggccggcaggcaatgcaatgaagaaatgctcggcgttggcctcggcgtccgactgatggtagctgttgcccctgcgcctccagttccagccccaccaggcaaaccgccccttcctctctgctcctctctccgccaccgctcctccggctggtggttctccaacggcgacgcccatggaagagacagcaccgccgccaccacgagcagcagggcgacgaggcggaagtggtggtccgaccccgacggcagccaagaagactacggttcctcttctctagaggaggacgagtacggttacggttacgactacgattacgaggatgaggctgcgttccccggatttggaggggctggggagatgttcgacgagccctggttctccaaggtctggtacatacgtattgtgtaaaatttctgctcctttccttcctttctggtaccctctgtcaatatgccatcaataatttctattttcctgcgtgcttgaaccttcatagtcatagactcataggtactaatgttacctgtctggacagtggatggggaccatagatcctttgccactcattcttagttataactaaaaatgcttcaaattaaatcaaatcgtcttccatttttttctctctctggtattaattcaagcaactgtataatgcttttgcctggtagatctaattaaaccaaatctctgcttataattctctgattgggatcttaacttac

SEQ ID NO: 117031 - DNA, 399 bp, Zea Mays
atgaatttcaccgaggacgtcgagtggcgccccagcttcagccgtgcctacagcaaaaaagccatcctccagctctgcgtcgggcgccgctgcctcatcttccagcttctccacgccgactacgtccccaacacgctggatgagttcctcagcgaccctgactacacattcgtcggcgtgggcatggctgcagacgtcgagcagctcgagaacgactacgacctggaggtggcgaacgcggaggacctggccgaactcacggcgaaggagatggggcgcccggacctccgcaacgcgggcctacagggcatcgcgagagccgtcatggacgcccacgtcgagaagccacagcgggtgaggacgggcccctgggacgcatcatccctctccgacgagtag

SEQ ID NO: 117032 - DNA, 996 bp, Zea Mays
ttggaaacgggaggtcgcccccgcaccgcgggaatagaagcgtctctccgacgagcagctgctagcctcattccttccggggagaggaataactctctctcccgtcgccgggatcccgccggtgacaatggtgaggtggctgccgccgccgccgccagcggacggcgagatacccttcggacacgacgccgtcgccttgtccttcttcgtggcgtgtgtggccgccaccgtcgcgctcgcgtcgtccatgtgctcggcatgcggtcgcaagccgaaggcggccacccgtgcagacccggccgcttcggaccagtccaccgggacgggctcgggctccgtctccggcggcggcggaagccaggaggctagcgccgcggaggcggaggaggaagtggtgagactgtcaccggagctggcgatgcacggcgccatcgacccggtgacgctgccgtcgtcgacgtcgaagcggcgcctgtccatcagcgtgagcaagaagctgagcatgaacatcccggacaagctgcggctgagccggcgggagcacaaggaccaccaccacaaggtggagtcggaggacacgctgtggaagaagggcatcatcctcggggagaagtgcaggatcccgggcgagagggaggcggagaccggcgagcccgtcgaccccgccgacgagatcgccgccggcagcttccgccggtccagctactcccggcccgtgtcgcggtcgagctcgttcgccgtgtaccaccaccaacagcagcagcaccagcacgacaccccggccgccttgcatgcctcggattcttgacagcccctcgagacccgagtataaatgtataatactattacgtacgtgtgtaggcgtcgaaggggagaaggatgctactatgcctacgggatgtaatgtgcattcaaattcagatgtaattgctctataattctactaggtgtgtgcccgtgcgttgcaacgggaacatataatatcatgataactta

SEQ ID NO: 117033 - DNA, 1987 bp, Zea Mays
ggcctccccttcctctagcagtggcgaggcaggaaggcaggccgggtgtcctgcctcccttgcgcgcgctctcacgacccatcccgtcgtgcgtcatcgagctccggcgggcgggccatgcacgcgtccagctagctcacacagcgccgtctcgacctgctgccggtgctccacccggcccgcgtcaacatcacggcgggcgggcgcgcgcgtgaacggtttcctctccgcatgaccctgtgatggtcggtgggttcctgcggcgcggccacagcctcgacaggctcctgtcgaggaggcgccgggccgtttcgcccagcccctcgttctcgtcctcctcctccacgccgtcgtctccgcgtggcagcagcgtcaggagcggcatgatggcagaggacgacgacgacgcgcccaccaccgtggcggcgccaccgctgcagagacgggtgctgtccaggagccacggctcgcgggccactcccggccggtcccaggacctgccgccggtgccatcgaggaccgtccgcgacagtgggccgccttcagatttagatttgatgaaggataagttcgccaagctgctgctcggggaggacatgtccggcacgggcaaaggggtgtcctccgctctcgctctctccaacgccatcacaaatctcgcggcctccatattcggggagcagcgccgcctcgagcccatgtccgcggagcggagggcgcggtggaacaaggagatcgactggctcttgtcggtcgccgaccacatcgtcgaattctctccctcgcagcaggtgtccgaggacggaactaacatcgaggtgatgggcactcagcagcgcggggatctcctcgtcaacatccccgccttgcgaaaactcgacgcgatgctcctagagtatctggacagtttcggcgaggcccaggagttctggtacgtggcgaaggacgcggacgggggcgaggacgacgacgacagcacgtgcgacaaatggtggatcccgacggtgagggtccccgccgagggcctgtcggacgcgtccaggaagtggctccagcaccagaaggacctcgtggggcaagttctcaaggcggccatggccatcaacgccgacgtcatcgcggagatggagatccccgaggagtatatcgagtccctgccgaagaacggaaggtccattcttggagactccatgtacaagatcataaccgacgacgtcttcgaccccaacgagctcctgcagtccgtggacctgtcgacggagcacaagatcgtggacctcaaggaccggatcgaggcctccgtcgtcatctggcaccggaagatcagcaacaagctctcgtggggccccgccggcgtcagcctggagaagcgggaggagttcgaggagcgggcgcagaccgccctgctcatcctcaagcacaggttccccggcatccctcagtcggcgctcgacatcagcaagatccagtacaacacggacgtcgggtacgccatcctggagagctactccaggaccctcgagagcctagccttcgcggttctgtctcggatcgaggacgtcctccacgccgacgccgtcgcctgcgaccccaagcgcaccaagtccaggaggcggcctagcctagagtgtgacgccgccgccgaagccgaagccgaagccgaagccgagacggcgcaccacagcggttccgtgcactggcaggaccatcaggatgccgaggacgacggcggcgagaagcatccggacggcaacggtaggaagctgaagaagctccacagggtggcgaccaagaagtttctccacacgcagaagatcgacggtgtggccggcgggctcaagagcttcgcacacaggtagcgtttttgcgtgcgtgcgtgcgtgcaatggtgccatactgtttggaaacgaagaacgtgtgtaaatagttccaagtttatttatatgcaaaaataggaccacggggtgcgggtcttgcccgagggatg

SEQ ID NO: 117034 - DNA, 2594 bp, Zea Mays
ccaggcaaaacaaaaaggcgctagagctgtttgtgttgctttatggtgattgcaagtttcctctgctccccatcgcccttttctctggcgcctctgactctctgagctgttcccgtctgtttcctcttgcacgcaggcgcggagcgggtgtgaggctgcagtgcctgggtggagctcgcgtggtccctgcagcggccgcaatgcctgccccacgcgcctgaccatgcattccaggctgctcaagaggctcgcgaagaggatcatgtgacggcaccttgccgtcgtttcgaccatcgcgcgcctgcgggacggggaagcatgcggaggatggatggcttcatctcgtcgtcgttggcgctcgtcgtgctggcgcttcatcttagcgtggatggctgctcggcggtcaaccttgaagggtcgatactgctcaaattccagtcaagagtggaggaggatccgtatggcgccatggtaggctggagcccgcgcgacagcgatccctgcagttggaacggcgtgcgctgcgttgatggcagagttgtaacgttaaacctgaaggatctctcattaagaggcaccctaggtccagagctaggaactcttagccatctgagggctcttgtactctccaataacttattcagtggatcaatacctaaggaattgagtgctcttacaatgttggagatactggatttaagcaacaacaacttgagtggggaagttccacaagagattgcagaaatgcaatcacttaggcagttattgctttccaataactgctttcagtggcctctgacccaacattcctatgggaactacgatcaggaaaatgatttcaatatttatgataatcttgggaggggtaatatgaatcgaagagctgagaatgggttggaatctggttcttcttcacaagagaacaaaaaggacactagcaacctttctgctcaacttccttcacaacacgaaccaagaaatacagcatcacaccttacccagcgcaggttacttcaagatagcaatcttgctgcaccttctcctgcaaatgcccttgttccagctgctgttcctgttccttccactggaactggttcgttttcagcatttagtcccaacaatgcacctgtaccagctgtaaattcaccaagtagtccaccgatggtccccagaactacctccgaagaagatcaagaaacaaggtccatcaaatggctttatgtcattgtactgccactggtcgcacttcttatgtttggcatcgcatgtatgcttttgctatgccgcaccaagtcagggacaacaataggtccatggaagacagggctcagtggccagctccaaaaggcatttgtaacaggagtaccaaagttgcaacgctctgagctggaaggtgcgtgtgaggatttcagtaatattgtggcaagctacccacaatacactgtctacaagggaaccttatcaagtggtgtggagatagctgttgtatcaaccatgattatctctagcaaagattggtcaaaacattcggaagggcgattcaggaagaagatagactcactgtcgcgaatcaatcataagaattatatcaatctgcttggatactgtgaggaggaagagcctttcatgcggatgatggtgatggaatatgctcccaatggaacgctatatgaacacctccatgtcgagggatttgatcctattgattggaatggtaggatgagggtaattatgggagtcgcatactgcacgctacacatgcatgagctcagccctcctataacacatccagacataaagtcaagtgctatattgctatctgaggatggagctgcaaagatagtagacatgagcgtttggcatgaagtatattccagagaaaacgtgcccaacgatgacgacttagttgatcacccggaacgagtagctgcggatccagctgggaacatctacagttttggtctactcatgctggagatcatctcaggaaagcctccatattccaaagaaaagggttcgcttttgaacttggctttggagtgcattagggataaccgaaacatgtcttgtttgcttgatcctaacttgaaggatcacaaagaaaaggacctagaaatcatatgtgatttgctctatgaatgcatccaaagcgatccgaagaagagaccaaccatgagggaggtcaccactagattgcgagaagtactgtcaatttcgcctgaggctgcaacgccccggttatctccactctggtgggcagagcttgagatcctttcagttgaagcaagctagcgaaaatgttctttgtttgcagcaacgaggtacttgtgcatattgtaatgcaaccctgtacatccctgttgtatgttttcatcttgtgttgtaactttggtgtctgcgtgctacaattttccctccccagtgaattcagttgcctggtatgttttctcatttgttcctcgctttccctatgtatactaaacatacatggtgtgaaagtagaaaataaaaaacgcttcatgccgtccaagggctgaatgtaatcagcaaatgtatagtgttccatagttttctttgattcaataactagtaat

SEQ ID NO: 117035 - DNA, 1419 bp, Zea Mays
ccctgcccttccccaccgcacctacgtcgtctccaccgcaatcaccgcgacggctttaccatgtccccacaatcaccgcagcggccagatcccacctcggctactcccgccctggctcctcgccgcaatcaccgcagcggccagatccgacctcgcccagcccatggcacacgcccgagctgcccgcgtcccccaaaatccgccccagatcctccatcgtcgacagagcgtgcaacctcaatcttcaccacatcgcggcgattgcgtccacgccccccgcctcgcgccctcgtgttgaccgccccgcccccaccgcgtacatcaagccgaggagccaacaccgcacccccgcgtgcgtccctgcccccgcgcagtccggaggtccgtgcccgctccacccctcagagatttctccctcgccgaggagctggaggcgacggtggcgtggctacgtcaggagaaggaggttgcagaggacgccacgcgctacggttccgctccagtgtcgcgcactcctcgcgcctccgcttcccgtgggcgtccaggtagctgcgcctggagctgcccagaccgccgctgttgctgctgaatgagctccgcgcgctggcgttgttgttgcaccgctgcatcctgtcgttgtacccgcggacacgcaggtccggccatggcttcgagaacgcgcggtcggcggcgtcggacgcgccgtccctgtgccccgcggcgcgacggtggatcaggccctagaggctccacgccttgcgccaccgcggcggcttcttcgcggggctatggaaggcagcgtctaggctggcggagaagtcctcgacgagtgagttggtgctgaagcagtggtcgaaaaggtcttcggcgtggtggaagtggtagaactccgagctgcccattgcaggggattccttgccgtttacaatggcggccggtggtgcgttcattggaacaggtacatgtcgacgcatgtaccagaagatcaagcatctttcttagctgctggagaagcatttgccgagcttctgcgttttgagcatcacggacagcagttgatggatggttcgttaacttgtgaggatgagtaaccactcctttttggaaacaagagttgcacacatcaaaatctggacaaatctcgcaccgccagccttgaccagattcaatatcatgactgcagacattgcacgtagtgacaaatgctggtgcagttggattgtgtaggtggtacaacaccatcattgatgaatgcttggcgcatcgaagtgtgtcatactgataatgatttccttggcaaagactaaggaatgcctgtctggtgtcaaagaactcactttccaatatgtcatctctatctttggtatctttgggcaccccaaaaatatcaaccggatggagcatatgtgtgtctctatt

SEQ ID NO: 117036 - DNA, 683 bp, Zea Mays
caagctaacggaccactgctgtcattgctgcctgggaccgggagcaagagaacgacgacgaagagatcggctgaacaagagggtcgcgtagagccatgcttgcgagcgcgacgagggcagggacgtcgtccaccaagcccggcctcgcggagggcgccgtccgcagagccagagccagagccagagccggagacggcggcagcggcacccccatcgtcgtcaccgatgccgggcaggaggtcaccgtctcgcagttcgtcgcgcagctagatgaggcggcccggcggaggctggacagcatgcaccagaggctgaggctgctggagcagcagatggagacgctggaggccgaggtcggcaaagccagcagcagtagaattgacacctacgcctagttattagtagttactttgctaggctcctggcaacatcgatccagcagcagaccgcagtccacagatatttttttctcgattaaacctttctcatgtacatgtataagcgattatggattatgatccaaatacttcctcacaaagtaggactctaaataaattttagttcaaaaatgaatagaaaagagacacgattttaatccgatccttaaattttatattgtaaaatttaaaacgtattgtcacccatatgtacatgagcgatgattaataatatatatgattgac

SEQ ID NO: 117037 - DNA, 360 bp, Zea Mays
tcacaagacagttctgacattaaggtaaatgatctactatttgagttgaaggttatgaagttaagtttgcctgaaagaccaatgtcttctatggagatttttaagtatgttcaacaaatggattcgtatccaaaatatttcaatcacttatcggatattatatattgtgcatgtgactgtggcatcggctgagaaaagcttttcaaagttaaaattgttgaagaactatttaaggtaaacgatgtctcaagatcgactcaacggataggctactttatgtattgagaaaaattattaaacaaggttgatagcaacactattatcaatgaattcgcatcaagaaatgttataagaaatttt

SEQ ID NO: 117038 - DNA, 982 bp, Zea Mays
atggccgccaacctcccggacgccgacgccgcggggttcaagctgttcggcaaggtcatccagccccccgacgcgcaaaaacgcggggcggacgagggcgacgacccgacgccacagacggcccttcctcctcctcctccccctcccccgcccccgcccccgcagcaggcgcccgcggctgggggtcccggcgccgagccgctgccgtgcccgcggtgcggcagccgggagaccaagttctgctacttcaacaactacaacgtgcggcagccgcgccacctctgccgcgcctgccgccgctactggacggccggcggcgcgctccgccgcgtggcctccgcgtccccgggccgccgcaggccgcgccccaccgcccgatcggcgcccgtcgctgccgccgcgtcgtccgcccccgcagccgccgaggaggattcttttggtggccaaaaggatgctgccggcctgctctgcgaccgcgagagagttcagtttggtaggcagtcaaaaaggccgccactccagcacgccagggtgacagagcagtgcagatgcaggagctctaaaaaaacatgcttcatcaccgcttccaacgagctcgtcagggtcctggccaaccccacaggcgtcctcaacccgtcggcagcgtccctcctcgcgccgcgctgcgctgcgctccgagctggaagctagcggaggcgtcgctgcgggtggccacgcggggctgggtgttagccgctgcacaggcaactaccgtgctggcatcagacgacgccgctgtagcagctgtaagcagatgttcaagagtgttccaagcagaagaacgaagtgcggctgcgtcggcagaggcacgacaatgtccgagttactggaccagagtgggccatgtaagcgtgagttgggctagaccattagagaagtataaaggggaacaactgtaggggcatcaaacaacaaaaagctaaaccgcaattgccttcgtcgc

SEQ ID NO: 117039 - DNA, 211 bp, Zea Mays
atctatccgaccacatggcttattactactagtaccggggccgggcgggtggtcacgcaaagaagtcaggcgcatgaagcaaaagtgagaagagcggggaggcgaggcgatgaccatctccactccctctcctccctagtagtgtataaaaagccggcgccggccgtcgtcccctacccacccacccaccccgggcccctcctcccgctcc

SEQ ID NO: 117040 - DNA, 1742 bp, Zea Mays
acgtcgaccagtacgtcgaaaaggaacacgtcgcccccatttcccacccgctttctccccctttggcctccccccctctctctctctcatctcctgccgataagaagcttcgccgccgtctcctctttctccgtcctagcaaaatcctccccgtattgagagccaaagaagaaaaaaaaaaaaggcaggaggccggcgaactacgcgaggaaaaattttctttcccgggaggctcgggagtcggacacgccacacgctttggtcaaaatcgtttccggttgttagcgcggctgctgctgccgctgctgtcgggggcgagcaggaaggggagcgaacgagcttgggcagctcaagaagaggggacgggggagggagcctgtggaaggcacctgagtacgcgtgaaggagcccgcgcgagagtaggggggaaaccaaatcgagagacatggactcggagcactggatctcgcgcctggccgccgccaagcgttactacgcggcgcagctcggccgcgtcgacgatgtgcccgggatggggacggaagaggtggagatggaggtggaggacgacggggacatggagatggagttggagatggcgctggagctcggggacgcgacgtggccggaggtcgcctgcccctactgctacgaggaccatgacgtcgcatccctctgcatccacctcgaggaggaccacccctacgagccccacgccgcgccctgccccatttgctcccaaaggattacaagggatatgcttaaccatatcaccatgcaacatggttacttgttcaagaatggtcacagatcccgtagatttattgttccagagagccatgcgatttcattattgagtcgagatctacgtggtactcatttacaggctcttctagggggtggtcatggccacagatcaaataacgcagtgaccacaaacatttccagtgatcctcttctttcatcgtttggcctgagcttctcagcatctgatgcaccagaaccatcaaaatcagcatcttctattccagacggtaccgcaatacgtaaggagacaccagttcagccttgggaatcaaggtttggagttgcagtatgatagttcagacttccgcaaccaacgaactcttctctttcaatggaaataatcttagtcttaaattgaattcattgagcaagcggttctttgatatttccagcacctctgcttaaaactaaatcacaagaagggtacactgacagtattgattcatctctcacgagcgaggaaagggagcaaaagcggaaacaggccaccgggagggcaacctttgtgcaaggcctagtgatgtctactctattcggagattgatcgctcaagcagccctaggttcttgcacttgctagatcggctctttctcctgcctggtccgtcgtcagatagtgctccacccggttcggactctgatggcagggaaaattcgccccaggaaacttagccgcgttcacctttttttttttcagaaaagtgcgccgttgattctagcatgatgcagcttgatttaagctagctgttgctgtacctgtacctttgtttttatcaatttatcggccagcaattcttatctgtaactcactggtacatcgtgttcgttaccaacatacatggtagctgtggcatctgcttacacaatgcaagaaaagacttgaaaattgctgctttcgtgaaggccccaaaaccacgcttgtccacgtgaacgcga

SEQ ID NO: 117041 - DNA, 1580 bp, Zea Mays
acgtcgaccagtacgtcgaaaaggaacacgtcgcccccatttcccacccgctttctccccctttggcctccccccctctctctctctcatctcctgccgataagaagcttcgccgccgtctcctctttctccgtcctagcaaaatcctccccgtattgagagccaaagaagaaaaaaaaaaaaggcaggaggccggcgaactacgcgaggaaaaattttctttcccgggaggctcgggagtcggacacgccacacgctttggtcaaaatcgtttccggttgttagcgcggctgctgctgccgctgctgtcgggggcgagcaggaaggggagcgaacgagcttgggcagctcaagaagaggggacgggggagggagcctgtggaaggcacctgagtacgcgtgaaggagcccgcgcgagagtaggggggaaaccaaatcgagagacatggactcggagcactggatctcgcgcctggccgccgccaagcgttactacgcggcgcagctcggccgcgtcgacgatgtgcccgggatggggacggaagaggtggagatggaggtggaggacgacggggacatggagatggagttggagatggcgctggagctcggggacgcgacgtggccggaggtcgcctgcccctactgctacgaggaccatgacgtcgcatccctctgcatccacctcgaggaggaccacccctacgagccccacgccgcgccctgccccatttgctcccaaaggattacaagggatatgcttaaccatatcaccatgcaacatggttacttgttcaagaatggtcacagatcccgtagatttattgttccagagagccatgcgatttcattattgagtcgagatctacgtggtactcatttacaggctcttctagggggtggtcatggccacagatcaaataacgcagtgaccacaaacatttccagtgatcctcttctttcatcgtttggcctgagcttctcagcatctgatgcaccagaaccatcaaaatcagcatcttctattccagacggtaccgcaatacgtaaggagacaccagttcagccttgggaatcaagtattgattcatctctcacgagcgaggaaagggagcaaaagcggaaacaggccaccgggagggcaacctttgtgcaaggcctagtgatgtctactctattcggagattgatcgctcaagcagccctaggttcttgcacttgctagatcggctctttctcctgcctggtccgtcgtcagatagtgctccacccggttcggactctgatggcagggaaaattcgccccaggaaacttagccgcgttcacctttttttttttcagaaaagtgcgccgttgattctagcatgatgcagcttgatttaagctagctgttgctgtacctgtacctttgtttttatcaatttatcggccagcaattcttatctgtaactcactggtacatcgtgttcgttaccaacatacatggtagctgtggcatctgcttacacaatgcaagaaaagacttgaaaattgctgctttcgtgaaggccccaaaaccacgcttgtccacgtgaacgcga

SEQ ID NO: 117042 - DNA, 192 bp, Zea Mays
cttttagtagtctcagaaacagcacccttctggtgggcagcagggatgacctatataggctattctaacatctccactgtgttggcacatgactgcctcaaggagcccttcgagtctgaggtcacatcccgcgagaaggtccatttctccatctccaagtggccgggcggcgagcaggagaagcccagtgag

SEQ ID NO: 117043 - DNA, 4262 bp, Zea Mays
gtgctcggatctaggtttcaaggccgtcgatcgccgccatggacgccggcggggacgaggacggcgccgggaaggcggcgctggagagcactgccgaggccgcgaccctgccaccggcgtcaacagtggcggtcccgtccccggtcccggcttctgcgcctggggcggccacggggacctcagggtcgggggagaagccggtgaagcggatgatgaagaccccctaccagctcgaggttctggagaagacctatgcggtggagcagtacccgtcggaagctatgcggctggagctgtcggcgaagatagggctgtcggacaggcagctgcaaatgtggttctgccaccgccgcctcaaggaccgcaagccaccgtccaagcggcaacggcgggaggaagagtccgcgctagtaccagtgatgcctccaccgccagtgttaccagcacctgtgatgcctctggcaagcagtgaccttgtggtgggtgctcctgggccgtatgatgagccgctgcacccacttcactcgcgaaggggtgctgggcgtgggcggtcctcagcagtccccaggatttccatgccggatattgggaggaggtattacgagccaccaccaattatgatagcgccgcctatcccgtcgatgcagctcacgcaatatgagctccgtgtgattaattctgtggagtcacagctcggggaaccattgagggaggatggtccagcgcttggcgttaattttgatccccttcctcctggcgcctttggtgcaccgattgttccagagcaacaaaagcagcctgtgcgatcttatgatgcggagatattttcttggcatgatcaaaaactcttaaaggcttcagcatttttacctaatatggaatccccatttgttccaaattcgtttactgggaagagaaaatcaccagttggtaattcagccatagttcaacctcatgttggatcacgggctgttcatgagtatcagttccttcctgagcaaccaagtgatacatatgagagggcaacccgatctcactactatgacactccagtggaagtttcaaatgctaggataccttctatcacatcaggatcacaacttctccatggatctgaggaggctgcgcctagttatgcttttcaaggtcacacatctggttctagcctgttgcctccgtccagcaggccccaagtgtttccagcagcaccaacagattatgagatgactcagtctaatagcaaccttagttctgttcctgttgaaggacagtttgatatttctcaggttgctgcatttgaaaacccacctgtatcatctgaaataatagcttatcatgatgaagatacttctcgcgtggaaagaaaacgaaaacatagtgaagaagcaaagattgcaaaggaagttgaagctcacgaaagacgaattaggaaggagcttgagaaacaagatatgttgaataaaaagagagaggagcaaaggcgcaaggaaatggagagacttgatcgtgagagaagaaaagaggaggagagattactgcgtgagaggcagcgagaagaagagaggttccaaagagagcaaaggcgcgaacatgagcgtatggagaagtttttgcagaagcaatctagacgagcagagaaacaaaggcaaaaggaggaactccgaaaagaaaaagaagcagcaaggcaaaaggctgccaatgaaagggctactgcacgtaggattgcacgggagtatatggaactggtggaagatgagcgtttggaatcaatggaattagctgctcaaaacaaagggttgccctcaatgctgtatcttgacagcgacacattgcagcagcttgattcctttcgaggcatgctaagtcaatttcctcctacaacggtgagaatgaagttgccattttctataaagccttggactggatccgaggataacgttggaaaccttttgatgtattcatataatttcatctcaggagacattttgctaactggattgcaggtgtggaaattcttaattactttcactgatgttctgggtctttgtccagttacacttgatgagtttgttcagtctcttcatgattatgattcaaggttgttgggggaactgcatattgctctgctgagatccattataaaggatattgaggatgttgctagaactccatcaattgcactgggggtgaatccaggaggtggccatccacaaattgttgaaggggcatatgcctggggattcaatatacgtagctggcaacgccatcttaatcttcttacatggcctgagatattaagacagtttgctttatctgctggttttggacctcaattaaagaaaaggaccgtagaagattcttactatcgtaatgataatgagggtcatgatggtgagaatgttatattgacgattcgaaatggtacagcagcagtgaatgctgctgctaagatgaaagaaagaggttacaccaatcgccgtagatcccgccaccgtctcactcctggaactgtaaaatttgccgctttccacgtgctttcgcttgaagggagcaatggtctcacaatattggaagtagcagaaaaaattcagaaatctggattgagagacctcacaacaagcaagacacctgaggcatccatagctgctgccttgtctagggatacaaagctttttgagagaactgctccttcaacatattgtgtgaagtcgccttatagaaaagatccggctgattctgaggctgtgttgtcagcagcgcgtgaaagaattagggcttttcagaatgtgctttctgactctgaagctgaaaaggaggtagatgaagctgagagggatgatgattctgactgcgatgatggtgatgatgaccctgatggtgatgatgtgaatactgaggtggaagacgacaaggatcctcttcttgctgtcaagtcacaagatgaagtaccgagtacaactacagttattggcataaaggccaatttagatggtgtgggtaatgcattgaactcatcaagtagttttactaaatcagcaaaaggcgctcctctcccttctttaggcaggtccaatgcagcagatacttctaatgatttgcctcttggagtctcatcagctaatcatgaagtagtacctgatgattctgaaaatacacaaattgatgaaagcaatcaagccgagccttgggtacgtgcactagcagaaggtgactactgtgaccttagtgttgaagaacgccttaacgcactggttgctcttgttggtgttgccactgaagggaactctattcgtgctgtacttgaggagcgtttggagttagcaaatgccttaaagaagcaaatgtgggcagaagcgcaacttgacaagaggcgtttcaaggaagaatttactagcagagtacaatataactctgacatgggtttgaagcctgatatatatcaagaaaacaacgtgacagagattacttcaactccagcgtgtgatgcttatagagagaatgatgaacatgtcgggacaatcaacaattgtgagatgcttgatcagcataatcagggtaatgctggtagtctaccttatgagagaaatggcgtatgccaggaaatcctcgcaaccccagatacttcgtatgttcagcagtatgcttatgctgataaaaggcgatctcagttgaaatcgtacattggtcaccgggcagagcagctttatgtttacagatccttgcccctaggtcaggatcggcggcgaaacaggtattggcagtttacaacttcagcatcaccaaatgaccctggctcaggaagaatcttttttgaatccaaagatggatattggagagttatcgactcagaggagctacctgcagaggtgagcaatgagctcactctcacaactcacggctagaggtacaagaacactgagaacagagcacacacagcactagcagtctagcacaagtctgaatgtgcagcaactgaactgctttctccattgcattgtctagtatatatacaagtctagtacccaactatatggtagaatagtacatggcttagcccagtgttcaactacatgactgatgtatgccactacatagttggcctattgccatactcctatagtgcaatagatggacagcaagaactggccacaaaaccaactctctgctgcagaaaaagtcaaaagggagcagcagattgtcttacaagtaccagtgtacttcacgctaaaaaatattgggatttgatcattagagttgctagg

SEQ ID NO: 117044 - DNA, 495 bp, Zea Mays
atgagaattgttccgtttcagaagcggcaacaagcagaagaggaggccaaaatgaaggaggctgaactgatgcggggaaacccgttgattaatatcaacaatgttggctccttcagtgttaagagaaggtgggacgatgacgtggtattcaagaatcaagcacgaggagagaccaagacactgaaacggttcatcaacgacgccatcagaagtgatttccaccgtaaatttcttcagaggtacatgaagtgatgcgtctgtcgttcacaattcagcctggagcccctcatcgttatcatgtttgtgtatgagcgaaagatcattattgtgttgttgtatgaaacaagagtgtaaacatctgtctacttcttaacaaagttatgctgagcaatgcatatcctagttgaatgtgacaatgctatgttttctatattttgacgttatctggttgtaatcatatttaagtttgactaggaaatatgagctcagagagca

SEQ ID NO: 117045 - DNA, 257 bp, Zea Mays
ttttttctttctatttcgtcacagtcacaccagggcccagggcccgccactgccagtgcgttactgtatatgccctgaagccgtggaccttgtggtcagtgtcaaagcacgtctttcgtcgtacacgcgcgaccatgttaaagcttagcggcccaagacatgcaacgtgtccattttttccggaatatccatgttttgattcagaacatttaggccttgttcggttacatcggattgcacccggaatcgttccggtt

SEQ ID NO: 117046 - DNA, 93 bp, Zea Mays
actagaccagtctctcctttcaatggggaacttttctgtcactctggttttggatggttggattgcacatcttcgctcagctcccaatggtac

SEQ ID NO: 117047 - DNA, 1170 bp, Zea Mays
gggcaaaggcccccggccgacattcctgcaactacaactccctatccctctccaattccccaatcacatcatagtctataacaatctggtatcggatatgtcaagcgctccgactccgatgaccctcgagggcctcaacgctaagctcgatgccaatcttcaccaccctcgcgcgctctgtggcaaccattgaagctttcatgtcgcgcatggcgtgtccctcccaacacccgccggcgccacagttatcgatgatcacgcacccaccagcgaccgtgggaccacccctgtcgccaccggcgccgtcacatcgcctgatcagtgccagtgcgcccgcaccaacgggcctgcccctttacctcatctccataccaccatcaccatcgccaattccatcatacgccctctcatcaatgacggcgccggaattcacgatggcaacgtctccttcaccgaccccgtcgttcaccgcccccatgcctatgccgccacagcagcactgcgaagacgtcttctacgggagcgtggatggcattcgggcaacgacggcgcagctacaggaggcggcacgctgcctcctagcgcgccgacaaggacaacgcccccatcttcaagcagaagcgcccagtcgtcccagcaaccttgaagcagctcacggagaggaaggcgagtgcgcaggcgagtgcctgcaaggtgtttgcggtggtgtggctgcaagctgcggcgcatggcctcctagtgcgccagcaaatgctcgaggcaaccttggtgtcggtcgaccttggcacatggggacgcgacctcgccctgtcggacgaccatcaagaactgcgctggcccgatatctccaagcgcgagcatggtgtgtgtcccgcgggcgacgaactccaactctacgacagcgtcggtagggaaggcactcccctccttgtcatcggcatgggcgcacggactagcactaccacattccactaccgaccgctatgagggcgtctcagttggtcattgttgcgacccattccagggatcatccacatgctcccctttcgtccagatggcgtatatcagatccatgtggctgcacacgtgcagatccaatgcgcaaagggtgttcgccttatcttaaggggtcaaaaaataaagagttaatgtctaattcaggttcgaaat

SEQ ID NO: 117048 - DNA, 1532 bp, Zea Mays
ggggaaagatttgatttttcctcatcatgagaatgagcttgcacaaagccgagctgcttatcctgagagtgaggtgaagtgctggatgcataatggctttgttaacaaggacgataaaaaatggcaaactcagataataactttttcacgattagagatatcactgctttttaccatccattggctttaagatttttcttgatgcgcactcattatagatcagatgtgaaccattctgatcaagcacttgagattgcatctgatcgtgtctattacatttatcagactctatatgactgcgaggaagtattagctacatatcgtgaagagggtatttttttctcagtgtcgttcgaggagcaaaatctgattgataagcaccattcagaattcttgaaatatatgtcgaatgatcttaaaaccatagatgttctggatcgttgcttcatggagctactgaaggccataaacggcagtctgaatgatttgaagaaactgcaacagaaaatagaacagcaaaagaagaaacaacaacagcagaagaagcagcaacagaagcaacaacaattgcaaaaacaaccagaacattatattcaagctctgattgcaatggaaatagaacttaaaaataaactgtctatacttggtctgatgccatcttcatctttggcagaggtattgaagcaattgaaggacaaagcactaaagagagcggggctgactgaagaaaaattgcaagagcagattgagcagataaacgttgcaaggaagaataaacagtttgagatatctaatggaattaggaaaaactttgctaccaagggcatcgccctgatgaatgaaccttctagtacagtgtggagaccatgcgaaccagagggatatgaagagtcatgattatacgccacacccactcaacaaatgatgtattcttcactcaggggcagggggatctgaagctgacccttttcaactgcatctactgcatggattatacatgggcgtcgtcgcagcgagcagcccgccccgccgctcttgaacaccgaagctcctgacttgtacataaggcagaatcctgttccaaatgcctacaccttagcaatcaacggcaaaaaaccattcattgtcgttcacacaagccttgtggagctgcttactccaagggaattgcaggctgttttggctcatgagatgggtcacctcaagtgcgatcatggtgtttggctcacttttgccaatatactcacaatgggagcatacactgtccctggttttggcatggttgctggctttctggaagagcagctatatagatggctacaagctgcagagctgacttgtgacagggcagctcttcttgtggtgcaagacccgaaggttacagttttttcagattctcctacagccacgggatggtggcggccttcgcgcgggcagcgtggctcaaggagtaccacgagaaggtgctggtggagatctacaggtcacctctccttctctctgcctagatccagatccatcctatacctctg

SEQ ID NO: 117049 - DNA, 2527 bp, Zea Mays
ggagtaagaggtttcttcagcacacatgttgtggatcagagccttgtttcttcagaaacatacaatacctagattttctgtgaatattgacaaccactctaattgggatgagatggttgattcatgtgctttgcagttatcacatgacttgattcgacatcatgttcaatttttgcatgatgaatctcataagaataataatcatcaacaaaaagaagtgtttgcttccatgaatattagtgcagaaggtgaacttaagtccagtgagaatgagcgacccttgtgtggagttgcttctaaggagaatccaattcagctggctgcaggcagagctcagcaagagcctccaccatccaatgtggaagataaagtagaaaatgatcaatttttttttgaaggcatagttcaaagaaatccttctagtagacttgtaaaaggcagcgagtcatttgctattgttgcttttggaattcagatactgcagcatcctcagttctcaaaactttgttgggctacgtcaaagctacgggaaggcccctgcactgatataaatggaccatggaaaggctggccatttaattcctgtttgttgcagagcagcaccttacctggtaaatcactaaatggaggggacaatgttgtaaagggaaaggaaaagtctgtctgtgtgagagggctggttgctgttggcttattagcttatagaggtgtctatgggtctgttattgaagtttgtgctgaggtgagaaaggtgttgggactgttagtcggacagattcaaactaaaattttggaaaagagaaatcaattccggtattttcgaatcctatctcaagtagcttatctagatgatattgtgaacagttgggcatacacctaccaaagaacacatgttgatacccggacaggaacatcccgcatgaagagttcaagtgccaaagaatgtcaaaggaccaagtatgctgcaggaaccaatgtacaagttgctcctgttgccatccctgctgaggttcaagacattccagcccaacacactcaggatcatgaagttgttcctggtcctactgaggtgcaaggcaatccggttaagcatactgcagaacaacctggaagctattcgatggactgtgaccttgataatcatgtgaactctgtttccagcaaggatgcagtagaacacgatcatgtccattcagctttacctgatgtgcataggggcaatacacatgcagatacagtaacaaatgacggagaacctattggagcaaacaacaatgggaaagtgtccaggttaacctacggtgaagataaattcagaccaggtattcaaagatctgaaaaccacacagaatctatggaaggtttaagctgtttgcaaagggcaggagattccgttggatccccagcaagtattaacaatacagaattaccaaagaacaatgtttcttctgaagctcatattgatgataatgagttgaggagaaatgatcttgtgaatgatgttgaatcaaattcgatcgatggtaaacatgacaccatgatgaatctttcagttccaaaaatttcatgtctctacaaatgttgttctccatgtttccaatctatttataagatggttcatggtattatttcaaatactctaaggcctaatctgcattgcttaacagctgatgatatgcatgacattctgtcatcatggtgcttgaatctattagggtctgttagaaagttgtacagctcacatgatgaggccagctgcacagaagtttttgttagaatgtccaataaagaaacccacttagagcattgtgcttgtcagagtgatatctatctttcaagagaatgtgtatgccacttggaaagcaatggggatgttgaaactgcaaatactgattgtcatcctctatcaggacaaagcttaagttttttctttaaagatggtgtatggatgccgttggatctcactgcggaaacaaaacttcattgcagcttcaggagattctgtgtttgctcgatattaggaacagtttctatgctcagctagatcctcagttcatgatattgtctgatgcagttgcaaaagtacatatagtactctaatgctctaagtgtggctccagttgtgcacataacacaacatcatcaggatgtctttggttgattggaacttctcatccttgatgcaacttttgggcaagcttttattgcacataaattgcctctacctgttatggtcattagtggaaaactggctgttgtagttgcttcgtagactgaatatttaaaaagaagctaagatattagtcttcattttttttccaacgaagttacccatgtaggttggactgttgttgctgctggaaatttcacggttagatgatgactgagtgactgacgccatttcagttctcattgtaatatgtattatggcccaattaagcatcaagttgaaacatgattgaatcttatactcacattttgtgttgtacctctattctggtcagtggtatgctttctaatggacaac

SEQ ID NO: 117050 - DNA, 3366 bp, Zea Mays
atgcctccgtccaagcccaagcggcggcgcggcggcgccgcctcccgcggccggaagaagcagaaacgcctcgacgcgatccgcgacgtcccgccgccgccacctccgccggcacccctggccggcggcggcggctccgactccgaagaggagtccatccgccgcagcaagagggtccgccgggcgccggtcgtcctcgacacatcgccgctcccttccccacgcggcaagaggtctcgccgcggcgtccgggtgggttcgagcgggagctcgcggaggggaagccggggcagggcaccgcacgaagtggatgcccgaggggtggaggaaggggagtacgatgaggggagcgtggtgtggcgttcgcggctgagggatagggttaaggggaaggccaaactgggggtgcgggcaaggagcatgtggttcgaagatgaagattacgtggcggagggagatgggcaaggggaggaggaggaggaggaggaggaggaggatgaggatgaggaggaagatgccgggatggtggtggtggacgttcgtgagaggtctgaggacgacgaagtgaacaaggaaagtggatgtttgcagttgcaagggaaggaactaacagatagagagatcaatttaacaatcgatttgaacttagatgcacatgatgcccgggatggtgtcgatgcaatagaaaaggaagagggaggaaaaggagggaatgttgggaaggaagatgtggcggcggagcaagaacaagatgatgaggggcccacagtaggcactagaaatgatctagaggaaggcacgggagaggaaatggtggtggaggaaggtttgcagcaggaggaaataggagggttggaatcacatgtatcgagaggaaacagtagtgatgaactaccttgtggtgagagcaatgagggggttagggccagcaattcagacagaattgagcagcttgacatggaacagaccgcagaagagagcaaccttccagttgagcagcaaacggaaccgcacctatctagtcctagtgagcaagaggaagaggtccaacaggatggacagtcggttcatttcccagatgcggtattggctaaggatggttcaaaagagagcatgcaaaattcctgggttttagatgaaaaccagggagttaaggtggttaaagaagggaggaggtgtgcgctctgtggtggagggaccgatgggagaccacctaagattgcattgcatgattctgttgacagtgaaaatgaagcctatgagggggctttaccttcagaggaacccaactatgatatgtgggatggatttggtgatgatcctggatggttgggaaggctgttgggtccaattcatgaccgctttggcattgcacgtgtctgggttcatcagaactgtgctgtttggagccccgaggtttactttgctggtttgggctgtctaagaaatgtaagagctgcgctttgccgtggaagacttctgaagtgcagtcgatgtggcagacctggagcaactattgggtgtcgtgttgatcgttgcccgaaaacctaccatttgccttgtagtcgaacagaagcctgcatatttgatcatcggaagtttcttatagcctgcaacgatcatcgccatctcttccaaccccaaggagataaatatgttgaactgctcaggaaaatgaagataaaaaagatgaaggccgatatcagaaaggtgtcacatgatgcatggagaaaagacagagaggctgaggagaaatggttagagaactgtggggaagatgaggagttcttgaaacgggagggcaagaggctaaacagagatcttttacgaattgcacctgtttatataggaggctcctctgaaaatgaaaagtcatatcgtggttgggaatctgttgctgggctaagtgatgttattcagagcatgaaggaggtggtgatgttacctcttctctaccctgagttctttagttctctaggtcttactcctccaagaggtgttctgctgcatggccaccctggtactggtaagacacttgttgtaagggcactcataggggcatgttctcaaggtaacagaagaattgcttattttgctcgaaaaggtgctgattgtttgggtaagtatgttggtgatgctgagagacagttaagacttcttttccaggtagctgaacgatgccagccttctatcatattttttgatgagatagatggtttagcaccttgtagatccagacaacaagaccaaacacataattcagttgtggcaaccttgctctcgttgcttgatggtttgaaatcacgaggctcagtcgtagtgattggggctacaaatcgtcctgatgctattgatcctgcccttaggagaccaggaaggtttgatcgtgagatatactttccactaccaaccttcgaggatagatctgctattctgtcactgcatacaaaaaaatggccaagtcctatttcaggtgcattcctgtcatttgttgctagccaaactgttggatatgctggtgctgatctgcaggcaatttgcacacaagcggcaataaatgctttgaaaaggacatgcccattacatcaaattttacaatatgccgagaaaggagttcctcatgggcgagttcctctaccaacagttcttgtcgaggataaagattggctagctgctcttgcagctgctccgccaccttgttcaaaaagggaagcagggattgcttcaaatgatttggtttccactcctctagattcctgttttgtaccaagcctttttaaaccattggtacaccttcttatttctatgtatttggatgagcgtgtatggttacctccatcccttcttaaggcatgttgctctataaaggaagtggtattctcatccatggaaaagaatactgtaccccacactttatggccaacttatcttagttctttgatccaacaaaaagatattgcagatagaattggaacaatcttgtcaagctgtggccttatatctgcacaactaggaaatcgtggttcaatgttgctgagtgatgttaaaacacaggagaatttttgtggcagcagattaaatcccactggtttgcatatgaaaggagggctgccacataagttatcaggctttcgagttttagttgctggagcaccaagatcaggccaacaacacctaattcgttgtgttcttcatggttttatgggccagattgtaatacacaagcttgaccttgcaactatggtgcaggaaggaaatggtgatatccttagtggtctgacacacattctctggtcatgtggctcctgcacgctagctttacaatggttttggtatgctgccacatatatgttcccaacactgaca

SEQ ID NO: 117051 - DNA, 465 bp, Zea Mays
tcagatgtgaagactaagtaggagacaactcatgggcataagcagattttctagaagaggagagcagcacttgatgactttgataggttcaaagtcatgctggcaaagatcgaggtcaggaacctcgctatcaaatgtttagttcgtgttggcactgtttctattgctcgctcacacttttttctttatgtaaacaaaggggtggtgctatcaggcaagagctcgccaagttgaagaaggcatccatggcttaatgggtatcttttagtggatgtcatgttatagtttttggttctaagttggatcaacaattcgattgagtgtcgacaaagacagacatactaatatgttccctgtgaatacatttcaaactttatcaagcatggaagtgctctagatattttatcgtgaatgataatgaaatatataaggtagcttgcgtcaaatgcgtgatctgtaccattt

SEQ ID NO: 117052 - DNA, 1094 bp, Zea Mays
ctcctagggttaccgcctcctttcgcgccaatctctggtatatgtacccctctgtggcgtcgcagccctctttcgtcccttcatctttctctcttcatttctttctgtcggtgagagcagggttcgtggttatctcggttagggttcttgaccaaaaagcgcaggggatggccgaggacagtgttcaagtaattggggaggtgcaggaagtggtggaagtgcatgctggtactgatcagcgtggcaggggtgcaatgaggtggactagtgttatgtctgcctttgtgctccgccgtatgtgccagctgatctcaagtggtgttagaacagacaaagggtttaaggaggtccacctgaaccaggttgccaaggctctacaagagtttattggcagtgaggtgaccggtactcaggtgtacaaccacttacgtaaatggagacagaggtggatgagggtggcaaaattaagagagttgagtggtgccaattgggatgaagacttatgcatgataagtctggaggatgagcactacaatggccacattaaggcccaccctaaggatgctgagttcttaaacaagcctatagaaaactataaggagatgatgactatatttgggacaggattagcaactgggaagtatgctatgggttcaaatgaagctttaggatctccatgcgaggttgctactagctctgttaagactgattcccttgatgaagacaagagtggtaagtcagttaagactgattcccttggtgaggcaacaaaggatatgaaagaaggtagtagtggtgtaggcaataagaggaagaggggtgtgctcactgatgaggacactctgatgttgtctaaaatgacagatgctgtcaaggatgtggcagctgctattcgtgagaccaaagtggaggtgattaatcctgacctatatgttgcagtgatgtatatgcctggatttagtgaggaagctttaatttgtgctttctctcatctggtggacaacaaggcgcagggggatgcttttgtccacatgactgactcccatcgtgtcctgtggctaaggacatggctagccaagaactacttcctgtag

SEQ ID NO: 117053 - DNA, 1804 bp, Zea Mays
ccagtgccaacccagtctccaaggccacaaccacggctcccggctggctccaggctctagttccaacctccacctgcgccgcccgatagcaaaacgcagcgacctcgccccccctgccccgctcctccccttttcccggtagcagagacggagcaccgcagcccgccagaaaggaagacgaaacgcgccgcggcgcaacgcaccgcgtgctagtgaaagggcgcagcggaaggccgccgccgcgctgctatttagacaggaagcggggcgatcgaatcgcgtctctcaaccaatcgataaatctgccggtaggtcgatcaaggagagcgcggtccacgtctccgttccgttccgttgcggggaaggaaggaaggagagagaggagcgatggcgtccgggtaccgcgcggaggaggagtacgactacctgttcaaggtggtgctgatcggggacagcggcgtggggaagtcgaacctgctgtcgcggttcgccagggacgagttcagcctcgagaccaggtccaccatcggcgtcgagttcgccaccaagaccgtccaggtcgacgacaagctcgtcaaggcacagatctgggacaccgccgggcaggagaggtacgcccttcttcgctgttgtacgctatgcaggttgcagatgcagctctaggatctgtgcaccatttttcagggcttcctggttagtagtaaggatttagttaatggttgctaatacggaaacttaagcgtaaccgacggtttccaacatacacctgtgcttctgattcgcatttcaaaaatgaaaccaaaccactggcctgttcatgactatgttttacggctgaatacgagattgatgtccatactactacagttgggagttcatgccgtaatgaatccatcaattaacatagcatcgcgatcgcgatcactaaaaagcgcgcgcgcttttcagattgttgcttgcgtatcacattttattcaactccagctaactttacgtgcgtttcgctagcgtgccattcagtgtcctcgaccctttcggcgatcgcagctgattgcttgtgtgccggcctcaggtaccgcgccatcacgagcgcatactaccgcggcgcggtgggcgcgctggtggtgtacgacgtgagccgccgcaccaccttcgacaacgcggagcgctggctgcgggagctgcgggaccacacggacgccaacatcgtggtcatgctggtgggcaacaaggccgacctgcgccacctccgcgccgtctcgcccgaggacgcggcggccttcgccgagcggcacggcaccttctccatggagacgtcggcgctggacgccaccaacgtggagcgcgccttcgccgaggtgctccgccagatctaccacgtcgtcagccggaacgcgctcgacatcggggacgaccccgccgcgccgcccaggggcaagaccatcgacgtcagcgccgccaaggacgaggtctcccctgtgaacgcgggcgggtgctgctcgtcggcttagccctggtcaaacatacgctttgctgattaaggaagacataacgtgatgacaatctttgttgacttcgtcaagcggttgggggtggttggcgctcgtgatgtgtttgcagactagcaatcgctgtcctcgattgtatttttcgggctattttttgattgatgcacttgggtgacgcacacatttacaagtggcaggttatggaccatatggggagcgatttacactgatttggatgaaatattgacatgttttgacaacttcgagcaaaaaaacatggataaattgccattttg

SEQ ID NO: 117054 - DNA, 1315 bp, Zea Mays
ccagtgccaacccagtctccaaggccacaaccacggctcccggctggctccaggctctagttccaacctccacctgcgccgcccgatagcaaaacgcagcgacctcgccccccctgccccgctcctccccttttcccggtagcagagacggagcaccgcagcccgccagaaaggaagacgaaacgcgccgcggcgcaacgcaccgcgtgctagtgaaagggcgcagcggaaggccgccgccgcgctgctatttagacaggaagcggggcgatcgaatcgcgtctctcaaccaatcgataaatctgccggtaggtcgatcaaggagagcgcggtccacgtctccgttccgttccgttgcggggaaggaaggaaggagagagaggagcgatggcgtccgggtaccgcgcggaggaggagtacgactacctgttcaaggtggtgctgatcggggacagcggcgtggggaagtcgaacctgctgtcgcggttcgccagggacgagttcagcctcgagaccaggtccaccatcggcgtcgagttcgccaccaagaccgtccaggtcgacgacaagctcgtcaaggcacagatctgggacaccgccgggcaggagaggtaccgcgccatcacgagcgcatactaccgcggcgcggtgggcgcgctggtggtgtacgacgtgagccgccgcaccaccttcgacaacgcggagcgctggctgcgggagctgcgggaccacacggacgccaacatcgtggtcatgctggtgggcaacaaggccgacctgcgccacctccgcgccgtctcgcccgaggacgcggcggccttcgccgagcggcacggcaccttctccatggagacgtcggcgctggacgccaccaacgtggagcgcgccttcgccgaggtgctccgccagatctaccacgtcgtcagccggaacgcgctcgacatcggggacgaccccgccgcgccgcccaggggcaagaccatcgacgtcagcgccgccaaggacgaggtctcccctgtgaacgcgggcgggtgctgctcgtcggcttagccctggtcaaacatacgctttgctgattaaggaagacataacgtgatgacaatctttgttgacttcgtcaagcggttgggggtggttggcgctcgtgatgtgtttgcagactagcaatcgctgtcctcgattgtatttttcgggctattttttgattgatgcacttgggtgacgcacacatttacaagtggcaggttatggaccatatggggagcgatttacactgatttggatgaaatattgacatgttttgacaacttcgagc

SEQ ID NO: 117055 - DNA, 1119 bp, Zea Mays
atggattcctctagcagaggcatccgcttcctcgtccaccgccgcgcgctgctgctgctgctgctcgtcgcgtcgtcgtccctcgtcggcacatcgcgtggcagggaggcgcagccgctgcccgcggcggcggccacggccctcggcagcaggcggtcgccggagcggcacggcctggcgctggacttctacgccaggacgtgccccgctgtcgaccagatcgtcgccaacgtcaccgccgcccagtacagggacttccccgccgccggacccgccgtgctccgcctcttccaccacgactgcttcgtggaagggtgtgacgcgtccattttgatcgcgccgacggccgacgcggccgcgcccgcgcgcccgccgccacccagggtggagcgcgacatggaggagaacaggaacctgccgcaggaggcgttcgacacggtggagctcgccaaggctgccgtggagagcaagtgccccgggatcgtctcctgcgccgacgtcctcgccctcgccgcccgagactacgtccagctggtgggtgggccgtactacgcggtgaagaagggccggaaggacagcaaggtgtccctggcggggaaggtccgcggcagcctgccgcgggccaactcgacggtggacgagctcctgcgcgtgttcgcgggcaagggcctgggcgcggcggacctggtggcgctctccggcgcgcacaccgtcgggttcgcgcactgcgtccacgtgctgggccgcatctacgacttccgcggcacgcggcggccggacccggtcatggacgcccgcctcgtgaaggcgctccgcatgtcgtgcccgtcgtcgggcggcagcgcccgcgtcgtggtgcccttcgacgtcagcacgcccttccagttcgaccacgcctactacgccaacctgcaggccaggctgggcctgctggcctccgaccaggcgctgttcctggacgcgcgcaccaggccgctcgtgcaggacctcgccgccaacaagacccgcttcttccaggcgttcgtggccagcatggaccggatgggctccatccggatcaagaaggggaggaaaggagaggtcaggaaagtctgtagccagcacctgttttcagcctga

SEQ ID NO: 117056 - DNA, 877 bp, Zea Mays
agatcccaaggaaggtcgaacatgtggtgcgccgcggccgcgccaactctccgctcgccggtcacggtattttctgtggcggagacaggcggcgccaccgttgacgctagaaaatggggaattgatttgatatagcacacgaggaactaaatactctccctactctcttcggcgttcttcggttgttgctctgtatccttacctaccttcgtggcaacctgcgctcgcgccatcagcgcgtcgatccatcaactccatggcgtgcagcttcccgccttcctccgccacgaggctccatgccttggacgccgcggcggcgggggtgaagaacggcagggtccccctcaaggcctccgtcgcccccgcgcagagggcactcggttgctgcagggcgaccgcgcggcaggaaggcgctacacaggaacccagtgttgcagcttcttcggcccgtgcacagctggacctcctggagcaactgacgtccgccacacctgatgacactgcggctggcctggagaacggcatgcctccaccagaaccgcgtcggcgtgctaccatccgcgagcagctgtcagcgctagccaacggtaaggtcgacgagttcaccctcccactgggcaagaggctgaaggaaggtctgaagaggctcaactccctcaccgtgtcgcagaggaggaacatcaagaggcaggccctgctcacccaggtcagcgggcggaacgactcggtgttcttcgcgaccgttggcgcgttcgtgctcgtcccgcctctcgccattctagctatcggtgtcctcactgggtatatccagctcttcccatgaccaccaagatgctgcatgctatttaactagctatctccacactgccatatatat

SEQ ID NO: 117057 - DNA, 907 bp, Zea Mays
agatcccaaggaaggtcgaacatgtggtgcgccgcggccgcgccaactctccgctcgccggtcacggtattttctgtggcggagacaggcggcgccaccgttgacgctagaaaatggggaattgatttgatatagcacacgaggaactaaatactctccctactctcttcggcgttcttcggttgttgctctgtatccttacctaccttcgtggcaacctgcgctcgcgccatcagcgcgtcgatccatcaactccatggcgtgcagcttcccgccttcctccgccacgaggctccatgccttggacgccgcggcggcgggggtgaagaacggcagggtccccctcaaggcctccgtcgcccccgcgcagagggcactcggttgctgcagggcgaccgcgcggcaggaaggcgctacacaggaacccagtgttgcagcttcttcggcccgtgcacagctggacctcctggagcaactgacgtccgccacacctgatgacactgcggctggtaaagatccatactgcacttgcacacaaggttacaaatactctgtgatcgaacccaactctcacgacaagcgctcatcgtcaggcctggagaacggcatgcctccaccagaaccgcgtcggcgtgctaccatccgcgagcagctgtcagcgctagccaacggtaaggtcgacgagttcaccctcccactgggcaagaggctgaaggaaggtctgaagaggctcaactccctcaccgtgtcgcagaggaggaacatcaagaggcaggccctgctcacccaggtcagcgggcggaacgactcggtgttcttcgcgaccgttggcgcgttcgtgctcgtcccgcctctcgccattctagctatcggtgtcctcactgggtatatccagctcttcccatga

SEQ ID NO: 117058 - DNA, 665 bp, Zea Mays
ctctcctctggctgccgctctccacagtcctcgggctccaagccttgcgtaaaccccgacccccacgcgcatagatgaagactaggtcgcagacgtcgccgaagcctctcaagacggtggcgatggctcccaggccgagcagcaccaagcggaagccgaggcccaagccggcggggaagggcgacccccgcgcacccaagaagccacccaccgccttcttctacttcatggaggattttcgcaagatctataagcaagaaaaaccaagtgtaaaatcaatgcaggaaatagggaaggcatgtggcgaaaaatggaatacaatgacatttgaggaaaaggtcaagtattatgatatagctactgagaaacgtgcagaatttgagaaggcgatgattgaatataacaagaaaaaggaaagctgaacatttgtctgttccaaattcccgatggttcactgtaactggatgaatcaatcagctgtatattacagaactgtgatttttagtggaatttataaataccactagttggaaccgtcagctcacgcagatatgtatcttttgtagtcgacttgcacattttgatgacaccgagtcttctacccggtgtttttcatctggagataatttgtgtttcgtgctaactgctcgttaaattgcttatta

SEQ ID NO: 117059 - DNA, 1618 bp, Zea Mays
ctctcctctggctgccgctctccacagtcctcgggctccaagccttgcgtaaaccccgacccccacgcgcatagatgaagactaggtcgcagacgtcgccgaagcctctcaagacggtggcgatggctcccaggccgagcagcaccaagcggaagccgaggcccaagccggcggggaagggcgacccccgcgcacccaagaagccacccaccgccttcttctacttcatggaggattttcgcaagatctataagcaagaaaaaccaagtgtaaaatcaatgcaggaaatagggaaggcatgtggcgaaaaatggaatacaatgacatttgaggtcagcattttctccttgcagcctgatagtcgtgttccattagttatttaccaccttatgctgcctgctgatgtaaattgcttgattccacaatggtgatgcaaatttgaccacggtgcactggatatgcagtttgggttttgcctatacttcttttttttcctgatcaaccattttatgtgggaaacaatatatagggatcagaaggtctttatattatgctttatttggttaatgtccagttcaaacttcaaagaacatgagctattgccacccttttattctaatggtgaggaagcgatttcccttgggcccatggcccatttcttatttaagttctttcacaagtttatactttagagagtttgaagggacaattggcatggctgtgttaactatgaatttttctgacctacatgctcaaaaagtcaaaatgaagtttatgagtactgtagctttggttcatttggattattctacatcagtgcacatttgctattatttcgtatgttacattaagtgtatagttgctacttactgtcccagtatttgagctccccacttatgagctgctttaggggtgttcactgacagttttaccagtttgatcaaagcagatcaatactcataattaacttggtgtgtacgctgctctgtcggtactgggcagctaggttgcttagcatgtatgtttgaatggtttcaaccgttttggaacatcttcacccctagtacatcttcactcaaccttggtttggtgcccacgggccattctagctactcttactgtgcatggtagcaaacgattcgaaacacgaaaacagtaggatttttgcaaatataaagataaactatggattctttaaattgtaaatactgcacgcttgtgccttctatatgattatgaaatttgacttatagaaacaatagttttcacttaattcatttcacaggaaaaggtcaagtattatgatatagctactgagaaacgtgcagaatttgagaaggcgatgattgaatataacaagaaaaaggaaagctgaacatttgtctgttccaaattcccgatggttcactgtaactggatgaatcaatcagctgtatattacagaactgtgatttttagtggaatttataaataccactagttggaaccgtcagctcacgcagatatgtatcttttgtagtcgacttgcacattttgatgacaccgagtcttctacccggtgtttttcatctggagataatttgtgtttcgtgctaactgctcgttaaattgcttatta

SEQ ID NO: 117060 - DNA, 1756 bp, Zea Mays
cgcctgcgtcctccctcgtacggcaacttgtgcgaccgccggcgccgacgccccaaggcaggtgccctgtgaccaggccttcgccggtccctttcgcgtccttcgccggcgacgagcaccaccagttcgtacgggagcacaatcagaggtgatcaccatttgctgcctgtttggtgaaagttgcgtgatggatggatatggagaggcggctgctgtggccatggagttggaggccgaggccagcccatccagggggcgctcctctcctgtggtttcagggtcaccatcccagaattctgatggaagcatgtcctcgtggcggctgggcctcaagaacagcatccagactaactttggagatgattatgtcttccaaattgcctcttgccaggagatctcaacgcttgcagtttccttgtcaacaaatgcactaaagttttattctccagaaaccggacagtacctaggggaatgtaaaggacacgaaggaacaatccatgaaatctccttctcagctccatcgtcaccacaagtaatctgctcttgttcttctgatggaactgtcagagcttgggatacaagaaactttaagcagatatctttgctaagaggaggcgtgtcacaagaaatgttcaccttcgcttttggtggatcaaatggtagcctacttgctgcgggctctaatgcccaggttctattctgggattggagaagttcaagacaaattgcatgcttagaggaatcccacatggatgatgtgacacaagtcaaattcacaccagatcaacaaagtaaactcatttctgcagcagttgatggattaatatgtgtttttgacactgatggtgatattgatgatgacaatcatctgttatctgttatgaatgcggaaacatctgttgccaaggtgggtttttttgggaacaagtataagaagctttggtgtttaacccatattgagacattaagtgtctgggactggaatgatggggctagagagttgaatatagaggatgctcgttccttggccactgataggtggaaccttgatcatgttgactatttcgttgattgtcactattctgtgcctgatgaccggctatggttgattggcggcacaactgcagggacgttaggttacttccctgtaagaaatgaccatgatggaccaataggttcagctgaagcaatcctcgaaggaggccatacaggagtcgttaggtccgtgtacccctcttcaggaatccatgggagacttgggcaaaacaggggcatctttggatggacaggaggtgaagacggtcgtttgtgctgctggcgctctgacgaaattgcagaaacaaacaaatcttggatctctagctcactggtgtggaagcagcaaaagaaaaccaaaaaccggcatcagccctactagccgcaatggataccgtttggaactttcggcactgacaagggaaagccctgtatgtgctgtgagcatgttgtatcttttctttgaattctactaggtcgtgatgaaacacagcacattgtaggtgcagttttgacgttgcttattgtttgagaatgcttgtctatttcagtaactggttattaatctagcaaagatatggtaagttgagtattgaagttttcgtgctcggaacttttagcggcccggaattgaacaggcgatgacgtgtatttggttcttggacattgtctgcagaataagtagcatataaatggagtaggttagggtgcatttggttct

SEQ ID NO: 117061 - DNA, 2440 bp, Zea Mays
cacagctccccacctccaccctcgccgcgagttgctcagtcgcagactcgcagcgagcgaggcggcggccggggagcgatgcaggcgccggagcagcagccgcagcagcagcagcagcggaggaagggttcgtcagagatggacttcttcagtgaatacggcgatgcgaacagatacaaaatccaagaggtcattggcaaaggaagttatggcgttgtttgctcagctgttgaccaacatactggtgacaaggtggcaatcaagaaaatacacaatatctttgagcacttatctgatgctgcccggatcctacgtgagatcaaactgcttcggctattacgccatcctgatatagttgagatcaagcatataatgctgcctccatcaaggagggacttcaaagatatctatgttgtatttgagctgatggatacagacctccaccaagtcatcaaggcaaatgatgatttaacccgagagcatcatcaattctttctctatcagatgctccgtgcactgaaatacattcataccgctaatgtttatcatcgtgatttgaagccaaagaatatattggctaatgctaactgtaaacttaaaatatgtgattttggattggcaagagtggcattcaatgacactcctacaacagtattctggacggattatgttgctacaagatggtatagggcccctgaactgtgtgggtctttcttttccaagtattcgccagctattgacatatggagtatcggttgcatttttgcggagatcttaactgggaagcctttatttcctggaaaaaatgtggtccaccagttagatttgatgactgatctcttgggtactccatcacttgatacagtttccaggattcggaatgagaaggcaaggaggtacttgagtagcatgaggaaaaaacagccagtaccatttactgaaaagtttcctaaagcagatcctgctgcactcaaacttttgcagaggcttttggcatttgatcccaaggataggccaactgctgaagaggcattggctgatccgtattttaaaggcctcgcaaaagtagagagagaaccatcatgccagccaataacaaaaatggagttcgagtttgagcgaaaaaaggcgaccaaagaggatgtcaaggaacttatattcagggagatattggagtatcatcctcaacttctcaaggattacatgaatgggactgagaaaacaaactttctatatcctagtgctgttgaccatttcaggaggcaatttgcaaacttggaggaaaatggaggaaagagtggggcacacgccgcttcatcagacaggaagcatgtttcgctcccaaggacaaccacagttcattctaatccaatccctccaaatggaacctcccaggttcctcaaaagattcccacaggtagaccaggaagagtggttggtccagtaataccatttgagaacgcagctgcagttgatccatacagccaacgtagggtctcaaggaatccagtacttcctccaaccacgtcgaacatgtcagcctatgcctaccaccggaagtcagacaactcagacagagagctccaacaggagctggaaaaggaccgcatgcagtaccagccagcacagcggttcatggacgccaaggtagtatcacagatgtcccctgacttgaggtcttcctactacataccaaaaggtgtcccaaaggctgatcccgcagatagaaccgctctgcattctagcatgattcatgggatcgcccctttcagtggcattgcagctgttggaggtggctacaacaaggtcaatgcagttcagtatggagtttctaggatgtactagttctagttgcattggccatctccgaattcctcagctgatgagttgaagtaataacatggcgaagaccagatgtaggtaccgaagaactgccataccggctctgagccaaagatagaaaacatggaatacggatctcggatcgaggacgtgtccgtcagattgaaaacagatactgggcagcagtcatggttctgtccattggacctagcttttcgggaagcaatgccatcgccccgcggaaacggtaaaataaaaggagaaaaaaaaatgcagtactgtcagttgattgctgcttataaagaagcaaagggggcagagacgacgatttttacaggtaaaattatgtactttgcaaggagggaaacatgtgggaataagtagtgagcctacgtttagctctgtatataaagtgacttgattttatatgtactattacggctggtgaaacacgcttctttaattcaaagctatggagttttggcctaaataccataggcagctcagattgatacagacgttcgtttattttgccctctttacctctgtgtttgtatattacgactagattagaaatgaaaattaccatcaagccgtc

SEQ ID NO: 117062 - DNA, 1373 bp, Zea Mays
gtaccatttactgaaaagtttcctaaagcagatcctgctgcactcaaacttttgcagggctgatccgtattttaaaggcctcgcaaaagtagagagagaaccatcatgccagccaataacaaaaatggagttcgagtttgagcgaaaaaaggcgaccaaagaggatgtcaaggaacttatattcagggagatattggagtatcatcctcaacttctcaaggattacatgaatgggactgagaaaacaaactttctatatcctagtgctgttgaccatttcaggaggcaatttgcaaacttggaggaaaatggaggaaagagtggggcacacgccgcttcatcagacaggaagcatgtttcgctcccaaggacaaccacagttcattctaatccaatccctccaaatggaacctcccaggttcctcaaaagattcccacaggtagaccaggaagagtggttggtccagtaataccatttgagaacgcagctgcagttgatccatacagccaacgtagggtctcaaggaatccagtacttcctccaaccacgtcgaacatgtcagcctatgcctaccaccggaagtcagacaactcagacagagagctccaacaggagctggaaaaggaccgcatgcagtaccagccagcacagcggttcatggacgccaaggtagtatcacagatgtcccctgacttgaggtcttcctactacataccaaaaggtgtcccaaaggctgatcccgcagatagaaccgctctgcattctagcatgattcatgggatcgcccctttcagtggcattgcagctgttggaggtggctacaacaaggtcaatgcagttcagtatggagtttctaggatgtactagttctagttgcattggccatctccgaattcctcagctgatgagttgaagtaataacatggcgaagaccagatgtaggtaccgaagaactgccataccggctctgagccaaagatagaaaacatggaatacggatctcggatcgaggacgtgtccgtcagattgaaaacagatactgggcagcagtcatggttctgtccattggacctagcttttcgggaagcaatgccatcgccccgcggaaacggtaaaataaaaggagaaaaaaaaatgcagtactgtcagttgattgctgcttataaagaagcaaagggggcagagacgacgatttttacaggtaaaattatgtactttgcaaggagggaaacatgtgggaataagtagtgagcctacgtttagctctgtatataaagtgacttgattttatatgtactattacggctggtgaaacacgcttctttaattcaaagctatggagttttggcctaaataccataggcagctcaga

SEQ ID NO: 117063 - DNA, 2603 bp, Zea Mays
ctgcggtgctactgctaccgtgctacaccatcaggaatcggacgcgggacgctacaccaccaccacagctccccacctccaccctcgccgcgagttgctcagtcgcagactcgcagcgagcgaggcgggggcctcactcagcgcggggcgaggcgagcgtcccgggtgggcagcgtcgcggtcgcgggctcgatcgggttgggacggggaggtagggaggaggggccagggatctccactctcgtccgtgcgggagcgcgggcgtcgcatgcggcggcgcgccggggcaaatgctggtagcctcacgggcggaggagcgctcacgctgaggcggcggccggggagcgatgcaggcgccggagcagcagccgcagcagcagcagcagcggaggaagggttcgtcagagatggacttcttcagtgaatacggcgatgcgaacagatacaaaatccaagaggtcattggcaaaggaagttatggcgttgtttgctcagctgttgaccaacatactggtgacaaggtggcaatcaagaaaatacacaatatctttgagcacttatctgatgctgcccggatcctacgtgagatcaaactgcttcggctattacgccatcctgatatagttgagatcaagcatataatgctgcctccatcaaggagggacttcaaagatatctatgttgtatttgagctgatggatacagacctccaccaagtcatcaaggcaaatgatgatttaacccgagagcatcatcaattctttctctatcagatgctccgtgcactgaaatacattcataccgctaatgtttatcatcgtgatttgaagccaaagaatatattggctaatgctaactgtaaacttaaaatatgtgattttggattggcaagagtggcattcaatgacactcctacaacagtattctggacggattatgttgctacaagatggtatagggcccctgaactgtgtgggtctttcttttccaagtattcgccagctattgacatatggagtatcggttgcatttttgcggagatcttaactgggaagcctttatttcctggaaaaaatgtggtccaccagttagatttgatgactgatctcttgggtactccatcacttgatacagtttccaggattcggaatgagaaggcaaggaggtacttgagtagcatgaggaaaaaacagccagtaccatttactgaaaagtttcctaaagcagatcctgctgcactcaaacttttgcagaggcttttggcatttgatcccaaggataggccaactgctgaagaggcattggctgatccgtattttaaaggcctcgcaaaagtagagagagaaccatcatgccagccaataacaaaaatggagttcgagtttgagcgaaaaaaggcgaccaaagaggatgtcaaggaacttatattcagggagatattggagtatcatcctcaacttctcaaggattacatgaatgggactgagaaaacaaactttctatatcctagtgctgttgaccatttcaggaggcaatttgcaaacttggaggaaaatggaggaaagagtggggcacacgccgcttcatcagacaggaagcatgtttcgctcccaaggacaaccacagttcattctaatccaatccctccaaatggaacctcccaggttcctcaaaagattcccacaggtagaccaggaagagtggttggtccagtaataccatttgagaacgcagctgcagttgatccatacagccaacgtagggtctcaaggaatccagtacttcctccaaccacgtcgaacatgtcagcctatgcctaccaccggaagtcagacaactcagacagagagctccaacaggagctggaaaaggaccgcatgcagtaccagccagcacagcggttcatggacgccaaggtagtatcacagatgtcccctgacttgaggtcttcctactacataccaaaaggtgtcccaaaggctgatcccgcagatagaaccgctctgcattctagcatgattcatgggatcgcccctttcagtggcattgcagctgttggaggtggctacaacaaggtcaatgcagttcagtatggagtttctaggatgtactagttctagttgcattggccatctccgaattcctcagctgatgagttgaagtaataacatggcgaagaccagatgtaggtaccgaagaactgccataccggctctgagccaaagatagaaaacatggaatacggatctcggatcgaggacgtgtccgtcagattgaaaacagatactgggcagcagtcatggttctgtccattggacctagcttttcgggaagcaatgccatcgccccgcggaaacggtaaaataaaaggagaaaaaaaaatgcagtactgtcagttgattgctgcttataaagaagcaaagggggcagagacgacgatttttacaggtaaaattatgtactttgcaaggagggaaacatgtgggaataagtagtgagcctacgtttagctctgtatataaagtgacttgattttatatgtactattacggctggtgaaacacgcttctttaattcaaagctatggagttttggcctaaata

SEQ ID NO: 117064 - DNA, 2114 bp, Zea Mays
gtctttcacgcttgaccagccctgctctgctcattgctggaggcaaaggaaggtttgcgctggaggggttcgtcagagatggacttcttcagtgaatacggcgatgcgaacagatacaaaatccaagaggtcattggcaaaggaagttatggcgttgtttgctcagctgttgaccaacatactggtgacaaggtggcaatcaagaaaatacacaatatctttgagcacttatctgatgctgcccggatcctacgtgagatcaaactgcttcggctattacgccatcctgatatagttgagatcaagcatataatgctgcctccatcaaggagggacttcaaagatatctatgttgtatttgagctgatggatacagacctccaccaagtcatcaaggcaaatgatgatttaacccgagagcatcatcaattctttctctatcagatgctccgtgcactgaaatacattcataccgctaatgtttatcatcgtgatttgaagccaaagaatatattggctaatgctaactgtaaacttaaaatatgtgattttggattggcaagagtggcattcaatgacactcctacaacagtattctggacggattatgttgctacaagatggtatagggcccctgaactgtgtgggtctttcttttccaagtattcgccagctattgacatatggagtatcggttgcatttttgcggagatcttaactgggaagcctttatttcctggaaaaaatgtggtccaccagttagatttgatgactgatctcttgggtactccatcacttgatacagtttccaggattcggaatgagaaggcaaggaggtacttgagtagcatgaggaaaaaacagccagtaccatttactgaaaagtttcctaaagcagatcctgctgcactcaaacttttgcagaggcttttggcatttgatcccaaggataggccaactgctgaagaggcattggctgatccgtattttaaaggcctcgcaaaagtagagagagaaccatcatgccagccaataacaaaaatggagttcgagtttgagcgaaaaaaggcgaccaaagaggatgtcaaggaacttatattcagggagatattggagtatcatcctcaacttctcaaggattacatgaatgggactgagaaaacaaactttctatatcctagtgctgttgaccatttcaggaggcaatttgcaaacttggaggaaaatggaggaaagagtggggcacacgccgcttcatcagacaggaagcatgtttcgctcccaaggacaaccacagttcattctaatccaatccctccaaatggaacctcccaggttcctcaaaagattcccacaggtagaccaggaagagtggttggtccagtaataccatttgagaacgcagctgcagttgatccatacagccaacgtagggtctcaaggaatccagtacttcctccaaccacgtcgaacatgtcagcctatgcctaccaccggaagtcagacaactcagacagagagctccaacaggagctggaaaaggaccgcatgcagtaccagccagcacagcggttcatggacgccaaggtagtatcacagatgtcccctgacttgaggtcttcctactacataccaaaaggtgtcccaaaggctgatcccgcagatagaaccgctctgcattctagcatgattcatgggatcgcccctttcagtggcattgcagctgttggaggtggctacaacaaggtcaatgcagttcagtatggagtttctaggatgtactagttctagttgcattggccatctccgaattcctcagctgatgagttgaagtaataacatggcgaagaccagatgtaggtaccgaagaactgccataccggctctgagccaaagatagaaaacatggaatacggatctcggatcgaggacgtgtccgtcagattgaaaacagatactgggcagcagtcatggttctgtccattggacctagcttttcgggaagcaatgccatcgccccgcggaaacggtaaaataaaaggagaaaaaaaaatgcagtactgtcagttgattgctgcttataaagaagcaaagggggcagagacgacgatttt

SEQ ID NO: 117065 - DNA, 2301 bp, Zea Mays
ctacatccatccagcacaccataccctagttcttccttcccgaaccctcgcgccgccaccgccgccgtctagcattttcctacacccaatctgatctgaccaagccctctgaacaccaccgcccatcctcctcctcctccgccgccgccgcccaagatgggcttcgacgtgggcctcgtcccctacaaccccgacgggtggggtccacctgaagttgccgccgcgccgccttccctcggtggtggctcctcgtctgtccccttcgctcccttctcccgctccgacaagctgggccgcatcgccgactggacgcgcaacccgccgggccccggggctttcgccgcagctcgcgacgccgtcttcgatttcgcggggctcgaggactccatcgggctcgcgtccgcggacgactcgtccttccgcctcgtcgatggcaaaccgccgccgcggcacccgcggtttggacctcgctggcgcttccagcagcggccccaactcccgcagcgccgcgacgaagaggtcgaggctcggcgtcgcgaggccgagaaggagcgcgcccgccgcgaccgccactggcagcagaaccgccgcacgcaccaccagttcaaccgcggcgggccctcctcgtcgtctgccaaaccgtccgttgacatccagcccgagtggtcggtgaaggagcagatccctttctcatccttctccaagctctccttcgccgtcgccgaccagcccgaggatctcctcgtctgtggcgcagtcgagtactacgaccggacctacgatcgcgtcacccccagggccgagcgtcgcctcgagcgcttcaagtcgcggaacttcttcaaggtcaccactaccgacgaccccgtcatccgccgtcttgctgagaatgacacggccacggtcttcgccaatgacaccatcctggccgcactcatgtgtgcgccccgtagcgtccagtcctgggatatcgtaattcagcgtgttggcaacaagttgttcttcgacaagcgtgatggctctcagcttgatcttctcaccgtcaacgaaaccgcccaggaggcactccctgaggccaaggaagacatcaactccgcgcattcgctggcggttgaagccacatacgtcaatcagaacttctcgcagcaggtgctgctccgcaatggtgagaaggtcacgttcgacgagcctaacccgtttgccactgaaggggaggaagctgcttccgttgcttaccgctaccgccgctggaagcttgatgaggagacaagcttggttgctcggtgcgaggttcatgccgtgagcgttgatctacgcggcgagcgccagttccttacactcaacgccctcaacgagttcgatcccaaggtcactggtgttgactggaggaagaagcttgagacccagcggggtgctgtgcttgccactgagctcaagaacaatgccaacaagcttgcacgctggactgcccaggcgctgcttgccggcgcagacatgatgaagttgggttatgtgtcacggctgcacccacgcgaccagtacaaccattccattctcagtgtgatcgggtacaagccaagggatttcgctgcacagatcaatctcaacaccgcaaatatgtgggggatcgtgaagtctattgtggatgtctgcatgaagcttggagaggggaagtatgtgcttgtgaaggacccagtgaaaccacaggtccggctttatgaagtgccaaatgatgcattcgagaatgactacgttgaggaaccactccctgaggaagagcaagtgcgtcccttctccgaggatgttgatgccagcgcgaaggaaatggatgctgccgcagaagcggaggctactggaacaactgcaggcgctgagaagagtggtgatgtcgctgctgtgtgaaggcggtggctacaacctgaagaggtctttttcggaccttgaataaggttaccttggctagctatctactacaatcatgggcatctggatacaggtttgatgtttctaccatcgaaggttatgctattattgttcgctgaatcttgagttgtgttccctttatgtgtccttatggctggacttaaatggaatcctcaaactatattgcactttccaagactcacatgttgtggattgccagttctgtttactgtgatttgagttgtggtgattgcatttgcatttacttggccatattagtaccttcagtttgttggatgaatacatgatgccatgtgaatattgccatttgtgcaaatccattgtttcgaatctgtccaatacgctcgttgatgttcgatt

SEQ ID NO: 117066 - DNA, 279 bp, Zea Mays
atggtaccccctggggattgttcaagcttccctcagtggggttctgggggtgctcctgtggcagactggtctgcgactggtagaagcttggatacccaagaccaccgtactgagatggctgatgtgcctggcggaagccaccatgctgactctggccctggaaaccatagaagttaccaggcggaactgcagaaattgttcttgaaccagcgcctccatgaagccacatcgttgaattatcactctgctgtagtgctgcataatgattggggtgtttga

SEQ ID NO: 117067 - DNA, 977 bp, Zea Mays
aattctcggaagccggccgatgtcgagtccaaaattgcaaaaatctctgccgtgcctctcgtctctcttctcaggcgccacgcaaaacgttctccgttttccctctccggatccggcccgcgggggccaggagctaccgatgatccggaccgcaacggtgcgagcgcgtctcctcctatcgcgctcctacgtagcacaggcacaggcagcttctcgctggcctctcgtccgctggaaggcttcgcatcttggatctgtacgctctttctatcagatggacattacaaggcaatacaaaaataaaagtttgactgcaagagggtgccatagctcccctgagagtcaagaattagcaatgaaaagctgtgttccatgcaactctaaggatttaggtcccatgtcagaagattctgctaaaaagttgcttgaacaggtgaatggttgggaactgatcactgaaggtggtgttctgaaattacatagaacatggaaggtgaagaactttgttaaaggacttgagttctttcagcttgttgctgctattgctgaggaagaaggtcaccatccagatcttcatcttgttggttggaataatgtgaaaattgatgtttggactcattctgtcagaggtttaacaagtaatgatttcatccttgctgcgaagatcaatcatctcactttagacggcattataaggaagaaagctaaatagccaatgtctcagaagcaactcaaatatgcaacttatatttgtttggaattttgtatgcgcagcgatggagaagccaaatgttgaggacacctcgccctgagtgagattaacttgctgaaatgtagtgccttattcagtagctcattttaccttgttattaattagtaatttgcatgagtagacgttgaatccatcattgtacttggttacctacttaccttgcctgtcagttttggaaagacacatggtcgagtaaacataccga

SEQ ID NO: 117068 - DNA, 891 bp, Zea Mays
aattctcggaagccggccgatgtcgagtccaaaattgcaaaaatctctgccgtgcctctcgtctctcttctcaggcgccacgcaaaacgttctccgttttccctctccggatccggcccgcgggggccaggagctaccgatgatccggaccgcaacggtgcgagcgcgtctcctcctatcgcgctcctacgtagcacaggcacaggcagcttctcgctggcctctcgtccgctggaaggcttcgcatcttggatctgtacgctctttctatcagatggacattacaaggcaatacaaaaataaaagtttgactgcaagagggtgccatagctcccctgagagtcaaggtgaatggttgggaactgatcactgaaggtggtgttctgaaattacatagaacatggaaggtgaagaactttgttaaaggacttgagttctttcagcttgttgctgctattgctgaggaagaaggtcaccatccagatcttcatcttgttggttggaataatgtgaaaattgatgtttggactcattctgtcagaggtttaacaagtaatgatttcatccttgctgcgaagatcaatcatctcactttagacggcattataaggaagaaagctaaatagccaatgtctcagaagcaactcaaatatgcaacttatatttgtttggaattttgtatgcgcagcgatggagaagccaaatgttgaggacacctcgccctgagtgagattaacttgctgaaatgtagtgccttattcagtagctcattttaccttgttattaattagtaatttgcatgagtagacgttgaatccatcattgtacttggttacctacttaccttgcctgtcagttttggaaagacacatggtcgagtaaacataccga

SEQ ID NO: 117069 - DNA, 134 bp, Zea Mays
cactacgagaaagtcggcttttagaaaaagttgtttcctggatccagccctttggttggcttttggcttttaggagagcaaaagccaaagccaaaagtcaaaccaaacacacccttaataccctgtctttaaat

SEQ ID NO: 117070 - DNA, 1564 bp, Zea Mays
ctgaggcctgagctgcctccatatttgcattcttcaccctcgcttcacgtcaccaccattgccatccaagaacaaattaagcgggacactggaaacaaagagagacatgggccttcgcggcggagctcttgccctgcttctgctcctgttcgtccacggaggccagcgagcagcagaggccggcggggacgcgttcgtgagggtccagggcacccgcttcgtgcaggacggcaagccgttcttcgccaacgggttcaacgcctactggctcatgacattcggcgccgaccccgcgcggaggggcaaggtcacctcggcgctcagccaggccgccggcgccggcctctccgtggccaggacgtgggcgttcagcgacggcggcggcggcggcggcagcgcgctgcagtactctcccggccgctacaacgagaacaccttccaggggctggatttcgtgctgtctgaggcaaggaagcatgggattaagatgattctgagcctcgtgaacaattacgacagctttggagggaggaagcagtacgtgcagtgggcgagggagcgggggcagaccattggatctgacgatgagttcttcactaacccctttgtaaagggcatctacaagaaccatatcaaggccgttctgacgagggtgaacacgatcaccggcgtggcatacaaggacgacccgacgatcatggcgtgggagctgatgaacgagccgcgttgccagtccgacgtgtcgggccacgccatccagtcgtggatcacggagatggcggcgcacgtgaagtccatcgacgggaaccacctgctggaggccggcctggagggcttctacggcgcgtcgtcggcccgcaggtccgcgaacccgtcggggtaccaggtgggcaccgacttcatcgccaacaaccgggcgcccgggatcgacttcgccaccgtgcactcgtacccggaccagtggctgggcggcctggacgcgcaggcgcagctgcggttcctgggcgcctggctcgacgcccacatcgccgacgcgcgggcggtgctgcgcaagccgctgctggtggccgagttcggcgagtcgcgccacgacccgggctacagcggcggccaacgcgacgcggtgttcggcacggtgtacgccagggtctacgactcggcgcgcgccggaggccccgcggcgggcgcgctcttctggcagctcctggcggaggggatggactcctacggggacggctacgaggtcgtcctcccgcaggcgccgtccaccgccggagtcatcgccacgcagagccggaggctgcagggcctcgccagggcgttcgtgcgcgcgcgcaaggcccaccaggggaaggcgggcaagggcgctaagggtggcggcaactgaaagtggggtgaaacgtgtgtggcgagatcaagaagagtgtgtgtgtgtatgcgtcgatgtctcctcgagatgatttgaagattcatccgggagccaagagttacttctacatactatctagcgttgtcctccatgttttattatttagaggacttgcgtttataaaaaaaataaaaa

SEQ ID NO: 117071 - DNA, 1700 bp, Zea Mays
ctgcctgaggcctgagctgcctccatatttgcattcttcaccctcgcttcacgtcaccaccattgccatccaagaacaaattaagcgggacactggaaacaaagagagacatgggccttcgcggcggagctcttgccctgcttctgctcctgttcgtccacggaggccagcgagcagcagaggccggcggggacgcgttcgtgagggtccagggcacccgcttcgtgcaggacggcaagccgttcttcgccaacgggttcaacgcctactggctcatgacattcggcgccgaccccgcgcggaggggcaaggtcacctcggcgctcagccaggccgccggcgccggcctctccgtggccaggacgtgggcgttcagcgacggcggcggcggcggcggcagcgcgctgcagtactctcccggccgctacaacgagaacaccttccaggggctggatttcgtgctgtctgaggcaaggaagcatgggattaagatgattctgagcctcgtgaacaattacgacagctttggagggaggaagcagtacgtgcagtgggcgagggagcgggggcagaccattggatctgacgatgagttcttcactaacccctttgtaaagggcatctacaagaaccatatcaaggccgttctgacgagggtgaacacgatcaccggcgtggcatacaaggacgacccgacgatcatggcgtgggagctgatgaacgagccgcgttgccagtccgacgtgtcgggccacgccatccagtcgtggatcacggagatggcggcgcacgtgaagtccatcgacgggaaccacctgctggaggccggcctggagggcttctacggcgcgtcgtcggcccgcaggtccgcgaacccgtcggggtaccaggtgggcaccgacttcatcgccaacaaccgggcgcccgggatcgacttcgccaccgtgcactcgtacccggaccagtggctgggcggcctggacgcgcaggcgcagctgcggttcctgggcgcctggctcgacgcccacatcgccgacgcgcgggcggtgctgcgcaagccgctgctggtggccgagttcggcgagtcgcgccacgacccgggctacagcggcggccaacgcgacgcggtgttcggcacggtgtacgccagggtctacgactcggcgcgcgccggaggccccgcggcgggcgcgctcttctggcagctcctggcggaggggatggactcctacggggacggctacgaggtcgtcctcccgcaggcgccgtccaccgccggagtcatcgccacgcagagccggaggctgcagggcctcgccagggcgttcgtgcgcgcgcgcaaggcccaccaggggaaggcgggcaagggcgctaagggtggcggcaactgaaagtggggtgaaacgtgtgtggcgagatcaagaagagtgtgtgtgtgtatgcgtcgatgtctcctcgagatgatttgaagattcatccgggagccaagagttacttctacatactatctagcgttgtcctccatgttttattatttagaggacttgcgtttagttcctgtgtggatcacgatagtcgagatgagcgaagttatatgcaaaagtcgtggactcgtggggggagcaactctacaatctcgagacctttgttggtttgttcgcctctgattaaagactaaagacagttattcgaacggttgc

SEQ ID NO: 117072 - DNA, 107 bp, Zea Mays
gaacctctgttgcttgacatttcgtttttatttaacatacataaagattgtcacttgctttgtagtgcagaggctgtgtcgtacagttggaatttactagttaaaat

SEQ ID NO: 117073 - DNA, 833 bp, Zea Mays
atgctgcacgaggcggcgccctgcacgtgcgggctgctctacggcagctgcggcggcggctgctcgctgctgttcgccgcagccgcggcgggggcggaccactactataagcactgcggcggcggcgacggggaggccttcagcggcgggctgtacgggggctccgtggactgcacgctctcgctgggcacgccgtccacgcgccgcgccgaggccggggcggcggcccgcgcgcccgccggcctgcacagctgggaggcgcccgctcccagctgcaacggcggcaggcagcaggaggcgcgcggcgccgaggcgggcgctcgccgctgcgccaactgcgacaccacctccacgccgctctggaggaacgggccgcgcggacccaagtcgctgtgcaacgcgtgcgggatccggtacaagaaggaggagcggcgcgcggcggccgcggcggtggcgccggcggcggacggcggggtggactacgccgcctcgtacggcgggtacgcgcggcagccgcagcagtggggctgctacggcccggcggcggccgtggcgaaggcggcgtccctgggcatgttcggcgtggacgccgcggccgaggtcgtcgacgggccgtgcctgccgtgggggctcggcgtcatgccgtcgtcgccggcgttcggggccgtgcgggagatgccgagcctgttccagtactactaggtacactagtaccacagctagctagcgcctagcggggatggtaggctgcaactccacgtccgaagtcggaagtcccccctttttctctttctcctcttttggtaacaacaggatgcttgcacttctttttg

SEQ ID NO: 117074 - DNA, 1110 bp, Zea Mays
acccatcgcacgcactcctcatcttatcccccgcctcctccggtcctcccgccgctgttgctcacttctgagtcccgacgcacgagctcccaagagctagccatggcgtccaccaccctctcctccgccttcaccctcctctcccgcccctccacctccccgtgccccgccgcctcgctcccgaggtcctcccacgccgcgccccacatccgccggggccgccgcgccgtcgccgtcgcgtgcaccgccaccgagtcccccaagatcctggagctcggggacgccatcgccgggctcacgctcgaggaggcccgcagcctcgtcgaccacctccaggagcggctcggcgtcaccgccgcggccttcgcgccggccgccgtcgtcgcggcgcccggggcgggcggcggggccgcggccgaggaggaggcccccgtcgagaagacggagttcgacgtgatgatcgaagaggtgcccagcagcgcgcgtatcgccactatcaaggtggtgcgcgcgctcaccagcctcgcgctcaaggaggccaaggaccttatcgagggtctccccaagaaggtcaaagaggccgtcagcaaggacgaggccgaggacgccaagaagcagctcgaggaggtcggcgccaaggtgtctatcgcgtgacactaggtatacgagtactccttttttttctttagtttcttttgtttgcatccccaatctcttgtatccccactgttgttcgtaaggaattgctgtttcatgatatgagatttgtgtatgtgtcgattcactagcttgtatgtgcgtgatatatctctgccttgaattggcagtgaatgtgatctgctcgaaactggtaatgtgtatttgccttcttggcactatcattaattcatgatggtggacaaatggacattttgctttccttgtaagtgcatgttctgttccttgccattttgctagcagtctttgtagtggtttccattgtgcatttttatactgttagctagtttgtgaaccctactttttcaagggatttttattttcccaagaaatattagttcatttttctttgtaaaaatagaaatcactcgagaaaatagtgggaggggggtt

SEQ ID NO: 117075 - DNA, 171 bp, Zea Mays
atggcggaggcgctctggtctggcaaccgcgacgcgtcgggcaggaagcggtacgccaaggcgactgaccggctcatcgactggcggcagcgcatggtcgggagtggggtccgggccgagcccatccagtcgctttggtgccgaacacgacccggtgggacgcccgcttag

SEQ ID NO: 117076 - DNA, 195 bp, Zea Mays
atgttttgtttagccatatgttacacaaattgcttgggattcatgtgtaccaaaatttcatggttgtcagttttaaataccagtggtccgaaaatagcacacacacacatcattcattgcaaattcgagcatcatattagtaagtgttgcctctacataaaagtaagaagttcatttcttcggcagcaacattag

SEQ ID NO: 117077 - DNA, 125 bp, Zea Mays
atttatttgttatcgctccggcccgatttgcagagtttttcgatcctacctttgatccctcgtcgtattcaaaactaaggtcaaagtttcgaacaatagagaaaaggtgaggttcaaaacttcag

SEQ ID NO: 117078 - DNA, 408 bp, Zea Mays
atgtcgcgcacccgcttcctgtgccgcagctcgccgcgcagccgccgcaggcagcggcgcgccagggcgagcggggccttgacgagcgccagccccagcaggctgaccaccgcgcacgggcagcagccgagcgcgatggcgtccgccagcgtcaccgccacgcaggaccggcacgtctgcgccgtgcagtccgcctggtccaccaccgggacgggcgcggcgggcccatcgtggcggtggaaccgcccgcgccggctcgcctccatcgcgccgccgccgccgccgcgacgaaccccggcgcgcccgccggtcaagtcctcattccgatgccgatgcgaccacgaattcgccgctggttttcgagggggcgagcgagcagcgggaggccggaggagggctggcgagtaa

SEQ ID NO: 117079 - DNA, 1566 bp, Zea Mays
gcgacggcgccgtggacctccactccggaaattccggccgcacgtcgcccgtctcgcccggagtccggatccctaggctatacaagccatgccttcgcatctctctattcccctgctcctttgcgcccacgccaacccagttaccagagccgccattgccgccggccctgcgtatcggcaacaccacacgaccgcagccattgtatcacctattcggtccgagacgcttcgattcagctcgctgttggtgttcccggactcgctgcgcgggattgatggcaggtgacgcgtgaatttgtcgtcggagttgaagctccgccgtgaccgcgctcactgccgtggcccggaacatttgcgctactaacctcggtggaggtggttctcaaatctcaagtccatccacgcggaatcggacttgacctttatttaaggcgcagggctgcaggcccgttccctcagctgaccatacgcaaccgcacaggaaacaggaccgtcgccgcgaaccgccgtactctataccgacttctccgaacctcctgtcctccataccggcgctcctaccctcgctgcaatggagttgaggaggcctgcgccctctcctctcgtcgacaactacgtggtacctggtgatgtcgtcctggacctctccgagatgaacaaccagaccattaaactcggcgcgggcctgcgtcaggagtgtgacaccatcgaggcgactagtgctgggaagttgcggcagttgaaacccaacaagtattgtattgaaaactcccagaagcggtataaaccttctgtagaagataccgttcttggtattgtggtcgacaccaaaccagacaactttttggtagacataaagggtcctaatttggcctttctaccagtactttcatttgaaggcggtacaaggagaaacatacccaagttcaagattggtacattaatatatgctcgagtggtgaaagcaaatagtatcatgaatcccgagctctcatgcatggatgctactgggaaagctgccaaatttggacagctgaaagatggttatatgttcgacacatcaactggcatgtcacgaatgttgttaagttccccaacgtgtccagttctggaggtccttgggaaaaaactgtcgtttgagattgctgttggactcaatggtcgagtctgggtgaatgctcctgcagcaagtactgtcattcttgtatcaaatgcaattatgaggtcagaatctttgagcggcataaaacaaagagctatggtagaaaatctattggagagattgtcatgatgataagtcagcaagcattagtctaaagtaaaatgggggaatttccattgtgtcagttcaaagtaaaagtaggaaagtttgagatcaaagtgactatccacatcaaaagattattatgtatcacgtgtcgtagtatacagtacactatactctttttttattaaatttatcaatgtatttatcaaagtcttgcatcccttgtttaatattcgggtctagtgcaaccgtgagagcaccaggacacggttttgaagcagtcttttcatgtttgtggg

SEQ ID NO: 117080 - DNA, 762 bp, Zea Mays
cttaattgatcatcagaacttcagaagtatggagtaccaaattttcttcgtcttagcaaatatatcctcattgcctgtgcgaacctctcagcttgtggaatgatactcagtctggcctgttttcttttggctttatctggttgttcttttactgtattgatgctgttcctattttcaagctactgggaaagctgccgaatttggacagctcaaagatggttatatgttcgacacatcaactggcatgtcacgaatgttgttaagttccccaacgtgtccagttctggaggtccttgggaaaaaactgtcgtttgagattgctgttggactcaatggtcgagtctgggtgaatgctcctgcagcaagtactgtcattcttgtatcaaatgcaataatgaggtcagaatctttgagcggcataaaacaaagagctatggtagaaaatctattggagagattgtcatgatgataagtcagcaagcattagtctaaagtaaaatggaggagtttccattgtgtcagttcaaagtaaaagtaggaaagtttgagatcaaagtgactatccccatcaaaagattattatgtatcacgtgtcgtagtatacagtacactatactcttttttatattaaattatcaatgtatttatcaaagtcttgcgtcccttgtttaatattcgaagggcgggtctagtgcaatcgtgagacctgtctcactaaatcaccaggtcacggctttgaagcagtcttatcatgtttgtggg

SEQ ID NO: 117081 - DNA, 1420 bp, Zea Mays
ctttatttacccagaaaccctagtctctcacgctcgcggagtcagtctcaccatctctctcggccgacagccggccaccaccagccgccagtagcaatagcaaattagcaacccgccgagcaccgacctctccatagttcctctacggctctaccgagcaaccgccggcgtcgaccctgccgtccaggcccgtcctgccgcggtgccgcctgcgtccctgccccagccacccggccgccacccgccgccgccagcgaggagcgagtagtagcgaccctggtccctgccgcccttgcgttcgtggctccctgcccagtgcccctgcgtcagcgtcactgcactctccgaggtggaggtggttctcaaatctcaagtccatccacggcgctactaccctcgctgcaatggagttgaggaggcctgcatcctctcctcttgtcgacaactacgtggtacctggtgacgtcgtcctggacctctctgagatgaacaaccagaccattaaactcggcgcgggtctgcgtcaggagtgtgacaccatccaggcgactagtgctgggaagctgcggcagttgaaacccaacaagtattggattgaaaactcacagaaaagatatataccttctgtagaagataccgttcttggtattgtggtcgacaccaaaccagacaactttttggtagacataaagggtcctaatttggcctttctaccagtactttcatttgaaggcggtacaaggagaaacatacccaagttcgagattggtacattaatatatgctcgagtggtgaaagcaaatagtatcatgaatcccgagctctcatgcatggatgctactgggaaagctgccgaatttggacagctcaaagatggttatatgttcgacacatcaactggcatgtcacgaatgttgttaagttccccaacgtgtccagttctggaggtccttgggaaaaaactgtcgtttgagattgctgttggactcaatggtcgagtctgggtgaatgctcctgcagcaagtactgtcattcttgtatcaaatgcaataatgaggtcagaatctttgagcggcataaaacaaagagctatggtagaaaatctattggagagattgtcatgatgataagtcagcaagcattagtctaaagtaaaatggaggagtttccattgtgtcagttcaaagtaaaagtaggaaagtttgagatcaaagtgactatccccatcaaaagattattatgtatcacgtgtcgtagtatacagtacactatactcttttttatattaaattatcaatgtatttatcaaagtcttgcgtcccttgtttaatattcgaagggcgggtctagtgcaatcgtgagacctgtctcactaaatcaccaggtcacggctttgaagcagtcttatcatgtttgtggg

SEQ ID NO: 117082 - DNA, 718 bp, Zea Mays
ctttatttacccagaaaccctagtctctcacgctcgcggagtcagtctcaccatctctctcggccgacagccggccaccaccagccgccagtagcaatagcaaattagcaacccgccgagcaccgacctctccatagttcctctacggctctaccgagcaaccgccggcgtcgaccctgccgtccaggcccgtcctgccgcggtgccgcctgcgtccctgccccagccacccggccgccacccgccgccgccagcgaggagcgagtagtagcgaccctggtccctgccgcccttgcgttcgtggctccctgcccagtgcccctgcgtcagcgtcactgcactctccgaggtggaggtggttctcaaatctcaagtccatccacggcgctactaccctcgctgcaatggagttgaggaggcctgcatcctctcctcttgtcgacaactacgtggtacctggtgacgtcgtcctggacctctctgagatgaacaaccagaccattaaactcggcgcgggtctgcgtcaggagtgtgacaccatccaggcgactagtgctgggaagctgcggcagttgaaacccaacaagtattggattgaaaactcacagaaaagatatataccttctgtagaagataccgttcttggtattgtggtcgacaccaaaccagacgtaagtatacatttatattcaggagtatgtgagttgatacttgtttc

SEQ ID NO: 117083 - DNA, 866 bp, Zea Mays
ggcgaacgcgttcggcgtgcaaacatgagccgaaccgaaggcgaggaatcgatgaagcgaagttcaccatggaggaatcagcgatgttgctgcacacacgacgcgacgaggaacgacgataactggcatggagtcccgacgcgacagaggaaggggttcgatggtttgacgacaccggcgaggtcaacgacgagccgaccaaacaaaactccacgacgccgaccggcacacgggccagagaacggaggctggcgaaatccgagctgggcgagcgcacggctggcgagctcgcgcgcacagctatggagacgagggaggagcgagttggagctggaggccgagctggacatgaggaagatgctgcgagcggccctgtcaccggtggccggactgggcaagcgccatgggaaagacgcgtggttgggctgggcgagctccaagctggggcgaactgggcgagatccgggctggggaaaaagctccggccatgggggaagcaaggggccgggggcgagcttgaggtcgaacgccggccagggagcagagcagagctgggacggcgtgtaggggaggagggaggagcggctgggcgcagggaagaagcaccggcgagctgggacgcacgcaggggagctccagggcgcgcgcaggaacttggaccagggagcagcgacgaccatggaggagagagagggaagcgcggagaggagagagagagggaagcgcggagagtagagagaggaggggcggctgggcacgagcaggaagaagctcggcgcgcagagggagaagtagagggagggagagaagcacgactgggaagaagccagtcttcagcgacgggatttttcctccaggaatgagcg

SEQ ID NO: 117084 - DNA, 1559 bp, Zea Mays
caaatcccccactccgcagtccccgacggcccacggcagagccaccagcagcagcaggcagccccagaaatcgagcaaacaagctgctccatggcctcaccaacccgaacaccatcgcctccgccggcggtcgagcccatcgcgccttctctctcttcagaacatccgcctgtcaacccctcctgtgacggatccttctcgccggagaacccagcgccagctccacctcctccccctgctactccgcatcctcatactcccagcgatagctctccttcctcaactccgcatccctcggcgccacagcctcttccatctccgcctcctcatactcccgacgatagctctccttcctcaactccgcatccctcggcgccacagcccccaccatctccgcctccgccgagcgctgatgcttctcctccactttcgcgacagggcgaaacgtcaccgccgcgcccatcgccccctccctcacccgctccagtatccccgcctactccagcgccggcgtcctcggaagccaagtcggagcaggaggaggcggaatcggctagcgaatcggggagcatgacgctagccatcgttctagccaaaactgaagatgcaacgccgccgaaggcctcctcggccgaggcgtccccaaccagatcgccgcagaaggaatcggccgtcaccatcgcgaagctcctctccgccgaagacctcgcggcgatggaggctaaggccacgccggacaaggttacacctccgagcgacgctgggtccctcgccgctgccgccgccgttactaccgttgggggagtcagtggcggcgtggggtccaagaggtggctcctaggcggcgtcccggagaaggtgcggcgcgctgagctgaggagggccgagctagggtttagggtttcggccgccgtgttctgcctggtcgcgctctccgtcatggcggccgataccacgacgggctggtccggcgactccttccgccgctacaacgagtacaggtacgtacttgctgcgagcgtcgtgacttttacctactgtggattccagttggtagccgaggtgcattacgttgtcacagggagacacatgattcgagccccattccgcagctacttcaatcttgccatggatcagatgttagcttacctcctgttgtcagcatcttcagcagcgctttctcgtaatggtgtttggatgtcgcggtttggaggggatcagtttaccaaactgatcaatgtctcggcttccatggcattcctagctttcattgctctgggtcttaactcggtgatctctgcttactgcttcttcagcttggtttcatagagctaccgttgtgcattgcatgatgtgaataatactacctgtatgcttcttggagcactgaaccttgatttatgtgaaatttctacatgatttctgtgaaatccctaaactccagtgggcctatattgtagcagtacattgagtcaaggttggcctttaaaattttggaagcggatgtaccaaggtttcatgctggtcgttatcgttttatactgaaagtctgaaagata

SEQ ID NO: 117085 - DNA, 1572 bp, Zea Mays
tcctcactccgcacttccgcagtatcaactggcctcggccgcacaaatcccccactccgcagtccccgacggcccacggcagagccaccagcagcagcaggcagccccagaaatcgagcaaacaagctgctccatggcctcaccaacccgaacaccatcgcctccgccggcggtcgagcccatcgcgccttctctctcttcagaacatccgcctgtcaacccctcctgtgacggatccttctcgccggagaacccagcgccagctccacctcctccccctgctactccgcatcctcatactcccagcgatagctctccttcctcaactccgcatccctcggcgccacagcctcttccatctccgcctcctcatactcccgacgatagctctccttcctcaactccgcatccctcggcgccacagcccccaccatctccgcctccgccgagcgctgatgcttctcctccactttcgcgacagggcgaaacgtcaccgccgcgcccatcgccccctccctcacccgctccagtatccccgcctactccagcgccggcgtcctcggaagccaagtcggagcaggaggaggcggaatcggctagcgaatcggggagcatgacgctagccatcgttctagccaaaactgaagatgcaacgccgccgaaggcctcctcggccgaggcgtccccaaccagatcgccgcagaaggaatcggccgtcaccatcgcgaagctcctctccgccgaagacctcgcggcgatggaggctaaggccacgccggacaaggttacacctccgagcgacgctgggtccctcgccgctgccgccgccgttactaccgttgggggagtcagtggcggcgtggggtccaagaggtggctcctaggcggcgtcccggagaaggtgcggcgcgctgagctgaggagggccgagctagggtttagggtttcggccgccgtgttctgcctggtcgcgctctccgtcatggcggccgataccacgacgggctggtccggcgactccttccgccgctacaacgagtacaggtacgtacttgctgcgagcgtcgtgacttttacctactgtggattccagttggtagccgaggtgcattacgttgtcacagggagacacatgattcgagccccattccgcagctacttcaatcttgccatggatcagatgttagcttacctcctgttgtcagcatcttcagcagcgctttctcgtaatggtgtttggatgtcgcggtttggaggggatcagtttaccaaactgatcaatgtctcggcttccatggcattcctagctttcattgctctgggtcttaactcggtgatctctgcttactgcttcttcagcttggtttcatagagctaccgttgtgcattgcatgatgtgaataatactacctgtatgcttcttggagcactgaaccttgatttatgtgaaatttctacatgatttctgtgaaatccctaacagggtgtttggatcccttcattttagaggaattggaagtcactcaataaattaaattatttagtttggaatttgacattccaccactttcc

SEQ ID NO: 117086 - DNA, 1355 bp, Zea Mays
cagcaccaacgagcacctctaagccaaagcaagttgctaggtcctttgaaccagcaactgaagcttcctcgtctcatcatcgagaccagtaagcaacatggcggctaatctcaagtgggctcctgttctagccctcgtcgtcgtcgttgctgccatggttggcaccacgagcgccggcaacatcgcagtgtactggggccagaacggcaacgaaggcagcctggcggacgcctgcaactccgggctctacgcctacgtcaacatcgcgttcctcacaaccttcggcaacggacagaccccagtcctcaacctcgccggacactgcgaccccggctctggcagctgcaccggccagagcagcgacatccagacctgccagtcgctgggcatcaaggtgctcctctccatcggcggcgccagcggcagctacggcctctcctccaccgacgacgccaacagcgtggccgactacctgtgggacaacttcctgggcggcagcggctcgtcccgcccgctcggcgccgccgtgctcgacggcatcgacttcgacatcgagaacggccagtcggcgcactacgatgacctggcgaacgcgctcaagggcaaggggagcgtgctgctgacggcggcgccgcagtgcccctacccggacgcgtcgctggggccggcgctgcagacgggccagttcgacaacgtgtggatacagttctacaacaaccccgggtgcgcgtacgccaacggggacgacaccaacctggtgaacgcatggaacacgtggaccagcagcatcaccgcggggagcttctacctcggcgtcccagcgtctccccaggccgcgggcagcgggtacatcgaccccggcaccctgacgggcacggtgatccccgccatccgaggcattggcaactacggcggcatcatggtgtgggaccgctttaacgacgtgcagaacaactacagcagccaggtgaagggcagcgtctgatgggcataccgcatacgaagcttcaagctacagcacctagccatgcatatatatatagtggctattcgtcaagttatcggactgctagatacaaatataataagagcggatcatcgggagacaaagacgcatgtcagctattgtctcgttttctaagcaacgagcgagagctgcatgcgctggttagatttaatatggatattgcccatacgttatgtaattaaatcaaataaatgttaagttcatattgaatgtgtcgaatcccatggtacaaccctatttaatatgagtctcttagggtttctatagaattaattgaaaaaatacaagagaagaactcttcgcgaagagtctgtctctattcactctc

SEQ ID NO: 117087 - DNA, 2546 bp, Zea Mays
gcggaggagccgcccgaggacgggtagcgtggccgtgcctgcatcatcgcccacaggcgctggacaaggctgtgcgttcgggtccgttcgcgatttatttggccagaatcggctggggaatcggtcccaaacaggcttattcttcttccgttcacccccctccctctctctctctgtcctccttgcggcggggacgagccgagcgccgccgccgttctcgtgctattcgcctctcacgagcagcacccaccagatcatccgtctgcttgcttcacaatccatctaatggaagaccattcatcatgggactatcttccagttgagcacattagaactcctgtattcaactctggagttgtttccgaagctagcaatggaggcaacgacttctcaatatcattggatgctgtcgtccctgatgatatcctggagaggattttcacattcctgcctatagcaagcatgatgagggcaacatcagtgtgcaagagatggcacgacattatctgttcaaggagatttctgtggacccacatgctgcctcagcggccatggtacttcatgttcacctctaataaaactgctgctggttatgcttttgaccccatcctccgcaagtggtatgatttagagcttccttatattgacaagagcagctgctttatctcttcttcttgtggcctagtttgcttcatggacaatgacaacaggaacaccatttctgtatgtaaccctataacaaagcactccaggaggcttttagagccgcccggtgagacattgccagactacagtaccattgccatgaatgtggatcggctgtcccataagtactccattgcattggcgaaatctaagcagattcctgaagattttgtccgatgggacttttcagtatacaagtacgactcatcgagtggttcatgggtaacttctgtgagggaagtgttcgttggttggagaggaggtgataatagtgtcatatgtgacggtgtcctgtactgcttgattcattccactggtgctcttggcaatgtcaacccccgtcatggccttatcatgtatgaccttgccggtgaaccatccgagacttcgttgatgcaaacgtcaatctcagtaccttgttctctcacgtgtggccgtctggtaaacttgaaggagaagctggttctggttggtgggatcgcaaaacacaacagacctgatatcattaaaggcataggaatatgggagctccatgaaagacagtggcatgaggtagctcggatgccccacaagttcttccaaggatttggtgaattcgatgatgtttttgcctgcagcggtatagatgaccttgtctacatacaaagctatggtgcaactgctttgcttgtttttgacatgatgcaaaagcaatggaggtggtccgttaaatgccctgtgagcaaaagatttcctctccagctattcactggcttttgctttgaaccgcggcttgatatcacagtttaatatgtacaaaattgtgcttttgccttttagtggagtcaggtcagctaccatgctaattcttatcaggaaattccatgcaagttttgtcgcattctttcagccattttcccgttacccttttctgagctgtaaccactgatggcccctcattggccctgcagcatgcaattatttgtctgttctgacatcaccagattgtaaatgtatagaatgctacatgtgctcacttgcatatggctgaagatgtacctttatttgcagaaacagtgttaagctgtacctttgtttgcaaaaaacgggacatatatgcactatgcttatcaggtttccaagttatcccttgaactgcgtcggcaacatctggatagcatgtttaatctgttgcacataattgagtgacaggttatccttacaggttagaggttacagcatgaccaggctgataaagtttcggtgctgtaaataatgtcgtctgctttgtttttgttcgatatcttgctatccgctatgttttgagcccacaccctattctatatgtcatagctgacatttgtccctttccggtcttaatggacaacttctactgttcacattttgtttcttgtgtaactattcatccatgctggcccagcatcgtctgaggcggctgctgctgctgctgctgggaacagcttagggcactgatctcccccggcgcttgaaagtcgtctctctggacactgaccagtgccttgctcatttttgtagaatcatcatgggccaaatccaggttttctcatgtgggggctggtccatccattattgtctgagatggtgcccccatgactctgcagcaccagcacggtgcatacgagccagagacgccattgatgaggtttcgacgctagctgctgtctgctgtgtgcgaatagtgctcagctgaggccagtggcagtgccacagggtactgtgagaccagcaagcacagaacatatacgtaatatatacatttgtatttgaaaaaataaagaaaaaacttgtcagatcacgctcagtctagacgtcatacggtg

SEQ ID NO: 117088 - DNA, 1807 bp, Zea Mays
gcggaggagccgcccgaggacgggtagcgtggccgtgcctgcatcatcgcccacaggcgctggacaaggctgtgcgttcgggtccgttcgcgatttatttggccagaatcggctggggaatcggtcccaaacaggcttattcttcttccgttcacccccctccctctctctctctgtcctccttgcggcggggacgagccgagcgccgccgccgttctcgtgctattcgcctctcacgagcagcacccaccagatcatccgtctgcttgcttcacaatccatctaatggaagaccattcatcatgggactatcttccagttgagcacattagaactcctgtattcaactctggagttgtttccgaagctagcaatggaggcaacgacttctcaatatcattggatgctgtcgtccctgatgatatcctggagaggattttcacattcctgcctatagcaagcatgatgagggcaacatcagtgtgcaagagatggcacgacattatctgttcaaggagatttctgtggacccacatgctgcctcagcggccatggtacttcatgttcacctctaataaaactgctgctggttatgcttttgaccccatcctccgcaagtggtatgatttagagcttccttatattgacaagagcagctgctttatctcttcttcttgtggcctagtttgcttcatggacaatgacaacaggaacaccatttctgtatgtaaccctataacaaagcactccaggaggcttttagagccgcccggtgagacattgccagactacagtaccattgccatgaatgtggatcggctgtcccataagtactccattgcattggcgaaatctaagcagattcctgaagattttgtccgatgggacttttcagtatacaagtacgactcatcgagtggttcatgggtaacttctgtgagggaagtgttcgttggttggagaggaggtgataatagtgtcatatgtgacggtgtcctgtactgcttgattcattccactggtgctcttggcaatgtcaacccccgtcatggccttatcatgtatgaccttgccggtgaaccatccgagacttcgttgatgcaaacgtcaatctcagtaccttgttctctcacgtgtggccgtctggtaaacttgaaggagaagctggttctggttggtgggatcgcaaaacacaacagacctgatatcattaaaggcataggaatatgggagctccatgaaagacagtggcatgaggtagctcggatgccccacaagttcttccaaggatttggtgaattcgatgatgtttttgcctgcagcggtatagatgaccttgtctacatacaaagctatggtgcaactgctttgcttgtttttgacatgatgcaaaagcaatggaggtggtccgttaaatgccctgtgagcaaaagatttcctctccagctattcactggcttttgctttgaaccgcggcttgatatcacagtttaatatgtacaaaattgtgcttttgccttttagtggagtcaggtcagctaccatgctaattcttatcaggaaattccatgcaagttttgtcgcattctttcagccattttcccgttacccttttctgagctgtaaccactgatggcccctcattggccctgcagcatgcaattatttgtctgttctgacatcaccagattgtaaatgtatagaatgctacatgtgctcacttgcatatggctgaagatgtacctttatttgcagaaacagtgttaagctgtacctttgtttgcaaaaaacgggacatatatgcact

SEQ ID NO: 117089 - DNA, 1333 bp, Zea Mays
tgcatcaggccgtccgttcaaatccccgtaaccgtgagaccccaaatccgaccacccgcccgcccgcccgccaaagccttccgtcgtctcgccctcccgcacccgatcgagaaatcctagctccgtcgctcgccggcgatggaggcgccggacgaggaggccgggctggggctccctgagggcgagcggcttctggaggtggccctcatctccgcgcaggggctcaagcccccgtccggcgtgcggcggcggctgcaggcgtacgcggtggcctgggtcgacgcggggcacaagctccagaccctccccgacgccacgggcggcctcgacccggcgtggcacgcgcgcctcctctttcgcgtgcgggaggcctcgctcgccgacgactcgcccgccgccgtctccgttgagatctacgccgccgccgccgcgggctcctggcacttcggcggggactcgctcgtcggctcggcgcgcttcctgattggcgaccaccgcctcctgtcccgcccggtcggctccccgtccatgttcgccgtcggcgtgcgccgcccctccggcagggtccacggcctcctcaacgtggccgcgagcctcgtcgcggtgcccccgtccccggccgcctgccacgccctccgcctctcgccggccgtctccctcagcgggccctccgtggcgccgaccccaagccgcgtgctccgcgtcctcaaccgcgcgcaccggacacctccaccgtccccgaggcttcttacgcccaagaagcagcagatggtggacgacggcagcgacgaggccgaggaagacgcgagggggatgggcggggtcgtgttctgcgggccctgcgtcggaccattaccaagaaagatacgcacgagcccctcagacgagaacctgcaggccttcgctaacatcttctctggcgggctcaggcattgccggacagagccctcatttttgaggagtccaggcaagtaggctttatgctctcaattggtttcctgtggagttagcccgtttcctcttgagatcagggtaaatctgagttgtatcatagcacctcttgttatcatcagaaatatgttacatcaaattttctgtagattcagtggatttagaatattcgagccacatatatcagcgttgaaattctttgctggtctctagtatatcatgttggaagaaagctgcttcttcctcaatacatatattagattggtaatttcagtggggaacaatgcttgcagcattgacacaaagtcttatgatttactatctctctgtccagatattttgagattcaaaatttggacacaaatttaagcatttttggcac

SEQ ID NO: 117090 - DNA, 77 bp, Zea Mays
ggaaattctacagagggcgtgtttagagcaactgcatcaggaaccaaaaaatattctcccaatcctattttagaggg

SEQ ID NO: 117091 - DNA, 1252 bp, Zea Mays
gacgtaattttaaatagaattaactaactattagccgcaattagagatcacagcaaaggatgcaaactacccaattaccatgcatgtataagcatgagactacgagctcgtgatcaatcaaggagtaggacaatgttctacgaagcagcattcacagcaagctgtactcgctctcctggtcctggagcaggtactgtgcatgtaccctggagtccggcggtcctccaacaagacatgacttgtttgcgaagtggtacaagaaaagcagcggctacacactatttctgctgagcgacgtgtgcacgcaaagcaaacctgttcggtgtcctttatgtcatatcaacgcatcagtgaggaaaacactgaagagcagagccccgtggtggatgcagtggagctcctccgtcgcccgtccgcttgctgtggctccgaccccatgcctcttaaaaattaaacacagggattgataaaactatttttagcgacaccattgtccaaacacagggagtagtaacaatatcacgccatgcaatgttgctgttatccttgaacatgaatatcattctactgatcgatcttaaactcctttatccagtgcatactgcatccatgcaccaaccatatatgcttggccactacttaataagtacctgcaaaaaaaaaaggttcgagcctgtttttacggacaaatccatgactgagagatgtggtgtagtcgatgcactcgtcatttgagaagcggacaagacgaagatctcagtactgttctggacaaacgagaaagtacactgtgccagcaagtaccacgctgcgcctacgataacacaaaaaatgatccaaatgttcctatttggtttgaaggatccagatattttaagaatccgtattaatttcttataatcagaatctagatcgtttagctacttacattttgtagacatttatttaaaatacacttggctaacacttgttcgtggtctatattttagagacacttgtgtctttttaatataccacatccatagtatcatctgttaatagcaagaacgtctgaaatactggaattctgaaatcttcatacaatcaaatgcgaaaatcggtacattttaaaactctagtagatttagtatatagattatcaacatccttccgcaaccaaatggggttagttgtcgatggatattgataatttatgaactaaaatctgttaaaactccaaacaatactaattctagcattagactgtattatc

SEQ ID NO: 117092 - DNA, 1282 bp, Zea Mays
atggaccgggttcacgaaataatgatagcacatacagacaatcaacggcaaccacagagccaacccgatcacgttgctcccgcggctggactagccccacgacctccagctcgaccattcccgatcccgtggactcccaattgcctgcctcctctacctgtccggctgtcccggctccagcatttccaccctcgcgcggcggtcgccggagcgagcagagctgccggaaggcccgtcggatccgccgccgccaagatgaatgacgccgatgtagccaagcagatccagcagatggtgcggttcatccgccaggaggccgacgagaaggccaacgagatctccgtctccgccgaggaggaattcaacattgagaagctgcagcttgttgaagctgagaaaaagaagattagacaagagtatgaacgcaaagagaagcaggttgaagtacggaagaaaattgagtactctatgcagttgaatgcttctcgcatcaaagttcttcaagctcaggatgatctagtaaacaaaatgaaagacgatgcgatgaaggaactcctccttgtcagccacaaccaccatgaatacaagaaccttttgaaagatctaattgttcagggcttgctccgtttgaaagagccagctgtattgctccgttgccgcaaggaagatcaccatcatgtggaatcagtactgcattcagcaaagcacgagtatgcatcaaaagcagatgtccatgaaccagagatatttgttgaccatgatgtgtacctaccacctgccccaagccatcatgatgctcacggccagttttgctctggaggtattgtcttggcttctcgagatggaaagattgtgtttgagagtacacttgacgccagactggaagttgttttccgcaagaaattgccagagatccggaagcttctttttggccagactgcagcttaattgactcaatccgcagatgatggtatggctcgcttctacctagtggtttttgccaaattgatcgtttacggtattcatccccaatgtacaaactaccttatttgttcattactgtcgccgagcaccgactgtttgtacttcgttcgctccgaggaataagaataaagcactgctagacttcccattgcgaagctgaataaatattgtaaagccatttgtcgtgctgaacttcccgttccgttcctgtcctgtcctgttgatgtgtatatctagttaatgtcggatacggttcttgtgggaaaaataaaaaataaaagttcttgtaaagttcgcc

SEQ ID NO: 117093 - DNA, 869 bp, Zea Mays
caatggtctgttactattcagaagaacaaagaagcatccagttttccagatgatattagacattttttttacatgtgatattgtacacatgttgatcttcgcaacttgattccagtgaagtgaggatagaaggtctggagacccttgattatcttgacaaccttagccagcgggaacgttttaccgaacagggagatgccataacatttgaatcagaggttgatcgagtctatgttggctgcccaggcgtaatagctgttcttgaccatggaaagaaacgcacattcatcgtgcggaaagaagggcttcctgatattgttgtgtggaacccctgggagaagaagtccaagacgatggcagacttcggcgacgacgagtacaagcagatgctgtgcgtggatgcagccgcggtcgagagggccatcacgctgaagcccggggaggagtggacggggaagctggagctctccgccgtggcgtcgaccaactgcagcgaccacctggatcgcccgggcaggctgtagagcgctgggtgggtgggttcgttcgcccctgacgaaaggcatgtactagttttttttcatgtacatgggggcgctaggtccggcccttgcaggctgcagtatcatctacctgtcaggtgtgtcatgtgtgagtttaaacttatgtcagatccaagtattgctgtgatcgacatgttcgatgttcctggactgcgaagtctcaagcgcaggctgttcgtttggctggctttaatccgaaacggcatctatagattgtagctgcagttcgaagcgaacagtaatgaaaacggacggaacagttaggaaaacactccaatcacttttaaatctatattttaatctaaa

SEQ ID NO: 117094 - DNA, 2072 bp, Zea Mays
tcccatggcaacgcctaggtggctgtggctgccatgatgggcgctctcgccacgccaccccgccaccccgccatgtgcgtgccgcttttgacagaagaggacgaggcagatctccagtccccggccctccgtcccctcctcctgcgaaggctcctccagcaccactagctagagctaaccccgtgctgctgctgctgctactacctgctgccgcgcgccgttcgttgccgtgcgggcgtgttgtggtccgctgatctcgttcgcgggacgccggggggtggtggtggtggcagcggtggttggtggtgcgcggcgtgaaagaaagaaagaaaaaaaaaaggcccgccgctttgcgctgctctgcttccgtaggtgtcacgagatttggccctagcctttcgctttcctttttcatctcgctcacaagggaagggaccgagggacgagggagacgttggggaggggagcgagcgagccgtaacatccgagctgttccaatggcgacccctgccgttgctttcgtcgccagcgctttgttggggcggtggtagcgctaggagcggagcagtactaggttggtaggtggttgtagctttgcgcgtgacccgagcgcgcgctcgctcgctcctgtgcctctctacctcgcttgcgtgcgccgggaaggcagtgggtggctggtcggttctcgcaagaggttgctggtgctgttcctcctcccccggttgatgagcatggggcattgctccgagcagcggacggggttcgaggtgactaaggactggaacggcgccgaccagttcgcgatccggtccccgcggggggcgtccgttcgggcagaaaaaaacttctctcggtctgattcgagcgttgggttgtcggcgcaggtctgcctgcacggcgggcaggtcgtctcgtggaggaaccaccgcggcgaggagctcctcttcagcagcagcaaggcaatcttcaagccgccaagagcgacccgtggtggcattccgatatgcttcccacagtttggaaactgtggaacattggagcagcatggatttgcaaggaacaagatatggacaatagacgatgaggctccacctctaaattatggtgataataacagcaacaaagcttctgttgaccttctgctaaagccatctgaagatgacctgaagtgctggccacactgttttgagttacgtctcagagtctctctttcaatggatggagacctttcactgatatcacgggtcagaaatgttaatgggaagccattcagtttcgcatttgcttaccatacatacctttctgtttctgacatcagtgaagtgaggatagaaggtctggagacccttgattatcttgacaaccttagccagcgggaacgttttaccgaacagggagatgccataacatttgaatcagaggttgatcgagtctatgttggctgcccaggcgtaatagctgttcttgaccatggaaagaaacgcacattcatcgtgcggaaagaagggcttcctgatattgttgtgtggaacccctgggagaagaagtccaagacgatggcagacttcggcgacgacgagtacaagcagatgctgtgcgtggatgcagccgcggtcgagagggccatcacgctgaagcccggggaggagtggacggggaagctggagctctccgccgtggcgtcgaccaactgcagcgaccacctggatcgcccgggcaggctgtagagcgctgggtgggtgggttcgttcgcccctgacgaaaggcatgtactagttttttttcatgtacatgggggcgctaggtccggcccttgcaggctgcagtatcatctacctgtcaggtgtgtcatgtgtgagtttaaacttatgtcagatccaagtattgctgtgatcgacatgttcgatgttcctggactgcgaagtctcaagcgcaggctgttcgtttggctggctttaatccgaaacggcatctatagattgtagctgcagttcgaagcgaacagtaatgaaaacggacggaacagttaggaaaacactccaatcacttttaaatctatattttaatctaaa

SEQ ID NO: 117095 - DNA, 2021 bp, Zea Mays
tcccatggcaacgcctaggtggctgtggctgccatgatgggcgctctcgccacgccaccccgccaccccgccatgtgcgtgccgcttttgacagaagaggacgaggcagatctccagtccccggccctccgtcccctcctcctgcgaaggctcctccagcaccactagctagagctaaccccgtgctgctgctgctgctactacctgctgccgcgcgccgttcgttgccgtgcgggcgtgttgtggtccgctgatctcgttcgcgggacgccggggggtggtggtggtggcagcggtggttggtggtgcgcggcgtgaaagaaagaaagaaaaaaaaaaggcccgccgctttgcgctgctctgcttccgtaggtgtcacgagatttggccctagcctttcgctttcctttttcatctcgctcacaagggaagggaccgagggacgagggagacgttggggaggggagcgagcgagccgtaacatccgagctgttccaatggcgacccctgccgttgctttcgtcgccagcgctttgttggggcggtggtagcgctaggagcggagcagtactaggttggtaggtggttgtagctttgcgcgtgacccgagcgcgcgctcgctcgctcctgtgcctctctacctcgcttgcgtgcgccgggaaggcagtgggtggctggtcggttctcgcaagaggttgctggtgctgttcctcctcccccggttgatgagcatggggcattgctccgagcagcggacggggttcgaggtgactaaggactggaacggcgccgaccagttcgcgatccggtccccgcggggggcgtccgttcgggtctgcctgcacggcgggcaggtcgtctcgtggaggaaccaccgcggcgaggagctcctcttcagcagcagcaaggcaatcttcaagccgccaagagcgacccgtggtggcattccgatatgcttcccacagtttggaaactgtggaacattggagcagcatggatttgcaaggaacaagatatggacaatagacgatgaggctccacctctaaattatggtgataataacagcaacaaagcttctgttgaccttctgctaaagccatctgaagatgacctgaagtgctggccacactgttttgagttacgtctcagagtctctctttcaatggatggagacctttcactgatatcacgggtcagaaatgttaatgggaagccattcagtttcgcatttgcttaccatacatacctttctgtttctgacatcagtgaagtgaggatagaaggtctggagacccttgattatcttgacaaccttagccagcgggaacgttttaccgaacagggagatgccataacatttgaatcagaggttgatcgagtctatgttggctgcccaggcgtaatagctgttcttgaccatggaaagaaacgcacattcatcgtgcggaaagaagggcttcctgatattgttgtgtggaacccctgggagaagaagtccaagacgatggcagacttcggcgacgacgagtacaagcagatgctgtgcgtggatgcagccgcggtcgagagggccatcacgctgaagcccggggaggagtggacggggaagctggagctctccgccgtggcgtcgaccaactgcagcgaccacctggatcgcccgggcaggctgtagagcgctgggtgggtgggttcgttcgcccctgacgaaaggcatgtactagttttttttcatgtacatgggggcgctaggtccggcccttgcaggctgcagtatcatctacctgtcaggtgtgtcatgtgtgagtttaaacttatgtcagatccaagtattgctgtgatcgacatgttcgatgttcctggactgcgaagtctcaagcgcaggctgttcgtttggctggctttaatccgaaacggcatctatagattgtagctgcagttcgaagcgaacagtaatgaaaacggacggaacagttaggaaaacactccaatcacttttaaatctatattttaatctaaa

SEQ ID NO: 117096 - DNA, 279 bp, Zea Mays
atggaggcacgtccaggtcccggcaacacaacgcagcagcgaccccaaaggccaggtagagaaaatactacatggcatacctctgggtccaggtcctcgcggtgttctcgtacttgtgccggtccgtcttgtacatgtgagctatctcggggaccaaagggtcgtcggggttcggatcagtcagcagggaacagatggacagcagcaccttggagatggttagtgccggactccactggtccttcaagatgtcgaggcaaatgctcccgttgctgttga

SEQ ID NO: 117097 - DNA, 1948 bp, Zea Mays
atgtcctccggcgccgacgcctccgacgtcgacgccgcgctcgccctcctctccggccccgacctcgtggcgcacctccgcgtcacctgccgcagggcggactacgaagcggccgcgcgggtgctcggcgaccgcgaccgcaggcacgcccagaccgaggccgcgcttgccgaggcccggacgggcctggcggacctgaccgcggaagtccaggccctgcaggaacgctacctcgagctcaaggcggcgagccgcgggccgagcagccgctcctcgggtggcgcgatagcggccgcggcgccgcgagtcaaccggcgcgctcaggagccggccccgaagagcactattgacctctgcagcagcagcgacaacgacgagtttgaggagggggagttccgccctggtgtcgcgggggtttctggcacgcggaaggattccgcgtccaagggccaggaagggcgccgcgcgcgggtttctcgcaagaggaaggcacccgcgtccgcgtgctcgtccgacgacgacgaaatctcgctcagccagcttataaagaagcggagcagcgctaagccttgggctaatggcgaacccaagaaggggcatggagatgtgcaggcgaattctgctggaccattgggatttgatcggcctgtgatttctcccgcgatcaggggaatccccgaagcagtctctgagcacatggttgccagccctgatgatccaaaggtgtcggttttcatgcaggggaccgggaatggccaatcggggaagaatgagggattgtccaggacaatgccgagtcctgcacccactggttccggtgctgggaacggcccacacaagaacggcccacacaagaatggctctgaatgccaaacgaggatcggtgagaaacaaagtcctgttgctcccccggggaatgatgcgtccgttcaggttagaactccaagcgttacgaacatggcgaggacaaatgtgggatcagcacgagttgttgctgagacgcccatgcagcacactcattctacatcggatggaactgtcaacgtggctctcaagtctatggaagggcaggagaaagcaattggtttagtgcacaagacgaaggtgtcgctggatactaatggaactggggacaaagctaggatcgtgttgaaggatactagagagcaacagaaaccagctggcctagtgctccacacaaaggtgttgccaagaagtgatggaattaaggaacaagggggtaagctcagtccttttcgtagccaggtggatgctcatggaggcagatccacaacatcagataagccagtgttagccaccttgcagaaaaaccagcttgagctgcatccggagcaaatgtcagtagagagttcattgtcttcagcagttacaagacagtggaaatcttcttcagctcttcttttctcatgcctaggaaataaggagctttgtatgcaagctgcttgtgctcttcaccgccagaaaaagtttacaactcagctaactggaggaatcaccaaatttgatgcagaaagggcggctgagttggcagaatttcttttggatggcaaccttcagggaccgctgacaagaactgctgaggacctagtgaagcgtgattctacaggtcatgatttacttgagagagtagtattgcaatgctctgagcagttgttcagtatttacaggaacaaagacgataaatacttctgttgaaagcgacaaaactgtatctggtaaggtttgcacaacttatcatatggaaggggtcactatgttttgttgtgacaatgtgatgtatgtagttaatgctgaaacttatcatcttcgcggattagaacggctagtagttgtagaagttgcagtaactttgtttcttgcatgtgtttaggaagatcgtactgaatgagctcataactgcctatggtatatgcatcctttattttca

SEQ ID NO: 117098 - DNA, 857 bp, Zea Mays
agaccagtgcaagtcgttccatccactacaccttcttacacaacgcacgaccatcaccaagccgtgaagaacgaaatggccaagctcgccagcctcacaaccctcctcctcatcattgttgtcatggccaccgtctcgtccgtgcacgacgcccgcactctcgagagagtggatcaagtagccatcctgcatgagccgtcactggaggcaaatccaccctcgccaacgctgctggaagtcgaggccatggtccctttcgatggcttgttgcttgaagaagcggcggacgggcccgtcgggggcagctggtaccttgcaactgattgcacccgtaagacaccggcgttcgggccctagctaagcgacacatctcgtggccaagtgtagtcaggcaacggtgttgtcgggaccataattaggggtaccctcaagacgcctaattctcagctggtaacccccatcagcataaagctgcaaaggcctgatgggtacgattaagtcagggatcagtccacacgagtgactcgatcacgcttcacccgagcctagcctcggccaagggcagccgacctcgagagacttccgtctcgcccgaggcccccctttttacggcggacacacctccggctcgcccgaggccttggcttcgctcagaagcaaccctgactaaatcgccacaccgactgaccaagttgcaggagcatttaacgcaaaggtggcctgacacctttatcctgacacgcgccccccggcagagccgaagtgaccgccgtcactccaccgctccactgaccagtctgacagaaggacagcgtcgcctgcgccactccgactgcagtgccactcgacagagtgag

SEQ ID NO: 117099 - DNA, 129 bp, Zea Mays
atggcgtgcgtttgccaccatgatgcgcgctccgcgttggcgcaagatgaccctacagagagctcgtcacaagccagtgactgcactggtgcaacgcagtttcaggggactaatctgaaccagaactga

SEQ ID NO: 117100 - DNA, 189 bp, Zea Mays
atgccagaggaaactgtagtttgcatattccgcaagggtctccagaacacagaactatcccaagagttgatccagaagtccccgacaaccatgtttgtccatttccaagtgattgacaaatactccctaagcgaggaggtgatgcatcgcatgactccttcgacaaaggacaagggaaagttagactag

SEQ ID NO: 117101 - DNA, 468 bp, Zea Mays
atggctcaccggttttgtgcccgcatgagaccctccatagtccaggcgaccaacagccaggcagtgaacggaggaagggcaatctcctctgaatgcctcgtggcactggcatggcatttcctgctaaggtatcgcagcagggacgacgccacagctctcgcatcttcatctagggtgcttcaaatcgcagaggacaaatcatctgcggccaacttgacaaagcacaagatcaagcgggagatttcgactatgaagctgatcaaacatcccaatgtggtccaattgcatgaggttatggcgagcagaacaaagatatacatggttcttgaatttgttgatggaggcgagctattcgataggatcccagagaatttgcttctggattcaaatggagctcttaaagtttcagacttcggcctaagtgcatttgcatcacaaacaaatgtacgatctctagtcagtagctag

SEQ ID NO: 117102 - DNA, 1113 bp, Zea Mays
cttttgcgctccttgcttccgcttgtagtgggagtgggagtggccgagtgggagaagggaagagatgagcagcagtgaggctagcacgcaagaccatggcgtgccggcgctcgaggcgcaggatagcacggatgaccatggcgtgcccgcgctcgaggcgcccacgcccgaggctacggacaaggtactggccgccatggcgcgtggacggtgaggtcgccgtcgtcgagggcgaggtgaacaacgccggccacacggtgggctccaccgccgtcgtggccgtcgtggggccccgtcacatcgtggtcgcgaactgcggcgactcccgcgccgtgctctcccgcggcggcgtccccgtgccgctgtcttccgaccacaagccagataggcctgatgagttggaaagggtagaatcagcgggcggcagggtcatcaactggaaggggtaccgtgtcctgggggtgcttgcgacgtcaaggtcaattggcgactactacatgaagccattcatatcagctgaaccagaggtgaccgttacggagcgtacgcacaaagacgagttcatcatcctggggagcgacgggctgtgggacgtcatgtccaacgaggtggcttgcaaggtggcgaggaactgcttgtgcgggcgcgcggcttccaagtaccctgaaaccgtccacgggagctcggccagcgatgccgccgcggtgctggtggagttcgccatggcgcggggcagcaccgacaacatcagcgtcgtggtggtggagctgaaacgtctgaagtggaagggtggtagacagaatggtaggacgtagtctgtaggagcctccggctcgtcgcgaaatataagcgtgtcgacagagccagagaggcaaagggaagcagccgagcgtatgacggaatgctgtaaaaaaaaaaaaaaacagagagagggctctgactctttgagagctgcacttgtgttgtgaccgctgtattgcgttggttacttggttctttagttcaatactaacaaaatggcattccggccaatggaagtagcaggaagcatgggctgctgtactagttctttcttgtcgttttgttcgagtcaaataagttctgaccgtccaa

SEQ ID NO: 117103 - DNA, 1599 bp, Zea Mays
acttcttttgcgctccttgcttccgcttgtagtgggagtgggagtggccgagtgggagaagggaagagatgagcagcagtgaggctagcacgcaagaccatggcgtgccggcgctcgaggcgcaggatagcacggatgaccatggcgtgcccgcgctcgaggcgcccacgcccgaggctacggacaaggtactggccgccatggcgcgactggcgcgacgtcggaggctggagctaaggcggctggggcgcactgcacccgtgggggcggagggagaggtggcgatgcgggtgcgtccggtgtcgggcacctccgcggacacgtcccgcgagtcggcgaaggtggcgcccgagccgcatgaaggggcttctgcggtggcggggtggcccaagcccgtgtcgcacggcgcggtgtcggtgatcgggcggcggcgggagatggaggacgcggtcgccgtcgccgtgccgttcctggtggccgcggcgggggaggagggggacggcggcggggagaaggaggctgagatggagttcttcgcggtgtacgacgggcacggcgggtcacgggtggcggacgcgtgccgggagcggctgcacgtggtgctcgcggaggaggtggcgcgtctgcaccttgtgaagggcggcgacggcgcgcgctggagggaggtcatggaggcctgcttcgcccgcgtggacggtgaggtcgccgtcgtcgagggcgaggtgaacaacgccggccacacggtgggctccaccgccgtcgtggccgtcgtggggccccgtcacatcgtggtcgcgaactgcggcgactcccgcgccgtgctctcccgcggcggcgtccccgtgccgctgtcttccgaccacaagccagataggcctgatgagttggaaagggtagaatcagcgggcggcagggtcatcaactggaaggggtaccgtgtcctgggggtgcttgcgacgtcaaggtcaattggcgactactacatgaagccattcatatcagctgaaccagaggtgaccgttacggagcgtacgcacaaagacgagttcatcatcctggggagcgacgggctgtgggacgtcatgtccaacgaggtggcttgcaaggtggcgaggaactgcttgtgcgggcgcgcggcttccaagtaccctgaaaccgtccacgggagctcggccagcgatgccgccgcggtgctggtggagttcgccatggcgcggggcagcaccgacaacatcagcgtcgtggtggtggagctgaaacgtctgaagtggaagggtggtagacagaatggtaggacgtagtctgtaggagcctccggctcgtcgcgaaatataagcgtgtcgacagagccagagaggcaaagggaagcagccgagcgtatgacggaatgctgtaaaaaaaaaaaaaaacagagagagggctctgactctttgagagctgcacttgtgttgtgaccgctgtattgcgttggttacttggttctttagttcaatactaacaaaatggcattccggccaatggaagtagcaggaagcatgggctgctgtactagttctttcttgtcgttttgttcgagtcaaataagttctgaccgtccaa

SEQ ID NO: 117104 - DNA, 1120 bp, Zea Mays
acttcttttgcgctccttgcttccgcttgtagtgggagtgggagtggccgagtgggagaagggaagagatgagcagcagtgaggctagcacgcaagaccatggcgtgccggcgctcgaggcgcaggatagcacggatgaccatggcgtgcccgcgctcgaggcgcccacgcccgaggctacggacaaggtactggccgccatggcgcgactggcgcgacgtcggaggctggagctaaggcggctggggcgcactgcacccgtgggggcggagggagaggtggcgatgcgggtgcgtccggtgtcgggcacctccgcggacacgtcccgcgagtcggcgaaggtggcgcccgagccgcatgaaggggcttctgcggtggcggggtggcccaagcccgtgtcgcacggcgcggtgtcggtgatcgggcggcggcgggagatggaggacgcggtcgccgtcgccgtgccgttcctggtggccgcggcgggggaggagggggacggcggcggggagaaggaggctgagatggagttcttcgcggtgtacgacgggcacggcgggtcacgggtggcggacgcgtgccgggagcggctgcacgtggtgctcgcggaggaggtggcgcgtctgcaccttgtgaagggcggcgacggcgcgcgctggagggaggtcatggaggcctgcttcgcccgcgtggacggtgaggtcgccgtcgtcgagggcgaggtgaacaacgccggccacacggtgggctccaccgccgtcgtggccgtcgtggggccccgtcacatcgtggtcgcgaactgcggcgactcccgcgccgtgctctcccgcggcggcgtccccgtgccgctgtcttccgaccacaagccagataggcctgatgagttggaaagggtagaatcagcgatgccgccgcggtgctggtggagttcgccatggcgcggggcagcaccgacaacatcagcgtcgtggtggtggagctgaaacgtctgaagtggaagggtggtagacagaatggtaggacgtagtctgtaggagcctccggctcgtcgcgaaatataagcgtgtcgacagagccagagaggcaaagggaagcagccgagcgtatgacggaatgctgt

SEQ ID NO: 117105 - DNA, 220 bp, Zea Mays
gcctgactttagcaaccacttcatattttgatctatctttttatacgtttgagttcatgtgacttattttagaaacttaagctcacaaacttcctcttatttggtctttatatggtggaattatgtcattttataatctttgcccgtttagtcagtcattgtgaactctcttctaatcgatccgttcattggccgtgttgtaccaagacatattggatgg

SEQ ID NO: 117106 - DNA, 2439 bp, Zea Mays
agtcagtccccgggccttgctctccctccacttccgccgcgacgatctcctcccacccgtagaccaacaacaacggtactaaccagtaccagccccgcatgcctctcgcggcggctgccgcggccgttgccgcatgtccttcgccgatcggcctcacccgctctttgtgccgtatcgaggcgcatccgcggcgccggcggaggttccggttggaggcaaattcgtcggcgtctacgtccgctcccgcgccgaccgcggcggatgagggaggcggagcggggttgtgccctgtggtcaggttcgacatggccgacttcaccgtcgccgaccgcgtcagcgtcgggctccatggacggtcggatgagatgatcttcgaggccacggtgtgcgatccgagcagcgagctgtatgggtcaacggtggtcctgcggcagctgaagagtttgcaggcgaagcgcagggggcgtcgcgctctcgaggtgctgaagaagctggctcgtcgccaaatgatgtaccactcctacgcacttcaggtccatggttacattgctccgtgcaatgccgtggaggaggaagatgtcccgttagtattggttcatgggtatcatgggagtcattccctgcgtcactggttgcaactctcagattggatcccaaccttagaggcaacattagcgttggacgaagaacaagtgaggagggtaggagatgactctgttggaggaccagctgtaactcgacagctgcgtcttatcaggatattgatgagagaccttttgattggtgtaaattatctacatagccatgggctggcacacaccgagcttaggatagagaatgttcacgtgagcccaatagacaagcatgttaaagtcggtattcttggaaatgctgctgattttcaagacaatgatcttagcagcagtacaattgcaagtaacaatgacaggcggaaaatgatgatagcctttgacatgagatgtgttggcttcatcatggcaaagatggttttgagagagctaatggatccttcgactttctttaaattcaaatcattcctgacaaagggaaatgacccatcctgtttgcgtgagttcctactaccaaccctctaccaaaattctccatctgggaatattggtttgcagatgctagataggcagtggggtgctggttggaatcttttagccttattgctggcaacaaaaccagaggaaaggataagttgtgttgatgcattgcgacacccgttcctttgtgggccaaaatggcgtataaatccgtcagcaaatctcattcggtggggcttgggatcaactgctgtccgcatggctgaagattatatatatgggcgtcatcagcgtagacgtttatcatattttgttgaattgatggaggttctaaaccctagtttaagaacacagaattggcttcacctcctacctggtcgttggcgcctcttgtactgcactggacgacacattggcctaacacttcgtcagccttcccctagagttctcatcagtgctgtgtaccttacagttagttcagagtcagtcgatcaagtcttctctctgacctcagatgttggtttcagaattatgccagaacccaattggcctcacgacaaatctggcagtgagggagttttgtctgtcaccgcatcagcaaggatagctgctggtaggatttatattaacgaacatgacagtaaagaggatatggtcacatcttctatgagatatcttcatggtaataaatggagaaaattctcgcaaataaaggagctgccatctagtctccctgcagtaaacattgctatggatgaaatccacgtatcgataagctgcacctcgactatgacagttaattctgcacaaaaggcgctgaaagagatccgtacacaaaccccgccggaaatgttcgatttgtcaaagattgtttgtgggacatacattgatgcgaggttgatgattcttcgtggtgttaacgggtcggctctgctcttcactagagcaaatccaatgattgacacctgaggagactccgtccgccgttatataaggccttgttcggttaatcccgttacctatggattggatgagattggaaaaaaatatgaagaagtttgacttacttgtgatttaaacccatccaatctcactcaatccacatggattgagagctaaccgaacaagccctaacgctgtattctttctttccctgtacattattatgtatttctagccgtacaatcaatttgtaacgagtgtagataacaaggtgtgtaggccatagttagaacgttgaaaattccttctcaagatgatctgttgcttccaagtacggagccttgacagggcttgagctgataaattattactctttccgtttcaaaatgaataaaattcacagttattgaggtcaacttcaaattta

SEQ ID NO: 117107 - DNA, 753 bp, Zea Mays
ttgtcaacaccgctgggatgaaattgataatctgaatacaccaagggaagagagggatccagaatctttttgtactttcaaagagcgtttgtgttatttacagaaaacagagcatggtagagtatgctttggtagatcagggattcataggtggggtctttttgctcggagagacattcaagaaggagaaatggtccttgagtatcgcggtgagctggtcagatgaagtgtagctgacttacgggaagaaaaataccgtgtgcaagccaaggattgctatcttttcaagatcagtgaggaagtggttgttgatgccacagacaaaggaaacatggcacgactgatcaatcattcttgcacaccaaactgctatgcgaggattatgagtgttggacatgatgaaagtcgtattgttctaatagccaagaaaaatgtttgtgctggtgatgagctaacgtatgactacctgtttgatccagatgagggtgatgaacgcgaagtgccatgcctttgccagactgctaactgccggaaattcatgaattagtttacttagatgttagaggatcactgacagtctttctttcttatttacccccgtttttggtatatattgatccttccctattttttgtttacattcattttagaataagtttagttagagctcaaaagtcgagcttccattcctgttaataccacagttgtattcactacggccagttcattctttaaataaatttttttgtacca

SEQ ID NO: 117108 - DNA, 585 bp, Zea Mays
cgcctcctcacctgacccgagcagtgaccaacagggggcggacgacagccggcctcccgcagccgcggccagaagcccacggcggagggggagcccacggcgaagagggagaagtccgtggagacgtacgcgatggggctggtcagcaacgtccgcgacggcgtgatggcttctgctgcctgttcctcggctgccgacgcgctctggcgccgttggaagacttctccttcctcacgcgtccaagctcgagctccagtggcggtgccggcgatctagagtgggagcaactgcgcgttagaggaccttgtcaacaccgctgggatgaaattgataatctgaatacaccaagggtaattttctgatttactgcataattgtactcggctgcctgttcctcggctgccgacgcgctctggcgccgttggaagacttctccttcctcacgcgtccaagctcgagctccagtggcggtgccggcggtaggaaaggccaaccctagctccgtatacctatactatattgaatattttggtgtgtctcttacacatcaccaccccacactcactatatttcaccactttacaa

SEQ ID NO: 117109 - DNA, 827 bp, Zea Mays
gcacaaaatcacgcgcctgtgccggtgccggttgccccggcatcggccttgtcgtcgcggccctccttgttggcgccgaaggtgctgtggtctaccccacgccccgcggcatcgtcgaccttgtcctgcaccttctcgatctggatggcgccctggtcctcccgcgaccgcaggtccgtgcgcgtgcggttctccccgccgcccaccgactcgtacgtcgtcggcgtcgtctggccgaccgggtgcgcgccctgtgctcccgacattgtgcgtgcgcgctggtacgtggtctttgccctccctcgccgccttgctcgtctcggggtctcctttccttcggcgatttcgcttgcgctgcagtgcagagatgggaagcaagtcgtgtgtgtatatatacagctgagctgcgtcgtggcctcgtgggtacccccccgcgcgtgaggcgccgcgtggcctggggacgtggtgcgacgggagcggcgtcccggggacacatgggcgggactatctttcgcgcggaattggtggcggactcgtgtccgctgtccagagaacagaacagaagagacgccgttgctggcttgggtttgggttcttcggtcaggataaacatgacatgaagtcatgaaccacctggtcgtctgagttgttcagctaccctactgcctccgaagtctacgaaaacggagcgcaggcaacccgacggtgatttgtgtgaaccacagaatggacacgcaattcagaggagaaaacaagctagaaaatactgagggaatgactgaacataatatgagtaatttaatcatctgcgaccattgttctacata

SEQ ID NO: 117110 - DNA, 1804 bp, Zea Mays
caggctgtcattaacaaggagaggagaggcgactacctagggaagaccgtccaggtagtgccgcacatcacggatgagatacaggactggatcgaacgcgtcgcggtggtcccagtggacggcaaggaagggcctcctgacgtctgcgtcatcgagctcgggggcactataggggacaaaatcttttcgccgcataacgacagtggcattcttgatgcaggggatatcgagtcaatgcctttcattgaagcgttaggtcaattctcgtaccgtgttggacctggaaacttctgtctcgttcatgtcagtcttgttccggttctaaatgtagtcggtgaacagaaaactaagcctacacagcacagtgttcgagggcttagagggcttgggttagcgccggatgttttagcatgtcgcagtactgagccattggaggaacatgtgaaggccaagctttcacagttttgccatgtcccggaccagaaggcccatgaagcgattctgaaggttttagacctccagtatgatggaaaggtgcctcgggaacctgagctaacaaagtggactaaaagagccaccaagtttgacaagttgaagactccggtcaagattgccatggttggaaaatacactggcctgtcggattcctacctgtctgtcataaaggctcttttgcatgcatcggttgctatggaaagaaaacttgtagtcgagtgggttccttcctgcgacctggaagattcttcagctaaagagacccctgaagcccataaaaaagcatggaaattgctgaagtccgtctcacggaattccattccatcccagggcgcagatggcgtactcgtccctggagggtttggggacaggggagtccagggcaaaatcctcgccgcgaaatacgcacgcgagaacaacgttccttatcttggcatctgcctgggaatgcaaatcgcggtgatcgagtttgcccgctcggtgatgaagctacgaggtgccaatagcacggagttcgatccagctacgacgtcaccctgtgtcatcttcatgccagagggctcaaaaacccaaatgggagccacgatgaggcttgggtcgaggaggacctatttccatgtcagtggctgcaaatctgcgaagctgtacggcaacgccagctctgtagatgaaagacatcgccacagatacgaggtgaaccctgacatggtcccagactttgagaaggccgggcttcagttcgtgggcaaagatgagagtgggaaacgcatggggatcgttgagcttccctctcacaagttcttcatcggtgcacagttccatcctgaattcaagtcgagaccagggaagccatctccgcttttcttagggctgatagccgcggcgtctgggcagctagaaccattgcttcagcgcagcaatccgacaacgaaagcatgttcgatcagtaaagtcccgaaactgaaactgtaccccactgggcctgtgaataatccactgaacagcttggtgaacgggtactacccaaatgagaagagaaggctaagattcagcaagcccccagctccagcgacacatggttccgacatttttaacgaggaacgccttccagtccgttgaagcgagctagccatagggtggtgaggtctagtgtgatgttgttgttgtttttttctctttcctttttttttggcctggaactaaggcgcgaagtgttttgagtagcgctagtagagcctggaagaagttatctaaactatttgtacattatggaagaacttatctaaggactgaatacacaaatgcttgg

SEQ ID NO: 117111 - DNA, 270 bp, Zea Mays
atgtcagattgaccagtggcatctgctgcatcaataaggtcaaaaaactccttgacgaatttcactattccctgcacggcatctgtaagactttcctgcttagcttgcttagctactgccaaactaagaatctgggtaacgtcagtggcatcagcagcagctgtttcttgtcccacatctcggctattgctcattgttaatagacaagcaagtgctcttttcaggtcattgctctgcattgcaaggtcgaactccagcctgcaaggtatc

SEQ ID NO: 117112 - DNA, 104 bp, Zea Mays
gcgctcctcaagtgctcatatatacggcgtccttgcatccatggatttatttagcttatcgagttctcggttctatctggatgggtagatttttgaaaacctga

SEQ ID NO: 117113 - DNA, 1747 bp, Zea Mays
aaagcagctctgaattctgaaccgcggctagaatcctgcccctttgccgccattttgcgctgcatccctgcagcatgcgtccatgtacgcctagctagagctagagctagctcgcgcgctgcgtgatcgatggccctgctcacctccctgccgaggcccaggaagcagcggtgcccctcccacacaatgctccccctctcgccgtccctcctctccctgatccttctcatccccttcctctccctcctcctcctccaccgttcctccttcccgggctcctcttgctccccggccctggcgggggccgcttctcaccggggaagaagcgcggccggcttcgagggggacctgcgcgacatcgagttctcctggaaccacctgccgttctcggcgtccaggccgccccccgccaagctgaagatcgccgtgttctcccggaagtggcccgtggccacggcgcccggaggcatggagcggcacgcgcacacgctgcacacggcgctcgcggcacgaggccaccgcgtgcacgtgttcacctccccgccgccgcacaccgaggccgcgccatcgccctccgccgacgggccccagctccacttcctggacggcgagccggggcagtggcgctgcgacgaggcgtggaagctctacgaggccgagggagagaacgaccccttcgacgtgatccactccgagagcgtggccgtgttccaccgctgggcgctcggcgtggacaagctggtagtgtcatggcacggcatctcgctggaggccctgcactcgggcatcttccaggacctggcccgcggcgacgaggagcccaggtcgccggcgctgaaccagagcctgggccagtccgtgtaccgcgtgctctccgaggtgcgcttcttccggagctacgcgcaccaggtggccatcagcgactcgacgggggagatgctccgcgacgtgtaccagatcccctcccgccgcgtgcacgtcatcctgaacggcgtggacgaggcgcagttcgagccggaccccccgctcgggcgcgcgttccgggaggaggtcggggtgcccaagggcgccgacctcgtgctgggcgtgtcgggccggctggtcaaggacaagggccacccgctgctgtacgaggccttctccaagctggcgctgcgccacccgaacgtgtacctcctcatcgccgggaaggggccctgggagaaccggtacatggacctgggccgcaacgccaaggtgctcggcgccgtgccgccggggaagctgaaggcgttctacaacgcgctggacgtgttcgtggacccgacgctgcggccccaggggctggacctgacgctgatggaggcgatgcagtgcgggaagccggtggtggcgacgcggttcccgagcatcaagggcagcatcgtggtggacgaggggttcgggtacatgttcgcgcccaacgtggagtcgctgctggagagcctggaggccgtggtggcggagggcgcccggcgcgccgcgcagcgcgggcgcgcgtgccgggagtacgccaagtccatgttcgcggccaccaagatggcgctcgcgtacgagaggctcttcctctgcgtcaagaacgacaccttctgcgggtacccagccgagttcgattgagcagctcctgcatgcatgtgcgttttgctaataattatacaagtgctgtacggtgctttttccgtcgcgtttttacgttgaactaccaggcatatagatatttaacttggag

SEQ ID NO: 117114 - DNA, 567 bp, Zea Mays
agagaaactcccgacagccagacgcaaagcacagcgtcgatcgatcagcacaggtaattgaacgagcaggtcgatcagctagctaagcaaagcgggcatatggccgagagggcgggcggcgtggtgaagaaggggcacgaggagggcctgaagatggcggtgtcgctgctggaggagttcgggctgccgctgggcctgctgcccctggcggacgtgatcgaggtcgggttcgtgcgcgccaccgggtacatgtggatcgcgcagcggaagaaggtggagcaccagttcaagctggtgggcaagcaggtgagctacgacgtggaggtcacagggtacgtcagcgccaggcgcatcaagaagctcaagggcgtcaaggccaaggagctcatgctgtggccgcccgtcaacgagatcaccgtcgacgacccgcccacgggcaagatccacttcaagagcctcgccggcgtcaccaagaccttcccggtcgaggcgttcgccgcgggacagtagccgcgcgcgcgcgcacgctgtgtgggaagctcgctttgctttgcttgtttatgttac

SEQ ID NO: 117115 - DNA, 2018 bp, Zea Mays
caatccgtcaatcccacacataaagagctcacggacgcatctccggaaatcctctctttccagccacctcactcttcactagcctctgctcctctgaaatggcggcggcgacttcctcttccacctacctcgccatcggccgcaaaaccctaaaccccgccccctccgtagccacagccgccacctccgtctccttccccgccacgcagcacccatgcctcgtcgccgcctccgcggaccgccgccgcgccgtggctgcgaaggtctcgtcgccgtcggtcatcggcaccgccatgccgtcgctcgacttcgagacctccgtcttcaagaaggaaaaggtgtccctggccggccatgaggagtatattgtgaggggtgggagggatctgttcccgctgttaccggaggccttcaagggaatcaaacagatcggtgtaatcggctggggctcgcagggtcctgcgcaagctcagaacttgagagactcacttgttgaggcaaagtcagatattgttgttaagattggtctccggaaaggttctaaatcttttgaagaagcccgagcagcaggattcaccgaagagagtgggacgctgggtgatatatgggagactgtatcaaacagtgatcttgttttgctactgatatctgattctgctcaggctgataactacgagaaaattttctcgcacatgaaaccaaacagtattcttggtttgtcacatggatttctccttggacatttgcaatctctgggttttgatttccctaaaagcatcagtgtgattgctgtatgccccaagggaatgggcccatcagtcagaagactttatgttcagggcaaagagatcaatggtgctggtatcaatgctagctttgctgttcaccaggatgttgatggaagggcaacagatgtagctctagggtggtcagtagctttaggttctcctttcacatttgctactactctagagcaggagtaccggagtgacatttttggcgagcgaggtattttgcttggtgctgtccatggcatggtggaggctcttttcaggagatacacagaacaaggaatggacgaggactcagcatataagaatactgtagagagcatcactggaattatatcgaaaactatttcaaagaagggtatgcttgaagtgtataactccttgactgaagaaggaaagaagcagtttattgaggcctatagtgcagcatattacccatgcatggacatattgtatgagtgctatgaagacgtctcttctggaagtgagattagaagtgtggtgttggctgggaggagattttatgagaaggaagggctccctgctttccctatgggaaaaattgatcaaacacgtatgtggaaggtgggtgaaagggtccgttcaaccaggccacaaggtgatcttggcccactgcatcccttcactgctggagtgtatgttgcactaatgatggctcagattgaggtccttaggaagaagggccactcttactcagagataattaatgagagcctgatcgagtccgtggactcgttgaacccgttcatgcatgctcgcggtgtggccttcatggtcgataactgctccacaactgctcgtttgggatctaggaagtgggcaccacgcttcgattacatcttgacccaacaggcgtttgtgactgttgacaagaaagcaccgatcaaccaagacctcatcagcaacttcatgtctgaccctgtccacggtgccatcgaagtctgcgctcagctgaggcccactgttgacatctcagtgaccgctgatgctgatttcgtgcgtccagagcttcgacagtcttcataagcttgtatggatccgcagtgtgactgcaatggctagtttgtaagaacttaatatgcctgggcttttgaactcttagattgtgcctgtattgctcgtgcttgaggaccagaaaagtaaactcttggcggtgtggtactgttgtgatttgcaagaataaaaataaatttctgttgatcattc

SEQ ID NO: 117116 - DNA, 1712 bp, Zea Mays
cctctccggtccccactagtccccttcccttccctcgcctaccttcgcacgggtgctctgcccgttcgacggccacgccgcgccgcccagctgctccggcacccgcccttcttcgtcgagctcgggatcagcatctcgcttgttctgggctccccattcggcctctcctcgccctaactctattttgcagcatgagaccagcacaacagcccgaatcataggcttgacgcagagaccccatctcatctgcgctcccgcgcgtggcctaacgctaacggagccagaagcaaaggagaggattccacaagcttcgagttgccgaaacattttgttaaatctactgcttgtgtgggatcattagtgcaaatccggtgcttgcgcgtgcaggctgtgctacccatgcgtcttggctattgtgaataaaaggtttcgcctgttgcatctgtcacttgcgatatacccgcgctctgaaatctcgccctagttggtaaaatacaactggtttgcccccaattaggactagtttggatactttgggattagagtgttttggagggattggagagggtgtaaatccccaatagatcagatactctctcaatacatgtcaatccactccaatcccactcattactagagtatccaaactaagccttaggtgactgcaaaacttcatttcaattactctggccctcttttgtgatcatggacatcaagcaaagtgtgtagtaggatgcccctttagggcttgataaaaggagatgatcatgttactcacatatctgaagatgtaacttcatctcgtttcagggtttagagggatgtcttcagaggagctgagggcgagcttttcagatttggcggtgggttcgccaacccagacagagggcaaaacgtatccttcaggtgatttgtcgtctgaggaggtcatgcaagtcacttgtttcacagaggatcttcatgatgtagtacttcactttcagatagtgaggttttctaaacagatctatgtgtgggttggatgcaacacagcaaagtttggccatttatacgctgctgcaaccactaggccggataacagagtgagcgtgacctctgtactaggaggaacatctgataacaccggatcaacttttagtaccagaaaggctgcatcctacatgtcccagtgttgaagaccggtctgaacattgtcctagcatgcagcatcccaaaagacagccccattcttgaggcagctgcggagaggaagctggtggagaagctgaaaggtttgggctacattaaaaccgcagctgtgaatgctaacacttccacggcaccatgatccgtggcatgatctagtgagctttcggtcgacgttcatcactagatgcatcatgatcatgagcagttgtgatgtttggtgggcttgattggctaactgtttcatctgttctttcgcgtggtaaaagttattatgaacattttggtgtatggagtgtttaaaagcactagagctaatagatagttggctaaaactactggtgaatttagctagttaactattagctaacttgctaaaaatagttaatagttgaattattaactagtatgtttggatgtctttagctaattttaacagctaactattagctctagtgcatttaaacacacctgtaatgtacttccttttctcgtcctaaaatgagtttccatctcaacatttcaag

SEQ ID NO: 117117 - DNA, 1366 bp, Zea Mays
ccttcccttccctcgcctaccttcgcacgggtgctctgcccgttcgacggccacgccgcgccgcccagctgctccggcacccgcccttcttcgtcgagctcgggatcagcatctcgcttgttctgggctccccattcggcctctcctcgccctaactctattttgcagcatgagaccagcacaacagcccgaatcataggcttgacgcagagaccccatctcatctgcgctcccgcgcgtggcctaacgctaacggagccagaagcaaaggagaggattccacaagcttcgagttgccgaaacattttgttaaatctactgcttgtgtgggatcattagtgcaaatccggtgcttgcgcgtgcaggctgtgctacccatgcgtcttggctattgtgaataaaagggtttagagggatgtcttcagaggagctgagggcgagcttttcagatttggcggtgggttcgccaacccagacagagggcaaaacgtatccttcaggtgatttgtcgtctgaggaggtcatgcaagtcacttgtttcacagaggatcttcatgatgtagtacttcactttcagatagtgaggttttctaaacagatctatgtgtgggttggatgcaacacagcaaagtttggccatttatacgctgctgcaaccactaggccggataacagagtgagcgtgacctctgtactaggaggaacatctgataacaccggatcaagtatggctcgccgtctaggtactgtttctgtttgcagttacagtaactaattccgctgcattcacgattagcttttagtaccagaaaggctgcatcctacatgtcccagtgttgaagaccggtctgaacattgtcctagcatgcagcatcccaaaagacagccccattcttgaggcagctgcggagaggaagctggtggagaagctgaaaggtttgggctacattaaaaccgcagctgtgaatgctaacacttccacggcaccatgatccgtggcatgatctagtgagctttcggtcgacgttcatcactagatgcatcatgatcatgagcagttgtgatgtttggtgggcttgattggctaactgtttcatctgttctttcgcgtggtaaaagttattatgaacattttggtgtatggagtgtttaaaagcactagagctaatagatagttggctaaaactactggtgaatttagctagttaactattagctaacttgctaaaaatagttaatagttgaattattaactagtatgtttggatgtctttagctaattttaacagctaactattagctctagtgcatttaaacacacctgtaatgtacttccttttctcgtcctaaaatgagtttccatctc

SEQ ID NO: 117118 - DNA, 1155 bp, Zea Mays
cgcctaccttcgcacgggtgctctgcccgttcgacggccacgccgcgccgcccagctgctccggcacccgcccttcttcgtcgagctcgggatcagcatctcgcttgttctgggctccccattcggcctctcctcgccctaactctattttgcagcatgagaccagcacaacagcccgaatcataggcttgacgcagagaccccatctcatctgcgctcccgcgcgtggcctaacgctaacggagccagaagcaaaggagaggattccacaagcttcgagttgccgaaacattttgttaaatctactgcttgtgtgggatcattagtgcaaatccggtgcttgcgcgtgcaggctgtgctacccatgcgtcttggctattgtgaataaaagggtttagagggatgtcttcagaggagctgagggcgagcttttcagatttggcggtgggttcgccaacccagacagagggcaaaacgtatccttcaggtgatttgtcgtctgaggaggtcatgcaagtcacttgtttcacagaggatcttcatgatgtagtacttcactttcagatagtgaggttttctaaacagatctatgtgtgggttggatgcaacacagcaaagtttggccatttatacgctgctgcaaccactaggccggataacagagtgagcgtgacctctgtactaggaggaacatctgataacaccggatcaagtatggctcgccgtctagcttttagtaccagaaaggctgcatcctacatgtcccagtgttgaagaccggtctgaacattgtcctagcatgcagcatcccaaaagacagccccattcttgaggcagctgcggagaggaagctggtggagaagctgaaaggtttgggctacattaaaaccgcagctgtgaatgctaacacttccacggcaccatgatccgtggcatgatctagtgagctttcggtcgacgttcatcactagatgcatcatgatcatgagcagttgtgatgtttggtgggcttgattggctaactgtttcatctgttctttcgcgtggtaaaagttattatgaacattttggtgtatggagtgtttaaaagcactagagctaatagatagttggctaaaactactggtgaatttagctagttaactattagctaac

SEQ ID NO: 117119 - DNA, 1160 bp, Zea Mays
ccactagtccccttcccttccctcgcctaccttcgcacgggtgctctgcccgttcgacggccacgccgcgccgcccagctgctccggcacccgcccttcttcgtcgagctcgggatcagcatctcgcttgttctgggctccccattcggcctctcctcgccctaactctattttgcagcatgagaccagcacaacagcccgaatcataggcttgacgcagagaccccatctcatctgcgctcccgcgcgtggcctaacgctaacggagccagaagcaaaggagaggattccacaagcttcgagttgccgaaacattttgttaaatctactgcttgtgtgggatcattagtgcaaatccggtgcttgcgcgtgcaggctgtgctacccatgcgtcttggctattgtgaataaaagggtttagagggatgtcttcagaggagctgagggcgagcttttcagatttggcggtgggttcgccaacccagacagagggcaaaacgtatccttcaggtgatttgtcgtctgaggaggtcatgcaagtcacttgtttcacagaggatcttcatgatgtagtacttcactttcagatagtgaggttttctaaacagatctatgtgtgggttggatgcaacacagcaaagtttggccatttatacgctgctgcaaccactaggccggataacagagtgagcgtgacctctgtactaggaggaacatctgataacaccggatcaacttttagtaccagaaaggctgcatcctacatgtcccagtgttgaagaccggtctgaacattgtcctagcatgcagcatcccaaaagacagccccattcttgaggcagctgcggagaggaagctggtggagaagctgaaaggtttgggctacattaaaaccgcagctgtgaatgctaacacttccacggcaccatgatccgtggcatgatctagtgagctttcggtcgacgttcatcactagatgcatcatgatcatgagcagttgtgatgtttggtgggcttgattggctaactgtttcatctgttctttcgcgtggtaaaagttattatgaacattttggtgtatggagtgtttaaaagcactagagctaatagatagttggctaaaactactggtgaatttagctagttaactattagctaac

SEQ ID NO: 117120 - DNA, 1047 bp, Zea Mays
tccattgccatctctagatgaaactacccacatttcgtttctcttcctctccggtccccactagtccccttcccttccctcgcctaccttcgcacgggtgctctgcccgttcgacggccacgccgcgccgcccagctgctccggcacccgcccttcttcgtcgagctcgggatcagcatctcgcttgttctgggctccccattcggcctctcctcgccctaactctattttgcagcatgagaccagcacaacagcccgaatcataggcttgacgcagagaccccatctcatctgcgctcccgcgcgtggcctaacgctaacggagccagaagcaaaggagaggattccacaagcttcgagttgccgaaacattttgttaaatctactgcttgtgtgggatcattagtgcaaatccggtgcttgcgcgtgcaggctgtgctacccatgcgtcttggctattgtgaataaaagggtttagagggatgtcttcagaggagctgagggcgagcttttcagatttggcggtgggttcgccaacccagacagagggcaaaacgtatccttcagatctatgtgtgggttggatgcaacacagcaaagtttggccatttatacgctgctgcaaccactaggccggataacagagtgagcgtgacctctgtactaggaggaacatctgataacaccggatcaagtatggctcgccgtctagcttttagtaccagaaaggctgcatcctacatgtcccagtgttgaagaccggtctgaacattgtcctagcatgcagcatcccaaaagacagccccattcttgaggcagctgcggagaggaagctggtggagaagctgaaaggtttgggctacattaaaaccgcagctgtgaatgctaacacttccacggcaccatgatccgtggcatgatctagtgagctttcggtcgacgttcatcactagatgcatcatgatcatgagcagttgtgatgtttggtgggcttgattggctaactgtttcatctgttctttcgcgtggtaaaagttattatgaaca

SEQ ID NO: 117121 - DNA, 1012 bp, Zea Mays
acagaaaaaaaaagaagtaaactataattgcaaaaactgaccgccacagactctgctctggcagatcaagtcggacgtggagaggcagggcgacttcatccggttcctgatcaaggaggtggagggcgcggcgttcgtggacatcgaggacgtcgtgagcttcgtcaagtggctggacgacgagctctcgcgcctggtggacgagcgcgcggtgctgaagcacttcgagtggccggagaacaaggcggacgcgctccgcgaggcggcgttcggctactgcgacctcaagaagctggagcgggaggcggcctccttccgcgacgacgcgcgccagccctgcgccgcggcgctcaagaagatgcaggcgctcttcgagaagctggagcacggcgtgtataacctcgcccgcgtccgggacgccgccaccggccgctacacccggttccagatcccgtgggagtggatgaagcaggacaccggcatcgtcagccagatcaaactccagtcggtgaagctggcaatgaagcacctgaaacgggtttcctccgagctcgaggtgatcaagggaggccctgaagaggaggagcaggagctgatgctccaaggagtacggttcgccttcagggtacaccagttcgcaggtgggttcgacgtggacaccatgcgagccttccaggagctcaaggagaaggcgtccatgtgccgggtacagcggcagaagcagcaccgtcacctgcgccagcacaggctcgttgccagggcctgagaggaggagactgaggagtgtgtgaggaccagagcatgcagttcttattttttatatggtcggattatctatacgccatcatctcgtcgtcgccgccacagtgccatagtatgatttgttcattgtttttttttttgcgagaaatagttgatcgtgtattctgctgtaaacgctccagtactgtaactaatgaacagcctttgtacctttttttaggagaaatatgtgtttattctctttcgttct

SEQ ID NO: 117122 - DNA, 2375 bp, Zea Mays
gtcggctccccgccacggccctttcaacccaaaagacccgtttctcggacgccgcgccccgcgcctccagcttaaaccccgaagggcagttcctagtgcatcgccgccgcggccgccgctgagagtagtcatgtgctagtgcgccccggcgcagtcctaacggtacgtaggtctctccacggtggtttagtgaagttaagaacaccgccatggtgacaggccgggtcaaggcggccatgggcttccagcgcagccccaagtcgcaggtgccggaggcggcgtctccttctcgggcgcctacgtcggggtccgtgtccaccgccgggtcggcgccgtccaaggcgtcggcgctcgcgcggtccttcggcgcgtacttcccgcgctcttcggcgcaggtgcgccccgccgcccgcgcgccgccgcaggtcgccgagctgctgcgcgccatcgagcagctccaggagcgggagtcgcgcctccgcgtggagctgctggagcagaagatactcaaggagaccgtcgccatcgtcccgttcctggaggccgagctcgcggccaagaaggccgagctccagaggtgcagggacaccgcggagcggctggaggccgagaacgggcggctgtgcgccgagctcgacgccgccgcgctcgaggtcacgagcaggaagcagaggatcgtcgagctggagaaggagatggcggagctgaggacgcggcaggacgcggcagcggacgccgacgactgctcctcgtccgcttcggcgccgagcgagcgtctcgagagctccagcgctgcgccaaagccaaaccgcgcgagtttagctcagcttgatcctccagcgccgccagcgccagggccagcgcctttgaagtccaagtcctacttctccgcgagctcgtcgcacccttcgcccgcaagctcgtcgccgccgccctcgccgtcttcctccacgtcgacctcgtcttcgccagcgcactcccgctcgtcgtcggacacggcagccgctccaaggccccgcgtggtagagctctcaaagctcccgcccatacctccgccgccgccgccttgccctcctccgccacctcccagcaggagcaagagatcctctcccccgaactcagccagcgtggacggaagcgcagccgccgctccgcctcccccgccgccgccgccgccgccgcctccccctccggcaaggaggcagttcggcgccgcgccagcaccgcctgcaggggcatcgtcggggcagggcgacgtgaggcgcgtgcccgaggtggtggagttctaccactcgttaatgcggcgggagtccaagagggacggcagcggcacagcaagtgaggccgcgaacggaggcggcggcggcgcggcggcgacgcgcgacatgatcggagagatcgagaaccggtctgcgcatctcctcgcgatcaagtcggacgtggagaggcagggcgacttcatccggttcctgatcaaggaggtggagggcgcggcgttcgtggacatcgaggacgtcgtgagcttcgtcaagtggctggacgacgagctctcgcgcctggtggacgagcgcgcggtgctgaagcacttcgagtggccggagaacaaggcggacgcgctccgcgaggcggcgttcggctactgcgacctcaagaagctggagcgggaggcggcctccttccgcgacgacgcgcgccagccctgcgccgcggcgctcaagaagatgcaggcgctcttcgagaagctggagcacggcgtgtataacctcgcccgcgtccgggacgccgccaccggccgctacacccggttccagatcccgtgggagtggatgaagcaggacaccggcatcgtcagccagatcaaactccagtcggtgaagctggcaatgaagcacctgaaacgggtttcctccgagctcgaggtgatcaagggaggccctgaagaggaggagcaggagctgatgctccaaggagtacggttcgccttcagggtacaccagttcgcaggtgggttcgacgtggacaccatgcgagccttccaggagctcaaggagaaggcgtccatgtgccgggtacagcggcagaagcagcaccgtcacctgcgccagcacaggctcgttgccagggcctgagaggaggagactgaggagtgtgtgaggaccagagcatgcagttcttattttttatatggtcggattatctatacgccatcatctcgtcgtcgccgccacagtgccatagtatgatttgttcattgtttttttttttgcgagaaatagttgatcgtgtattctgctgtaaacgctccagtactgtaactaatgaacagcctttgtacctttttttaggagaaatatgtgtttattctctttcgttct

SEQ ID NO: 117123 - DNA, 1947 bp, Zea Mays
cgtgtacccgcgtgcgacgatgtcgtcgatgatcttgccgagatcgaagccaccccgcgtggtcttgagcacggtgccacccttcttgtgtcagtcgtcgacggcggaggggtgcagcctgacgtgatcctcgtcggcgccgtagaaccctcggtagccgacggtgacgccgaagacgtggcggacgccgtagagctcatggagcccgacgacgagctccctcagcacggtgttgagccccgggcagaggcccccacaggtgacgagcgtggcgcgcgccgcggccgggtcgacggcgaggtcccgccggggcccccgcgacggtaggcgacgagcggggtgggcgtagcggagacgaggtcgaagaaggcatggcggagggagacacgaccagtcaaagaacagagattgaagaagaagagaacgacagaggatgacggcgcctagggaagaaacggcgtgagggcaaaacgggaagatgaaatatgctaatgactatttagagaaaccgatgctaaatgttcaaacctacgaattcaattaccgcgatgatggtgctaagtttctgaagcccaccttagatggtgccatatttgcaaaattctcccccgcaggtatataaatacgtgtgttcatcgtattcaataacatgatcgatcgatcgatcccgcgcgtcaaccatgcaggccctcgccctgcccacgatggagtcggagctgagggctctcgcgtgggcgacgttgctcaccccagcgtgcgcggtgtacgcgcggttcgccgctcgccgccttcgccccggcgtcccgcgcctggccgcgctcttcccgacattcccggtgttcgtgtacatgccctgcatgttcagctccctccacctgcgcctcttctccaccttcttccacacctggctggccatcaacaggctcgtcctcctcgcgctcgacctcggcccgctccacccgcgcctcccgctcctgccgttcgtcctctgcgccggcctccccatcaaggtccgtctccagcagccgacgaagaaccaagcgtcgtcgtcgtcgtcatcaccaccacccagcgccgagttcctgaggccatgcgtccgcagcgtcctgctcctcagctgtctcgccatggcgtacccctacacgaggtggctcccgctctacgcgctccactacctctactgcgtccagatcttcctcacgctcgacctcgtgttctcctctatcgcgctcgtctccgcggcactcatgggcgcgagcctggagaggcagttcagcacgccgctcgccgtcacctcgctgaacagcttctggggccaacagtggaacctaatggccgtggacctcctccgcgagtcggtgtatgcgcccgtgcgcgccaggtggggacgggacgtcggcgtgctggccgcgttcctaatgtcgggcctgctccacgagttcctgtactggtacctgacgctacagcagcccaggggtgagatgttgctcttcttcgtgttccatgccgcgttccagatcgctgagcgacgggccagggcggccgggctgtggcggccgcccagagcagcggcgtacctcctcgtcacagccttcatggtggtcaccatatcggagatgttcttcgcgccgttcgtgagagccggcacagacgtgcgcctcacggaggaaaccacggcgatggtggaactcatttggggtactaggaaatatctgctccatccgtttagggtggcctcaagctagaggcgtaaggtcgatttatggttgctacattgtagagaatccactcgcagatgagcacttgtatatctctaatactccctccgtttctttttatttgtcgctgaatagtgtaattttacactatccagcgacaaataaaaagaaacggagggagtactatattactacatgagtctgaagcataaaaccattgagtctcaac

SEQ ID NO: 117124 - DNA, 1631 bp, Zea Mays
ggagaagtcaggaatgctcagaaagaagttcaggcacttgagagttgagactcactcagtcactagcaagtgcctcgtcacatggcagcggcagcgctagcggcgtggtggtggtctctgtcgctcctggctaccatcgtcggcggaggcagcgcctcaccgtcaccggtgcccggctgctacacgcgcatcttcagcttcggcgactcgctgaccgacacgggcaactacgtccacctgacggcgagcagccacagcccctacggcgcgccgccgtacgggaggacgttcttcggcaaacctaccggccgcgccagcgacggacgcctcgtcatcgacttcatcgcggaagagttcgggctggcgaaggtgacggcgatccaggcgggcacggcgccaggggacttccagaacggcgccaacttcgccatcatctcggccaccgccaacaacggctccttcttcgcgggcaacggcatggacatcaggcccttctcgctggacacgcagatgctgtggttcaggacccacctccgcgagctcgtgcaggcggcggcggcggcacagcagaacggcagcgtgggcgcgctgctgagcggcgcgctggtggcgctgggcgagatcggagggaacgactacaacttcgccttctcgcggggcgtgccgcgggacgcggtgcgcaggttcgtgccggccgtggtggacaagctggcgggcgccatggaggagctcatcgccatgggggcgcgcgccttcgtggtgcccgggaacctacccttcggctgcacgccgctgtacctgcagcggttccgcgccaacggcgggtggtgggactacgacccggccacgggctgcctcgcctggttcaaccgcttcgcccagtaccacaaccgggtgctcgcggcgcgcctcgacaggctccggcgcctgcacccggacgtgaccatcgtctacgccgactggtacgaggccacgatgagcatcttccaggaccccgggaagctagggttcacaaacgctctgcggacttgctgcgggaaccagaccgtgccgtgtggcaggcccgggtgctccgtctgcaaggacccgtccacgtacgggtcctgggacgggacgcacccgacggaggcggtgtacaaggtgatcgccgacggggtgctgcacgggccgcacgcgtcccctgttcctctcgccgacacctgtcctccgacatgacccttagaagatttataattggcagctttaagagcggtggtaacatctgaatcgtacttgcgtgattttaaggatggcacgataatagctttgtttaagaatacaggtgaggttggcatatttcgatagcataagcatacacacgaagctctgaagtgataattgagtttgtataaacatcatcattgatttagggggtgtttggttagagggactaaagattagtctctagtttttagtctcttttagtctcttttttaccaaacattaggactaaaatatgaactaaaatgatttagtctgtagtccttcacatatgtgctaaaagggactaaaccatattaattccacatttaccctttatttagttcaattgtactaatagtaggagaatgttaaaggctattttagtctta

SEQ ID NO: 117125 - DNA, 1161 bp, Zea Mays
cggctacctggcatccatgccccaattcatgcggcagcgctagcggcgtggtggtggtctctgtcgctcctggctaccatcgtcggcggaggcagcgcctcaccgtcaccggtgcccggctgctacacgcgcatcttcagcttcggcgactcgctgaccgacacgggcaactacgtccacctgacggcgagcagccacagcccctacggcgcgccgccgtacgggaggacgttcttcggcaaacctaccggccgcgccagcgacggacgcctcgtcatcgacttcatcgcggaagagttcgggctggcgaaggtgacggcgatccaggcgggcacggcgccaggggacttccagaacggcgccaacttcgccatcatctcggccaccgccaacaacggctccttcttcgcgggcaacggcatggacatcaggcccttctcgctggacacgcagatgctgtggttcaggacccacctccgcgagctcgtgcaggcggcggcggcggcacagcagaacggcagcgtgggcgcgctgctgagcggcgcgctggtggcgctgggcgagatcggagggaacgactacaacttcgccttctcgcggggcgtgccgcgggacgcggtgcgcaggttcgtgccggccgtggtggacaagctggcgggcgccatggaggagctcatcgccatgggggcgcgcgccttcgtggtgcccgggaacctacccttcggctgcacgccgctgtacctgcagcggttccgcgccaacggcgggtggtgggactacgacccggccacgggctgcctcgcctggttcaaccgcttcgcccagtaccacaaccgggtgctcgcggcgcgcctcgacaggctccggcgcctgcacccggacgtgaccatcgtctacgccgactggtacgaggccacgatgagcatcttccaggaccccgggaagctagggttcacaaacgctctgcggacttgctgcgggaaccagaccgtgccgtgtggcaggcccgggtgctccgtctgcaaggacccgtccacgtacgggtcctgggacgggacgcacccgacggaggcggtgtacaaggtgatcgccgacggggtgctgcacgggccgcacgcgtcccctgttcctctcgccgacacctgtcctccgacatgaccc

SEQ ID NO: 117126 - DNA, 126 bp, Zea Mays
gcccttatggttgaccacttgacctccaatgcttcaatttctcctacacatagagcatctacaaaaaacgctaaaaatatccccaaaaccttttattgggggctcttggaataaaatttccaaaaa

SEQ ID NO: 117127 - DNA, 562 bp, Zea Mays
gccgcaccggagatggagagcttggccaccggtgacgtggcggcgctgtcgccgagggccatcagattcgaggagatggtggactcatctactgccggtcgcttgcgccgccgccttgcaaggtccgggaccgcgcatgggcagatcaagctaggtcgaggtcaagcgaggtcggatcatgatgggcgcggcgggagcaggcagatcaagcgaggtcgagggcagcgccgaggcagggaggacaggcggggaagagccgagcgggagcgagggcgggcgcccatgcgcgagcagtgggggatccagagaagctggcatggatggcgtcggatggttgaggagtattgcggtgcgtgcggcggaggatgcggggtacaccgagacgggcgtcacaggcgggcgggtgggatgtgacaaggcgtgcgaagaggagaggtgtgcattacacggacagtggtcgatgacgaaagtgaatatcatgcgggttcgtgccgatgggccaggagcggcgaaggacgggcactgtgccttgatcgaggagctgaagaagttaggtgactag

SEQ ID NO: 117128 - DNA, 105 bp, Zea Mays
cggttcagaagacaagagttcctcgagtcttcggatcataccgcaatacacttcaatccgttccatcacaacacccactattttggaccaattcaaaagctttgg

SEQ ID NO: 117129 - DNA, 2534 bp, Zea Mays
ccctcttctcttctcgtctcccctccgccgcttccgttgctcgcagtgctgcctcccctcctctcttcactcgtcaggcccttccgccgtcccggaggctcgaacccctcggcccgcggacgggaccctaaacccgccccaccactcgcgcggggttcgcccgcgacgcatgcgcggcggcggctggtaccctcggcagccggcgatcgccggaaatctgcggggacagtgcggcggcttgcacgagtgccggacacggcgggagtggggaacgtaggggagatggcggcgggaggaaagggctgggcggagcgggtacgccgcggggcgaggaccgcttggttcatggtggccatggtggcctcgctgctcgtggcgtcgtcgccggcgctggtggcggcgggcgacatggcagtggcgctctggctcgaggcgcggctcggctgcttccgaggcgacggcctgcggggccacctccagcgctaccgttttcggaactcgcttgccgacatacctctcgtctccgtcgttcgatccatcgtcatcacctgtgtgtacctcatgtctgatacttctggcctctctcatggtccttaccttggaacaacaactttctgttccttggcttctctgctcatcttgttaattaaggcatctgtttatagtccggcgcaggacattgggcctgagctctcgccgtcgttaccagatcacaagctcaatctcaagaatctatggggaatgcctgtacttttcctgtcttccttggtgtttgctcttggccatgttattgttgcttacagaacaagcggcagggctcgacggaagcttctcattcaccgcattgaccctgaatcgattttagcatacaagaatgccttttctggatgctacaaggttccacggtctcctacaccatacagcggaaagctttttacaaggagtgaaagtgagactaagagaaaatcacttatccaggacgatcgtgatttgccaatcagttttcttgcagacagtgatagcatgttcattgcttgccaggggatcactatacactacaaagtttccgatccagcagccagcctaccttcatcccctggcttcttttcagagagagatactcatcacgatgtaatttcatcaagcatttctcctagaagacagaggcatgagagtccaccatctgcttcctctaatacccgtcgcgttctgaataggagctttagccatcaataccataatacttcgctatatgcaccactattggtagaaccagtggcatctccaactttgttggatgatattcctctgatgtgtattgatgatggcaatgctgatggatgtctgagtcatgtgggctttgaccttgaggctggagggcagggtaaattcgctgtagttttggtgcatggatttggagggggagtattctcgtggagacatgtttccaatttgttagctcgacaattgggatgcactgtgatggcatttgatcgcccaggatggggattaacatctcgacctcgtaggaaggactgggaagataagaagttaccgaatccatatgagctggagtctcaggttgatcttcttatttcattttgttcagagatgggcttgcactctgtggttttagttggtcatgatgatgggggcttgcttgccttgaaggctgcggagaagctgcgcacttatggaggtgacagagaggttgaagtgaagggagtagttcttattggtgtgagcttatcaagagaagtcattcctgcatttgctcgtatactcctgcatacacctctgaggaaaaagcacatggttcgaccacttctacgtactgaaatcgttcaagttatcaatcggcgggcatggtatgatgccacaaagttgacgacagaaatacttaacctatacaaggctccgctatttgttgagggctgggatgaagcacttcatgaagtaggccggctttcgttttctactgtcctgccatcaaaacgagcagcggatctactaagatcagtggaagaccttccggttctggtggtagcgggctccgaggatgctcttgtttctctgaagtcggcacaagccatggcttcgaaatttgtaaattctaggatagtaattatatcggggtgtggacatctgccgcacgaggagtgccccaaggcgttgctctcggctcttgctcctttcatctctacattggtaccctcagaagatttgttgcaaagactgtagaatatactcgttcctttttcgtttttttaagaacttttttctagctggtgagtttgtatgagcccattgtagcgcgaagtagtagtggagcctgacccaaaatctcaagggttcctagagctcccctgatttttttgtcacatgttaatggttccccctgaacgatttcaattaagcaagttgaatgtgtacagcacatgctttgttctgttccttgcccagcctaggtggggagaacaggcttagtacaatggcgatagctatcttggtttgaagccatctccgtggaagcc

SEQ ID NO: 117130 - DNA, 2944 bp, Zea Mays
ccctcttctcttctcgtctcccctccgccgcttccgttgctcgcagtgctgcctcccctcctctcttcactcgtcaggcccttccgccgtcccggaggctcgaacccctcggcccgcggacgggaccctaaacccgccccaccactcgcgcggggttcgcccgcgacgcatgcgcggcggcggctggtaccctcggcagccggcgatcgccggaaatctgcggggacagtgcggcggcttgcacgagtgccggacacggcgggagtggggaacgtaggggagatggcggcgggaggaaagggctgggcggagcgggtacgccgcggggcgaggaccgcttggttcatggtggccatggtggcctcgctgctcgtggcgtcgtcgccggcgctggtggcggcgggcgacatggcagtggcgctctggctcgaggcgcggctcggctgcttccgaggcgacggcctgcggggccacctccagcgctaccgttttcggaactcgcttgccgacatacctctcgtctccgtcgttcgatccatcgtcatcacctgtaagccctcccgctgcctgctaactcattgatgctttagaatgggcagatggcctaaaaaccaacccgttcgcttgagttcgatttccttttcttctactatttctcccctttgtggtttatttgctctggtgatgtagagagtgtttactgtttagaatcatttttttgggtgaggtcttagcttgagaagatcttttcgcattcctctatgaggatttggtgatctgaaagctacagtactcactacggctgtgcttgtcttcttttgcttgcacggagctttcggcggaatctgcgtgtatctgcagttattaatcacagagtatagctgttgcctgctctcttttcttgggaggtagttaaactaagcctgttgtttagctggacctggactggttgtaagaaattgggaacctctcgaataccaaattctgctctgttcttaatttgagggcaaagactaaccttatgttctgcggcttctgcaggtgtgtacctcatgtctgatacttctggcctctctcatggtccttaccttggaacaacaactttctgttccttggcttctctgctcatcttgttaattaaggcatctgtttatagtccggcgcaggacattgggcctgagctctcgccgtcgttaccagatcacaagctcaatctcaagaatctatggggaatgcctgtacttttcctgtcttccttggtgtttgctcttggccatgttattgttgcttacagaacaagcggcagggctcgacggaagcttctcattcaccgcattgaccctgaatcgattttagcatacaagaatgccttttctggatgctacaaggttccacggtctcctacaccatacagcggaaagctttttacaaggagtgaaagtgagactaagagaaaatcacttatccaggacgatcgtgatttgccaatcagttttcttgcagacagtgatagcatgttcattgcttgccaggggatcactatacactacaaagtttccgatccagcagccagcctaccttcatcccctggcttcttttcagagagagatactcatcacgatgtaatttcatcaagcatttctcctagaagacagaggcatgagagtccaccatctgcttcctctaatacccgtcgcgttctgaataggagctttagccatcaataccataatacttcgctatatgcaccactattggtagaaccagtggcatctccaactttgttggatgatattcctctgatgtgtattgatgatggcaatgctgatggatgtctgagtcatgtgggctttgaccttgaggctggagggcagggtaaattcgctgtagttttggtgcatggatttggagggggagtattctcgtggagacatgtttccaatttgttagctcgacaattgggatgcactgtgatggcatttgatcgcccaggatggggattaacatctcgacctcgtaggaaggactgggaagataagaagttaccgaatccatatgagctggagtctcaggttgatcttcttatttcattttgttcagagatgggcttgcactctgtggttttagttggtcatgatgatgggggcttgcttgccttgaaggctgcggagaagctgcgcacttatggaggtgacagagaggttgaagtgaagggagtagttcttattggtgtgagcttatcaagagaagtcattcctgcatttgctcgtatactcctgcatacacctctgaggaaaaagcacatggttcgaccacttctacgtactgaaatcgttcaagttatcaatcggcgggcatggtatgatgccacaaagttgacgacagaaatacttaacctatacaaggctccgctatttgttgagggctgggatgaagcacttcatgaagtaggccggctttcgttttctactgtcctgccatcaaaacgagcagcggatctactaagatcagtggaagaccttccggttctggtggtagcgggctccgaggatgctcttgtttctctgaagtcggcacaagccatggcttcgaaatttgtaaattctaggatagtaattatatcggggtgtggacatctgccgcacgaggagtgccccaaggcgttgctctcggctcttgctcctttcatctctacattggtaccctcagaagatttgttgcaaagactgtagaatatactcgttcctttttcgtttttttaagaacttttttctagctggtgagtttgtatgagcccattgtagcgcgaagtagtagtggagcctgacccaaaatctcaagggttcctagagctcccctgatttttttgtcacatgttaatggttccccctgaacgatttcaattaagcaagttgaatgtgtacagcacatgctttgttctgtt

SEQ ID NO: 117131 - DNA, 1752 bp, Zea Mays
ccccaggccatactccgatccccaagcagaattaaacctcacctaaccccatgggcgaccacccggtcgccggggagcaccaccacccttcggccgccacggccctgggcgcgctgctgctgctcccgtcggagctcctccacgagatcctgctccgcctggccgtcccggagctcctccgcgtgcgctccgtggcgcggccgctctccagcctcatctcctcgccggacttccgccgcctgtaccacctctcgtcggcgtcctccgggcccgggccggccgccgcgtggctgctcctcttcaagaagctcccgccccgcgacgccgccatcaggggcttccacgggccctcgggccgctggttccgcatccccgtctcggcgatcctcgcccccgccgtgccgcccggcgaggacctctacttcctggccgcgtccggcagctccttcctgttcgccgccaacggccgccgcgagctcgtcgtcgtcgacctcaccgcgcgcgccgcgcgccgcctcccgccgtccccgctcggcccccgcggcacctcctcctggcgtcgcttcggcctcaagctcgtcgccgatccccccggatcgaaccggtttaggtttctgttcgctgagctggtgaacaacacgccgttcctcttcgagtaccggtcggagacggacacgtggcaggagtcggaggcggtcctggtggcggagggggcagcagaggcggccgacccagacggagacggagacggcggcacctacctctgcgcggcgcacgccggggcggactgcgtgatggtgtacgccgggccgcgcacggacgagcgcccggtcttcttccgcccccggttcccgaacgccggcgccgcgggagcgggacacggggagcggctgcacgtgtacggcgacgggagcgcggccgtggtgcggtcggcggcggcggcggcgggcgaggacccgacgagccggagccggggcaaggtggtgacgggcgtggagctgtacggggtcggggccgtggggggcgactggcagctggtggccagcgtgccgggcgggctggtggaggggttccggaagccgtacgccgtgatgacgggtctgctggcggagcgggagggcgtggtccggctggtgctcatctccaactgccgcggcgcgtgggacctggtgtggctgtcgtacgaccgcgcgcggcgcgagtggcggtgggtgcccgtgccggactggggcggcagcaaggggctcaacatggccggcatcgccgtctcgtccaccttctcccgactctggccgctggccgcgccgccgccggcgaccagcagcagcagcagcagccaccggtgaaccgatgatgatacaggtgtctgtcgcacgtgatgcgtgggcgtgctgtacatacaggtgtgtgggtgtgccgagtggtaggggtccaagtccaacgcggccgtgtccccagtcccagtccccacgccacgatatgtgattgtgagcggcgcttccatgcggggtggggtgggggcgtggcgcggcatgatcccgcatgctagcttggccgatgcggactagtccgtccgtgagagtgaattgtttcagtttcagataagggaagggccaggtgtgcgcgtgcttctattttgtacagtataatactgcactacagctgctaagttcaaatgcggtgctatgcttgcgtcgtcaacttgaaccgcggcaatgtgcgacaacacgtggctacaagctataaaggtct

SEQ ID NO: 117132 - DNA, 2955 bp, Zea Mays
atggacgacgacaagcagcagctggcgcggcaggaggaccaggcagggcgcgcgtcgtgggtccccggcgcggtcatcgtgggcgcgggcccgtcggggctggccgtggcggcgtgcctggcggcccgcggcgtgccggccacggtgctggagatgtcggactcgctggcgtccacgtggcgccaccgcacctacgaccgcctgacgctgcacctgccgaagcgcttctgcgagctgccgctgctgcccttcccgcgggggtacccggcgtacccgtccaagggccagttcgtggcgtacctggaggcgtactccgcggcggcgggcgtggcgccgcgattcgacgcccgcgaggaggaggacgcgttcgacgcgggcgccggcgcctgggcgctccgcctggggggcgcaggaggcggcggcgccgaagaccccctcctggcgcgctggctcgacggaggcgacgtgttctcgagcgaagggatgcccaggatccccttccccaacggctggaaagggaagaacgggctctacgccgtcggcttctcgcagcgggggctgctgggcgcctcggccgacgccctcaacatcgccagggatatacaccgccgtggccttgttcttcgtctccggcaagggccccggaatctaggaggcggttgtgccgcccctgcgttctcctactcgtcagagactgagacctcgatcttctccaccgcggcggccgaacgccgactccccttccccatcgcgagtctactcaggagtgcttcagcgttgacataccgcgtgctcccggcggggactgttagacccgagacaaggcatgctgctgatgaggatgatgactttatgccattatccaagaagcgtaaattggacgacagccctgggaaagttttgaagaaggtagtcactaagcggaggaaagcagtgcccccaccccgacagcagaagctgaacgtcagatgcaacccccaagatgtgttactcgaccacaatgacatgacaattcgagctggccctggaaaggagctgaaaattacaaaggatacggtgcacctaattttgggtttaccgaatgctgggggaggaactgcattgggcatcgatgaagctgttgttgccaacaatttgagagctgaacttgggctatcgaaagaagattttggggttacagctctacaagatcgtttgaggaaaggttctgacgatgatttaagcatcagatgctttttcttgatattgttcaataggttgttgttccctactgccagctggggaataacgaaccatgaggttcttttaaccgagcagatggatcgtttccaccagattgactggtgccagcttattttcaatgatttatgccaagctgccaagaagtggcataacaggagcgttactaacgtttctacaaccatctatggatgttccatcgttattcttctgtattatttggatcatttgcatgactcagcggcaccccagaacaaacgtggaacaccacgaatcaaatactttgataggaatattattcaagccctgacaagagctgacaagggcaagatacgcaaaggagaagaagcatttggacattgctcgcataagaccaggaccaacacttttgatgttcctcgtcctgacccatctggacagcactcaattcacatcgaactcccgctcatcagggatttgatatcaagcaagcttaatcagcttccatcccgccaccgcatgggtttcatagagaagctgtcacattttgatgcggaggttggtaaagcgtgtacagttattaaacagactcttcagcagattgttgagaaacaattcaatctatctgatgtttttggcgagttaattgatgaggtcctccgtgccgaggcgggtgacaacgaagatgcttatgatgtgcagaaaaccacatcaaaatcagatgatattcttccccagacagctgaaagttgtcccgatgaagatgatattgatctactggttcatacaaatataacgaaacagaacaaaacacctacaacctcagtgggtaaacatggtgacggtggcaagaacatgccgaccaatacaaacgtcactcctaaagcaacaccacacatggatcctgacgcgccgatatttgatgcgactccgcaaatcaagtctactggcggcgtacaacaagtggcagaaacagacttgcctgacagtggtccatgctttgatcagactccatctgaacatgtttatgttgaaaccgatccagctacaaacactccacaggttggccaggcttctcttgattcggagatgcaaactgtgttagctctacgcgaatatttgtgtggtctgcaatctgacaccggcaggaccataatagattatggtgaatattcagcgacatgttctgacatatatgaatcttttgccgatgggaagtgtctcgacaatggattcatgcagtgtttcatccaatgtgttattcatgatgcaaaaaatcagcagacttccatgagttcgaacagtttggttcttgatgttaatgttgggtcaatactcaactttgaggaacaggaacgacacagtcgcaatcctcaaccttttgatgaatctgtactccacacacttctagacaattcattgcctgagacagatgagttggaccaatgcaaagcgatcatggtccccatggtaagcagggggcattggacattgtatgttgtcaacaaggtcaagaagtgcattcatattttagattccaacccatatggaccaacacttggtggaactacatggaaggactatcattttgcacatttgggctcaggtggcagaaagttaccctgggctaagggcaacaccagtgagatacggtctcttgcgctgcattacatcacattccacccgaagaacaaagcattatcgctgctccaagacatccaaagattcaaggtctaa

SEQ ID NO: 117133 - DNA, 116 bp, Zea Mays
tttttttttgttttggagtagcaaaattctaaggctatcaccacaacaacttatccatctgcatacacatactaaaaatccgttctgtgaatagtgtaatcttcaacgtaaaacag

SEQ ID NO: 117134 - DNA, 99 bp, Zea Mays
gcttccgcggtcaccgcgcttcggacctgcaccgatgtcgcgcacgtgctcgagcagtttcgcctcgcctggtgcagcaagctcgcccgggacgcccgc

SEQ ID NO: 117135 - DNA, 813 bp, Zea Mays
atggcttatgccttccttgtggttagtccacctgacatgagtcaatgctttgaggagatggctgctgctaaatctaataaaacttcatccaaacctggattgaattatcctggcctggaagaacagacccttcagtttatcttggactgctgtgaatctaatatagaaaatatacaaagtgggaattcattatcggtactacttcttaagtaccaagctccagtgtatgttgaacaaccaaggcaacagcaggtgccaccaccacatcgccaaccacgcagaccaccagcacaattccagcagctggagtatgaagattcttatgcacggggtcgaggaagaggcgtgggcgtggaaggggctggggtagaggtggctacggtggctatggtggatatggaaacaaccaaggtggctatcatcagggtggtgggtattatgacaatcaaggtggagataatggctatgataatcaagacagatatagtggctatgataatcaaagtgggtatggtggtggatatggctataaccaaggcagatatgggaactatcaaggcaatgacacatcttgataagttgatccagaaaatggtggatataaccgagacacaggaagtggtatgcgaggaagaggcaattggggttaccgaggagagtgttgtcgtcgactgtatctccaaaattcctttcgacaccattcaattgccttcctccgactacattgtgatcattgaccaccattgttctctgtactatgacaggggtgaaccaagcacaaaaacatcagctcatgctcatgtggtattttaa

SEQ ID NO: 117136 - DNA, 426 bp, Zea Mays
gcgcccaaccaaatggcgccgcacaccactgctggaggcgagggcggggccggggccgaggatgaggtgtccgaggcggcgactgcatcccccgcgctgcggcaccgccacgcgggcaagggcgagggcgaggggctgggcggcaatggcgtcgctgggggcgacgaccaggcgtatgtggagcgggtgttcgcggacaaggcggtgccgtcgtggcaggagcagctcacgctgcgggcattcgtcgtcagcgcgctgctggccgtcatgttcagcgtcatagtcatgaagctcaaccttaccacggggatcatcccctccctcaatgtctccgctgggctgctcggcttcttcttcgtccgcatgtggaccgccgccgccgagaggatgggcttcctccgccagcccttcaccaggcaggcctaa

SEQ ID NO: 117137 - DNA, 1067 bp, Zea Mays
atcgtctccccggaaaccttgtcgtcaccctctcccgcgaactccgtgtcgatagttccgctcttcggctcgggcgctcggtcgttccgttccccattcttctcgtacgcggccgattgtgaccctcgccctcgcctccccacaccacctaaaatgccctgcctccgcgcccgctcgtcatccccgcgccgcctcgtggacgccccggtcggcgatgtggcgggagcatgcggcccgctcctcaggctcctctcggcgtgcggcggggtctggcccacctcgccggtccccggcgccgcggcctcctcctccaccttctctagggacgactcagaaggcagtgacggcctcctccggggatgactcggaatcgaggccggcccgtgctcgtgaatcctccgtcgggcgcggcgccatcggcgttcctctgctgtgtgatccctaaaaccccgcggtgctctagcgaccccgcgatatgggacgacgacgacgacgggaggcgtttcggccgtgcttcgtggatttatatccttgatttttgtttttgatctcaagtgggttgctgttccagttgcagttctgtggtttgctgttctccagtgtgggttgccgttggtgtggttctgacttctgaggtctccttaaaacttgtacggtgcagggattagctgggaatacgatcgtcgcagttgctgcactcgggctcttcctcgccaagaggaacataaacacacctcagcgaagcgaagagtagggcaagaaagagataaaagcaacattcttcagtttgaagcaagggactataaattccacttcgctgcaatgaagagatgtgtaccaagcattctctggttggagcccttctctgttatccattccacttcttttacggaacaccatcagaacattctttaaaaaagatataattatgtgatatatagaaaccatagtgacgcacggtctcctacctagtttagtgtcataagttttaacgctcgattctgaaaattcggccaatcttaaaaagatttggaaatacgtagcttccgtgcagagcagtatcaaaa

SEQ ID NO: 117138 - DNA, 629 bp, Zea Mays
ggagtcttgggggtacccctaattatggtctccgacagttttcataagtttcctgagctcattatcactgtaatgcccctgattgatgtcctcctcaccactttgctttgcgcgagccctataagacaagtcgcagaagcgttgaaaactcaaggtgggcaacttattatccctgtcactctgcttcatgttgctgcatttgctcttgggtactggttatcgagattatctacctttggggaatcaacctctaggaccatctcaattgaatgtgggatgcagagttctgcacttggatttttacttgctcaaaagcagtttacaaatgcactcgttgttgttacttcagctgtcagcgttgtgcgcatgcatggctcttggaaggagtgtccttgcagtttactggagaaacaaatggcttccagcgaatgacaaaaatgatttcaaggagtaaagaaactcaacacatgagctcctagttttccatgttccaatactttaggcgtagataggaaggcctgcactattgttgattatcattaggggttccgctttgcctacatttattgtgtactatagtatttcatacccggtacgttcataaataaatcaatttctgcagttgtcct

SEQ ID NO: 117139 - DNA, 234 bp, Zea Mays
ggtcaccgccaacaagccaccgcatgttcttgtagaagaaatctgagagccatcaacattgctatgcgggtgagagaaaggaggaagtcacctcgtgtctacgccatcgacaagcattggagtttggtctggacagcatccgggaaaccaggaattcgtcgccggagtacatcaccgccgcggtgctcctttgtttcgtggacaaggactgctactactcatgggccggtaaga

SEQ ID NO: 117140 - DNA, 579 bp, Zea Mays
aatcctctcttcgcaccaagtcaccagacacgtacaccgacgaaggcgacgacgacctggtcatcaagcgggaggacaatggaagccgaggcgttcccgatccggttcacgaagggcatcaggtcctactggcgccggcgcgcggacggcagcggcgcggcgggccgcggcaggcgccgtcacgggctggtgcgcctcggggatggcagcgggcccaagccgtgggccgcgaggatcggcggcatgttccgggcgcgccgcgtcagggctacggcgccggcggcaccgtctcgagcggcgaccgtcgccaaggtgcccatgcgcgtgctcgggcggatacgggacgcctacgtcgacgtgatgctgggcgctgccaagacgcggccggccgcggcgcgggcgctgcccagcgcgcccgaggcgctgtggcagaagcgggtgcccgtgcgccggtccagcagcagccaggccgggcggaagcccgatgagctcggccagaggctcgtcatggagatgtacaagtccgtgctcgcgtccaggaacatctccggcatgctccaagcgtcggtggcgcgatag

SEQ ID NO: 117141 - DNA, 871 bp, Zea Mays
ccccaacacacttttataagtgtatttatttattttatcatttttatattttacaaattttagggctttacaaaaacaaagcgtccaccaaatttgatacacaatccaccacatattatccaacatatacaatccaccccatattagtagccaacacacataaagaggagaggagaaagttctactacttgcctgaaggagtgctgctgagtgtctagcctagaggagaggtgttgctgcctcgccggcgtggagagctgctcgaagtacgcgacgcgttgatgctgctatcaagatccagcgtggaggagatctggtgccgctatggagagttgctcctcctctgtaatgacagcgtttgtgctgctaatggaagcctggcgggtgggacaaaacatgagcgccggccacaccgacagcatcgatgctccctcttcctcgagaggaagccgctcaggcaggagctcgcgctgtagagcaggggattggagagggcggcgatgggagcacgggctggaccaacgacggcggtgggttgtcggagcgcgggctggacgagagtcggcgacgggagcgcgagcgggctggacgagaggcggcagtggattggacagggcgacggtagattggacagggcgacggtcagccggagcgcaggacggacacgcaacggcggcggtcagccggagcgggcgagccaaagagcaggacggacacgcagcggcggtcagccggagtgcgaccggagagcaggacagcgcgtcagcgccgacagtggtgaagactgcagcgaaggagaataggagatggattggggatttttttcgttggttccataggtaagaaacggaaggttaacagaaacgacgtt

SEQ ID NO: 117142 - DNA, 779 bp, Zea Mays
tttatttattttatcatttttatattttacaaattttagggctttacaaaaacaaagcgtccaccaaatttgatacacaatccaccacatattatccaacatatacaatccaccccatattagtagccaacacacataaagaggagaggagaaagttctactacttgcctgaaggagtgctgctgagtgtctagcctagaggagaggtgttgctgcctcgccggcgtggagagctgctcgaagtacgcgacgcgttgatgctgctatcaagatccagcgtggaggagatctggtgccgctatggagagttgctcctcctctgtaatgacagcgtttgtgctgctaatggaagcctggcgggtgggacaaaacatgagcgccggccacaccgacagcatcgatgctccctcttcctcgagaggaagccgctcaggcaggagctcgcgctgtagagcaggggattggagagggcggcgatgggagcacgggctggaccaacgacggcggtgggttgtcggagcgcgggctggacgagagtcggcgacgggagcgcgagcgggctggacgagaggcggcagtggattggacagggcgacggtagattggacagggcgacggtcagccggagcgcaggacggacacgcaacggcggcggtcagccggagcgggcgagccaaagagcaggacggacacgcagcggcggtcagccggagtgcgaccggagagcaggacagcgcgtcagcgccgacagtggtgaagactgcagcgaaggagaatag

SEQ ID NO: 117143 - DNA, 1131 bp, Zea Mays
aactaatattcttgcaaacaaagggagtagataggtcgcactcgcgtcataagagagagcgtcagagcgcctgcgaggcccagcctcccactcaccatacgcctcctctcgatcttaccttcgcacacacctttctcgatcgtacgcagtgtgtgtaagcctagttctcctacctaggcagccagctcagctcgccgcccggccggtgatgggaggacgaaggtcatcatcagtggctccagcggccgtcctcgcgctggcggcggtgaccatcgccatcgcggccgctgcggcggccgagggggaggtgaagtgcggcgggtgctccccgtgcggcggcgccgactgcccggtgctgtacccgtcgccgccgccgcccgcgctgcctcccccgccgccgtactactactacagccctccgccgccggccaccacctaccccggggactcgtcgtactgcccgccgccgcccggcgcgtacatccagatcgggagcacgccgccggggaagggcccgctgtacccgcaggacccggggttcatgccgtccggcgcgccggcccgcgccgcgccgctcgcgctcgcggtcgcgctcgccgcgttggccttcttcttgtgatctctgcatgtgacaactggacggcgagcttcctcggtgtagtaagtagcgcgcgcgacggcccgagggaggagtcgacacatcgtgccgccggcgttccacgggttcattcatttcccagtgtacttatgcatatgctccttctgtgacaataattttcacgtactggccatctatgggctacacggtagttctttcttgtaatgtatgaaagttttcttttgttgctttggtctttaatttcttaaatctgatggttttagaacaatccttgtaagaaatgggaacgcagattcaagaagaatttgtaagtgtaatcagctgcaggtcattccagatttcgtacgttttcccagagtcaacttatgatgtgtgtgtgtgtgtcgtcaatcggtgtgatctactacaacttgccgctgtaagcggccgggatcagggcgatcgagccggttgaccatgcgtgtcatgctcggttttcaaatattttcaatgcaagatgccaagattcgtct

SEQ ID NO: 117144 - DNA, 252 bp, Zea Mays
gatcgggatggccctggtaacgcgcgggtacacgacggtggccgggtgcgccatgatgcgtcgtcccttgcggtggcggaacaggtacacggcggcccccagcggccactcgatgaccccggccaccacgaacgcgacgaaccccagcgtcggcccgaccaccttgcaccggcacgggttgctccgcgtcccgcactgcacgcacaccggcacgaacgccatcgctgctgtgtcttttgttgccggctgctg

SEQ ID NO: 117145 - DNA, 729 bp, Zea Mays
tccaataagtcattcctcgacttcttgtcccactgcttttgtccgcaagcggaagtacggaactattgagaaggatcaagaaagcaaggaagcacctctcttctacagcactgccaccttctccagctaaccacttccccaacccccaatccatatctagcattctactgtagtggcaacgatgatggccgtgtctctgcagctgcgcccaatccctcgtctccctccgtcgagaaatcgctgcgcaggcacaagtccgcggatggccgccttgagctgcagatacaaccagcctaccaatgtgcaagggcgaacaaggctcacaagccacataacacgcagagatgccctgtcgttcatgtcatccggcgtgctggccgcattcgtgctcgtggtggccagtccggcagaagctagaccttcgagattggagaacaaaaggaaagccctggagaagcttgagaagctccgggagaaggcgttaggcccgaaggagaagagcggagccaccggtaacggtaaggagatgccccctccggcgaacttgctaatccctcctgccgccgtggaggctttcttgtgaaaggcagtctgccgatggacccttcccttgtgttaaatggcgaggctagtctgagtttgtacgttgttggagtcttgtatgactatgccaactggaaaatgaaatgaaagtgagcttgcatgcttagctgaaagtttatagatatg

SEQ ID NO: 117146 - DNA, 434 bp, Zea Mays
tccaataagtcattcctcgacttcttgtcccactgcttttgtccgcaagcggaagtacggaactattgagaaggatcaagaaagcaaggaagcacctctcttctacagcactgccaccttctccagctaaccacttccccaacccccaatccatatctagcattctactgtagtggcaacgatgatggccgtgtctctgcagctgcgcccaatccctcgtctccctccgtcgagaaatcgctgcgcaggcacaagtccgcggatggccgccttgagctgcagatacaaccagatccatgttaggcatactgttgttgagaatttcctcgtttacatgacctggacctccgtgagttcccgtcttgacatgtagattcagagtctgattctactatcctagagtacacaaaactgaatctgcatgtgtgtactta

SEQ ID NO: 117147 - DNA, 775 bp, Zea Mays
cgcactttaaccccctggatcccccgccggccatcgcccagcggccaacgaactctccccttccacccgccagtcgccacctcgcctcgccatggcagaccggccaccgccggggccacgcgcagcagccctgctgcccaacccggtcacccggcgcggccacgcggcgtcgtcgacggatcgccagcactcgctgctcgggcgcgccgtccagacgctccacgcccacggctccacccagctcctgcgcttcctcgcgcttgccgtcacgctgaccgcgctcctcgtcctggccagcgtgacgctcacggccgcgctcgccgcgctggtcctgctcagcccgctcgtgctcctcaccgtcccgctctgggcgcccgtagcggtactggcgctgctgacgggggccgcctcgctcgtcgcctgctgcgccggcctggccgcggtcgccgcgggcacgtgggcgcaccggtacttcacggggcgctactccgtcggcgcgcaccgggtgcagtccgccgatcagtacgcccgcgggggcacggtcgcggacgtggccagccgagtgagggggtactacgacgcctacgcgcgagagtacggcgggtacccgccgcgcccgcactctcgggtcaaggacgccgcgcccggggcgtagcgtagcttgtgtgtgctgagcggtctctccctctctctctccctctctttgctccctcgtgctcacgtgctgtacatatgtttcgtcgttctagcagtcgtgtttcgctagaagcggtat

SEQ ID NO: 117148 - DNA, 822 bp, Zea Mays
atgcacggcatggaacggaacacggggacgttgacgcgaagggactccaaggtccaaaccctacacctacacctaaaaagctacacgggcccgcgctggttttctccatccatcatcaaatttacacagcacaaccactttgcccccctggccctaacaaccaaactctctcggctccttcccctaccggccggagtcgcatgcggtgggactaggctaaaacgccgcggacgggcggcgcgggtggaaggggctcgcggcgggcggcgggcgtggggtgcgcgcggccgttgcggcggtgatgcgctcgcagcgcgggcacatggtgagcgcggacgccgggagcggctgccgggtgtgcggggagagcacggtgggcggggccacccgcatcgcgcgcagctcctccacctcccgctgcagccgccggttctcctcggtcagcgagccgaagcagcgcttcaggtactcgcactccagctccgtctgcttaagcttcgtcctagccctgcggttctggaaccagacctccacctgcctgggccgcagcttgagcttgacagccaaggcctccttttgcttcggtgtgagggtgtggttgaggcggaagctctcctccaggaggcgggactgctccttggacagccggagcttcttggcgcggtgcggcccgccggcgccgccgcgctcgtcctcctcctcctccacgctccccattgggaactcctcctcctcgccgccgctcgccggctggttcatgtccaggtccctcatgttgttcccgttcccgctcccgttgttgttgttgcatccaaacccctc

SEQ ID NO: 117149 - DNA, 1323 bp, Zea Mays
gtaaataagttctacttgtctgctttagagaattactagtagccttcaaaagtgagttctcgtcttgcccaattcaataatcactggtccaggtagacaataactgatcaggtggagctcctggctttatatcaatcctagtggcaaccacaatatgtttggagatacatggtctagtatcagtgacattagatgaaccaaacagcaccttagtgcatatgaactgcttttgtgaaatgcattgtggttgctctaagttagtgtccctatttcttacccaaggctcctacattatagcattagcatacatcctttctaggctcaatttttagcagtaggccactactagccccaaatcaggatcttactttcatgactccattgtcagtcacatctcagctccttttcttctctctccaatcttgcaccactgtccatagccaccgacttttgttgtcacctgccatgcatggccctcttactgccgctggctgtcatcattgctccctcgctccacagttgttagtcagagaggttaggcttccagtagagggacaattaacctataggaggtgaggtttaggctggaagggagagtctccttgcctctttgctggaggaccgccaagagggcacgtacgcatgtgaagagcgcggagctcatgcagaggctgttgtgaggatgcaacaacggcggctctaccgcaagggatcgtgcccttcgtgttcgcgaaagaatacaacgtccacccggccatcctgagcactatggtaatttttggcatgatgatagcgctgccgattaccttgatctactacatccttcttggactgaagccagtgtagtgtagctgcttcgttcgtcctgctgcacacacatgatgaggcatgcatgagcgaggtcctagtagaccaccatggacgacgctgagctggttgcactcgagcgtggcccacatgcatggctggagccttgtaattttgagtcagctccagtgttccctttgtgggggtgattagacatgcatgcggtttttgttgcttattactaatccatcttgtcgtttgaggattgcatgtagtgtcgtccatgcccatataaaccctagtttaagctttgagggccctctatcctagagatctcgatttgctcgtagcgagaaatgaaccatacatgcgtgacgatatttgctcgctgcattgggatttgggaaacggatatactgcgaagacgagaagtttactgtgcgcatcatcggtttgtgcgaagctgagttcaaaggaaaatacagtcaatatatactccctcctatttgcattcac

SEQ ID NO: 117150 - DNA, 2741 bp, Zea Mays
aaagaaatcaatgttgattttcatgcccccctggaaataaatgaatcttgattcaaatcccacgagtttgcatccgcgtcaaatgggctgcgcgtctccgtcgtttcttccgagcacacggcagcccaccggatcggtcgatctagagatggtgtttgtttgtcgcagtcgcaaccgaatcacactgctcccatataaatagaatggcgccggcgaccggcgttgcccacttcacattcacaagaccggaggagcccactcctgcatgtaactcagatactccacccgagagtccgcaccaactcacatcacacctcaccttccactccagaagaagaagccagaccggaatcccgagagccctgcccctgctccctcggttcctcctccgttgggcgtttggccgccgggggtggtgggccgagaccgagatgatatcgtggaacgatgtatacacggtgctgaccgcgatggtgcccctgtacgtggccatgttcctggcgtacgggtcggtgcggtggtggcgcatcttcacggcggaccagtgctccggcatcaaccgcttcgtggccatcttcgccgtgccgctgctgtccttccacttcatctccaccaacgacccgtacgccatgaacctccggttcctggccgcggacacgctgcagaagctggtcgtcctcgcggggctggccgcgtgctcgcgcctgccctccaggctggcggcgccgcggctggactggtccatcacgctcttctccgtgtcgacgctgcccaacacgctggtgatgggcatcccgctgctgatcgccatgtacggtccctacgccgggtccctgatggtgcaggtggtggtgctccagtgcatcatctggtacacgctgctgctgttcctcttcgagttccgcgccgcgcggacgctcatcgcggaccagttcccggacaccgcggcggccatcgcgtcgctgcacgtggacccggacgtggtgtcgctggagggcgggcgcgccgagacggaggccgaggtggcggaggacggccggctgcacgtgacggtgcgccggtcgtcggcgtcgcggcggtcgctgctgatggcgacgccgcggccgtccaacctgacgggcgcggagatatactcgatgagctcgtcgcggcagcacagcccgcggggctccaacttcaaccacgccgacttcttcgccatggtcgacggcgcgccgcccccgccggcgcccggcgcgcgcgcctcgagcttcggcgccgccgagctgtactcgatgcactcatcgcgggggccgacgccgcggcagtccaacttcgacgagcgctcggcctcggcccggtcgtcgaggcccgcggccgtgcccagccacgacgccaaggagctccacatgttcgtgtggagctcgggcgcctcccccgtctcggacgtcagcggcctgccggccttcaccggtggtggcgcgggtggcgtcaacgtcggcgccaaggaaattcgcatggttgtccccgccgagatgccgcagaacggctcggccggcaaagagaacgagaacaacggtgcagcagcagcagcgacgggggaagccgagggtttcggcttcagatcaggcggcaagacgacggcggaggacgccgaggcgggagaagcagcagggcccgagcagctaacgaagctggggtccaggtactcgacggccgagctgcgcgcgaaggacgacggcggtggcgcgggctcggcggcgcagcagatgccgccggcgagcgtgatgacccgcctgatactaatcatggtgtggcgcaagctgatccgcaacccgaacacgtactccagcctcatcggcctcgcctggtccctcgtcgcgttccggtggcacatctccatgccggcggtcgtggccaagtccatcgccatcctctcggacgccgggctggggatggccatgtttagcctgggattgtttatggcgctgcagccgaagctcatcgcgtgcggatggcgcgccacaggcgtctccatggccgtccgcttcctcgccggccctgccgtcatggccgccgcgtccctggccatcggcctccgagggacccttttgcggatcgccattgtgcaggcggctctaccgcaagggatcgtgcccttcgtgttcgcgaaagaatacaacgtccacccggccatcctgagcactatggtaatttttggcatgatgatagcgctgccgattaccttgatctactacatccttcttggactgaagccagtgtagtgtagctgcttcgttcgtcctgctgcacacacatgatgaggcatgcatgagcgaggtcctagtagaccaccatggacgacgctgagctggttgcactcgagcgtggcccacatgcatggctggagccttgtaattttgagtcagctccagtgttccctttgtgggggtgattagacatgcatgcggtttttgttgcttattactaatccatcttgtcgtttgaggattgcatgtagtgtcgtccatgcccatataaaccctagtttaagctttgagggccctctatcctagagatctcgatttgctcgtagcgagaaatgaaccatacatgcgtgacgatatttgctcgctgcattgggatttgggaaacggatatactgcgaagacgagaagtttactgtgcgcatcatcggtttgtgcgaagctgagttcaaaggaaaatacagtcaatatatactccctcctatttgcattcac

SEQ ID NO: 117151 - DNA, 1962 bp, Zea Mays
ggatgcggatgccggaagcagcacaaaactttggatcgccatctgttgcgtgctcgcacctcgccgcgcccccaagggctcacgctcgtgacgcgtcccacgttgcgtgaacgcactcgcgctccccagtggcgcacacgccaccgccgccgcctatttagaggcccccaccgcctcacgagcacgcccccccgtcgactcgcccgctccatcgcccccacgcacccgctgccggccaaaagccaattcgaatctccccgctgcgcggcggggcctctgcttccgcaatgcgggcctccgtcgaggaggcgggcgcgctcctggcgcggagcgactcagccggccgccgccgccgctccccgccgccggtgcagaccgcgtccccgaggcccggtagcctcaggcgccagtcgtcgtcgttccgcgaggacgtcgggcacgccgcctccgagacttacctcgtctcgcgcctcaccttcaccctcctccagtacctcgggttaggttaccgatggatgtcacaacttctttcactcacaatctatgcaattgtacttatgccaggatttatacaagttggatattactatttcttttcgagccaagtgcgtagaagtgtagtctatggagaccaacccagaaacaggttggatctatacataccagaagataatagtaggccctgtccagtggtggcctttgtgactggtggagcatggattattggttacaaggcatggggtgctcttctaggacgacgattggcagagcgaggaataatagttgcttgcattgattacagaaatttcccacaaggtacaataggggacatggttcatgatgcttctcaggggatttcttttgtgtgcaacaacatcgccagccatggaggagatcctaatcagatctacttgataggtcagtcagcaggtgcacatattgcagcgtgtgccctcatggagcaagcagtaaaagaatctggtgggaatcctgtttcttggagtcttacccaaatcaaagcatacttcggtttatctggagggtattaaattggatatctaatgaagtggtatctagtaacgattagatataacagtaaggattaatgatggatttgaagtacaatttcagcataatggaaggagaggaatcattgtcacgttattctcctgaaattgttgcaaagacgtcaagtgctgaaaccatagctcttctgcctcttgttgttcttatgcatggaactgaagattattcaataccatcatcttccagtcaaacttttgttgacgtcctccaacaagctggtgctcaagcaaggttactattgtacgaagggaaaacacatacagatatctttgtacaggaccctctaaggggtggaagagatccattggttgaagacgtgttgtctattattcatgctgatgatgcaaatgcatgtcaaaagattgctttagcaccaactcctaggagattagttttcgagtggcaattaaagttggcacgcaaaattagtccattctagcagtatgaaccatggagaagcttggagctatggattttgcaccttcatgaggaaagggtgctcgtctgctcggggagccgttgagctggattggatcaggcaagtaaaaggttctcgcgtcttctttacttgcacaacgttggtcaatgtgaaacttgtagctggtacgcaatacgagaggaagaagctaaatacacgactgggaatggaaaccacgtcatcttttttttgcaaggctgtatataatgttgcatattatattgtacaaaggcttgtactacgtttcttgtgcctctattctaaaatgtaagttttttttttaattttagccgaaatcaaactgactaaaggcttgtttcaaactgactaaaggcttgtttggaagcactcagtttttaagaaattagtttataaaaattgagttggtttcaaacata

SEQ ID NO: 117152 - DNA, 1956 bp, Zea Mays
caaccgagtccaccgccgtccgccgcagcctctaggccagggccagctaatttctcgcaggccgcgaacatgacactcacagccagttctagagcctgcaagattctcgtcctatcgccatctgttgcgtgctcgcacctcgccgcgcccccaagggctcacgctcgtgacgcgtcccacgcccccaccgcctcacgagcacgcccccccgtcgactcgcccgctccatcgcccccacgcacccgctgccggccaaaagccaattcgaatctccccgctgcgcggcggggcctctgcttccgcaatgcgggcctccgtcgaggaggcgggcgcgctcctggcgcggagcgactcagccggccgccgccgccgctccccgccgccggtgcagaccgcgtccccgaggcccggtagcctcaggcgccagtcgtcgtcgttccgcgaggacgtcgggcacgccgcctccgagacttacctcgtctcgcgcctcaccttcaccctcctccagtacctcgggttaggttaccgatggatgtcacaacttctttcactcacaatctatgcaattgtacttatgccaggatttatacaagttggatattactatttcttttcgagccaagtgcgtagaagtgtagtctatggagaccaacccagaaacaggttggatctatacataccagaagataatagtaggccctgtccagtggtggcctttgtgactggtggagcatggattattggttacaaggcatggggtgctcttctaggacgacgattggcagagcgaggaataatagttgcttgcattgattacagaaatttcccacaaggtacaataggggacatggttcatgatgcttctcaggggatttcttttgtgtgcaacaacatcgccagccatggaggagatcctaatcagatctacttgataggtcagtcagcaggtgcacatattgcagcgtgtgccctcatggagcaagcagtaaaagaatctggtgggaatcctgtttcttggagtcttacccaaatcaaagcatacttcggtttatctggaggatacaatatgcataatttggttgaccatttccacgagcgtggtcttaatcgctcaatattcctcagcataatggaaggagaggaatcattgtcacgttattctcctgaaattgttgcaaagacgtcaagtgctgaaaccatagctcttctgcctcttgttgttcttatgcatggaactgaagattattcaataccatcatcttccagtcaaacttttgttgacgtcctccaacaagctggtgctcaagcaaggttactattgtacgaagggaaaacacatacagatatctttgtacaggaccctctaaggggtggaagagatccattggttgaagacgtgttgtctattattcatgctgatgatgcaaatgcatgtcaaaagattgctttagcaccaactcctaggagattagttttcgagtggcaattaaagttggcacgcaaaattagtccattctagcagtatgaaccatggagaagcttggagctatggattttgcaccttcatgaggaaagggtgctcgtctgctcggggagccgttgagctggattggatcaggcaagtaaaaggttctcgcgtcttctttacttgcacaacgttggtcaatgtgaaacttgtagctggtacgcaatacgagaggaagaagctaaatacacgactgggaatggaaaccacgtcatcttttttttgcaaggctgtatataatgttgcatattatattgtacaaaggcttgtactacgtttcttgtgcctctattctaaaatgtaagttttttttttaattttagccgaaatcaaactgactaaaggcttgtttcaaactgactaaaggcttgtttggaagcactcagtttttaagaaattagtttataaaaattgagttggtttcaaacata

SEQ ID NO: 117153 - DNA, 336 bp, Zea Mays
atgatcaaagaggcctgtggtgctctacgggttcctagtgggaattatcggcgggctgctgctcccactcccgctggtggtaaacctcggaaaagcaggaggattgctagagtcggggttgagcggttgccagttccattgccagctaagctgggtaggaagaggattctcatggaacaaggtattgttgggtctgatcggtcagagttcgtctcctctaagactcttgacgagtatgcccgagtgttcagtaagcagctgtcggaggtccagatcaaagccttagccgcgctttttggctggactattcaagtggaaatgcaagggtacctctga

SEQ ID NO: 117154 - DNA, 99 bp, Zea Mays
gtgcatccgagtaataagacacattgctgaacattggttagtacccctttcattccaaaatgtaagtcattcatgcttttctgcatacatagtttgtgc

SEQ ID NO: 117155 - DNA, 147 bp, Zea Mays
atggagtacaagctggaatcttgcagcattcaagctcacaaaggtgacaacgttataatggactaccccggaaaaattactgatggaacagttttaaattcaagctatgaaagagggaatacatacttggagttggagcaaacctga

SEQ ID NO: 117156 - DNA, 1451 bp, Zea Mays
tggccatctctagcacagcccggccggcgtcgttcatctgtgtttggtagtacggtcgttccgacggtcggatgctcacaagagaaaagagatgctgtgtgcaagctgcagagactggcgtccgacccgatcccactcccacggtcccacctcgcctctcgcgctcctgcccacccagcctgtccgccgtctggtgtccgcctgttccccaaaagcaaagagaggcgcagagccgccgccgttgatctctgacctttccgatccagagcctagctctcaccgtctaccggagctctcaccatggcggtgagctcgcggtttccctcccaacccgcggcgcgtggcctcctgcgccgcaccccgcagcgcatcctccccgtcgagcgcacgccgcgccgcctcgccctggtcgtcaccgccgtctctgggggacctgtacctggcggatcgcccgttcccaggcggccgccaccgccggaggacgccgcgaccgtggcaccgacctcagtgccgtcgtcggccgcctcggccatcgatttcctcaccctgtgtcaccgcctcaagaccaccaaaaggaaaggatggataaaccatagcatcaagggccctgagtccattgctgatcacatgtaccgaatggccttgatggctctgattgctggtgatctgcctgctgtggatcgagaaaggtgtatcaaaattgctattgtgcatgacattgcagaagctattgttggtgacattaccccatcggatggtatacctaaggctgaaaaaagccggcgcgaacaagcagcactagatgaaatgtgccaagttcttggtggtgggccagctgctgatgagattaaagagttgtgggaagaatatgagaacaattcttctattgaagccaatcttgtaaaagattttgataaagtggaaatgattcttcaggcattggaatatgagaaagaacatggcaaagtgctagatgagttctttctctccactgccggcaagttccagacagagatcggtaagagctgggccgctgaagtaaactcgaggagaaaggagggatgcggaaagcaggagccttcatcaaacttccacggaaacgtgttgtgatggggacggtgtggccaactagagcctggcaagtttaagtggccctggagccaacttcagcggtgggctgatggcagttcaccgattgacacggctgttcagccttcctaaataataacaggagggttatggagtgaacactagattttagtctggttagctgaaatgttcgtagttgctcgaagaccaaggggtaggtaaaactgtgtagtgtttcgttgtagcctggaatccagcgaggatgagatacttcttcttttttcaactccgtgaataatgaaagggcaatggtgtttgcccttctcatcttccctgcccatttttattgggcaaaatctatg

SEQ ID NO: 117157 - DNA, 1541 bp, Zea Mays
caagccaccgcctggccgtctcccccagaatccacccgcctggccgcctccccaagccaccgcttggtcgtctcctcgcctgaagccgctggctgtctcccccagaatccccccgcctggccgcctcccccaagccaccgcctggtcgtctcctcgcctgaagccgccgcccgcatggatcccgtcgaccaaggggcgccacaccccaaacagcgccgccgcagctccaaatccccctcaactgcgccgccgcaaccacagcagcgccgccgtacctccttgcttgctgccctagatgcgatagggagagtagaacctggcaccttcgatagtcgacagagcacaccatcggcatctgtacatcgatctactgtgggcagcgctgatccctcgacggtgatgcctgattacagtaaaattgcttgactggggcgaagatggccatagatcagaacaagaaattggtgcactaagagcagcgtttgcacaagaggtcgctgtctggcataagcttgagcatccaaacgttactaagtttattggggctataatgggcgcaagagatttaaatatacaaacggaacatggacagcttggcatgccaagcaatatttgctgtgttgttgttgagtaccttgctggaggtgcgctgaaaaattttctgataaagaacaggagaaggaaacttgcctttaaagttgtggtccaaatagctcttgaccttgccaggggattatgctacctccactcaaagaaaatagtgcaccgtgatgtcaagactgaaaacatgcttctggacaagacgagaacggtaaagatcgctgattttggtgttgctcgagtcgaggcttcaaatcctagcgatatgacgggagaaacagggacgcttggttacatggctcctgaggttctcaatggccatgcttacaacaggaagtgtgacgtgtacagctttgggatctgcctgtgggagatatactgctgtgacatgccgtaccctgatctcagtttttctgaggtcacctctgccgtcgttcgccagaatctgaggcctgagataccgcgctgctgcccgagctcgctagcgaatgtgatgaagcgatgctgggacgcgaacccggacaagcgtcccgagatggcggaggtggtgtccatgctggaggcgatcgacacgtccaagggtggcggcatgatccctaaggaccagacgcagggctgcctctcgtgcttccgccagtaccgaggtccctaacgcagggttgtttatttatacccggtgaaatgatgatattggtctctacactacaactcagtgtaatctaatcgcagaagtggctatataatggagaagcttatcattgcttgccatgggtgtaaatggatggggcggggtggttgacgattggtgtgcttgtatgctcgcttcgagttataatgcttgctgtaagttaaggtgtggacggagttgctgttgccgtttgctcacatcgttaaattcgtgggcgtgacatgaagcaaggttatgtactacgtattggatt

SEQ ID NO: 117158 - DNA, 1765 bp, Zea Mays
cacgaaaccccttgtgggacccacaaccgcaacacgagtcctcggctcctgacctccgggtctggcctccggcgtcacttgccctcccgtaccccgtgcggccgtgcctacttcggcaacccactatctcatgcgctcacatggagactcccgcacgaactggaatcatctccgcctcgccacctcttcatcttcttccccagtagccgccgccaccaccactgcagcagccaaaccacgtgacacctcccgcgccgctcaaccccacagcatccgttgccaccgccgctcacctccccggcgctcccggctacaaccactgcaagcatgaggcagccaaccagcgcgggcggcgacgctgggttcttgcgcgcggaccagatcgacctcaagagcctggacgagcagctcgagcgccacctcggacatcccgcggagcgggtagttggcccagtctctgggacagggagccgccgcggcgaaacggccaagctgggtccggaggagctgacgccactgcagcggtgccgtgaggactgggagatcgaccctaccaagctcatcatcaagggcgtcatcgcgcgcggcacctttggcaccgtccaccgcggcgtctacgacggccaggacgtcgctgtaaaattgcttgactggggcgaagatggccatagatcagaacaagaaattggtgcactaagagcagcgtttgcacaagaggtcgctgtctggcataagcttgagcatccaaacgttactaagtttattggggctataatgggcgcaagagatttaaatatacaaacggaacatggacagcttggcatgccaagcaatatttgctgtgttgttgttgagtaccttgctggaggtgcgctgaaaaattttctgataaagaacaggagaaggaaacttgcctttaaagttgtggtccaaatagctcttgaccttgccaggggattatgctacctccactcaaagaaaatagtgcaccgtgatgtcaagactgaaaacatgcttctggacaagacgagaacggtaaagatcgctgattttggtgttgctcgagtcgaggcttcaaatcctagcgatatgacgggagaaacagggacgcttggttacatggctcctgaggttctcaatggccatgcttacaacaggaagtgtgacgtgtacagctttgggatctgcctgtgggagatatactgctgtgacatgccgtaccctgatctcagtttttctgaggtcacctctgccgtcgttcgccagaatctgaggcctgagataccgcgctgctgcccgagctcgctagcgaatgtgatgaagcgatgctgggacgcgaacccggacaagcgtcccgagatggcggaggtggtgtccatgctggaggcgatcgacacgtccaagggtggcggcatgatccctaaggaccagacgcagggctgcctctcgtgcttccgccagtaccgaggtccctaacgcagggttgtttatttatacccggtgaaatgatgatattggtctctacactacaactcagtgtaatctaatcgcagaagtggctatataatggagaagcttatcattgcttgccatgggtgtaaatggatggggcggggtggttgacgattggtgtgcttgtatgctcgcttcgagttataatgcttgctgtaagttaaggtgtggacggagttgctgttgccgtttgctcacatcgttaaattcgtgggcgtgacatgaagcaaggttatgtactacgtattggatt

SEQ ID NO: 117159 - DNA, 85 bp, Zea Mays
agtccttcagattcttacctcattcctgaccaccgataggttcgttccaaacttttcgaatcactccccgatgacaacagaattc

SEQ ID NO: 117160 - DNA, 240 bp, Zea Mays
atgtcagggcagccgtgtcagaccatgctgaagagattagccgtggagatgagcgcgttcagagcgagcatcaggaacgcaatgaaggacagccacagggcgctggtgatcttcctgttgaaggcgtccgtgccgaacctggacacccacaggtcgttgcgcgacgcggccgccgacgacgccgacatgaggaggaggtcgttcatttcttacggaatagaggcatgcaacaatttctag

SEQ ID NO: 117161 - DNA, 1425 bp, Zea Mays
atgatgtccgtctcctgctgccacttggcggcgctcgtgtccatcctcgcggcgggcgcggctacggcgttgctcaccttgtccctaccctcttcccctggcgcatccacgacgaggagaaccgacttcgctggagcattgtcagtggcaaacgagaccccgccactgccgcacttgtcagcgcctccggcacccgccacgccgccccctgctccaccttccccgcccgccgacaggcctcgaaagcgagagccgtcgttctggaggatggcgccggaggaggcgctgcgctacgccaagaaggaaatacgggacgccgagccggtgctcgacgaccccgacctgtacgcgcctctgttcaagaacgtctcccagttcaagaggagctatgaactgatggaacggatactcaaagtttacatttaccaggacggccggaggcccatcttccacacgcctcccctcagcggcatctacgcctccgagggctggttcatgaagctcctcaaggagagccgccggcacgtcgtcgccgacgcgggcaaggcgcacctcttctaccttccctacagctctcagcagctgaggctcacgctctacgaggccggctcccacaacctcaggccgctggccgcgtacctgagaaacttcgtcagaggcctcgccagcaagtacccgttctggaaccgcacgagaggagccgaccatttccttgtcgcctgccatgattggggaccttacacgacgaccgcgcacagggacctccgcaagaacgccatcaaggcgctgtgcaacgccgatagctcggagggcatctttacccccgggaaggacgtctccctgcccgaaacaaccatccggacccccaggcggccgctccggtacgtcggcggcctgccggtgtcccgccggagcatcctagccttcttcgccggcaacgtgcacggcagggtccggccagtgctcctcaggcactggggcaacgggcaggacgacgacatgcgggtgtacagcctgctgcccagcagggtgtcacgccggatgaactacatccagcacatgaagaacagccgcttctgcctctgccccatggggtacgaggtgaacagcccccgcatcgtcgaggcgctctactacgagtgcgtgcccgtgatcatcgccgacaacttcgtgctgcccttcagcgaggtgctggactggagcgccttctcggtggtcatcgccgagaaggacataccggacctcaagaagatcctgaaggggatctcgctgcggaggtacgtggcgatgcacgactccgtcaagcgcctgcagcgccacttcctgtggcacgccaggccgatcaagtacgacctcttccacatgatcctgcactcaatttggttgagtagagtcaaccaggtccaggttcagcttgagggatga

SEQ ID NO: 117162 - DNA, 1054 bp, Zea Mays
acagagcgaaacaatccgcagagactcggaagtcggaaagaatccctcctgttcttcgtcaaccctccagaacctgctctctcttcctctacgagactacgaccgtgtaaggacatggccgtcgagcgcttgaagaccgggttcgagcagttcaaggccgacgtctacgacaagaagccggagctgttcgagccactcaaggcgcaccagtcgcccaagtacatggtgttcgcctgctccgactcccgcgtgtgcccgtcggtgaccctgggcctgcaccccggcgaggcctttgccgtccgcaacatcgccagcatggtgccgccctacgacaagaccaagtacgccggcgtcggctccgccatcgagtacgccgtctgcgccctcaaggtggaggtcatcgtggtcataggccacagccgctgcggcgggatcaaggcgctcctctccctcgaggacggcgcgcccgacaagttccacttcgtggaggaatgggtcagggtcggcgccccggcgaagtccaaggtgctggccgaccacgcctcggcgcctttcgaagaccaatgctccatcctggagaaggaggccgtcaacgtgtcccttgagaacctcaagtcctacccgttcgtcaaggaagggctggagaaagggaccctcaagctggtcggcggccattacgacttcgtcaatggaaagttcgagacatgggaaccctaagtggccatatacgtacaaatacgccccaccggacttattagctgcgtggagtgcttaattatttgccgctatatatacacatataccggaatttaccggtgagaactatactgttgtaataataatagcgggaaaaaatattctttgcatctgggatacaaacacacttttttacgaatagaagaaaaataaattagtaagggattaatttataaatttgatctgtttttgtgggtttgcctctaggtagtggatgtgagaggcttcaaaagagtgtttgtatcccgaatacaaagaattttttcaataaggaatacctgtgttatttgacttctaa

SEQ ID NO: 117163 - DNA, 1636 bp, Zea Mays
gcgagcgccatttgttggaaataccttgtccacaaaggccgctctcaggcgttactgacggtgtctctttctctcgctggcacgattacacgcgtcttgttgctagtaaactgtaccacgagagagagagagagagagagagagagagagagagtgagagggccgcatcgcatacatacatccgtccggagataagagaggagtggaagaaaagaggagaaggtgagcagctgcctttgcctcccgcgtgtcgttataaaaaggatcggagcgggggtcaccgaaggcgtccaattcatccaccttgtccgccacccaccttccaaggtccgtcccctcctccccccctccctcggcccctgggaggggccatggacgaccccgtcgagcgcttgaaggacgggttccacaagttcaagaccgaggtctatgacaagaagccggagctgttcgagcctctcaaggccggccaggcccccaagtacgtggtgttcgcctgctccgactcccgcgtgtgcccgtcggtgaccctgggcctgcagcccggcgaggccttcaccgtccgcaacatcgccgccatggtcccagcctacgacaagaccaagtacaccggcatcgggtccgccatcgagtacgccgtgtgcgcgctcaaggtggaggtcctcgtggtcattggccacagctgctgcggtggcatcagggcgctcctctccctccaggacggcgcacctgacaacttccacttcgttgagaactgggttaagatcggcttccctgccaagattaaggtgaagaaagaccacgcatcggtgccgttcgatgaccagtgctctattctagagaaggaggccgtgaacctgtccctggagaacctcaagacctaccccttcgtcaaggaagggctggccaacgggacgctcaagctggtcggcggccactacaacttcgtgtcaggggagttcctcacatgggacaataagcagccatcgacatggccgtcgagcgcttgaagaccgggttcgagcagttcaaggccgacgtctacgacaagaagccggagctgttcgagccactcaaggcgcaccagtcgcccaagtacatggtgttcgcctgctccgactcccgcgtgtgcccgtcggtgaccctgggcctgcaccccggcgaggcctttgccgtccgcaacatcgccagcatggtgccgccctacgacaagaccaagtacgccggcgtcggctccgccatcgagtacgccgtctgcgccctcaaggtggaggtcatcgtggtcataggccacagccgctgcggcgggatcaaggcgctcctctccctcgaggacggcgcgcccgacaagttccacttcgtggaggaatgggtcagggtcggcgccccggcgaagtccaaggtgctggccgaccacgcctcggcgcctttcgaagaccaatgctccatcctggagaaggaggccgtcaacgtgtcccttgagaacctcaagtcctacccgttcgtcaaggaagggctggagaaagggaccctcaagctggtcggcggccattacgacttcgtcaatggaaagttcgagacatgggaaccctaagtggccatatacgtacaaatacgccccaccggacttattagc

SEQ ID NO: 117164 - DNA, 1406 bp, Zea Mays
accatcctgcacacactgcaatctccgtccatccctccgtttccttttttcctctgttgccatcagttcagtagtagcctgcagctctcccaccttctcgctgcgctgtactgtgctggtgcaaagaagatccctgttcccgcttttagatcacctttgtgcatgcttttccctgtggtccgtgggcgaggaggccaaaaactgcatcatgcccctcgccctctctctctctctatcatgctgcctgtatcgcaatcacgagcgagcaggttggtcgtctttctggagacggcgagctgaccggccgacggtgtctctgtggctgttgatgttgcaggcaggggaggggccatggacgaccccgtcgagcgcttgaaggacgggttccacaagttcaagaccgaggtctatgacaagaagccggagctgttcgagcctctcaaggccggccaggcccccaagtacgtggtgttcgcctgctccgactcccgcgtgtgcccgtcggtgaccctgggcctgcagcccggcgaggccttcaccgtccgcaacatcgccgccatggtcccagcctacgacaagaccaagtacaccggcatcgggtccgccatcgagtacgccgtgtgcgcgctcaaggtggaggtcctcgtggtcattggccacagctgctgcggtggcatcagggcgctcctctccctccaggacggcgcacctgacaacttccacttcgttgagaactgggttaagatcggcttccctgccaagattaaggtgaagaaagaccacgcatcggtgccgttcgatgaccagtgctctattctagagaaggaggccgtgaacctgtccctggagaacctcaagacctaccccttcgtcaaggaagggctggccaacgggacgctcaagctggtcggcggccactacaacttcgtgtcaggggagttcctcacatgggacaataagcagccatcgtgaatctatatatatacactacatgatgcatgttcgtattcagcatgcagctacatacatatatatataccggatcacccaatgcaatgtgtgaatgtgtattgtgtaataagcaataccatatattctaccattctaccgcttttttattttctaacgccgagcattcatgtactgtgtattttatgatgaccgccctgtgtgctcgtcaaaagacatctgctatatataatcatctttggcgagattaattattacgaagccaactagagatggtcaaacgggccgccccgacccgataaagcccggaccgttttgggtccgatccatcaggcacggttagaaaaccgagccgatccatctaaacctgcgggctcgttttcctgttcgagcccggcccgcggcagcctaaacccgtttagcacgggaaaagtggg

SEQ ID NO: 117165 - DNA, 1187 bp, Zea Mays
accatcctgcacacactgcaatctccgtccatccctccgtttccttttttcctctgttgccatcagttcagtagtagcctgcagctctcccaccttctcgctgcgctgtactgtgctggcaggggaggggccatggacgaccccgtcgagcgcttgaaggacgggttccacaagttcaagaccgaggtctatgacaagaagccggagctgttcgagcctctcaaggccggccaggcccccaagtacgtggtgttcgcctgctccgactcccgcgtgtgcccgtcggtgaccctgggcctgcagcccggcgaggccttcaccgtccgcaacatcgccgccatggtcccagcctacgacaagaccaagtacaccggcatcgggtccgccatcgagtacgccgtgtgcgcgctcaaggtggaggtcctcgtggtcattggccacagctgctgcggtggcatcagggcgctcctctccctccaggacggcgcacctgacaacttccacttcgttgagaactgggttaagatcggcttccctgccaagattaaggtgaagaaagaccacgcatcggtgccgttcgatgaccagtgctctattctagagaaggaggccgtgaacctgtccctggagaacctcaagacctaccccttcgtcaaggaagggctggccaacgggacgctcaagctggtcggcggccactacaacttcgtgtcaggggagttcctcacatgggacaataagcagccatcgtgaatctatatatatacactacatgatgcatgttcgtattcagcatgcagctacatacatatatatataccggatcacccaatgcaatgtgtgaatgtgtattgtgtaataagcaataccatatattctaccattctaccgcttttttattttctaacgccgagcattcatgtactgtgtattttatgatgaccgccctgtgtgctcgtcaaaagacatctgctatatataatcatctttggcgagattaattattacgaagccaactagagatggtcaaacgggccgccccgacccgataaagcccggaccgttttgggtccgatccatcaggcacggttagaaaaccgagccgatccatctaaacctgcgggctcgttttcctgttcgagcccggcccgcggcagcctaaacccgtttagcacgggaaaagtggg

SEQ ID NO: 117166 - DNA, 1313 bp, Zea Mays
gtaaactgtaccacgagagagagagagagagagagagagagagagagagtgagagggccgcatcgcatacatacatccgtccggagataagagaggagtggaagaaaagaggagaaggtgagcagctgcctttgcctcccgcgtgtcgttataaaaaggatcggagcgggggtcaccgaaggcgtccaattcatccaccttgtccgtccctccctgagaaccagaaggccacccaccttccaaggcaggggaggggccatggacgaccccgtcgagcgcttgaaggacgggttccacaagttcaagaccgaggtctatgacaagaagccggagctgttcgagcctctcaaggccggccaggcccccaagtacgtggtgttcgcctgctccgactcccgcgtgtgcccgtcggtgaccctgggcctgcagcccggcgaggccttcaccgtccgcaacatcgccgccatggtcccagcctacgacaagaccaagtacaccggcatcgggtccgccatcgagtacgccgtgtgcgcgctcaaggtggaggtcctcgtggtcattggccacagctgctgcggtggcatcagggcgctcctctccctccaggacggcgcacctgacaacttccacttcgttgagaactgggttaagatcggcttccctgccaagattaaggtgaagaaagaccacgcatcggtgccgttcgatgaccagtgctctattctagagaaggaggccgtgaacctgtccctggagaacctcaagacctaccccttcgtcaaggaagggctggccaacgggacgctcaagctggtcggcggccactacaacttcgtgtcaggggagttcctcacatgggacaataagcagccatcgtgaatctatatatatacactacatgatgcatgttcgtattcagcatgcagctacatacatatatatataccggatcacccaatgcaatgtgtgaatgtgtattgtgtaataagcaataccatatattctaccattctaccgcttttttattttctaacgccgagcattcatgtactgtgtattttatgatgaccgccctgtgtgctcgtcaaaagacatctgctatatataatcatctttggcgagattaattattacgaagccaactagagatggtcaaacgggccgccccgacccgataaagcccggaccgttttgggtccgatccatcaggcacggttagaaaaccgagccgatccatctaaacctgcgggctcgttttcctgttcgagcccggcccgcggcagcctaaacccgtttagcacgggaaaagtggg

SEQ ID NO: 117167 - DNA, 1335 bp, Zea Mays
gtaaactgtaccacgagagagagagagagagagagagagagagagagagtgagagggccgcatcgcatacatacatccgtccggagataagagaggagtggaagaaaagaggagaaggtgagcagctgcctttgcctcccgcgtgtcgttataaaaaggatcggagcgggggtcaccgaaggcgtccaattcatccaccttgtccgtccctccctgagaaccagaaggccacccaccttccaaggcaggggaggggccatggacgaccccgtcgagcgcttgaaggacgggttccacaagttcaagaccgaggtctatgacaagaagccggagctgttcgagcctctcaaggccggccaggcccccaagtacgtggtgttcgcctgctccgactcccgcgtgtgcccgtcggtgaccctgggcctgcagcccggcgaggccttcaccgtccgcaacatcgccgccatggtcccagcctacgacaagttcgttttcgtgtcgactgcagaccaagtacaccggcatcgggtccgccatcgagtacgccgtgtgcgcgctcaaggtggaggtcctcgtggtcattggccacagctgctgcggtggcatcagggcgctcctctccctccaggacggcgcacctgacaacttccacttcgttgagaactgggttaagatcggcttccctgccaagattaaggtgaagaaagaccacgcatcggtgccgttcgatgaccagtgctctattctagagaaggaggccgtgaacctgtccctggagaacctcaagacctaccccttcgtcaaggaagggctggccaacgggacgctcaagctggtcggcggccactacaacttcgtgtcaggggagttcctcacatgggacaataagcagccatcgtgaatctatatatatacactacatgatgcatgttcgtattcagcatgcagctacatacatatatatataccggatcacccaatgcaatgtgtgaatgtgtattgtgtaataagcaataccatatattctaccattctaccgcttttttattttctaacgccgagcattcatgtactgtgtattttatgatgaccgccctgtgtgctcgtcaaaagacatctgctatatataatcatctttggcgagattaattattacgaagccaactagagatggtcaaacgggccgccccgacccgataaagcccggaccgttttgggtccgatccatcaggcacggttagaaaaccgagccgatccatctaaacctgcgggctcgttttcctgttcgagcccggcccgcggcagcctaaacccgtttagcacgggaaaagtggg

SEQ ID NO: 117168 - DNA, 1070 bp, Zea Mays
cccttcattctctcgctctctctatacccccctcatgctgcatctatcaccgtaccatcacgagcatgcaagttagtctttccgggcatggcgaactgaccgacgattttcttgttgctggtcctgcagccccaggacgccatcgagcgcttgacgagcgggttccagcagttcaaggtcaatgtctatgacaagaagccggagcttttcgggcctctcaagtccggccaggcccccaagtacatggtgttcgcttgctccgactcccgtgtgtgcccatcggtgaccctgggcctgcagcccggcgaggccttcaccgttcgcaacatagccgccatggtcccaggctacgacaagaccaagtacaccggcatcgggtccgccatcgagtacgctgtgtgcgctctcaaggtggaggtcctcgtggtcattggccatagctgctgcggtggcatcagggcgctcctctccctccaggacggcgcacctgacaccttccacttcgtcgaggactgggttaagatcggcttcattgccaagatgaaggtaaagaaagagcacgcctcggtgccgttcgatgaccagtgctccattctcgagaaggaggccgtgaacgtgtccctggagaacctcaagacctaccccttcgtcaaggaagggcttgcaaatgggaccctcaagctgatcggcgcccactacgactttgtctcaggagagttcctcacatggaaaaagtgaaaaactagggctacggcaattctaccggcccgccgactcctgcatcatcataaatatatatactatactatactactacgtacctaccgatatgcacccgagcaatgtgaatgcgtcgagtactatatatctgttttctgcatctacatatatataccggatcaatcgcccaatgtgaatgtaataagcaatatcattttctaccacttttcattcctaacgctgagctttttatgtactatatcttatatgatgaataataatatgaccgccttgtgatctaaagacatcagctatatttttttcacaatattattacgaagagcttctta

SEQ ID NO: 117169 - DNA, 2005 bp, Zea Mays
acgataagcggcactcgcacgatcaatgtacacattgcccgtccgcgccaccacatccagcatcgtcgccagcctcgccacccccgcgccgtcctcctcctccggctccggctccggccgccccaggcccaggctcatccggaacgcccccgtcttcgccgcccccgccaccgtcgtggtactaaacgggacggcgggcagctgaggagtcaaacgagagagatcgagagaaagaaagggagggcatccaccagccgccggcgataagaggggaggagagagaggccagagaagaggaggagaagaagaagaaaatgagcagctgcctctgccttccgaaaaaaaaggaggggccagcgaaggagaagccgtccacagatacccccacctcgtcactccttcagaaccagaagccctcccaacctccacctcctccctccaaggcttcctccaagggcatggaccccaccgtcgagcgcttgaagagcgggttccagaagttcaagaccgaggtctatgacaagaagccggagctgttcgagcctctcaagtccggccagagccccaggtacatggtgttcgcctgctccgactcccgcgtgtgcccgtcggtgacactgggcctgcagcccggcgaggcattcaccgtccgcaacatcgcctccatggtcccaccctacgacaagatcaagtacgccggcaccgggtccgccatcgagtacgccgtgtgcgcgctcaaggtgcaggtcatcgtggtcattggccacagctgctgcggtggcatcagggcgctcctctccctcaaggacggcgcgcccgacaacttccacttcgtggaggactgggtcaggatcggcagccctgccaagaacaaggtgaagaaagagcacgcatcggtgccgttcgatgaccagtgctccatcctggagaaggaggccgtgaacgtgtcgctccagaacctcaagagctaccccttcgtcaaggaagggctggccggcgggacgctcaagctggttggcgcccactacgacttcgtcaaagggcagttcgtcacatgggagcctccccaggacgccatcgagcgcttgacgagcgggttccagcagttcaaggtcaatgtctatgacaagaagccggagcttttcgggcctctcaagtccggccaggcccccaagtacatggtgttcgcttgctccgactcccgtgtgtgcccatcggtgaccctgggcctgcagcccggcgaggccttcaccgttcgcaacatagccgccatggtcccaggctacgacaagaccaagtacaccggcatcgggtccgccatcgagtacgctgtgtgcgctctcaaggtggaggtcctcgtggtcattggccatagctgctgcggtggcatcagggcgctcctctccctccaggacggcgcacctgacaccttccacttcgtcgaggactgggttaagatcggcttcattgccaagatgaaggtaaagaaagagcacgcctcggtgccgttcgatgaccagtgctccattctcgagaaggaggccgtgaacgtgtccctggagaacctcaagacctaccccttcgtcaaggaagggcttgcaaatgggaccctcaagctgatcggcgcccactacgactttgtctcaggagagttcctcacatggaaaaagtgaaaaactagggctacggcaattctaccggcccgccgactcctgcatcatcataaatatatatactatactatactactacgtacctaccgatatgcacccgagcaatgtgaatgcgtcgagtactatatatctgttttctgcatctacatatatataccggatcaatcgcccaatgtgaatgtaataagcaatatcattttctaccacttttcattcctaacgctgagctttttatgtactatatcttatatgatgaataataatatgaccgccttgtgatctaaagacatcagctatatttttttcacaatattattacgaagagcttctta

SEQ ID NO: 117170 - DNA, 2001 bp, Zea Mays
acgataagcggcactcgcacgatcaatgtacacattgcccgtccgcgccaccacatccagcatcgtcgccagcctcgccacccccgcgccgtcctcctcctccggctccggctccggccgccccaggcccaggctcatccggaacgcccccgtcttcgccgcccccgccaccgtcgtgtaaacgggacggcgggcagctgaggagtcaaacgagagagatcgagagaaagaaagggagggcatccaccagccgccggcgataagaggggaggagagagaggccagagaagaggaggagaagaagaagaaaatgagcagctgcctctgccttccgaaaaaaaaggaggggccagcgaaggagaagccgtccacagatacccccacctcgtcactccttcagaaccagaagccctcccaacctccacctcctccctccaaggcttcctccaagggcatggaccccaccgtcgagcgcttgaagagcgggttccagaagttcaagaccgaggtctatgacaagaagccggagctgttcgagcctctcaagtccggccagagccccaggtacatggtgttcgcctgctccgactcccgcgtgtgcccgtcggtgacactgggcctgcagcccggcgaggcattcaccgtccgcaacatcgcctccatggtcccaccctacgacaagatcaagtacgccggcaccgggtccgccatcgagtacgccgtgtgcgcgctcaaggtgcaggtcatcgtggtcattggccacagctgctgcggtggcatcagggcgctcctctccctcaaggacggcgcgcccgacaacttccacttcgtggaggactgggtcaggatcggcagccctgccaagaacaaggtgaagaaagagcacgcatcggtgccgttcgatgaccagtgctccatcctggagaaggaggccgtgaacgtgtcgctccagaacctcaagagctaccccttcgtcaaggaagggctggccggcgggacgctcaagctggttggcgcccactacgacttcgtcaaagggcagttcgtcacatgggagcctccccaggacgccatcgagcgcttgacgagcgggttccagcagttcaaggtcaatgtctatgacaagaagccggagcttttcgggcctctcaagtccggccaggcccccaagtacatggtgttcgcttgctccgactcccgtgtgtgcccatcggtgaccctgggcctgcagcccggcgaggccttcaccgttcgcaacatagccgccatggtcccaggctacgacaagaccaagtacaccggcatcgggtccgccatcgagtacgctgtgtgcgctctcaaggtggaggtcctcgtggtcattggccatagctgctgcggtggcatcagggcgctcctctccctccaggacggcgcacctgacaccttccacttcgtcgaggactgggttaagatcggcttcattgccaagatgaaggtaaagaaagagcacgcctcggtgccgttcgatgaccagtgctccattctcgagaaggaggccgtgaacgtgtccctggagaacctcaagacctaccccttcgtcaaggaagggcttgcaaatgggaccctcaagctgatcggcgcccactacgactttgtctcaggagagttcctcacatggaaaaagtgaaaaactagggctacggcaattctaccggcccgccgactcctgcatcatcataaatatatatactatactatactactacgtacctaccgatatgcacccgagcaatgtgaatgcgtcgagtactatatatctgttttctgcatctacatatatataccggatcaatcgcccaatgtgaatgtaataagcaatatcattttctaccacttttcattcctaacgctgagctttttatgtactatatcttatatgatgaataataatatgaccgccttgtgatctaaagacatcagctatatttttttcacaatattattacgaagagcttctta

SEQ ID NO: 117171 - DNA, 1728 bp, Zea Mays
acgataagcggcactcgcacgatcaatgtacacattgcccgtccgcgccaccacatccagcatcgtcgccagcctcgccacccccgcgccgtcctcctcctccggctccggctccggccgccccaggcccaggctcatccggaacgcccccgtcttcgccgcccccgccaccgtcgtgggcatggaccccaccgtcgagcgcttgaagagcgggttccagaagttcaagaccgaggtctatgacaagaagccggagctgttcgagcctctcaagtccggccagagccccaggtacatggtgttcgcctgctccgactcccgcgtgtgcccgtcggtgacactgggcctgcagcccggcgaggcattcaccgtccgcaacatcgcctccatggtcccaccctacgacaagatcaagtacgccggcaccgggtccgccatcgagtacgccgtgtgcgcgctcaaggtgcaggtcatcgtggtcattggccacagctgctgcggtggcatcagggcgctcctctccctcaaggacggcgcgcccgacaacttccacttcgtggaggactgggtcaggatcggcagccctgccaagaacaaggtgaagaaagagcacgcatcggtgccgttcgatgaccagtgctccatcctggagaaggaggccgtgaacgtgtcgctccagaacctcaagagctaccccttcgtcaaggaagggctggccggcgggacgctcaagctggttggcgcccactacgacttcgtcaaagggcagttcgtcacatgggagcctccccaggacgccatcgagcgcttgacgagcgggttccagcagttcaaggtcaatgtctatgacaagaagccggagcttttcgggcctctcaagtccggccaggcccccaagtacatggtgttcgcttgctccgactcccgtgtgtgcccatcggtgaccctgggcctgcagcccggcgaggccttcaccgttcgcaacatagccgccatggtcccaggctacgacaagaccaagtacaccggcatcgggtccgccatcgagtacgctgtgtgcgctctcaaggtggaggtcctcgtggtcattggccatagctgctgcggtggcatcagggcgctcctctccctccaggacggcgcacctgacaccttccacttcgtcgaggactgggttaagatcggcttcattgccaagatgaaggtaaagaaagagcacgcctcggtgccgttcgatgaccagtgctccattctcgagaaggaggccgtgaacgtgtccctggagaacctcaagacctaccccttcgtcaaggaagggcttgcaaatgggaccctcaagctgatcggcgcccactacgactttgtctcaggagagttcctcacatggaaaaagtgaaaaactagggctacggcaattctaccggcccgccgactcctgcatcatcataaatatatatactatactatactactacgtacctaccgatatgcacccgagcaatgtgaatgcgtcgagtactatatatctgttttctgcatctacatatatataccggatcaatcgcccaatgtgaatgtaataagcaatatcattttctaccacttttcattcctaacgctgagctttttatgtactatatcttatatgatgaataataatatgaccgccttgtgatctaaagacatcagctatatttttttcacaatattattacgaagagcttctta

SEQ ID NO: 117172 - DNA, 1466 bp, Zea Mays
acgataagcggcactcgcacgatcaatgtacacattgcccgtccgcgccaccacatccagcatcgtcgccagcctcgccacccccgcgccgtcctcctcctccggctccggctccggccgccccaggcccaggctcatccggaacgcccccgtcttcgccgcccccgccaccgtcgtgtaaacgggacggcgggcagctgaggagtcaaacgagagagatcgagagaaagaaagggagggcatccaccagccgccggcgataagaggggaggagagagaggccagagaagaggaggagaagaagaagaaaatgagcagctgcctctgccttccgaaaaaaaaggaggggccagcgaaggagaagccgtccacagatacccccacctcgtcactccttcagaaccagaagccctcccaacctccacctcctccctccaaggcttcctccaagggcatggaccccaccgtcgagcgcttgaagagcgggttccagaagttcaagaccgaggtctatgacaagaagccggagctgttcgagcctctcaagtccggccagagccccaggtacatggtgttcgcctgctccgactcccgcgtgtgcccgtcggtgacactgggcctgcagcccggcgaggcattcaccgtccgcaacatcgcctccatggtcccaccctacgacaagatcaagtacgccggcaccgggtccgccatcgagtacgccgtgtgcgcgctcaaggtgcaggtcatcgtggtcattggccacagctgctgcggtggcatcagggcgctcctctccctcaaggacggcgcgcccgacaacttccacttcgtggaggactgggtcaggatcggcagccctgccaagaacaaggtgaagaaagagcacgcatcggtgccgttcgatgaccagtgctccatcctggagaaggaggccgtgaacgtgtcgctccagaacctcaagagctaccccttcgtcaaggaagggctggccggcgggacgctcaagctggttggcgcccactacgacttcgtcaaagggcagttcgtcacatgggagcctgtaggggtccacgcgcacagctcttcttttagagcaactccaatagattagccaaattttttattctatattctcatttagctagccgtttagctataattcactctctaaattacgattaattccaacagactagccaaattagactggtaggtcccacatgtcattctcaccttgccttcttccctatgtcccacgcgcctatgctacaccgtcctgcctccactccggctgaggacaaaggctatgggaggaccggatagctagcgtagggaattagtcatatttggctagcggagggggttgtttaccgagttggatagcgagagaaggatttgaagagactgttggatccaatttttactccaattttattatttttagctagtcaatttgttttacataa

SEQ ID NO: 117173 - DNA, 1778 bp, Zea Mays
actcggcggccaatctacagctgaccggattaacaataacagtcgcttgtttctcaagcaagcaagcacgatctcggcaaatcccacggacagaggacctttcgagagatctcccaaaatcatgtgtaaacccaggaaaaagtagcaagaactcggtacacgcacacggaacgcaaccagcgggcagcctagcgcaagagataaacgaaccccgcgtccgcgtgcatcacgactgacgtgtagcgcacccgagccacgagggcgtgcgcgtttctcccaaattccccagcccaagctaaaaaacagagcagacgccagacgccagacgccccagacgccagacgccagacgggcgccgcgagtcagagcccttctagaaggtcgcctcgctacccggttcccctatataaacgccgttcccatctcgctaaccgactagcagttgttccccttttccctccccacgccgaacgcacccgatcgcaaacaaagcgagcagcagaaacatgcgagacatgccggttgtccgccgccaggaacccaccgtcgtcaggacggaggacgacgtggtttccggcggtgaggactcggacggcgagttcgagttcccctccgtgagccgggagtccgcggcgggcgttggcggcgccgcgtctgccgacgagctcttcgcgggcggccacgcccgggcgttctacccggtgtttggccgagtgctggacgaggccgcagcgccggcaccgagggcgccactagggcggctgttccagctggagcaggcgcggacctcgtccgtcgcgtccacgtcctcctcctcctcatcatcatcggcgtcgacggcggcgggcacgggcgcggacctcgacggcgtcggcgcgtcgccggacagctactgcgtctggacgcccgggtcgtcgccggcgtcctcgccctcgcggccgccgcggaagagcgggtccacgggctccatcgcgcggtggcgccgcatcggtgagctcgtcgtcggccgcagccgcagcgacggcaaggacaagttcctcttcctctcggcgccgccgtccccggccagggacagggagcacgcccccgcctccaaggccaaggccaagctgccgcccaaaggaagcaaagccgccgcaaccgagctagacacggtctccgcgggccgccggttgtcatatggcggcggcggcgccaaggcctccaccggcggccggcgcacgttcctgccgtaccggcaggacctcgtggggctgttcgccagcgtgcacgggctcagcaggagcccacacccgttgtgagccggtgagccacgaccacgacgcgccgtggaggacccgttccaaacagtgagacttcaggtttgaaatcgggatttgaaatttcagacatttgacttggagatctcctgcgagccgagtcaaaaagacaaggtgtgaagtcagagaaagcaggggaaatgtgagccttcctttcaggattcggctcggaatcgtgctctgcagtcggtggctaaccacctgccatgcgatttgtgtaggcgggtacacatatactacgacaaattggacaagaagtttacatgtgattgttcgtatatgttggtatatatgtagctgtgtacatactgtacattgtatagtattgcaatttaggtatacaggagtaggtgtttgcgaggaattcagaattcctcgtttgcattctacagtttcgtttatctgcgtgttgtcgcatctctaatgtctaatctaactaattgcttttctgcctaatta

SEQ ID NO: 117174 - DNA, 450 bp, Zea Mays
atggcgaacaatagacaggtctcaccagacaatggcgatggtgcaagggtcggccacgacacaaggcagtgcggccctgtttcagaactccgacgaggtattgtagggcttctggtggtcttctcattgcgccggggccacgatcaccaacagagtcgccctgtaaagctttctggccacctcccgaagtgcttgcgctggcgaaacggagttgcctccgcggcggcagtgttttcttcacgacgctccatgatctcatcgacgccctcggttcacgtgctctcaatttttggggtggccgaggaggggacggacgtagggcttgcttttatgctcggcgtggagcccggttgggtcgcgttcggttggggaggaggttcctcgggattgcgttggctgttgagctcgatttgggagggaagagtcttgagtgctaggtcccacgtgtag

SEQ ID NO: 117175 - DNA, 543 bp, Zea Mays
aaatatatgtaaatatgcgtatactaaatagtaacttctattattatgcagaggttgaattttaatgtggatgttataaatatgagtatgccggatcgtgcaagaccaaaaggacggacaatcaaaaattcagaagataggattatgagactaggtgcgaaaggagagaaaaagaagaataggagatgccatttgtgtggaatagcagatgggcataacagcaaaacatgtctgtctgtggaagagaacagggcaaggctagcaaaactgtctaatcgaaagagaggacggccagccggatcaagactaaacaataaaacaactgctccacagtggaatgaaacatcgactgcaaaaaaacatcgtattgatgaagaagtggaaaatgaagaagccgatgagcatatggatttgggcgaataatttgaagtgtgactaaagagtggtcgatttagtagaaacttgtaatagcacaatgacttatgctttattttgttggaaattcaatagtttgaatgaaagggttatataatgcgttgatat

SEQ ID NO: 117176 - DNA, 1552 bp, Zea Mays
tggaaatgctcccaattgactcggttatacgtcttattcaagagcagaaagttagtctagctcgaaggttcgcgcttgttcccttgggaccgccactactgacttacaggagcaactgcaaagcgatgttgacagctgatggtgattctgttcgattggtggtggatcggccatataaagctggagagccaataatcatctggtgtgggccccaaacaaactccaggcttgttctgaattatggttttgttgatgaagataatccctttgatcgtgtagcaattgaggcatctttaaatacagaagatcctcaataccaagaaaagagaatggttgctcagaggaatggaaaacttgctatccaaaattttaatgtctatgtaggtaaagagaaacaaactgttgcagaaatgctgccttatttgagactaggttacatatcaaatcctgatgaaatgcagtctatactctcttctgaaggagatacatgtccagttagtccatgtacagagcgagctgtacttgatcaacttgttggttacctggaatctcgattggctggatatccaacaactttggatgaagatgaagctatgttggcagatggcaatttggaaccaaagaaggaagttgctactaggcttgtaaggttggagaagaagatgctccatgcctgtctgcaggccacaaatgagtttataaacgacttgccagaccacacagtgtcaccttgccctgctccatatgcccctgaattgaaatgagattgcatgttttcttttcccagatggtcataccattaagaatgtcaaaatttgatcaatttgcatatctatatgaagaccatatatgctgcaaggtggatatactatttgaaagaatctgctgcttgtttcctttagagattacagatcttaattgcatgctagaaggaaatcgcatttcttgctgttcgttcaagttaataaggatatgattggtctccagcgggatatggctatggtctcgaaagggatgtggtcatgttgtagttagttgcgatgcacagaaggtatcacttttgttaatctagttggtgttgtattaacaacctccttttgctgataatcttgggcaggaatgccaatcaacaatcatgattcatgtacatgattgctgactgatcactttttttttcacgagatggtcagtagttattgttgtagttgtctttaggattacttacagaaaccgaatttgggcagaactggattcaatcggccatgctgctatgccagttttcattctagattgggcactactccttctgaggcattgtatggctacagctatttcgggttggaacttggaagcgaatacaaagtagcgtagagaagtttcttagcattgatttacccgatctgttagaggcttttgaggtgtctaaataggtatttgtaaaaaaattgtggagtcgtcttgtcgtaaagagacatctctagctcgtaactcaagtagtcaagtagtaacagatcacagatgtcttcacttctcttactaatacatcgtctgc

SEQ ID NO: 117177 - DNA, 1913 bp, Zea Mays
cgctcttcgccgtcagcccgtcactcctctcccccgtccggccgtcccaactcccaatcgtcgccgcgcttctccccgcacgattgccagaatctctaacgcccatggcccccgtctcccccgcggccgccgccgccgcggtctcggcctctcaccacggccgccacctcctcccgtcgtccccgcgccgcctccccaggccccgcccgcgctctcgtccgcaccttcgcctcgccgcctgccacgccgacaccctcctcccctcctcctcatcggaggcccgtgcggcgccaggccctgcggtggagccttcctccgaatctgccaccgactgcttcgtcgattggctgcgcgcgcgcggccttcccccgggcaaagtggacatccgggagcgcccggtgccctgcttgcgcgacggcaaggaccagccgctgcgctacgtctccgctgtcgtcgacctccaggcgggggatgtggcattcgaggtgtcaatgtccctcgtcgttacgcttgagcgggtgctcggggatgaatcaatcgctgagttgttaacaaataacaagttatctgagctggcatgcttggcattgtatctcatgtatgagaaaaaacaaggaaaggattcattttggtacccctacattaaggaacttgaccgacatcgaggaagggggcagctagctgttgaatcaccacttttatggactgaaagtgaactggattaccttactggaagccccttgaaggatgaagttgttgctagagatgaggcaataaggagagagtataatgagcttgacacattgtggtttatggcaggttcactatttcagcaatatccttttgacatacctactgaggcttttccgtttgaaatattcaagcaggcttttgttgcagtacagtcttgtgtggttcatttgcagaaagttagtctagctcgaaggttcgcgcttgttcccttgggaccgccactactgacttacaggagcaactgcaaagcgatgttgacagctgatggtgattctgttcgattggtggtggatcggccatataaagctggagagccaataatcatctggtgtgggccccaaacaaactccaggcttgttctgaattatggttttgttgatgaagataatccctttgatcgtgtagcaattgaggcatctttaaatacagaagatcctcaataccaagaaaagagaatggttgctcagaggaatggaaaacttgctatccaaaattttaatgtctatgtaggtaaagagaaacaaactgttgcagaaatgctgccttatttgagactaggttacatatcaaatcctgatgaaatgcagtctatactctcttctgaaggagatacatgtccagttagtccatgtacagagcgagctgtacttgatcaacttgttggttacctggaatctcgattggctggatatccaacaactttggatgaagatgaagctatgttggcagatggcaatttggaaccaaagaaggaagttgctactaggcttgtaaggttggagaagaagatgctccatgcctgtctgcaggccacaaatgagtttataaacgacttgccagaccacacagtgtcaccttgccctgctccatatgcccctgaattgaaatgagattgcatgttttcttttcccagatggtcataccattaagaatgtcaaaatttgatcaatttgcatatctatatgaagaccatatatgctgcaaggtggatatactatttgaaagaatctgctgcttgtttcctttagagattacagatcttaattgcatgctagaaggtaaatgaggcagaccgaagttgtattaaattatatcatgccaaaaagcctgctacatataatacaaatttactgttcattgatccgaacgtgcttatggtt

SEQ ID NO: 117178 - DNA, 1015 bp, Zea Mays
tggaaatgctcccaattgactcggttatacgtcttattcaagagcagaaagttagtctagctcgaaggttcgcgcttgttcccttgggaccgccactactgacttacaggagcaactgcaaagcgatgttgacagctgatggtgattctgttcgattggtggtggatcggccatataaagctggagagccaataatcatctggtgtgggccccaaacaaactccaggcttgttctgaattatggttttgttgatgaagataatccctttgatcgtgtagcaattgaggcatctttaaatacagaagatcctcaataccaagaaaagagaatggttgctcagaggaatggaaaacttgctatccaaaattttaatgtctatgtaggtaaagagaaacaaactgttgcagaaatgctgccttatttgagactaggttacatatcaaatcctgatgaaatgcagtctatactctcttctgaaggagatacatgtccagttagtccatgtacagagcgagctgtacttgatcaacttgttggttacctggaatctcgattggctggatatccaacaactttggatgaagatgaagctatgttggcagatggcaatttggaaccaaagaaggaagttgctactaggcttgtaaggttggagaagaagatgctccatgcctgtctgcaggccacaaatgagtttataaacgacttgccagaccacacagtgtcaccttgccctgctccatatgcccctgaattgaaatgagattgcatgttttcttttcccagatggtcataccattaagaatgtcaaaatttgatcaatttgcatatctatatgaagaccatatatgctgcaaggtggatatactatttgaaagaatctgctgcttgtttcctttagagattacagatcttaattgcatgctagaaggtaaatgaggcagaccgaagttgtattaaattatatcatgccaaaaagcctgctacatataatacaaatttactgttcattga

SEQ ID NO: 117179 - DNA, 762 bp, Zea Mays
ctcccgctccgacagctgcacgaaccccgccgccttcagccgccgcttcgcctcgtcttctcccgatggaagcaacagcccaacggagtcagctcagatctatccgcgaggaaaaaaacggaaaggggagcagatgaagtgtaccaacggcgtgaaaggcggtgggcgacgcgttgaggaagtcgacgaggtcggagacgacgggggcgacggttgccatgggcggtggcgacggtgccgatccggcgggcgaacagcgaactaatacagatggaagtgcggtcgtgttgagaaatttccaaactaagggacgatctcgtctcgccctatctcacctgttgatttgaaggcaaggagagaaaggttccacagaagaaaaaaaaacgtgctcaccttccgaccttcctcgcgatggcaacaccgcgttccccgagccccgcggcgacgtcctggactcggcgtctgctcttcttcggcggtgtcgggcggcgaccggcggcgcagcggaggagctggaggagcagtagacgaattgggccaagcggatagcgctgctaaacaggctcaaatccagcctgaatctacaccggtttgttttgtgataatacgaatccaattcaccctgatgcgctccaatatgcacaggaaaaagttggcagtcatattcagcgtacaaattcgtttgctcaactagagtctttctaaattttactctctaaattatcattttaaaagtcttttatattaaaattacttttataa

SEQ ID NO: 117180 - DNA, 963 bp, Zea Mays
atggcgacgcgcggccaggccactagcgccggcgaaggtgaccggccaagccgtgtcccctcacgatgcgcactgctgggcgactaccggacgtcagccatggacatggaggattcgtcgcgccaagatcaggcggccattgccgaggaactgcatcaactgtttcggtgtgctcatcgcccggattactatgagctctgtaaaaagttctatgagaaatctatctatatgtatagatgtccaaacgttcgcacgagaggcgatgtcggtggcgccgtggcggtgctccccatgcggtcacgccccagatctataatcccctccggcctctcgtgctcccgtgctcaccgatccgccctactgacccctggttttggcttcccgtgctcgatccactcctcggttggcgactccggtgctccctgcttggtattcctaattctacctaaccctaaatccgtaatactccctgctctggtgttcctacctaaccctaaacccccctcggttgctacctcatatgctctggtgttcctcatcctcggctggtggtcagtaggtgactccggtgctccgattgcgtttggagccggtgtcgccatggaactggatccggccgctgaggaggaggagtaccgacttgaggcacataacgaggagcaggatgcaagggcctttatcggcatcggcaacgatgatgctcctggtgccgatacagggataggctcaactagccccactgctgctgatggaagcagtattggtactggcactagtggtagcatgggtgccaatgcctcaaggaagagatccaaagtctggaatgactttgaggagctgactaatctcgtcaatggtaagagggtccggccctgtaccactaggttgtccagtacaatggtacgtcccagcccgtcggaatacccatcgggttgtgcttgggccgtagtgccagcacgccgg

SEQ ID NO: 117181 - DNA, 1402 bp, Zea Mays
aacgtttggctcaccaagagaaaacgacacgggtgacgcgcctctcagctaacttgacatgaatcacacctaaaccattttgtcgtcgtcgttccagctgcagtccagagttggaacccaagcgcacgcagcaccgtcgtcgaactcttcccttttcggcggcattggagatggcggcgaatctagaggacgtgccgtctctggatctgatgcacgaactgctccgtcggatgaagtgcagctccaagcccgacaagcacctcatcctcatcggcccacctggctctggaaagggtactcagtctccccttattaaggatgaatattgcctgtgccatttagccactggtgatatgttgagggctgctgtggcagccaagacaactctaggtatcaaagctaaagaagctatggataagggagagcttgtttcagataacttggttgtggggattattgatgaagctatgaagaaaccgtcatgccagaaaggtttcattcttgatggcttccctagaactgtcactcaagcacagaagcttgatgagatgttggcaaagcaaggtgctaatgttgacaaggtcctaaactttgcaattgatgatgctatattggaagaacggattactggccgttggatccacccacccagtggtaggacttaccatacaaaatttgcacctccaaagtctccaggagttgatgatgtaactggagagccattgattcaaaggagggatgacactgccgaggttttgaagtcaaggcttgaagccttccacaaacaaactgagcctgtgattgattattactctaagaagggcttggtggtaaatctgcctgcggagaaaccaccaaaggaagtgactgctgaggtgctgaaagccctctcatgatgaaatgcccctttttctgagtttattcaggttaagcatgatatgtaccgaaatccctttgtctgggtttcttcacaccagcatcatgcagtttcctttttgtgcgattacaccattttatcatagctttgacaagctcggtaactgtctgaataatctgttttgaatgagagaagttgtttttcagtaccaatactgagatgattacatcaattcacgtttgggaaattttccttactaaacttgttccagttcttacatcaatgctatgttactggctatggtaataatcaattaatcagcaaaaaccctgatattctgatcgcccagcaccttcgtctgttgagtggtattgatatgccacgaggtaaaaaaagaacgcttttcatgggctgggcttggacggacggaccaatgcacgacccatgtgaaaaataattaataaaatatttaatcaattagatgtgctgctttaagatccgtgcactttttttttaaaaaaaaga

SEQ ID NO: 117182 - DNA, 1287 bp, Zea Mays
aacgtttggctcaccaagagaaaacgacacgggtgacgcgcctctcagctaacttgacatgaatcacacctaaaccattttgtcgtcgtcgttccagctgcagtccagagttggaacccaagcgcacgcagcaccgtcgtcgaactcttcccttttcggcggcattggagatggcggcgaatctagaggacgtgccgtctctggatctgatgcacgaactgctccgtcggatgaagtgcagctccaagcccgacaagcacctcatcctcatcggtacgggaggccctctccttcttcctgctcctcgccgccggcggcggctccgcgctttcctggagccgccgggagggaaaggctgcgtcttgccgcggcccacctggctctggaaagggtactcagtctccccttattaaggatgaatattgcctgtgccatttagccactggtgatatgttgagggctgctgggagagcttgtttcagataacttggttgtggggattattgatgaagctatgaagaaaccgtcatgccagaaaggtttcattcttgatggcttccctagaactgtcactcaagcacagaagcttgatgagatgttggcaaagcaaggtgctaatgttgacaaggtcctaaactttgcaattgatgatgctatattggaagaacggattactggccgttggatccacccacccagtggtaggacttaccatacaaaatttgcacctccaaagtctccaggagttgatgatgttgtattggtgggaaattgggggtcggggcgtggtggttcgtcgcctggaagatggtccaggcgccgtggctacccgagaggagaggcaggtaactggagagccattgattcaaaggagggatgacactgccgaggttttgaagtcaaggcttgaagccttccacaaacaaactgagcctgtgattgattattactctaagaagggcttggtggtaaatctgcctgcggagaaaccaccaaaggaagtgactgctgaggtgctgaaagccctctcatgatgaaatgcccctttttctgagtttattcaggttaagcatgatatgtaccgaaatccctttgtctgggtttcttcacaccagcatcatgcagtttcctttttgtgcgattacaccattttatcatagctttgacaagctcggtaactgtctgaataatctgttttgaatgagagaagttgtttttcagtaccaatactgagatgattacatcaattcacgtttgggaaattttccttactaaacttgttccagt

SEQ ID NO: 117183 - DNA, 1196 bp, Zea Mays
aacgtttggctcaccaagagaaaacgacacgggtgacgcgcctctcagctaacttgacatgaatcacacctaaaccattttgtcgtcgtcgttccagctgcagtccagagttggaacccaagcgcacgcagcaccgtcgtcgaactcttcccttttcggcggcattggagatggcggcgaatctagaggacgtgccgtctctggatctgatgcacgaactgctccgtcggatgaagtgcagctccaagcccgacaagcacctcatcctcatcggtacgggaggccctctccttcttcctgctcctcgccgccggcggcggctccgcgctttcctggagccgccgggagggaaaggctgcgtcttgccgcggcccacctggctctggaaagggtactcagtctccccttattaaggatgaatattgcctgtgccatttagccactggtgatatgttgagggctgctgggagagcttgtttcagataacttggttgtggggattattgatgaagctatgaagaaaccgtcatgccagaaaggtttcattcttgatggcttccctagaactgtcactcaagcacagaagcttgatgagatgttggcaaagcaaggtgctaatgttgacaaggtcctaaactttgcaattgatgatgctatattggaagaacggattactggccgttggatccacccacccagtggtaggacttaccatacaaaatttgcacctccaaagtctccaggagttgatgatgtaactggagagccattgattcaaaggagggatgacactgccgaggttttgaagtcaaggcttgaagccttccacaaacaaactgagcctgtgattgattattactctaagaagggcttggtggtaaatctgcctgcggagaaaccaccaaaggaagtgactgctgaggtgctgaaagccctctcatgatgaaatgcccctttttctgagtttattcaggttaagcatgatatgtaccgaaatccctttgtctgggtttcttcacaccagcatcatgcagtttcctttttgtgcgattacaccattttatcatagctttgacaagctcggtaactgtctgaataatctgttttgaatgagagaagttgtttttcagtaccaatactgagatgattacatcaattcacgtttgggaaattttccttactaaacttgttccagt

SEQ ID NO: 117184 - DNA, 1362 bp, Zea Mays
gacatgaatcacacctaaaccattttgtcgtcgtcgttccagctgcagtccagagttggaacccaagcgcacgcagcaccgtcgtcgaactcttcccttttcggcggcattggagatggcggcgaatctagaggacgtgccgtctctggatctgatgcacgaactgctccgtcggatgaagtgcagctccaagcccgacaagcacctcatcctcatcggtacgggaggccctctccttcttcctgctcctcgccgccggcggcggctccgcgctttcctggagccgccgggagggaaaggctgcgtcttgccgcggcccacctggctctggaaagggtactcagtctccccttattaaggatgaatattgcctgtgccatttagccactggtgatatgttgagggctgctgtggcagccaagacaactctaggtatcaaagctaaagaagctatggataagggagagcttgtttcagataacttggttgtggggattattgatgaagctatgaagaaaccgtcatgccagaaaggtttcattcttgatggcttccctagaactgtcactcaagcacagaaggtcagatgctcaatatatgcatcagcatgaagaaacatccgtacatcgtattgttatagattctatatttgatttactataattttaccctgggctgttttttttaacatcctgtacagcttgatgagatgttggcaaagcaaggtgctaatgttgacaaggtcctaaactttgcaattgatgatgctatattggaagaacggattactggccgttggatccacccacccagtggtaggacttaccatacaaaatttgcacctccaaagtctccaggagttgatgatgttgtattggtgggaaattgggggtcggggcgtggtggttcgtcgcctggaagatggtccaggcgccgtggctacccgagaggagaggcaggtaactggagagccattgattcaaaggagggatgacactgccgaggttttgaagtcaaggcttgaagccttccacaaacaaactgagcctgtgattgattattactctaagaagggcttggtggtaaatctgcctgcggagaaaccaccaaaggaagtgactgctgaggtgctgaaagccctctcatgatgaaatgcccctttttctgagtttattcaggttaagcatgatatgtaccgaaatccctttgtctgggtttcttcacaccagcatcatgcagtttcctttttgtgcgattacaccattttatcatagctttgacaagctcggtaactgtctgaataatctgttttgaatgagagaagttgtttttcagtaccaatactgagatgattacatcaat

SEQ ID NO: 117185 - DNA, 402 bp, Zea Mays
atgccgccggggtccacgaaggcggaggtgtggaacacgccagcgcatccgtcgaaggcgcggtgcaggctctccgggtccatcacgttcgccatcaccgtccacactccgtccctgccgtcgtcgccgaacatctccatctcccgcagcttgtccatgtcctcttgcgtctccagcgcgaggcggacggtgtacccgtgccggaggaggcggtcgacgacggcgaacccgacgaaggagatccctcccgtgacgcacacggcgcgcgccgcggcccctccggcgtcgccgccggggctgcgcttggcgtccgcgtggcccgccgaccggcgccacccgcccgcggcctcgtgcccgccgcctgccaggagcgcggcgcgcagctcgtccacctccgcctga

SEQ ID NO: 117186 - DNA, 1352 bp, Zea Mays
actcggtcttctcctcctcggaaccccccaatcgatatttttagattatattgctctaaagtctcatcccattcggccgatcagcaccccgtctcgctgagccgactgtccggcggcagccagtcgtcacgggtgtcccctcccggggtttctggatcggcgttgtcctctacgccgcccgccgcccgccactcgcccggcgtgatcgtgggagttcgcgtccggcgaagcgaggagggtttcgatccacggcgttattgccccggacagcagaggtttggcggcagctagcggcttacgcacggagtcgtcgcgctagtccatttggggaggtgccggggacggcgcggtgggcaatggcgaccccgacgccggcgcgcccgtaccggttccccgcgctgccggaggaggaagacgagcaggcggccacgcggtgctccaggcggtcctgcgggacgtgcggcgcgtcggcggtggcgagctgcgtggcgctgtgctgctgcccgtgcgccgcggtgagctgcctcacgctggcgctcgtcaaggcgccctacgtggcgggccggcggtgcgtggccaggctcgccaggaggcggctgcggaaggggagggcgaggcgcgtccgcgacatgggcgaggacgacgacgagcggcagggcccgcggtgcagcaaggagtcgtgcgacctgcctcgtgcggctgcggccgacgagagggcgaaggtgagctccaggattgacgcgtcgtccgagaaggtgtgggtggacatgtaccaggtcgggctttgggggttcggccggctgtccttctcggcggcggccggggctggaagcgactccgacaaggacggcgacactgctccagagtaatgtcgtcttgtagtacaacagacttctatcttgggcaatatggcctgtacgatcttttgtgatggcgtggatcgtttggttggtggacacgatgctgtgacgcgcgctgcctatgggcgactcacctttattgctgcatcaaaactctgtacaaaattgcacccggtacatcattgcacacatacttggctcccctcctgctctttctcgtccacaaggacaatcaagcggagttttgctatttctccgcttcgcttccggtgtccacttgtcaatgggacagggattgcagactggtggtcaacccttcatggcaattccgcctgagcttgctagtcaaacgcgacggagtagtaggtgtcgtacgtgcaccgcctcctggaggacatgagcctggacagcttccgcttgcagagctcgaacctggccggccggtcgtcagagccctgcgcggccgcggcccctcccggcagccccagctgt

SEQ ID NO: 117187 - DNA, 1425 bp, Zea Mays
atggccatcaaagatgagccgcagccgctgcacatcctcttcttcccgttcctcgcgccggggcacctcatcccgatcgccgacatggccgcgctcttcgctgcccgaggcgtcaggtgcaccatcctcaccacaccggtgaacgcccaactcatccgctcggcggtagaccgcgccaacgacgcctcccgcggaaccgagggcgccctggccatcgacatcgcggtcgtgcctttccccgacgtcggcctgccccccggcgtcgagtgcgccccggcgcttaataccatggacgaccgcgaaaagttcttccacggggcccagttactccgcgagccgttcgaccggttcttggcggagaaccgcccggacgccgccgtgaccgacagcttcttcgactggtccgccgacgccgccgcggagcacggccgagtctacgctgcgcaacaaccccgtggaggccgcccccgacgaccggacgcgctcgtgctgcttccggggctgccgcgccgcgtcgagctgaggcgcagccagatgatggagcccaagaagcggccggagcgctgggccttcttccagcgcatgaacgctgcggaccagaggagctacggcgaggtgttcaacagcttccacgagctggagccggacttcatggagcactacaccacgacgctggggcgccgcgcatggctcgtcgggccggtggcgctcgccagcaaggacgtggcgacgaggggcgccaacaacgggctctcgcgggacgcgggcgcctgccagcagtggctggacgcgaaaccagagggctcggtggtgtacgtgtccttcggcacgctgacccatttctcgccgcccgagatgcgcgagctcgcgcgcggcctcgacctgtccggcaagaacttcgtctgggtcgtcggcggcgcggacaccgaggagtcggaatggatgcccgatgggttcgcggagctggtggcgcgcggcgaccgcggctttatcatccggggctgggcgccgcagatgctcatcttgacccacccggcggtgggcgggttcgtcacgcactgcgggtggaactccacgctggaggccgtgagcgccggcgtgcctatggtgacgtggccgcggtacgccgaccagttctacaacgagaagctggtagtggagctgctcaaggtcggtgtcgccgtgggatccacggactacgcgtccatgctggagacccggcgcgccgtgattggtggtgaggtgatcgcgaaggccatcgggagagtgatgggcgacggtgaggacgcggaggcaatacgggagatggccaaggagctcggggagaaggccaggcgcgcggtggccaacggtgggtcatcttacgatgatgtcggacgcttagtggacgagctgatggctcgtaggagatccgtcaaagtctga

SEQ ID NO: 117188 - DNA, 908 bp, Zea Mays
gcctatataaccaccggccgtcgccgaacgatctactacatacagcgcaccaacaatcgcgggattgttcaatccgatcgacatcacaaaatccacgcacaaagaagcgacagatgactacgagcagggtggccaggtcgtgcggccgcggcagcgacgatgagccggcggtgcgcaaggggccgtggacgctggaggaggacctcatcctcgtcagctacatctcccagcacggggagggctcctgggacaacctcgcgcgcgcagctggactgaaccgcaacggcaagagctgcaggctgcggtggctcaactacctgaggccgggggtgcggcgcggcagcatcacggcgggggaggacacggtcatccgggagctccacgcgaggtgggggaacaagtggtccaagatctccaagcacctccccggccgaaccgacaacgagatcaagaactactggaggaccaggatccagcagaagaagcagcagggagccaagacgacgcagcagcgggagccgtcgacgaccgccagctccggcgccggggacgactactggtgcaccaagcccgaccccgaccagcaagcgcactactgcctgcagaaagccgccatggcagctgcgactgcgacgacgagcgcggtcgtcgtcagcagcgaggacgacgcgccgtcggcggcgctgacgagccaggacagctccgccgcggccggcggagactggtacatgcaccagcagcagatgtgctacccgtactgctccgagctgagctttgtcgccgccggccacgatgaaacggtcggcctggacgctgtgacgatgcagttcttgtcgtcgcacttcactgccagcttttggacgaacggcgtggatgatttctgggagtcaaaaccgatcgattactga

SEQ ID NO: 117189 - DNA, 1952 bp, Zea Mays
ccgcaaccacaggcctcccgcgctctattctctctatctaccactactactacccagcagcagcaggccagcacacaatacacacactctaatctctccacacagccaacacagatacggacaggacaggaggatgaagctgggagcaaaaggcctcggcctcctgctcctccttgtcctgcttgcgctttgctccaccattgaagtcggcgaggcaagaagagaccggcattggaggtcgtcgaggacctcctcctctcagctgctgaagaaaggcaaaggaaagaagaccagctcccgccgccaatacggcagcaaccggccaagtccgaagccaccggccagctcgacaccgagctctggtgccggcggcaaaggaaaccagactccgtaccaaccaagcccgaatgcccctcacatcccgaggccaagcccccctgccaatggcagcgcccattccactcccaagccgccgactcctccaagctgcgggaaggctcatcagcagccatcacagtcacagccgccaccaccagcaacctcctcgcagcatggtgcagtattcaatgtggttgattttggagccaagggtgacggagttacagacgatactaaggcttttcaaggagcgtgggctgctgcctgcacccagggggcatctacacttctcgtaccaccagaactagagttccttgttgggccaatctcgttctctgggccttactgcaaaccgaatattgtctttcagttggaaggaacaatcctagctccaatcagtgctaaatcctggggttctggcttgctccagtggctcgagttcaccaaactaaatgggatagttattcaagggaacggcattataaatggcagagggcaacaatggtggacctactcagacccagaggatgaggatgatgatgacacgtaccatgtagagtttcaaagaatgccacagattaaacctacagcgttgaggttttatggtagtttcaacgttgtagtgtctggtatcactattgtcaacagctcacagtgccatcttaagttcgacaactgtcaaggagtgatggtccatgatgtgaccatatcctcccctgagaacagtctcaacactgacggaatacacctgcagaactccaaagatgtcagcattcatcatacaaccctggcttgtggtgatgattgcatctccatccagacaggatgcagcaacataaatatacacaacgtgaattgtggaccaggccatggaatcagcataggtggactaggccgagacaacacaaaagcatgtgtatcaaatgttacagtaagagatgtcaacatgttcagaaccatgaatggtgtcagaatcaagacctggcagggtggcgtaggattggttcaagacataaggttctcaaatatacaagtctcagaggttcaaacacccattatcatagatcagttttattgtgacagaagcacttgcaggaatcaaacatcagcagtggcagtatcaggggttcaatacgagaatatcagaggaacatttacaatcaagcctgtccattttgcatgcagtgacagcttaccttgttcaggaatctctcttactggtgtgcaactcaggccagtgcaagtaccccactaccacctgaataacccattctgctggcaagcttttggggagctctacactccaaccgtccctcccatagcttgcttgcagattggaaaacctgctggcaataacttacagtcatatgacgacatatgttgagaaactgaaagtgcctttgtctgttcattggtgcttatccatgagtggtcgttgtgatacatgcgaccccatttgcaccattgcttgttgatgtgcacatatacagttattttgaggtcatcatatcacaacattttaatcttttcatcaaagtaaacataaatatattcatatgaaatggtcatacagc

SEQ ID NO: 117190 - DNA, 1511 bp, Zea Mays
cgcgggctgacgcagccgcgcgggacgtcaatctcacgcgactccgctgctggccgctgtttaaaaaccaaaaaccctcccccaaaacctccgaaatccccgcgacctcccctccccgtctcccctctccgctcccaaattcgtcgaacgccaccccacccgcccactgcaatggcgagcttcaatcccgccggcgccagcgccgccaaccataatcccaacaaatccttcgaggtgactccggcgcctggggactcggtgtccagcctcagcttcagccccaaggcgaaccacctcgttgccacctcatgggacaaccaggttcggtgctgggaggtcatggctggtggggcctgccaagcgaaggcctccatttcgcacgatcaaccggtgctgtgctcggcttggaaggatgatgggttgactgttttctcaggaggctgtgataagcaggttaaaatgtggcccctgctctcaggtgcccagcccacggttttctcaggccatgaggcacctattaaagaactcgcttgggtgccacagatgaatcttcttgtcagtgggagctgggacaagactttgaggtactgggacattaggcaaccccaaccagtgcatgttcagcaacttcctgagcgttgctatgctctatcgctttgttatcctctcatggtggttggcactgctgatcgcaacgtaatagtcttcaatctgcagaatccacaggctgaattcaagaggattacgtcacctttgaagctccagacaaggtgtcttgctgcatttcctgatcaacaaggttttttgattgggtctatagaaggacgagttggtgttcatcatgtggaagagtctcagcaaggaaaaaactttacattcaagtgtcaccgcgatggcaatgatatatacgctattagctcgttgaactttcatcctgtgcatggtacattcgctactacaggctctgatggaagtttcaacttttgggataaggacagtaagcaaaggctgaaggcttataataggtgtccatcccccatcacatgcagcgcattcaatcatgatggctctatatttgcttacgcggtatgttatgattggagcaaaggtgctgagaagcataatccttctactgcaaagacaaatatatttctacatagtgcacaggattctgacgtgaaaggaaaaccccgcgctggaaagaagtaggcgtagcaatgataagtcagtgactggtgatcgtaggacagcaaatcagctctcttctcctgatagttagggtatttcttgacagtacactagactaaaagcatgtccttttatcacaaccattgcatttgcctcttttggctaagtaatttcggtggcagtgcacttacggcgggttatttctaaaatggaccatctgctgggcgggggcattgttgttctttggacgtctggttgttggtctactggtcgcttttgaagcttggttagtcaatttctcttcgtgctctctagttgcttga

SEQ ID NO: 117191 - DNA, 656 bp, Zea Mays
aagatgtacctctgatgtcaattaagcacactttaaacaaatgcatctggtgtttgtatcgcagtgatgtcatttagagggaaaacgtgtgcttaattgatattgacaaacaatttggaaccttcttaaggaaatttttatgcatttgtttaaagatatacctctgatgtgccattttattttacaggcttataataggtgtccatcccccatcacatgcagcgcattcaatcatgatggctctatatttgcttacgcggtatgttatgattggagcaaaggtgctgagaagcataatccttctactgcaaagacaaatatatttctacatagtgcacaggattctgacgtgaaaggaaaaccccgcgctggaaagaagtaggcgtagcaatgataagtcagtgactggtgatcgtaggacagcaaatcagctctcttctcctgatagttagggtatttcttgacagtacactagactaaaagcatgtccttttatcacaaccattgcatttgcctcttttggctaagtaatttcggtggcagtgcacttacggcgggttatttctaaaatggaccatctgctgggcgggggcattgttgttctttggacgtctggttgttggtctactggtcgcttttgaagcttggttagtcaa

SEQ ID NO: 117192 - DNA, 674 bp, Zea Mays
agaatgcaaaccacaaaacaaagtcaaaccagctgcaacgatcaagagcgaggcttccttgtccagctctccgctcagccgacacacacagattgacagatggcgtctatgtcgctgagctcgtcgagggcgcagtggacggcgaagcagaacaagctgttcgagcaggcgttggcggtgtacgacagggacacgccggaccgctggcacaacatcgcgcgcgccgtgggtggcaagtcggcggacgaggtcaggcgctactacgagctgctggtgaaggacttggagcacatcgaggccggcaaggtggccttccccgcgtacaggtgccccggcggctacgacgacgccgacagcgacaggctgaagcacctgacctgaagatctaggcggcaggcaagcatcatgagaaccactgaacaagtacgtcctacatacgtacacttcgcgccatgtgagtgtagcacgtgtggctacaaaagaagcaagccaagcgagtgggtcggacggattatctgttcaagcacgcatgtgaattagaattactactagcaatagctataggatgttgatcaatcgatctccgttccccccgtgttgcgatgtaaaatctcagcatctgtagcatatatattctgaggagtgaaataaaatacattcactagtttgtggac

SEQ ID NO: 117193 - DNA, 504 bp, Zea Mays
acctcaaccattccaaacctccgaggaggaccaggacgtaccgttgtccgttccacacgcgatcaaaacagcgccatgtcgtcggcgtccaactcggccaagggctcgtcgccgtcatcgtcgacgtcgtcccagtggacgaagccgcagaacaagctgttcgagcgcgccctggcggtgtacgacacggacaccccagaccggtggcacaacgtggcgcgctacatggggggcaccacgtctgtggaggaagtgcgccgccgctaccagcagctcgccgtggacgtcgcgcagatcgagtccggcgaagtgcccttccactactggtacgccgccgccccgccgctgcatccagcgacattagttatgagcatgtgtgatctaagcacaatatatatggtgttccgctcgatgtcgtacagtaaggttgcagtgttaatcaccatcactaaggaccaaccgtcgaaaagtagcaggaagaagtcgcaaccgtgggttttttaa

SEQ ID NO: 117194 - DNA, 824 bp, Zea Mays
atggagtcggctgtgaaggaaaccttggtgccatttgttttccgtttgagcgaaactccagtgcagaccaaccaaattaaacacagcatgcaagggatcacgaaggcgctgcggctccacgggaggcagctgaggcacgcggtcctgcagcacatgaacatgaacaaggggatcttctcctgggccaccctgatctcgcgcatacagagcgagtcgccagccgtgatcataccgcacatggggctcgagaacatcaccgtcaacgagattctcagggccaagggggaggccgaggccggagcggtctactggtgcagcaccgcccatctggtgcacgaagcggtgcagcacatggcggcacacaacgttggagctctcgtggttctcaagtcgggggacatgaaccagctcgcaggaattgtgaccgagagagattttgccagaaagatcctcttgccagggcgaccttcacagcaaacaagggtagaggatatcatgacagaagaggacaaggtgatcacggtgtccggtcgtaccaatattctgcgtgcaatggaggttatgacagacaagcgtatcaggcatgttcctgttttcgacgacaaggtagttggaatgatatccatcggtgatgttgttagaacaatcgtggaccagcagcaccaagaagtaaaacagctcaagaagtatatcagaggagactattattagaacactttttaattattattttttacattcggtgtataaacgtaatttggatgtaatcgtttatagatatttaactacaatgtatatttttctctgcgaaaacatggttgata

SEQ ID NO: 117195 - DNA, 1779 bp, Zea Mays
gttcctggatgtcatcgacactgattcctctttgttttgttggagcagcagtacgtacgcgcagcgcaggcccagctgattgcgccatggaagatcatcatcatcatacagcaacgattgcgcacacgtggttggcggcgatggcgatcgccgtgctccctatcctctccgtcctgattctggctgccaccaagcagatgggaagaaccgtcttcgcccctcccaagcgccgagagccgccggtggcggagggcgctcctctcctcggcgtcctgcctgccatcctcaccaggagcttgcaaggcgtgatctgcgaccagtacttgaagctcggcagcgtgttcacgctgagctccttgggagtgaaggtgacgttcctggtgggccccgaggtgtccgcccacttcttccatgccgccgagtcggagatcagcatcggcgacgtctacaaggtcaccgtccccatctttggcaaaggggtcggctatgacgtcgacaacgacacgcgcaacgagcagcacaggttcttcgccgacactttgaggccggccaagctcaggagccatgcccgtctcatggtccgcgaggtggaggagtacttcgccaggtgggggcagtccggcacggtcgatctgaagcaacaggttgaggacgttctcttgctgattgcgagccggtgcctgctggggaaggaggttcgggatcacatgcacgacgaggtgtcctcgctcctccgcgagcttatcggcggcctgcacctagtgagccttttcttcccgtacctgccgaccccggctcaccgccgccgcgaccgagcgcgcgccaggctcgaggagatattctccgggatcgccaggctgcgcaagagctcatgctcatccggccgcggcgccggggacgacggcgaccgcgaccacgacatgctgcagggcctgctagactccaggtacagagacgggcgcggcacgaccgaggcggaggtcaccggcctgctcgtggcgctgctcttcgccggccatcacaccagcgcaacggtcacgacctggaccgcggcgcgcctgctccgccacacagagtggctgcacgcagccactgaggagcagaggctgctgcagaggaacgatcagaacgacgctgcagccatcgactacgacgtcctgctccggatggacgtcctccaccgcagcgtcaaggaggcgctgcggctgcacccggtgaccccaatgatcctccgccgcgcgcgcaggccgttcaccgtgcgcactcaggacggctccgagtacgaggtccccgaggggcgcatgctggcgagcccgctggtggtgaataatctgctccagggcatctacagggaccctgatgtgttcgacccggatcgcttcgccgcctggagggaggaggacagggtcggcggcgacctcgcctacacctccttcggcgccgggaagcatgcctgcatgggcgagggctacgcctacctgcagatcaaagtgatactgagccatctcctcaggaacttcgagctccggctgctttctcccttcccggagacggagaacatgatctccatgaggcccaaaggtgaagtcatggtgagctacaggagacgctctctgctgcagtagtgcacttgcttgacaagtcaataataagcgatgcagtgaacggacttttatttgttgagccgcaaattagtcagggaattgcatggtttgcaaaaataacactactatatcctaaaagtcacgagttggaaaatataaaagagagtcttcaata

SEQ ID NO: 117196 - DNA, 1479 bp, Zea Mays
tcgtcgatcggaactggagcagcagctaaagaagcaaagcaagtgtctgctcactcagtcctgcgcaagagctcgctctcggagaaaaaaacgcgggaggcgataatggagggaggtgccggtgcgagcgagaaagggaaggtgctggtcacgggggcgtcgggcttcgtcggctcctggctcgtcatgaagctcctccaggccggctacaccgtccgggcgaccgtgcgcgatcccgcgaacgttgggaagacgaagccattgatggaccttcccggagcaacggagcgcctgtccatatggaaagccgacctggcggaggaaggcagcttccacgacgccatcaggggctgcaccggcgtcttccacgtcgccacgcccatggacttcctgtccaaagaccctgagaatgaggtaatcaagccgacggtggaagggatgataagcatcatgcgggcatgcaaggaggccggcaccgtgcggcgcatcgtcttcacttcctccgccgggacggtcaacctggaggagcggcagaggcccgtctacgacgaggaaagctggaccgacgtcgacttctgccgtcgcgtcaagatgaccggatggatgtacttcgtgtctaaaaccctggcggagaaggcggccctggcgtacgcggcggagcacggcctggacctggtcaccatcatcccgacgctcgtggtcggcccgttcatcagcgcgtccatgccgcccagcctcatcaccgcgctggcgctcatcacggggaacgcgccccactactcgatcctcaagcaggtgcagctcatccacctcgacgacctctgcgacgccgagatcttcctcttcgagaacccggccgcggccgggcgctacgtctgctcctcgcacgacgtcaccatccacggcctcgccgccatgctcagggataggtaccccgagtacgacgtcccgcagaggttccccgggatccaggacgacctccagccggtgcgcttctcgtccaagaagctccaggacctcgggttcaccttcaggtacaagacgctggaggacatgttcgacgccgccatccggacttgccaggagaagggcctcatccccctcgccactgccgccggaggggacggctttgcctcggtgcgcgcacccggcgagacggaggcgacgattggcgcttaagcaacaatcacccggctctccccgtcgatgatgctatcagctatctatctcttcgagctccgctgccaatacggaacttacttccatgttcaacgaattgttttatcccctggattacgtattgtttttatgttttatacccaaacaacgaatgtttctcagtattttactacagctagcccctatagtagagattctattatatgaataagctatctgtagaggctctggtgcaatatatatttcgagttatttggattactagcataattcaatttttaaaaactattattattattc

SEQ ID NO: 117197 - DNA, 1448 bp, Zea Mays
tcgtcgatcggaactggagcagcagctaaagaagcaaagcaagtgtctgctcactcagtcctgcgcaagagctcgctctcggagaaaaaaacgcgggaggcgataatggagggaggtgccggtgcgagcgagaaagggaaggtgctggtcacgggggcgtcgggcttcgtcggctcctggctcgtcatgaagctcctccaggccggctacaccgtccgggcgaccgtgcgcgatcccgcgaacgttgggaagacgaagccattgatggaccttcccggagcaacggagcgcctgtccatatggaaagccgacctggcggaggaaggcagcttccacgacgccatcaggggctgcaccggcgtcttccacgtcgccacgcccatggacttcctgtccaaagaccctgaggtaatcaagccgacggtggaagggatgataagcatcatgcgggcatgcaaggaggccggcaccgtgcggcgcatcgtcttcacttcctccgccgggacggtcaacctggaggagcggcagaggcccgtctacgacgaggaaagctggaccgacgtcgacttctgccgtcgcgtcaagatgaccggatggatgtacttcgtgtctaaaaccctggcggagaaggcggccctggcgtacgcggcggagcacggcctggacctggtcaccatcatcccgacgctcgtggtcggcccgttcatcagcgcgtccatgccgcccagcctcatcaccgcgctggcgctcatcacggggaacgcgccccactactcgatcctcaagcaggtgcagctcatccacctcgacgacctctgcgacgccgagatcttcctcttcgagaacccggccgcggccgggcgctacgtctgctcctcgcacgacgtcaccatccacggcctcgccgccatgctcagggataggtaccccgagtacgacgtcccgcagaggttccccgggatccaggacgacctccagccggtgcgcttctcgtccaagaagctccaggacctcgggttcaccttcaggtacaagacgctggaggacatgttcgacgccgccatccggacttgccaggagaagggcctcatccccctcgccactgccgccggaggggacggctttgcctcggtgcgcgcacccggcgagacggaggcgacgattggcgcttaagcaacaatcacccggctctccccgtcgatgatgctatcagctatctatctcttcgagctccgctgccaatacggaacttacttccatgttcaacgaattgttttatcccctggattacgtattgtttttatgttttatacccaaacaacgaatgtttctcagtattttactacagctagcccctatagtagagattctattatatgaataagctatctgtagaggctctggtgcaatatatatttcgagttatttggattactagcataattcaa

SEQ ID NO: 117198 - DNA, 1564 bp, Zea Mays
tcgtcgatcggaactggagcagcagctaaagaagcaaagcaagtgtctgctcactcagtcctgcgcaagagctcgctctcggagaaaaaaacgcgggaggcgataatggagggaggtgccggtgcgagcgagaaagggaaggtgctggtcacgggggcgtcgggcttcgtcggctcctggctcgtcatgaagctcctccaggccggctacaccgtccgggcgaccgtgcgcgatcccgcgaacgttgggaagacgaagccattgatggaccttcccggagcaacggagcgcctgtccatatggaaagccgacctggcggaggaaggcagcttccacgacgccatcaggggctgcaccggcgtcttccacgtcgccacgcccatggacttcctgtccaaagaccctgaggtagatcagtctctagctctggctgcacaattaattagtctctcgatctctacgtcttcactgcacatgcactgcacacatatactacatacgtatggtttccattgcagaatgaggtaatcaagccgacggtggaagggatgataagcatcatgcgggcatgcaaggaggccggcaccgtgcggcgcatcgtcttcacttcctccgccgggacggtcaacctggaggagcggcagaggcccgtctacgacgaggaaagctggaccgacgtcgacttctgccgtcgcgtcaagatgaccggatggatgtacttcgtgtctaaaaccctggcggagaaggcggccctggcgtacgcggcggagcacggcctggacctggtcaccatcatcccgacgctcgtggtcggcccgttcatcagcgcgtccatgccgcccagcctcatcaccgcgctggcgctcatcacggggaacgcgccccactactcgatcctcaagcaggtgcagctcatccacctcgacgacctctgcgacgccgagatcttcctcttcgagaacccggccgcggccgggcgctacgtctgctcctcgcacgacgtcaccatccacggcctcgccgccatgctcagggataggtaccccgagtacgacgtcccgcagaggttccccgggatccaggacgacctccagccggtgcgcttctcgtccaagaagctccaggacctcgggttcaccttcaggtacaagacgctggaggacatgttcgacgccgccatccggacttgccaggagaagggcctcatccccctcgccactgccgccggaggggacggctttgcctcggtgcgcgcacccggcgagacggaggcgacgattggcgcttaagcaacaatcacccggctctccccgtcgatgatgctatcagctatctatctcttcgagctccgctgccaatacggaacttacttccatgttcaacgaattgttttatcccctggattacgtattgtttttatgttttatacccaaacaacgaatgtttctcagtattttactacagctagcccctatagtagagattctattatatgaataagctatctgtagaggctctggtgcaatatatatttcgagttatttggattactagcataattcaa

SEQ ID NO: 117199 - DNA, 699 bp, Zea Mays
tcgtcgatcggaactggagcagcagctaaagaagcaaagcaagtgtctgctcactcagtcctgcgcaagagctcgctctcggagaaaaaaacgcgggaggcgataatggagggaggtgccggtgcgagcgagaaagggaaggtgctggtcacgggggcgtcgggcttcgtcggctcctggctcgtcatgaagctcctccaggccggctacaccgtccgggcgaccgtgcgcgatcccgcgaacgttgggaagacgaagccattgatggaccttcccggagcaacggagcgcctgtccatatggaaagccgacctggcggaggaaggcagcttccacgacgccatcaggggctgcaccggcgtcttccacgtcgccacgcccatggacttcctgtccaaagaccctgagaatgaggtaatcaagccgacggtggaagggatgataagcatcatgcgggcatgcaaggaggccggcaccgtgcggcgcatcgtcttcacttcctccgccgggacggtcaacctggaggagcggcagaggcccgtctacgacgaggaaagctggaccgacgtcgacttctgccgtcgcgtcaagatgaccggatgggtacgtacgcagccacttgtcagccctgcgcctcatcaattcaactgaacttcgacgacgacagtgtttggtcaccatcagccctgcctgcggctg

SEQ ID NO: 117200 - DNA, 1895 bp, Zea Mays
caccgcagccagagtccgggagcgcagagatcgctggggagatggcgagagaagcagcgagcgaagccaccgcaagccgcgaaagcggggcggaggcggcaggggagtgctggagcgaagcgctcaagtcgttcctggaccacatccccgtctcctccgtcccgggcgcgctccaacccactgcctccccagcggtggaggtcaagctccacggctccgtcctgggcgccctcgacgccatgtacagcagcaacgccgcgggcgcggtgatcatcgacgtggtgcacagcagtctaggcaagtacgtcgatcgcgatattggcttcgtcgagttctcgagcctagtcctgtgggcacttgaggaacttggcaaagtggaaagtgaaccaacagacagtacttctgatttcctctctactctgaaacagcatcatcagattgcagaaacgaagatcgcctggttagcgaagttgttcctgtgggagccattcttccctgttcggacccatgacacgctgttccacgcaatgcttctcttttcgaaacaccacaggctcaacgtggcaccggttgttgagtcaatgaactcgagtgttattggatttgtcacacaggatgcagtgatggagctgcttctccagtcaagtggccttgagtggcttgataaaattgcagacaagcagctttcggaatttaggtttgcaaatgtgaggaagcctgttttggtgtactcagatcaaactctagctgatgggctgcatattctctcaaaggaaaaaacgggggttgcagtcattgacaggaaaaccagccgtctaattggatcattacagtgcagtgatctctacctgtttctagatgacagcacccttttcagcaagcgaacgacaactactctggaagaattaatcagcctgaataacaagaccgacaggaaatgcagcaccgctgaaaattcatgtgcgcctggccgaaacatcctcgcgctcaggagcaggcagtcaggcatggtgggcctaccagccaccaacctggaatccgacaccctaaagcaagcgatggagaagctgacaactttaaggagcagctgcagcttcatcgtcgacgagcacgggcgcgtccaaggagtggtgaccacaagggacatcatctccgtgttctccccgctgtgcatggactcgaggattgacggggccacgttcttctcggctgcgctcgagcaggctggctgccgcgttgagaacgggcagatgtttcagaattagtttcagacaaaactggaatgcagggaggctttagtttgttgcagtgaggaagatgtacatggcacttaccggctatgttgccctgatacgagggatatggatacgggatacgtcgatactctgatacgctatttatcaaaaaatactctgatacgctatttctcagaaaatactgatacggtgatataaaatatatattataaataaaattaaatactgaaatgtctgagatagaccattgccgatcagttcaatttaagggtattagaagttaatgttcaataattttgactaaagtaaatatctacttcctctttcaaaatttatctggactcaaatcaatgaaatcagcatgccaaaacacgtgtaatccatctcgagtaatttgtatcaatacctattcagtagatccttttttctgtgccaggaaccagatttgaacgggtgacacgaggatttttagtcctctgctctatcaactaagctattctgaccatttcttgtgcatcatcctagtagagtacggacttgtgtctatgtgggactaaaaaagacaaaagtattctaaaattggacttagtaaatgtcaggataatgataatgacttacttaataatagggatacactgc

SEQ ID NO: 117201 - DNA, 2557 bp, Zea Mays
gagagtctaacttttccattttctttccccctctacctaccccgacccatcagtagagggcggcggctgcctcctcttcctacccgcgtccgagctcgcccccttcctcgccaccttgggaggcgacgagcatcaccaggacaccaggttgcctatattttcttccccttcttgaaaatggatcatagttctgacgaagatacagaaatcagtgattctgagattgatgattatgaaggaaaaatttatgcaagactgatgtcaggagatttaaaattaaataagaatggagaaaattacatttgtcccttctgtagcagcaagaagaagaattacagtaaaagtagcctggttcaacatgcctcaggagtcagtgcagcacctaatcgggaggcaaaagaaaaagcagtccatcgcgccctcttcaaatatttgaagaatggtcttgctaaatcacctgaaccagggtcacatgcaactcctgtggagccacaacctcttcagaaccgagacgagaagtttgtgtggccctggatgggtgtcctagttaatgtgcctactgaatggaaggatgggcgccaaattggagaaagtggaaatcgtctgaaggagcaactatcacacttttgcccactgagggtcatcccgttatggacttttagaggtcatacaggaaatgctattgttgagtttggaaaggactggaatggtttcagaaatgcgcgtacctttgaaagtcactttgcggcaggaggattcggtaagaaggactggattggaaaaaagaatcaaggatccgagctctatggatggcttgcgcgggctgaagattacaattctccaggaataatagcggaccacttgagaaaaaatggcgacttgaaatctgtcaatgatcttgcaaaggaaggagcgcgtaaaaatgacaggcttgttgctaatttagctaaccaaattgaggtgaaaaataggtatttacaggaactagaatgcaaatacagtgagacaactgcatcacttgagaagatgatggggcaaagggaacaacttctccagtcatacaatgaagaaattagcaagatgcagcagctagctcgcaggcattctcagaagatcattgatgagaatcaaaagttgcgttctgaccttgaggcaaaaatgaatgatcttgatgtgagatccaagcaactcgatgagattgcagcaaaaagcgattatgacagaaggagccttgagcaggagaagcaaaagaatgctatcaaatcgagtcatcttaaattggcaacattagagcagcagaaagctgatgagaatgtgctgaagcttgtggaagaacaaaaaagggagaaacatgctgcgttaaagaagattctgatgttggaacaacaattggatgcaaaacaaaagcttgaattagaaatacagcagttgaagggcaaactaaaagtgatggagcatatgccaggtgatgaagattcagcgtcaaagaataaaattaatgagctgagtgaggcattgcaagaaaagatagatgaactggatggaatggagtcacttaaccaaactctggttatcaaagaaagcaaaagcaacattgaactgcaagaagctcgcaaagagctagaaaatggcctgcttgatctttcaggtgggcagacacatataggaatcaagagaatgggagagcttgatctaaaagcattttcaaaggcatgccaaaaggagcgtacagaaaatgcagaagttactgctgcctttctttgttcaaagtgggaggctgaaataaaaaatcctgactggcacccttttagggtcgtcacaattgatggaaaggagatggcaataatcgaggatgatgcaaagcttcgagcactcaaagaagaacatggagaagaaatctatgcaatggtgacaaaggcgctgcttgaaaccaacgagtacaaatcaaaaggcagctaccctgtgggggagctatggaacttcaaagaaaaccggaaggtgactctgaaggaagctgtccagtttgtcctgagacagtggcgaacaaacaggaggaagcgataagctctcggctactcaatgctcttggctttttttccccaccacctgatccgaaagccatgagttcgagagctagtaacctggaaacagtagtattaattcgtgataaaatcaacagggcgatacagccctgtggatctgttccttgttggatataagctggcactcctattgcagtgtcagcatcagtggactcgaacgccattatggcgttatccttgtgccacctttgtaacaagtagttcgttcttgttcttgaaccgtgtgttgtagttggcccttggccgcatgctaccggctctgtacggctgtgcctacaaagttgtggtggaacatgcagactcataataaagcatgcttgggctcttgtgatactctgcacttttatgatgttgtgagaatgtttgttcatggttggtactgcagctcctcctgaccgcttcggattaaagccagctgtttggaccctgcagctgtaatctatagaaataaaata

SEQ ID NO: 117202 - DNA, 2538 bp, Zea Mays
gagagtctaacttttccattttctttccccctctacctaccccgacccatcagtagagggcggcggctgcctcctcttcctacccgcgtccgagctcgcccccttcctcgccaccttgggaggcgacgagcatcaccaggacaccaggttgcctatattttcttccccttcttgaaaatggatcatagttctgacgaagatacagaaatcagtgattctgagattgatgattatgaaggaaaaatttatgcaagactgatgtcaggagatttaaaattaaataagaatggagaaaattacatttgtcccttctgtagcagcaagaagaagaattacagtaaaagtagcctggttcaacatgcctcaggagtcagtgcagcacctaatcgggaggcaaaagaaaaagcagtccatcgcgccctcttcaaatatttgaagaatggtcttgctaaatcacctgaaccagggtcacatgcaactcctgtggagccacaacctcttcagaaccgagacgagaagtttgtgtggccctggatgggtgtcctagttaatgtgcctactgaatggaaggatgggcgccaaattggagaaagtggaaatcgtctgaaggagcaactatcacacttttgcccactgagggtcatcccgttatggacttttagaggtcatacaggaaatgctattgttgagtttggaaaggactggaatggtttcagaaatgcgcgtacctttgaaagtcactttgcggcaggaggattcggtaagaaggactggattggaaaaaagaatcaaggatccgagctctatggatggcttgcgcgggctgaagattacaattctccaggaataatagcggaccacttgagaaaaaatggcgacttgaaatctgtcaatgatcttgcaaaggaaggagcgcgtaaaaatgacaggcttgttgctaatttagctaaccaaattgaggtgaaaaataggtatttacaggaactagaatgcaaatacagtgagacaactgcatcacttgagaagatgatggggcaaagggaacaacttctccagtcatacaatgaagaaattagcaagatgcagcagctagctcgcaggcattctcagaagatcattgatgagaatcaaaagttgcgttctgaccttgaggcaaaaatgaatgatcttgatgtgagatccaagcaactcgatgagattgcagcaaaaagcgattatgacagaaggagccttgagcaggagaagcaaaagaatgctatcaaatcgagtcatcttaaattggcaacattagagcagcagaaagctgatgagaatgtgctgaagcttgtggaagaacaaaaaagggagaaacatgctgcgttaaagaagattctgatgttggaacaacaattggatgcaaaacaaaagcttgaattagaaatacagcagttgaagggcaaactaaaagtgatggagcatatgccaggtgatgaagattcagcgtcaaagaataaaattaatgagctgagtgaggcattgcaagaaaagatagatgaactggatggaatggagtcacttaaccaaactctggttatcaaagaaagcaaaagcaacattgaactgcaagaagctcgcaaagagctagaaaatgtgggcagacacatataggaatcaagagaatgggagagcttgatctaaaagcattttcaaaggcatgccaaaaggagcgtacagaaaatgcagaagttactgctgcctttctttgttcaaagtgggaggctgaaataaaaaatcctgactggcacccttttagggtcgtcacaattgatggaaaggagatggcaataatcgaggatgatgcaaagcttcgagcactcaaagaagaacatggagaagaaatctatgcaatggtgacaaaggcgctgcttgaaaccaacgagtacaaatcaaaaggcagctaccctgtgggggagctatggaacttcaaagaaaaccggaaggtgactctgaaggaagctgtccagtttgtcctgagacagtggcgaacaaacaggaggaagcgataagctctcggctactcaatgctcttggctttttttccccaccacctgatccgaaagccatgagttcgagagctagtaacctggaaacagtagtattaattcgtgataaaatcaacagggcgatacagccctgtggatctgttccttgttggatataagctggcactcctattgcagtgtcagcatcagtggactcgaacgccattatggcgttatccttgtgccacctttgtaacaagtagttcgttcttgttcttgaaccgtgtgttgtagttggcccttggccgcatgctaccggctctgtacggctgtgcctacaaagttgtggtggaacatgcagactcataataaagcatgcttgggctcttgtgatactctgcacttttatgatgttgtgagaatgtttgttcatggttggtactgcagctcctcctgaccgcttcggattaaagccagctgtttggaccctgcagctgtaatctatagaaataaaata

SEQ ID NO: 117203 - DNA, 865 bp, Zea Mays
gagagtctaacttttccattttctttccccctctacctaccccgacccatcagtagagggcggcggctgcctcctcttcctacccgcgtccgagctcgcccccttcctcgccaccttgggaggcgacgagcatcaccaggacaccaggcaataatcgaggatgatgcaaagcttcgagcactcaaagaagaacatggagaagaaatctatgcaatggtgacaaaggcgctgcttgaaaccaacgagtacaaatcaaaaggcagctaccctgtgggggagctatggaacttcaaagaaaaccggaaggtgactctgaaggaagctgtccagtttgtcctgagacagtggcgaacaaacaggaggaagcgataagctctcggctactcaatgctcttggctttttttccccaccacctgatccgaaagccatgagttcgagagctagtaacctggaaacagtagtattaattcgtgataaaatcaacagggcgatacagccctgtggatctgttccttgttggatataagctggcactcctattgcagtgtcagcatcagtggactcgaacgccattatggcgttatccttgtgccacctttgtaacaagtagttcgttcttgttcttgaaccgtgtgttgtagttggcccttggccgcatgctaccggctctgtacggctgtgcctacaaagttgtggtggaacatgcagactcataataaagcatgcttgggctcttgtgatactctgcacttttatgatgttgtgagaatgtttgttcatggttggtactgcagctcctcctgaccgcttcggattaaagccagctgtttggaccctgcagctgtaatctatagaaataaaata

SEQ ID NO: 117204 - DNA, 2363 bp, Zea Mays
ttttgcgagtctgctggtgtagtgtatctcccatctgttgttgtctcatgtctggttgcctatattttcttccccttcttgaaaatggatcatagttctgacgaagatacagaaatcagtgattctgagattgatgattatgaaggaaaaatttatgcaagactgatgtcaggagatttaaaattaaataagaatggagaaaattacatttgtcccttctgtagcagcaagaagaagaattacagtaaaagtagcctggttcaacatgcctcaggagtcagtgcagcacctaatcgggaggcaaaagaaaaagcagtccatcgcgccctcttcaaatatttgaagaatggtcttgctaaatcacctgaaccagggtcacatgcaactcctgtggagccacaacctcttcagaaccgagacgagaagtttgtgtggccctggatgggtgtcctagttaatgtgcctactgaatggaaggatgggcgccaaattggagaaagtggaaatcgtctgaaggagcaactatcacacttttgcccactgagggtcatcccgttatggacttttagaggtcatacaggaaatgctattgttgagtttggaaaggactggaatggtttcagaaatgcgcgtacctttgaaagtcactttgcggcaggaggattcggtaagaaggactggattggaaaaaagaatcaaggatccgagctctatggatggcttgcgcgggctgaagattacaattctccaggaataatagcggaccacttgagaaaaaatggcgacttgaaatctgtcaatgatcttgcaaaggaaggagcgcgtaaaaatgacaggcttgttgctaatttagctaaccaaattgaggtgaaaaataggtatttacaggaactagaatgcaaatacagtgagacaactgcatcacttgagaagatgatggggcaaagggaacaacttctccagtcatacaatgaagaaattagcaagatgcagcagctagctcgcaggcattctcagaagatcattgatgagaatcaaaagttgcgttctgaccttgaggcaaaaatgaatgatcttgatgtgagatccaagcaactcgatgagattgcagcaaaaagcgattatgacagaaggagccttgagcaggagaagcaaaagaatgctatcaaatcgagtcatcttaaattggcaacattagagcagcagaaagctgatgagaatgtgctgaagcttgtggaagaacaaaaaagggagaaacatgctgcgttaaagaagattctgatgttggaacaacaattggatgcaaaacaaaagcttgaattagaaatacagcagttgaagggcaaactaaaagtgatggagcatatgccaggtgatgaagattcagcgtcaaagaataaaattaatgagctgagtgaggcattgcaagaaaagatagatgaactggatggaatggagtcacttaaccaaactctggttatcaaagaaagcaaaagcaacattgaactgcaagaagctcgcaaagagctagaaaatggcctgcttgatctttcaggtgggcagacacatataggaatcaagagaatgggagagcttgatctaaaagcattttcaaaggcatgccaaaaggagcgtacagaaaatgcagaagttactgctgcctttctttgttcaaagtgggaggctgaaataaaaaatcctgactggcacccttttagggtcgtcacaattgatggaaaggagatggcaataatcgaggatgatgcaaagcttcgagcactcaaagaagaacatggagaagaaatctatgcaatggtgacaaaggcgctgcttgaaaccaacgagtacaaatcaaaaggcagctaccctgtgggggagctatggaacttcaaagaaaaccggaaggtgactctgaaggaagctgtccagtttgtcctgagacagtggcgaacaaacaggaggaagcgataagctctcggctactcaatgctcttggctttttttccccaccacctgatccgaaagccatgagttcgagagctagtaacctggaaacagtagtattaattcgtgataaaatcaacagggcgatacagccctgtggatctgttccttgttggatataagctggcactcctattgcagtgtcagcatcagtggactcgaacgccattatggcgttatccttgtgccacctttgtaacaagtagttcgttcttgttcttgaaccgtgtgttgtagttggcccttggccgcatgctaccggctctgtacggctgtgcctacaaagttgtggtggaacatgcagactcataataaagcatgcttgggctcttgtgatactctgcacttttatgatgttg

SEQ ID NO: 117205 - DNA, 2613 bp, Zea Mays
cgcttctccccacggcgcacacgcgcaacttctctgcgcgacgccagccccgcttctccccacggcgcgccgccatccccgcgcaccttcctgcgcgccgccagccccgcgcttccctgcgcgccgccagccgtcagcccgcacctgcgcgccgccagcccgtcaccgcttggagacgcgcgcagccgcgcttccctgcgcaccgccactccagccgacagccgcgcttccgtggccgcgtccaccgccgccagctctgtggtcgcgccgtcagccaacccatctgccgtcgtgaggtactgaggttgcctatattttcttccccttcttgaaaatggatcatagttctgacgaagatacagaaatcagtgattctgagattgatgattatgaaggaaaaatttatgcaagactgatgtcaggagatttaaaattaaataagaatggagaaaattacatttgtcccttctgtagcagcaagaagaagaattacagtaaaagtagcctggttcaacatgcctcaggagtcagtgcagcacctaatcgggaggcaaaagaaaaagcagtccatcgcgccctcttcaaatatttgaagaatggtcttgctaaatcacctgaaccagggtcacatgcaactcctgtggagccacaacctcttcagaaccgagacgagaagtttgtgtggccctggatgggtgtcctagttaatgtgcctactgaatggaaggatgggcgccaaattggagaaagtggaaatcgtctgaaggagcaactatcacacttttgcccactgagggtcatcccgttatggacttttagaggtcatacaggaaatgctattgttgagtttggaaaggactggaatggtttcagaaatgcgcgtacctttgaaagtcactttgcggcaggaggattcggtaagaaggactggattggaaaaaagaatcaaggatccgagctctatggatggcttgcgcgggctgaagattacaattctccaggaataatagcggaccacttgagaaaaaatggcgacttgaaatctgtcaatgatcttgcaaaggaaggagcgcgtaaaaatgacaggcttgttgctaatttagctaaccaaattgaggtgaaaaataggtatttacaggaactagaatgcaaatacagtgagacaactgcatcacttgagaagatgatggggcaaagggaacaacttctccagtcatacaatgaagaaattagcaagatgcagcagctagctcgcaggcattctcagaagatcattgatgagaatcaaaagttgcgttctgaccttgaggcaaaaatgaatgatcttgatgtgagatccaagcaactcgatgagattgcagcaaaaagcgattatgacagaaggagccttgagcaggagaagcaaaagaatgctatcaaatcgagtcatcttaaattggcaacattagagcagcagaaagctgatgagaatgtgctgaagcttgtggaagaacaaaaaagggagaaacatgctgcgttaaagaagattctgatgttggaacaacaattggatgcaaaacaaaagcttgaattagaaatacagcagttgaagggcaaactaaaagtgatggagcatatgccaggtgatgaagattcagcgtcaaagaataaaattaatgagctgagtgaggcattgcaagaaaagatagatgaactggatggaatggagtcacttaaccaaactctggttatcaaagaaagcaaaagcaacattgaactgcaagaagctcgcaaagagctagaaaatggcctgcttgatctttcaggtgggcagacacatataggaatcaagagaatgggagagcttgatctaaaagcattttcaaaggcatgccaaaaggagcgtacagaaaatgcagaagttactgctgcctttctttgttcaaagtgggaggctgaaataaaaaatcctgactggcacccttttagggtcgtcacaattgatggaaaggagatggcaataatcgaggatgatgcaaagcttcgagcactcaaagaagaacatggagaagaaatctatgcaatggtgacaaaggcgctgcttgaaaccaacgagtacaaatcaaaaggcagctaccctgtgggggagctatggaacttcaaagaaaaccggaaggtgactctgaaggaagctgtccagtttgtcctgagacagtggcgaacaaacaggaggaagcgataagctctcggctactcaatgctcttggctttttttccccaccacctgatccgaaagccatgagttcgagagctagtaacctggaaacagtagtattaattcgtgataaaatcaacagggcgatacagccctgtggatctgttccttgttggatataagctggcactcctattgcagtgtcagcatcagtggactcgaacgccattatggcgttatccttgtgccacctttgtaacaagtagttcgttcttgttcttgaaccgtgtgttgtagttggcccttggccgcatgctaccggctctgtacggctgtgcctacaaagttgtggtggaacatgcagactcataataaagcatgcttgggctcttgtgatactctgcacttttatgatgttg

SEQ ID NO: 117206 - DNA, 2308 bp, Zea Mays
atgggcgggcagtgctgtgagttagagcagtgtggcaatgttggtggtagtggtgacacccttcgggagcggaaggaggctggaacttcagattatttggcattctgtaaaagacccaacacccaaatgcttgaaaaaatatatcatgttgtaaaaattcgatctgcatttccttctgcaaactcttctggaagaaaggtgtctaaaactatgaacgggttacagaaagcaaaggccaagggcaaaattggaacactaatgatggttggttgcatgagtctgtcgattacttgcaagaaatgtgaacctttgtttctttcatctccaccagtatgccctctcatactctatataaacacatcaacagcatcgcaattagccacaagatcacttcgggaggcaagtgcgatttcgatctcgcagccaccttttttttgttctgttgtgtatctagtagttggaggagatatgcagtttgcacttgcattggacacgaactcaggtcctcaccagataagatcttgtgagggtgatgggattgacaggttggaaaaattaagtattgggggcagaaagcaggagaaagctttgagaaataggtgctttggtggtagagttgctgcaactacacaatgtattcttacctcagatgcttgtcctgaaactcttcattctcaaacacagtcctctaggaaaaattatgctgatgcaaaccgtgtatctgctatcattttgggcggaggcactggatctcagctctttcctctgacaagcacaagagctacgcctgctgtacctgttggaggatgttacaggcttattgatatccctatgagtaactgcttcaacagtggtataaataagatatttgtgatgagtcagttcaattctacttcgcttaaccgccatattcatcgtacataccttgaaggcgggatcaactttgctgatggatctgtacaggtattagcggctacacaaatgcctgaagagccagctggatggttccagggtacagcagactctatcagaaaatttatctgggtactcgaggattattacagtcacaaatccattgacaacattgtaatcttgagtggcgatcagctttatcggatgaattacatggaacttgtgcagaaacatgtcgaggacgatgctgatatcactatatcatgtgctcctgttgatgagagccgagcttctaaaaatgggctagtgaagattgatcatactggacgtgtacttcaattctttgaaaaaccaaagggtgctgatttgaattctatgagagttgagaccaacttcctgagctatgctatagatgatgcacagaaatatccataccttgcatcaatgggcatttatgtcttcaagaaagatgcacttttagaccttctcaagtcaaaatatattcaattacatgactttggatctgaaatcctcccaagagctgtactagatcatagtgtgcaggcatgcatttttacgggctattgggaggatgttggaacaatcaaatcattctttgatgcaaacttggccctcactgagcagccttccaagtttgatttttatgatccaaaaacacctttcttcactgcaccccgatgcttgcctccgacgcaattggacaagtgcaagatgaaagatgcatttatctcagatggttgcttactgagagaatgcaacatcgagcattctgtgattggagtctgctcacgtgtcagctctggatgtgaactcaaggactccgtgatgatgggagcggacacctatgaaactgaagaagaagcttcaaagctactgttagctgggaaggtcccagttggaataggaaggaacacaaagataaggaactgtatcattgacatgaatgctaggattgggaagaacgtggtgatcacaaacagtaagggcatccaagaggctgatcacccggaagaagggtactacataaggtctggaatcgtggtgatcttgaagaatgcaaccatcaacgatgggtctgtcatatagatcggctgcgtttgcgtctacaaaacaagaacctacaatggtattgcatcgatggatcgtgtaaccttggtatggtaagagccgcttgacaggaagtcgagcgttcgggcgcaagatgcgttgtctggcatgctgttccttgaccatttgtgctgctagtatgtactgttataagctgccctagaagttgcagcaaacctttttatgaacctttgtatttccattacctgctttggatcaactatatctgtcatcctatatattactaaatttttacgtgtttttctaa

SEQ ID NO: 117207 - DNA, 2542 bp, Zea Mays
atgggcgggcagtgctgtgagttagagcagtgtggcaatgttggtggtagtggtgacacccttcgggagcggaaggaggctggaacttcagattatttggcattctgtaaaagacccaacacccaaatgcttgaaaaaatatatcatgttgtaaaaattcgatctgcatttccttctgcaaactcttctggaagaaaggtgtctaaaactatgaacgggttacagaaagcaaaggccaagggcaaaattggaacactaatgatggttggttgcatgagtctgtcgattacttgcaagaaatgtgaacctttgtttctttcatctccaccagtatgccctctcatactctatataaacacatcaacagcatcgcaattagccacaagatcacttcgggaggcaagtgcgatttcgatctcgcagccaccttttttttgttctgttgtgtatctagtagttggaggagatatgcagtttgcacttgcattggacacgaactcaggtcctcaccagataagatcttgtgagggtgatgggattgacaggttggaaaaattaagtattgggggcagaaagcaggagaaagctttgagaaataggtgctttggtggtagagttgctgcaactacacaatgtattcttacctcagatgcttgtcctgaaactcttcattctcaaacacagtcctctaggaaaaattatgctgatgcaaaccgtgtatctgctatcattttgggcggaggcactggatctcagctctttcctctgacaagcacaagagctacgcctgctgtaagggataacactgaacatccaacgttgattactctattatagtattatacagactgtacttttcgaatttatcttagttttctacaatatttagtggattcttctcattttcaagatacacaattgatccataatcgaagtggtatgtaagacagtgagttaaaagattatattttttgggagacttccagtcaaattttcttagaagtttttttggtccagatgttcataaagtcgccgctttcatactttttttaattttttaattggtgcactattaggtacctgttggaggatgttacaggcttattgatatccctatgagtaactgcttcaacagtggtataaataagatatttgtgatgagtcagttcaattctacttcgcttaaccgccatattcatcgtacataccttgaaggcgggatcaactttgctgatggatctgtacaggtattagcggctacacaaatgcctgaagagccagctggatggttccagggtacagcagactctatcagaaaatttatctgggtactcgaggattattacagtcacaaatccattgacaacattgtaatcttgagtggcgatcagctttatcggatgaattacatggaacttgtgcagaaacatgtcgaggacgatgctgatatcactatatcatgtgctcctgttgatgagagccgagcttctaaaaatgggctagtgaagattgatcatactggacgtgtacttcaattctttgaaaaaccaaagggtgctgatttgaattctatgagagttgagaccaacttcctgagctatgctatagatgatgcacagaaatatccataccttgcatcaatgggcatttatgtcttcaagaaagatgcacttttagaccttctcaaagctgtactagatcatagtgtgcaggcatgcatttttacgggctattgggaggatgttggaacaatcaaatcattctttgatgcaaacttggccctcactgagcagccttccaagtttgatttttatgatccaaaaacacctttcttcactgcaccccgatgcttgcctccgacgcaattggacaagtgcaagatgaaagatgcatttatctcagatggttgcttactgagagaatgcaacatcgagcattctgtgattggagtctgctcacgtgtcagctctggatgtgaactcaaggactccgtgatgatgggagcggacacctatgaaactgaagaagaagcttcaaagctactgttagctgggaaggtcccagttggaataggaaggaacacaaagataaggaactgtatcattgacatgaatgctaggattgggaagaacgtggtgatcacaaacagtaagggcatccaagaggctgatcacccggaagaagggtactacataaggtctggaatcgtggtgatcttgaagaatgcaaccatcaacgatgggtctgtcatatagatcggctgcgtttgcgtctacaaaacaagaacctacaatggtattgcatcgatggatcgtgtaaccttggtatggtaagagccgcttgacaggaagtcgagcgttcgggcgcaagatgcgttgtctggcatgctgttccttgaccatttgtgctgctagtatgtactgttataagctgccctagaagttgcagcaaacctttttatgaacctttgtatttccattacctgctttggatcaactatatctgtcatcctatatattactaaatttttacgtgtttttct

SEQ ID NO: 117208 - DNA, 655 bp, Zea Mays
ctcaagctataagttagtgttagtatggatccggtaaaaattatcctggcttcgcccctcgatctggaggctggtggccgctggcgcagcgtacgcaaggcagcatccgacggcgagctcgtcgcgaggttctacttcacctacggcgggcgcagcgtggtgatcgggccaccgcgtgcgtgctgtgtgcgccggagtttctggacatggcggcggcggcacaccatcgtggacgccgtgaagtgcaagcgcctgcttccgctcgcgggctccaccgacgaggtcgacagctggggcatcgccgtcgaggacagcgcgagcgtggagtcgttgagcacgaggtggacggggcatgccgagctgctccgcggcaccgtgcgctccaatagccgaccacgctttcgagctcttcaaggattgatcatccgcaacctgcctcagcaatcggagtgttgaggtgctcgcgaccgccgcgcgcgtgcatgccatccacgaggcgtagtagcccctgacgctgcaggtttgtctgtgactcacacacgcacgccatatgtttgttctaatgctctagtgcagcagtgttgcgaatgcctaactgcaaaagcaccaagtcaatcagcgtgggatcacctgaatttaatgttctttttagcca

SEQ ID NO: 117209 - DNA, 2025 bp, Zea Mays
tttgggcttccaatccttcccctctcggcagctatccgtcgccagtgcgtgtttttgtttcccgctctcgcgatctctactctcgtctctcgtgcaagctctaaggcaaggatggggcgtaggacatgtggcacggccttcatccttctctacgtgctgtctacgtcgacattgcccgcgtcgtcatcgaacaccggcgacggcctcatccgcatcccgctgaagaagagatcgataatggacaccatctacggcgacctcctgccgaagccgagcgcgccggaggagaaggagaagcaagccgtcgacgacccggtgcgggacgccatagcccgagcacgcgagcggcagcacgaaatgctggtccaggccgctgccacggaacgcaggcgcaggtactactggagctacagcggggccgggggcaagggaaacggcagccgtctgcatgacggaggccagggcgaggggtcggggagcatcgccatcgttgcgctcaagaacttcctcaacgcccagtactttgggcagatcggggtcggctgcccgccgcagaacttcaccgtcgtcttcgacaccgggagcgccaacctctgggtcccttctgccaagtgctttttctcgctcgcgtgtttattccatcccaagtatgactcccgccagtccagcacttacaaaccgaatggaacaccggcttctattcactacgggacgggagggattgctggtttttacagccaagaccaggtcacggttggcaatctggtagttcaaaaccaggagttcatcgaagccactcacgagcctggcttcacctttctactggcaaaattcgacggcatcctcgggcttgcatttcaggaaatttcagttgaaggttcacttccagtatggtacaatatggtgaaccaaaacctagtggcgcagcctgttttctccttctggttaaaccggaacccattcgacggggaagggggcgaaattgtgtttggaggttctgacgaacagcattacaaaggaagccatacgtacaccagggtcactcggaaaggctactggcagtttgaaatgggtgactttctcattggcggaaggagcactggaatctgtgtggatggttgtgcggccattgcagactctgggacttcgctgattgctggtcctctagttgccattgcccagatcaatgaacagattggagcggccggggtggtcaaccaagagtgcaaacaggtcgttgctggttacgggctacaaattgcagggctgctggaagctcagcagacaccaccatcagaagtgtgctcgaaggtcgggctctgcacgttcgatgggacacgcggagtaagtgctgctggcatcgagagtgtaccgggatccgtagacggcatggcggaagctctatgcaacgcgtgcgagatagtagtgttctggacgcaaagcgagctgagcccgaacaggagcaacgagggcacgctggagtacgtggacaggctctgcgaaagcatgcccgatccggtggggtcgcgcgtggactgcggacgcgtgggttccctgcagaccgttgcgttcagcatcggtggaagggcgttcgagctccggcctgaccagtacgtcctcaaggtcggcgaggggttcgccgcgcactgcatcagcgggttcacggctctggacgtgccccctccggtaggccctctgtggatactgggtgacgtcttcatgggagcctaccataccatctttgactacggcaagatgaggatcgggttcgcagattccgcgtgagacacgggcgttcttccactaatgaccgcgaccactatagctgcagtatgttcctcagagaagccctgcgtggtgtagtgctggattttcactactacgccctgcagagcttttctcgagcttctgtagagcacatacactacgcgcaggacaaatgtgtatcgctgcatcgagaaagaaataaaggaaacaatgcaaaaaaaagaaagatcatgtattagttttctttatctttaattt

SEQ ID NO: 117210 - DNA, 1398 bp, Zea Mays
gtagctgtccacaccgcatcgcacgctgctggggtttcgcttgcattgggttcttgtggagacgaaatgggtcagaggctgctcgaccgcttggcgggcttccttcttgtcgtcgtcgtcgtcgttgtcctctatggcggaacagagcagcggatagcagaggcggcggatggagcgaacccgcacaggctgctggccaccgtctcggtgtccaagccgtcgtaccccacggttgtcaccacgccgatgtcagcctacggcgccgacccggcctccaagccgtcctactccacgttcccgtcgctggcgaccgggaacggcggtgccggtgccggtgccggtgcaggcggtggtggtgcagctgcaggcagtggcgggggcggcgggacgtggtgcgtggccagccagagcgccagcccgaccgcgctgcaggtcgcgctggactacgcctgcggctacggcgcggactgctccgcgatccagcagggcgggagctgcttcaacccggacaccgtccacgaccacgcgtcctacgccttcaacagctactaccagaagaaccccgccccgaccagctgcgacttcggcggcacggccaccatcaccaacaccgatcccagttcagggtcgtgccagtacccatcatcaagcggcggcggcggcgctcagaacatggtgcccccgccatccccgacgacgaccatgccgccgacagtccccagtaccgtcccgatgaccccgacgccgacggcgccggacaccggtaccccggtctacgggctgtccccgcccgactacagcggctcaacttcccctcccggctacggatcgacgtctcccccggactacaacgacgtcagcgccgccgccgcgagggtgaggcagcagggcggcgcggcgctggcgctgacgcttctgtgcgtcgtcgtcgcgacagtgtcgctgcgcgtctccaaatgagagcgcgcggagctaggtggagattatacagggcggtctcaggcgagacgtacgttacgtggcgcgccccgtacgtggtggctggctgaaagacgcagaggtccgtcgtcgccgtggaccgacggtggtgtggtgcccggccagccggggggagcttccgagcagagtcgcaagtctgcttactgttgtataagaaatgtgacgagcttcctagcaacgcctataatataggccattccactgttgtacttaggagtatgtcagaaaattcttttctttgctctctccgtttgctcatgctgaataatatagttatgataaagtaaggagcgaacaattaagctttgaagtagctgtagcttgcgattttgttactaggatttaatctccgttttagggagaatcggaaattaaagggtgtttgatttaaggaatcac

SEQ ID NO: 117211 - DNA, 1220 bp, Zea Mays
cttggcttttgctgattgaattggagctgcacttgtagtttggtaatgtttatatacataactatgcggattgcgttagctagaatatgtcttccagtaccagggtgagtgggtgacaatgggctctaaattttacactaaaatttaagaatccgatcgggttatgatcaggttatatttatatttattattgaactaaaattaatttagggctctaacaaattgtggagaaacattttgaatcgtgatccattatcacccctaccagtaccacatacatacctcccgttgtggtgtttaaccctacgtgcagaccttgtcaccttattttggatcgattccctgttgtatgtggcttgtgctaaaacaagaaacacttgcaactttactagaaattatggtcagactctctttctctgtgttcgtttgattgttgctctggctgtctcctgctaaccaattttgtgggaaattcaacctttgaagcatcaatgtggtgaataatttctcaaaccctcagtatgttttccctaatgctggataaggcgctctcaaaaaggtcagttcctatttgatggtgcattcattatttggttgtgcatggttaatggtgccatctttcttgtatgaatgcctgggactcggccacgacctctgggtgcacctcttcaccaccagcgaggctgtggtcagcgccttcgcctccatgacgccgatgctcatcggctccgtcgtgctggactccacgcagggggtactctgcggcgtcgccaggggctgcaggtggcagcacctggcggcgtggaccaacctggtggccttctatgtcatcggcttgccgctcgccatccttttcggattcacgctcgccttccaaaccaaggggctgtggatggggcagatatgcagcctcctctgccagaactacgtcctcttttttatcaccctgtgaaccaactggcaggagttagacctgaccatgttcaacaaggacaacgattttgtgtgctaggaatctagaaagagtttttattttcttttttgccatgtgctgttgctgaaacattgaaccatcagcatcaggcttcgacagagctgtctggtgtttgctcatcaattcatcatcagtgtaatactacagattataacatttggaatctcgaagataggaattaaaaatgttctgatacgccaatatagctgacgctttgttgaaccaa

SEQ ID NO: 117212 - DNA, 1028 bp, Zea Mays
ggattgcgttagctagaatatgtcttccagtaccagggtgagtgggtgacaatgggctctaaattttacactaaaatttaagaatccgatcgggttatgatcaggttatatttatatttattattgaactaaaattaatttagggctctaacaaattgtggagaaacattttgaatcgtgatccattatcacccctaccagtaccacatacatacctcccgttgtggtgtttaaccctacgtgcagaccttgtcaccttattttggatcgattccctgttgtatgtggcttgtgctaaaacaagaaacacttgcaactttactagaaattatggtcagactctctttctctgtgttcgtttgattgttgctctggctgtctcctgctaaccaattttgtgggaaattcaacctttgaagcatcaatgtggtgaataatttctcaaaccctcagtatgttttccctaatgctggataaggcgctctcaaaaagcgaggctgtggtcagcgccttcgcctccatgacgccgatgctcatcggctccgtcgtgctggactccacgcagggggtactctgcggcgtcgccaggggctgcaggtggcagcacctggcggcgtggaccaacctggtggccttctatgtcatcggcttgccgctcgccatccttttcggattcacgctcgccttccaaaccaaggggctgtggatggggcagatatgcagcctcctctgccagaactacgtcctcttttttatcaccctgtgaaccaactggcaggagttagacctgaccatgttcaacaaggacaacgattttgtgtgctaggaatctagaaagagtttttattttcttttttgccatgtgctgttgctgaaacattgaaccatcagcatcaggcttcgacagagctgtctggtgtttgctcatcaattcatcatcagtgtaatactacagattataacatttggaatctcgaagataggaattaaaaatgttctgatacgccaatatagctgacgctttgttg

SEQ ID NO: 117213 - DNA, 2105 bp, Zea Mays
gtccgccccttgccccctccctctccgtctccgattctggatctgcccatgccgtaacccgcaggctcccggcatctcgttctcgcctccaaaattcaccttcgccgattgccgccgtgggccgccgcgacggcgttgcggacgcctcgtaccacctccgtcgcattctccgctgactcccccctcggtggcgtcccactgcgctcctcaacagcctgctccattcccacgccacctcctctcgctccgctgcgaccaccgaggaccaccagagcgggacgccgcggaactcgtcggccacgtcctggccgtcgcgcatgctgacgacgaggccgttgccctcccgggcaccctcgacgcggagctcgcgcgcgtcctgcgagcgcacggcgccgctcaggtacgccttcacctcctcgtaggtgctgtcgttgtcggagacggggccgtagcgtgagtagcgcacctcgccgccgggctccgagatgtcgatggtcacgtaggggtccacgacgttgagtaggcggcgggcgcgccggcggaggaacaggttgaggtaggtccagaacagaggacagggagggacctaaaaatcaagcccaaaggcccaaagcccgaagtttcttttcttccccgcaaagaaagaaggcaagagttctcggcttctcgcaagtcgcgacagagaaagaggcggagttgcggagaagatgcagagcagcagcatgaagagggagatcagcgaggcccacaacaccattcgcttcggcatcaacgctggcgtcaaagcggaccttgccccgccgcacccgctccagtctaccatccaatcggtaaggattcgtcgctctccttcgtttcgtggttcacgcgtggtgtcgcatcgggcggctcgacgaggcggacaaagccggtggccagtgcgtccaccacctaggggcgcgaccgactcgtcttccccaccggtctggtgctccatggaggtggctgtctccattggtaccacgcagggccaggcttgttccactggctgcagcgtggacaatgacgtgaagccgaagctctagacggcgatcaaagcagaggaggaacaccagctgagactactctacacccgagtgtcacagtggtggcccatgaatacgcaggctggagctgcgatctcgtcgcagaccatgggtgcaatgggtgcagagacttaggtggatggttctaaatgttcacggcaaaaaaatgtgtggcgcatgggtttctatcctgagggtgcgcagatcggtcgccattagaaagatgcagcttcaactactttggaccaggtgcaaactcatggcagttctgatagggcaccctacacaaatctggagtttgaacacacgacagcatcaatgtggtgaataatttctcaaaccctcagtatgttttccctaatgctggataaggcgctctcaaaaaggtcagttcctatttgatggtgcattcattatttggttgtgcatggttaatggtgccatctttcttgtatgaatgcctgggactcggccacgacctctgggtgcacctcttcaccaccagcgaggctgtggtcagcgccttcgcctccatgacgccgatgctcatcggctccgtcgtgctggactccacgcagggggtactctgcggcgtcgccaggggctgcaggtggcagcacctggcggcgtggaccaacctggtggccttctatgtcatcggcttgccgctcgccatccttttcggattcacgctcgccttccaaaccaaggggctgtggatggggcagatatgcagcctcctctgccagaactacgtcctcttttttatcaccctgtgaaccaactggcaggagttagacctgaccatgttcaacaaggacaacgattttgtgtgctaggaatctagaaagagtttttattttcttttttgccatgtgctgttgctgaaacattgaaccatcagcatcaggcttcgacagagctgtctggtgtttgctcatcaattcatcatcagtgtaatactacagattataacatttggaatctcgaagataggaattaaaaatgttctgatacgccaatatagctgacgctttgttg

SEQ ID NO: 117214 - DNA, 1969 bp, Zea Mays
gcgtccgccccttgccccctccctctccgtctccgattctggatctgcccatgccgtaacccgcaggctcccggcatctcgttctcgcctccaaaattcaccttcgccgattgccgccgtgggccgccgcgacggcgttgcggacgcctcgtaccacctccgtcgcattctccgctgactcccccctcggtggcgtcccactgcgctcctcaacagcctgctccattcccacgccacctcctctcgctccgctgcgaccaccgaggaccaccagagcgggacgccgcggaactcgtcggccacgtcctggccgtcgcgcatgctgacgacgaggccgttgccctcccgggcaccctcgacgcggagctcgcgcgcgtcctgcgagcgcacggcgccgctcaggtacgccttcacctcctcgtaggtgctgtcgttgtcggagacggggccgtagcgtgagtagcgcacctcgccgccgggctccgagatgtcgatggtcacgtaggggtccacgacgttgagtaggcggcgggcgcgccggcggaggaacaggttgaggtaggtccagaacagaggacagggagggacctaaaaatcaagcccaaaggcccaaagcccgaagtttcttttcttccccgcaaagaaagaaggcaagagttctcggcttctcgcaagtcgcgacagagaaagaggcggagttgcggagaagatgcagagcagcagcatgaagagggagatcagcgaggcccacaacaccattcgcttcggcatcaacgctggcgtcaaagcggaccttgccccgccgcacccgctccagtctaccatccaatcggtaaggattcgtcgctctccttcgtttcgtggttcacgcgtggtgtcgcatcgggcggctcgacgaggcggacaaagccggtggccagtgcgtccaccacctaggggcgcgaccgactcgtcttccccaccggtctggtgctccatggaggtggctgtctccattggtaccacgcagggccaggcttgttccactggctgcagcgtggacaatgacgtgaagccgaagctctagacggcgatcaaagcagaggaggaacaccagctgagactactctacacccgagtgtcacagtggtggcccatgaatacgcaggctggagctgcgatctcgtcgcagaccatgggtgcaatgggtgcagagacttaggtggatggttctaaatgttcacggcaaaaaaatgtgtggcgcatgggtttctatcctgagggtgcgcagatcggtcgccattagaaagatgcagcttcaactactttggaccaggtgcaaactcatggcagttctgatagggcaccctacacaaatctggagtttgaacacacgacagcatcaatgtggtgaataatttctcaaaccctcagtatgttttccctaatgctggataaggcgctctcaaaaagcgaggctgtggtcagcgccttcgcctccatgacgccgatgctcatcggctccgtcgtgctggactccacgcagggggtactctgcggcgtcgccaggggctgcaggtggcagcacctggcggcgtggaccaacctggtggccttctatgtcatcggcttgccgctcgccatccttttcggattcacgctcgccttccaaaccaaggggctgtggatggggcagatatgcagcctcctctgccagaactacgtcctcttttttatcaccctgtgaaccaactggcaggagttagacctgaccatgttcaacaaggacaacgattttgtgtgctaggaatctagaaagagtttttattttcttttttgccatgtgctgttgctgaaacattgaaccatcagcatcaggcttcgacagagctgtctggtgtttgctcatcaattcatcatcagtgtaatactacagattataacatttggaatctcgaagataggaattaaaaatgttctgatacgccaa

SEQ ID NO: 117215 - DNA, 1846 bp, Zea Mays
gcgtccgccccttgccccctccctctccgtctccgattctggatctgcccatgccgtaacccgcaggctcccggcatctcgttctcgcctccaaaattcaccttcgccgattgccgccgtgggccgccgcgacggcgttgcggacgcctcgtaccacctccgtcgcattctccgctgactcccccctcggtggcgtcccactgcgctcctcaacagcctgctccattcccacgccacctcctctcgctccgctgcgaccaccgaggaccaccagagcgggacgccgcggaactcgtcggccacgtcctggccgtcgcgcatgctgacgacgaggccgttgccctcccgggcaccctcgacgcggagctcgcgcgcgtcctgcgagcgcacggcgccgctcaggcggcgggcgcgccggcggaggaacaggttgaggtaggtccagaacagaggacagggagggacctaaaaatcaagcccaaaggcccaaagcccgaagtttcttttcttccccgcaaagaaagaaggcaagagttctcggcttctcgcaagtcgcgacagagaaagaggcggagttgcggagaagatgcagagcagcagcatgaagagggagatcagcgaggcccacaacaccattcgcttcggcatcaacgctggcgtcaaagcggaccttgccccgccgcacccgctccagtctaccatccaatcggtaaggattcgtcgctctccttcgtttcgtggttcacgcgtggtgtcgcatcgggcggctcgacgaggcggacaaagccggtggccagtgcgtccaccacctaggggcgcgaccgactcgtcttccccaccggtctggtgctccatggaggtggctgtctccattggtaccacgcagggccaggcttgttccactggctgcagcgtggacaatgacgtgaagccgaagctctagacggcgatcaaagcagaggaggaacaccagctgagactactctacacccgagtgtcacagtggtggcccatgaatacgcaggctggagctgcgatctcgtcgcagaccatgggtgcaatgggtgcagagacttaggtggatggttctaaatgttcacggcaaaaaaatgtgtggcgcatgggtttctatcctgagggtgcgcagatcggtcgccattagaaagatgcagcttcaactactttggaccaggtgcaaactcatggcagttctgatagggcaccctacacaaatctggagtttgaacacacgacagcatcaatgtggtgaataatttctcaaaccctcagtatgttttccctaatgctggataaggcgctctcaaaaagcgaggctgtggtcagcgccttcgcctccatgacgccgatgctcatcggctccgtcgtgctggactccacgcagggggtactctgcggcgtcgccaggggctgcaggtggcagcacctggcggcgtggaccaacctggtggccttctatgtcatcggcttgccgctcgccatccttttcggattcacgctcgccttccaaaccaaggggctgtggatggggcagatatgcagcctcctctgccagaactacgtcctcttttttatcaccctgtgaaccaactggcaggagttagacctgaccatgttcaacaaggacaacgattttgtgtgctaggaatctagaaagagtttttattttcttttttgccatgtgctgttgctgaaacattgaaccatcagcatcaggcttcgacagagctgtctggtgtttgctcatcaattcatcatcagtgtaatactacagattataacatttggaatctcgaagataggaattaaaaatgttctgatacgccaa

SEQ ID NO: 117216 - DNA, 2089 bp, Zea Mays
atgccctccactgcagcctgcaccacacggcccctggcactgccaacctcgtcgcccacccaagtctcttcatttgcagcgacaaaaataggaacggagcaaaggtccggcgagccagagcaatagttaacaaccatctccacaaacaggctaccacgtagctacgtatatgccggaactgaactgagctgagaaagctcaggcgtgaactgaactagatggtgtttcctgccatcctccccaaggtggccgtgcgattgctcttcacgttctaccgcgccgccaggaagctcaggcgccacgccttccagctctacaaccgtaggaccgccgccaagccgccttcgttctccgtctcccagcagcaggccggtgccgccaccttcaagaccgacgccgccatccctgacgccgccggccggaccgtcgtctgtgacgtgcacggagccctgctgcgctcctccgcgctcttcccctacttcatggtcgtggcctacgagggcggcagccttctgcgcgccatgctgctgctctgcgccttccctctcgtctgggcactcggggagcgcagcggcggcgctggcgccgtccgggtgatggcgttcgtcaccttcgcggggctcaggcccagggacatggacctcgtgggccgcgccgtcctgcccaagcactacatggagcagctcaacgcgctggtgtacggcagcctgtggctcccggccaggaggaaggtggcggtgaccggcgcgccgcgggtgatgtccgagtggttcctcaaggagtacctggccgccgacgcagtggtcggcctcgagctgcagctcgtcacggtcggccgctgccggtacttcacgggattgctgtcaggccccgcgacggggccggagctgaggcacaaggcgctcatggaggctctaggcgccgaggacgacaccgtggccgacgtgggcatcatcagcaactccaacccgctcgaccacctcttcgtcccatactgcaaggaagtttatgtcgtgaacacagagaatgacaagctaccgcgggtcaaatacccgaagccgctcatcttccacgacgggcgccttgccttcctgcccacccccgccgccatgcttgccttcttcctcttccttccgctcggcgtcatcctctccgtcatccgcattaacatcggcatcgttctcccttacaaggtcaacttcgtggccgccgcgatcttcggcgtccgcttccgcgcctctgggctccgcgccccgccggcggacggcgagcagcgccggggcgtcctctacgtgtgcacgcaccggacgctggtggaccccatcatgctcaccacggcgctgcagaagcccgtgcccgccttgacgtacagcctcagccggctgtccgagctgatcgcgcccatcaagacggtgcggctgacgcgcgaccgcgcgcgggacgccgacaccatgtccaggctgctgaagcaaggcgacctcgcggtctgccccgagggcaccacctgccgcgagccgtacctgctgcgcttcagcccgctgttcgcggagctcgcggacgacatggagcccgtggccctggacgctcaggtgacgatgctctacggcacgacggcgagtggccacaagtggctggatcccgtcgcgttcttcgccaacccggtgccatcgtaccgggtggagttcctggggaccgtgccgcgggagtggacgcgcgccgggggcaggaccggcgtggaggtggccaactgggtgcagcggcgactgggcgaggcactggagttcgagtgcaccgagctcactcgccgtgacaagtacatgatgctggcgggcaacgacggcgtggtcgccaagtagagagcgcctgccgtgcatgcgctgcaacagttgggtgtggtttttattatgcatatacatgctgggtatattattgtcaaaagctagttactgtattttgcatggcagcaatggatcctttggttccgttgtgtaaagaatctttgattagctgcaaaactaaacgaatactagatgcttgaatttaacttcaaatcaaaacagtatatatttcgtctgatcgttttgctgaa

SEQ ID NO: 117217 - DNA, 125 bp, Zea Mays
tttttttctctctacatatactttgtttttccaatataaccaaacagatctcggttttgagcaatactgtagttttactatggtaaaggaataccgtagtatttatgtcatgtacaattgtaaaa

SEQ ID NO: 117218 - DNA, 334 bp, Zea Mays
cggcgcgccaggtgatggacgacatcgtgggcgtgggcgccggccggaggaccgtgccttccttcacgggatccaaaaggagtgtcctgcccatcgagaacgggcacgaccatgccgccctctaggcgctcagccacctccgctaccactccacgtccatacagagggatttagacgacgaagtgtccacgattaaatatactgctggtagctttatctgtagagtctgaaggaatgagctgaaacgaggcagcttctgttactcccgcaaccgttggcaccgacggtgcatcagtgagaactggggacttcccaccaatctgatgacagtcca

SEQ ID NO: 117219 - DNA, 1987 bp, Zea Mays
tcgtaccgccgccgcgcggccgtagagcccgtgcggagagccgcatggggcaaggcggcagggggcagactccaactcgaacttgcccaccaccagtccactgtccaccaccctggcggcctggcccttcaacactcgccaaggccaggccagccaactagtcaaggccgccagggggcgtctggcttctccttccttgctgcggtcctgctcctgcccagagcagccctttcgtccctccctgcgctttccctccacaccttcgcggacacacacacaaaaaattgtcagctgcccccgccccgtataaaaaacgcaccaccagtggcggccaagccatccactgccccccgcgcatcgccatggctctcgccgtccgcacgcctcggttccagcctcgaccggcctccatttctgcgcccacaacacccgcatcgacctccctcgccgccgggaacgcgaggccccgcccctgcgccggcgccgccgttcgcgcctcgcccttcaccgaggccacctcctcctcgcgctaccgccgcgacgcctggtcatacgccgccgatggctcctccaactccgcatccccgtcctccgctgccgctgctgccgcgggccgtcgggatgacgagatcgcgctgcagctgccggaactgcggaggctcctggacgtgctgagggcgtccagggggaggggcgccgaggagggcggcggacccgggagggtggcactggtgggcacagggcccggggaccccgagctgctcacgctcaaggcggtccgggccatcgaggcggcggacctggtgctctacgacaggctggtgtctaacgacgtgttggacttggtcggggagggcgccaggctgctctatgtcggcaagaccgcgggataccacagccgcacccaggaggagattcacgagctgctgctgagctttgcggaggccggtgccaatgttgtgcgcttgaaaggtggcgatcctctggtttttggaaggggtggagaagagatggatttcttacagcaacagggaattaaagttgaagttatcccaggaattacttctgcttcgggtattgcagcagagctaggcattccgttaacccatagaggtgttgctaccagtgtcagatttttaactggccactccagaaatggtgggacagatccactatatgtagctggaaatgcggctgatccagacactactttggttgtgtatatgggtttgtcaacacttccatcacttgctccaaagttaatgaagcacggcctgccaccagatacccctgctgttgcagtagagcgcgggactacaccccaacaacgaacggtgttcgcctcgttgaaggatcttgtggatgaagtcaagtcagccgatctagtttctccaactctaataattattgggaaagtggtatccttgtcacccttctgggttgagtcatctgaacatgatgcactgaaagttcagagctcgtatgcaaatgaggccagatgacaacagattttcttggtttttagtgactggacaatacttgagaaatgcaagatcccagatatgggagcacaggttcgacctggtgtacacagaaacatctcaggaagcatggatcctgaatggcggatggtagcttaagcttataacagacttggggcagaagcgcacttggactgatcatgcttgattctttggcctaatctacatgagattcacaatttttcgatttagttgagttcgacaatagttgtgtgcttctttgttactagtagccatgtacgtgcggcgcacgcgtgtttacgattctatgccctagcatagtaaggctattccaacgctgccacgttatgattttatgataatgggagtttcgtagcaccatgataatgagaaatagtgctacgaagctcttattatatgacaagtgccataaatcgtagcacttatgattttatgataatggggagcttcgtagagctctttct

SEQ ID NO: 117220 - DNA, 1635 bp, Zea Mays
tcgtaccgccgccgcgcggccgtagagcccgtgcggagagccgcatggggcaaggcggcagggggcagactccaactcgaacttgcccaccaccagtccactgtccaccaccctggcggcctggcccttcaacactcgccaaggccaggccagccaactagtcaaggccgccagggggcgtctggcttctccttccttgctgcggtcctgctcctgcccagagcagccctttcgtccctccctgcgctttccctccacaccttcgcggacacacacacaaaaaattgtcagctgcccccgccccgtataaaaaacgcaccaccagtggcggccaagccatccactgccccccgcgcatcgccatggctctcgccgtccgcacgcctcggttccagcctcgaccggcctccatttctgcgcccacaacacccgcatcgacctccctcgccgccgggaacgcgaggccccgcccctgcgccggcgccgccgttcgcgcctcgcccttcaccgaggccacctcctcctcgcgctaccgccgcgacgcctggtcatacgccgccgatggctcctccaactccgcatccccgtcctccgctgccgctgctgccgcgggccgtcgggatgacgagatcgcgctgcagctgccggaactgcggaggctcctggacgtgctgagggcgtccagggggaggggcgccgaggagggcggcggacccgggagggtggcactggtgggcacagggcccggggaccccgagctgctcacgctcaaggcggtccgggccatcgaggcggcggacctggtgctctacgacaggctggtgtctaacgacgtgttggacttggtcggggagggcgccaggctgctctatgtcggcaagaccgcgggataccacagccgcacccaggaggagattcacgagctgctgctgagctttgcggaggccggtgccaatgttgtgcgcttgaaaggtggcgatcctctggtttttggaaggggtggagaagagatggatttcttacagcaacagggaattaaagttgaagttatcccaggaattacttctgcttcgggtattgcagcagagctaggcattccgttaacccatagaggtgttgctaccagtgtcagatttttaactggccactccagaaatggtgggacagatccactatatgtagctggaaatgcggctgatccagacactactttggttgtgtatatgggtttgtcaacacttccatcacttgctccaaagttaatgaagcacggcctgccaccagatacccctgctgttgcagtagagcgcgggactacaccccaacaacgaacggtgttcgcctcgttgaaggatcttgtggatgaagtcaagtcagccgatctagtttctccaactctaataattattgggaaagtggtatccttgtcacccttctgggttgagtcatctgaacatgatgcactgaaagttcagagctcgtatgcaaatgaggccagatgacaacagattttcttggtttttagtgactggacaatacttgagaaatgcaagatcccagatatgggagcacaggttcgacctggtgtacacagaaacatctcaggaagcatggatcctgaatggcggatggtag

SEQ ID NO: 117221 - DNA, 4146 bp, Zea Mays
cttttcttttcagcacatagcgcatatgcagcatttaggcttattcatttatttgtgcaggcttgatatttgactgggacactgggcaaattttaacaagtttcagcaatggggtttgataatgaatgcatcttgagtattcaatcccttcctggtgaatatttctgccctgtttgccggacacttgtatatccgaatgaggccctacaaactcaatgcacacatctctactgcaaatcctgcttggcatatgtagtggcaaccacacaagcttgtccttatgatggataccttgtaacagaagctgattccaagcctcttgtggaatcaaataaaacccttgctgagactattggcaaagtcgcggtctattgcctgtataataagagtggatgccaatggcatggagagctatctgcctgtgtcacacatggtactgcttgtgcatatgggaactctcctgttgtttgcaatcgttgtgggacacaaattgtgcatcgtcaagtgcaagaacatgctcaagtctgccatggcttacaatctcaaacacaacaagctgatggtagtcaggtgcagctggcaacggcaacaactcagccagtcatccaagattcatcacttgcctcagctggatctgctgcagctgcagctacaaccctaacaaagccatcttcaactacagccacagctgtaacagattctgcagcagcaacaggaggggcagctggtgcaaccacagcagctgtgccttcttcagcttcatctatttctgcttcccaaactccaacagctgagcagtggtaccagcagcagcagcagctccaatactcgcaatactaccagcagcagcaccctggatccaacccttacatgcagcaacatcaacaatatgaccaataccagcaggcatatcagcaatacatgcaacctccaatgcaagtaccatcccaaaatgtggtgcaaggatctgcacaacctgcttcttatgttcagcctcaagttcagtcctcccaggtgatgatgcaagcccaaagtcagccccaggtccatccattgacgagtcagccacagcttcaacagcatccagttcaaccccgaccccaaagtcaccctcatatttcccatgttcaagcaccttcaggtcagtcgcagcttcatcaaccaattcagtcagcccaagttccacaggtccaaccaagtcaagttcctctccaaccatctggtctccaagtacaatctgcagcacatccatctgctcctactcaagttggtaatcagcaatttgcgactcaagcaatggcgtatcaggtccagccacatgtacaagctcaacctccgcagcagcaacatattgttgcacatcaacaacatccacatatgcaagctttacccctacagcaaaatattcaacctaagatgcagctaaactctcaagttcagctacagcctccacatgtccagcagcaagcttacccacaatctcaggtctatcctcaacagacacatcatatgcactcccagaatactacatatgcacagcagcaaacccaaggtgctttgatgcaacctgtacatgtgtcccaccaacaaacacatgtttctcatcatcctgcaccgatgcgtcctccatcgtcaggccatcagccagctttgcagcatcctcaggcccagggaattcaacatacatcacaacatgaaaaacatattgggtttcatgctcagtggccaacaatgtattccaacattccttcccaagcaccaccacagggattgtctgtgcactcatctgtttcctcacaatcagttcaatcataccagcaaggaatgtcttcatcacaacagatgcattcccaacctggtcagccatatacacaacagcatgttactggcaatactggacaacatgttcaaacttctgctggcagacctatggcccatcttgcaccaacacagcaatttcagcagcaacatccagcaatgcttagaactgagtcacctgctgctgggcactctattgggcagggtcctttagatcttgaaaaacatacttcaaaatcagggaagttggataatgcaactattgctgctgtcggtgaaaataaaaatagtggtcctgagtcagttgtcatgagacctacaaagtcacaattgggtgatgaaaacatgaacagcgaacacaatggttttgttggtgttagaaaagatgcagtgcaaactggcattgtatcacacaatttagatggttcaattaggagggatgggaatactgaccaggcaggcaattcacatggcccacttgtgcagggaggcaaagatcacaaggcttcagatgcatctactgatcatgagaaaggacgactgtttcaacaggcatcactgcaaaatgcaggggcaccgggctcttatgtgcccccaggtgtggtaccacatccatctggaccagataaaatgcttcctcagcatatgacgaatcatggtcatatgcatggtttctctgaaaatatccgtcctccgctgcaacaaccatatggtgtgtttcattctggaacgataacaaggccatttggagagaaccagattcagatgccaatgccacagcctgggggtatcagacctggtgatggtatgattcgtccttgtttggttggcccattacctggacatcatggtgcagtgttgccttcttttgatcttgaacgtttgggtcagccacgtcctcttggaatgttgaacagcaatgactttggtggtgaggggttcaacgcttcagggggtgcagcgtatcctgaaagacatgataataccgaagacagtcggaaacattttccagcaccagcccctctagatgatcagggcttgcgaagggaccctagacattttgagagagctttaggtagacctgatggtttccttgattcagtacctggaaggcctccatttgcaaaccacagaagtgcaggtttgcatgaggattttccaagaaagcaaaatgcaactgccagtcaccctgacttcctgtcacatggagcagaatttgatcatcacagggctattggaatgcctaatttcagaaatccaggcccatttgctcaagggacaagtggcggtcctggtggccctcctaaacaccagcttggctctggtgacatgcatccaggtgaccctcatcttgtcgctgaatatgctcagcatggatttcctaaaactgcagcacactttggtttgggtggattcttgagaaacgggaattctggttggtgccgaatatgcatgtttaactgtgggagtgcagagaatctggatttgcatgtacaaacaagggaacatcagcaatgtgcaatggacattgtcctgaaaatgaagcaagatgttgcaaaaaggcaaaaactgaattatggagggcccaagtcattcaacaacaaaaaggtttctgggaagggccattttcgtgggaacaggcgctagtgttaactgattaaaattgatgtggttttgaaggttgctactggtgcttatggatgtgtcaatggcaatcgagaattgagatcttttcagacattctgttcatgcggttcagcgtatttgaagggaaacttgctcatgctttttctaatggcgacctaataatagaccatgctggaacttttacaaagagacttgtaattgtgtcatcagacatccataacatgaaactgcaaagtgtaggataatttccagcagagggctcctgtcatacttgcatgtttccctaacgatgataaaccaatcaaaagtaaaaaggagaggcgcgtgaagcctaacctacgaaggctacgagtatgaagtcgattatccaatgaagcctcacttacgaaagctatgggtgcaaagttacacatcctgtgaagccttgacgagaagaagaattgctccaagcccttaagaagtcaaagaaccttcactaggtgcatgtatgtgctcgtgaaggccagtcgatcatgaggacccgttaataccatggaatttggatgaaccattgtattttaagccaaaaggtgtttggtagcctttaaaaactctgtatataatactgtggtattatcgatactatggttattttggggtatagaaaactttggtccagaccaaagtttctttgctgtgcgc

SEQ ID NO: 117222 - DNA, 390 bp, Zea Mays
caattcgctagtaattagcagctaggtgacattatttgctgttggcataacgtggaggatctatgtttcttttgtctcgtgtttctttgggattcttatagatggtggatgtgcatgggtgctgactactgtttgaacgaactggccacgccttggctctcattttctgccagcatcggatgtttttgactgaccccagggcaccttatatctattgttgtgagggttaaattgtaaaatttctggcccgtggttcattccttaccaactaatgcactcaggtgtaaaagaaaattcctgtaatgtatacacaaacatttatatacaattttgcactgtaaatatactaatattagtttcaatggagtgcacccacaaattaatgtacct

SEQ ID NO: 117223 - DNA, 4014 bp, Zea Mays
cttttcttttcagcacatagcgcatatgcagcatttaggcttattcatttatttgtgcaggcttgatatttgactgggacactgggcaaattttaacaagtttcagcaatggggtttgataatgaatgcatcttgagtattcaatcccttcctggtgaatatttctgccctgtttgccggacacttgtatatccgaatgaggccctacaaactcaatgcacacatctctactgcaaatcctgcttggcatatgtagtggcaaccacacaagcttgtccttatgatggataccttgtaacagaagctgattccaagcctcttgtggaatcaaataaaacccttgctgagactattggcaaagtcgcggtctattgcctgtataataagagtggatgccaatggcatggagagctatctgcctgtgtcacacatggtactgcttgtgcatatgggaactctcctgttgtttgcaatcgttgtgggacacaaattgtgcatcgtcaagtgcaagaacatgctcaagtctgccatggcttacaatctcaaacacaacaagctgatggtagtcaggtgcagctggcaacggcaacaactcagccagtcatccaagattcatcacttgcctcagctggatctgctgcagctgcagctacaaccctaacaaagccatcttcaactacagccacagctgtaacagattctgcagcagcaacaggaggggcagctggtgcaaccacagcagctgtgccttcttcagcttcatctatttctgcttcccaaactccaacagctgagcagtggtaccagcagcagcagcagctccaatactcgcaatactaccagcagcagcaccctggatccaacccttacatgcagcaacatcaacaatatgaccaataccagcaggcatatcagcaatacatgcaacctccaatgcaagtaccatcccaaaatgtggtgcaaggatctgcacaacctgcttcttatgttcagcctcaagttcagtcctcccaggtgatgatgcaagcccaaagtcagccccaggtccatccattgacgagtcagccacagcttcaacagcatccagttcaaccccgaccccaaagtcaccctcatatttcccatgttcaagcaccttcaggtcagtcgcagcttcatcaaccaattcagtcagcccaagttccacaggtccaaccaagtcaagttcctctccaaccatctggtctccaagtacaatctgcagcacatccatctgctcctactcaagttggtaatcagcaatttgcgactcaagcaatggcgtatcaggtccagccacatgtacaagctcaacctccgcagcagcaacatattgttgcacatcaacaacatccacatatgcaagctttacccctacagcaaaatattcaacctaagatgcagctaaactctcaagttcagctacagcctccacatgtccagcagcaagcttacccacaatctcaggtctatcctcaacagacacatcatatgcactcccagaatactacatatgcacagcagcaaacccaaggtgctttgatgcaacctgtacatgtgtcccaccaacaaacacatgtttctcatcatcctgcaccgatgcgtcctccatcgtcaggccatcagccagctttgcagcatcctcaggcccagggaattcaacatacatcacaacatgaaaaacatattgggtttcatgctcagtggccaacaatgtattccaacattccttcccaagcaccaccacagggattgtctgtgcactcatctgtttcctcacaatcagttcaatcataccagcaaggaatgtcttcatcacaacagatgcattcccaacctggtcagccatatacacaacagcatgttactggcaatactggacaacatgttcaaacttctgctggcagacctatggcccatcttgcaccaacacagcaatttcagcagcaacatccagcaatgcttagaactgagtcacctgctgctgggcactctattgggcagggtcctttagatcttgaaaaacatacttcaaaatcagggaagttggataatgcaactattgctgctgtcggtgaaaataaaaatagtggtcctgagtcagttgtcatgagacctacaaagtcacaattgggtgatgaaaacatgaacagcgaacacaatggttttgttggtgttagaaaagatgcagtgcaaactggcattgtatcacacaatttagatggttcaattaggagggatgggaatactgaccaggcaggcaattcacatggcccacttgtgcagggaggcaaagatcacaaggcttcagatgcatctactgatcatgagaaaggacgactgtttcaacaggcatcactgcaaaatgcaggggcaccgggctcttatgtgcccccaggtgtggtaccacatccatctggaccagataaaatgcttcctcagcatatgacgaatcatggtcatatgcatggtttctctgaaaatatccgtcctccgctgcaacaaccatatggtgtgtttcattctggaacgataacaaggccatttggagagaaccagattcagatgccaatgccacagcctgggggtatcagacctggtgatggtatgattcgtccttgtttggttggcccattacctggacatcatggtgcagtgttgccttcttttgatcttgaacgtttgggtcagccacgtcctcttggaatgttgaacagcaatgactttggtggtgaggggttcaacgcttcagggggtgcagcgtatcctgaaagacatgataataccgaagacagtcggaaacattttccagcaccagcccctctagatgatcagggcttgcgaagggaccctagacattttgagagagctttaggtagacctgatggtttccttgattcagtacctggaaggcctccatttgcaaaccacagaagtgcaggtttgcatgaggattttccaagaaagcaaaatgcaactgccagtcaccctgacttcctgtcacatggagcagaatttgatcatcacagggctattggaatgcctaatttcagaaatccaggcccatttgctcaagggacaagtggcggtcctggtggccctcctaaacaccagcttggctctggtaaccttcctgggaatttacattcttttgagggtgacatgcatccaggtgaccctcatcttgtcgctgaatatgctcagcatggatttcctaaaactgcagcacactttggtttgggtggattcttgagaaacgggaattctggttggtgccgaatatgcatgtttaactgtgggagtgcagagaatctggatttgcatgtacaaacaagggaacatcagcaatgtgcaatggacattgtcctgaaaatgaagcaagatgttgcaaaaaggcaaaaactgaattatggagggcccaagtcattcaacaacaaaaaggtttctgggaagggccattttcgtgggaacaggcgctagtgttaactgattaaaattgatgtggttttgaaggttgctactggtgcttatggatgtgtcaatggcaatcgagaattgagatcttttcagacattctgttcatgcggttcagcgtatttgaagggaaacttaaactgcaaagtgtaggataatttccagcagagggctcctgtcatacttgcatgtttccctaacgatggtaaggatgacatgctttcataatgctgatggtggatgtgcatgggtgctgactactgtttgaacgaactggccacgccttggctctcattttctgccagcatcggatgtttttgactgaccccagggcaccttatatctattgttgtgagggttaaattgtaaaatttctggcccgtggttcattccttaccaactaatgcactcaggtgtaaaagaaaattcctgtaatgtatacacaaacatttatatacaattttgcactgtaaatatactaatattagtttcaatggagtgcacccacaaattaatgtacct

SEQ ID NO: 117224 - DNA, 3918 bp, Zea Mays
atgttttttttgccatttcctgaatcgttgacatgcatttttttgttgggtttctgtttcttttcttttcagcacatagcgcatatgcagcatttaggcttattcatttatttgtgcaggcttgatatttgactgggacactgggcaaattttaacaagtttcagcaatggggtttgataatgaatgcatcttgagtattcaatcccttcctggtgaatatttctgccctgtttgccggacacttgtatatccgaatgaggccctacaaactcaatgcacacatctctactgcaaatcctgcttggcatatgtagtggcaaccacacaagcttgtccttatgatggataccttgtaacagaagctgattccaagcctcttgtggaatcaaataaaacccttgctgagactattggcaaagtcgcggtctattgcctgtataataagagtggatgccaatggcatggagagctatctgcctgtgtcacacatggtactgcttgtgcatatgggaactctcctgttgtttgcaatcgttgtgggacacaaattgtgcatcgtcaagtgcaagaacatgctcaagtctgccatggcttacaatctcaaacacaacaagctgatggtagtcaggtgcagctggcaacggcaacaactcagccagtcatccaagattcatcacttgcctcagctggatctgctgcagctgcagctacaaccctaacaaagccatcttcaactacagccacagctgtaacagattctgcagcagcaacaggaggggcagctggtgcaaccacagcagctgtgccttcttcagcttcatctatttctgcttcccaaactccaacagctgagcagtggtaccagcagcagcagcagctccaatactcgcaatactaccagcagcagcaccctggatccaacccttacatgcagcaacatcaacaatatgaccaataccagcaggcatatcagcaatacatgcaacctccaatgcaagtaccatcccaaaatgtggtgcaaggatctgcacaacctgcttcttatgttcagcctcaagttcagtcctcccaggtgatgatgcaagcccaaagtcagccccaggtccatccattgacgagtcagccacagcttcaacagcatccagttcaaccccgaccccaaagtcaccctcatatttcccatgttcaagcaccttcaggtcagtcgcagcttcatcaaccaattcagtcagcccaagttccacaggtccaaccaagtcaagttcctctccaaccatctggtctccaagtacaatctgcagcacatccatctgctcctactcaagttggtaatcagcaatttgcgactcaagcaatggcgtatcaggtccagccacatgtacaagctcaacctccgcagcagcaacatattgttgcacatcaacaacatccacatatgcaagctttacccctacagcaaaatattcaacctaagatgcagctaaactctcaagttcagctacagcctccacatgtccagcagcaagcttacccacaatctcaggtctatcctcaacagacacatcatatgcactcccagaatactacatatgcacagcagcaaacccaaggtgctttgatgcaacctgtacatgtgtcccaccaacaaacacatgtttctcatcatcctgcaccgatgcgtcctccatcgtcaggccatcagccagctttgcagcatcctcaggcccagggaattcaacatacatcacaacatgaaaaacatattgggtttcatgctcagtggccaacaatgtattccaacattccttcccaagcaccaccacagggattgtctgtgcactcatctgtttcctcacaatcagttcaatcataccagcaaggaatgtcttcatcacaacagatgcattcccaacctggtcagccatatacacaacagcatgttactggcaatactggacaacatgttcaaacttctgctggcagacctatggcccatcttgcaccaacacagcaatttcagcagcaacatccagcaatgcttagaactgagtcacctgctgctgggcactctattgggcagggtcctttagatcttgaaaaacatacttcaaaatcagggaagttggataatgcaactattgctgctgtcggtgaaaataaaaatagtggtcctgagtcagttgtcatgagacctacaaagtcacaattgggtgatgaaaacatgaacagcgaacacaatggttttgttggtgttagaaaagatgcagtgcaaactggcattgtatcacacaatttagatggttcaattaggagggatgggaatactgaccaggcaggcaattcacatggcccacttgtgcagggaggcaaagatcacaaggcttcagatgcatctactgatcatgagaaaggacgactgtttcaacaggcatcactgcaaaatgcaggggcaccgggctcttatgtgcccccaggtgtggtaccacatccatctggaccagataaaatgcttcctcagcatatgacgaatcatggtcatatgcatggtttctctgaaaatatccgtcctccgctgcaacaaccatatggtgtgtttcattctggaacgataacaaggccatttggagagaaccagattcagatgccaatgccacagcctgggggtatcagacctggtgatggtatgattcgtccttgtttggttggcccattacctggacatcatggtgcagtgttgccttcttttgatcttgaacgtttgggtcagccacgtcctcttggaatgttgaacagcaatgactttggtggtgaggggttcaacgcttcagggggtgcagcgtatcctgaaagacatgataataccgaagacagtcggaaacattttccagcaccagcccctctagatgatcagggcttgcgaagggaccctagacattttgagagagctttaggtagacctgatggtttccttgattcagtacctggaaggcctccatttgcaaaccacagaagtgcaggtttgcatgaggattttccaagaaagcaaaatgcaactgccagtcaccctgacttcctgtcacatggagcagaatttgatcatcacagggctattggaatgcctaatttcagaaatccaggcccatttgctcaagggacaagtggcggtcctggtggccctcctaaacaccagcttggctctggtgacatgcatccaggtgaccctcatcttgtcgctgaatatgctcagcatggatttcctaaaactgcagcacactttggtttgggtggattcttgagaaacgggaattctggttggtgccgaatatgcatgtttaactgtgggagtgcagagaatctggatttgcatgtacaaacaagggaacatcagcaatgtgcaatggacattgtcctgaaaatgaagcaagatgttgcaaaaaggcaaaaactgaattatggagggcccaagtcattcaacaacaaaaaggtttctgggaagggccattttcgtgggaacaggcgctagtgttaactgattaaaattgatgtggttttgaaggttgctactggtgcttatggatgtgtcaatggcaatcgagaattgagatcttttcagacattctgttcatgcggttcagcgtatttgaagggaaacttgtaatggtcccaaacttttgttccatgttgatctgcagagttcacatggctatgtttacttcacgtatttttgccgaagttgttctgggattgcttaacatgctaatatccttcttctgtacgtgctgatttataactcctgtttctttcaactaggctcatgctttttctaatggcgacctaataatagaccatgctggaacttttacaaagagacttgtaattgtgtcatcagacatccataacatggtaaattttgttgg

SEQ ID NO: 117225 - DNA, 880 bp, Zea Mays
cgatcccggttgggaatggcctaaacgaacgaacaaggccactcggccccatccggcatccccgacccccgagcgtcttctttcgtctgctcgctctgcgctcgcatctaccatggagactagggtctagggtttagtgcgccgctgcctacatcgccgccatcctcaacttcctacgggatcctgacgaggcgccgtatcatcctcaacgccgcgaacctccgctcccacgttatcctcacgcccaccagtagctctcggcctctacctcgttaaggttaggatcgttccacctctacctctgagtattgactgaggtttgggtacaagactcacacccggtgcttggtctgttgatttgtttgctgcatcggtgttagggtttgatttttgtggatttgatctgtgattgattactgacagcagtagaccgagttgctggtgcgcgagaatcggatagatggggcagcaagggtgccatttctatttctaataggcatacttggattggatgtgaaggttctatgggggtgtttggtttgcccctgctaaaatttagcccctatcacatcgaatgtttgaacctccgttcggggtattaaatgtagtcggattataaaactaatttctcagccgaagattaaaaagtgagacgaatctagtacagttggttgggtctatatttcatactcctatttgaaagtcaaacgcttgatgtgacccgggctaaactttagtccacagaaccaaacaccccctatatagcatgcaaaatcctgttatttccatggtcacatcacaaggttcttttttaaaaaaattccacgtgtacaaatccattattgaatgtctgaatgatacagaggagatacttgtccta

SEQ ID NO: 117226 - DNA, 834 bp, Zea Mays
atgcactgtgatgtcaccatcaacaagacgttggataagatgggtgtagaaattataattgttgatgctggtatcaacgatttcaatgtcgtcggactaggtgatgtagttgtgttgcttgcatttggagctgttgtggaagagatgtgcacactaaatgaaaataaagttgaacgacggcttggaaactacactcaggccaaggatgagatactggtatctgcctacatgaacatgtccaaagatcctgcaattggaacgaatcagtcaggaaaggcttattggtgtcgcatcagcgactactacaatgaacacaagaagacaactaatgctaggacacaacactccttggagcacaagtggagcgacattcaaagggacactacgaagttttgtgctgcgtacgacaaagtgataaggttgaagcaaagtggcaaaagcgaagacgaccaggtaaaagatgcactacagatgtttgaaagcatgcacaagaaacagtttaggtttatgcactgttggtacatgcttcgccaagaggtcaaatggacgacctggctctcaagttgtgaaactccacataatactgggaatgtcaacgtcaacgaaaccgggtcccaggcgaggcagggggaagaccaatttggttcaccgtctgatacctttgtgcgaccaatgggtagggaccgtgcaaagaaggctcgtagtaccagcacttcgatcaattcaactgcctgcatggcgatgctccagaagttccaagaggatagagcaaggttcgaagaaaaggctacaaagtatgaagatcaggccgcagcatcaacagaagaggattga

SEQ ID NO: 117227 - DNA, 1484 bp, Zea Mays
agagctagtgttttcttttctctccccctcccctctcctcccatgtgacgtcgcctgcaggctgcagcggtcggtgccggccagccatccccggcgagatccccccctctccctctcccatcacccccgccgccaacgtctggtcgcacggaccataggccgccaatgcccacgtcggattgctcggggtcctaccataggtccggatcgtggctccccctcctgtccctactatgccaccacgcacgggagcatgggagggcgcctcggtgtcgcccctgccaccgtctacgacctcacaccaccactgccctccacatggctgcccattgctgccgccgcgggcacgggcgcgaagctactgggagtgggggttcttgctgccttggttgttggctttagctacgggtgctccggtggtgcccatcgcgcccacgctatctttgtcgttgccgtccttcacggtctcagctctcctaaagcacctattgagctcgtagttggggtgtcagtctctctcgggtttcctccacccatcggtttcacgagactgtattgaaagtgaaatgtgccttgggccatttctaagtattttggtgatttagtttcaaacacaagtgcttaagtgtaaaatggtggacaaagtacaaaccaaggataaaggtatgtttctcagacttagtacattgttttatggactaatgtattgtatctaagtgctggaaacaggaaaaatctaattggaaatatcttggctcgagcagccaagaatctgctcagtctgggagcaccggactgtccggtggtgcaccggacagtgtccggtgcgccaggctggttcgagcgaagtggccgctctcgggaattcaccggcgacgtacggctataattcaccggactgtccggtgtacaccggactgtccggtgagccaacggtcggccgcgcgatctgcgcgggacacgtggccaagccaacggctagaagggggcaccggactgtccggtgcgccaacggctccaagtctgccaacggtcggtttcgccatgtaaggaaagaaatcaggcacccgacagtgtccggtgtgcaccggactgtccggtgcgccagacgacagaaggcaagaattgccttcccagattgctctcaacggctcctagctgccttggggctataaaagagacccctaggcgcatggaggagaataccaagcataccttgagcactcttgatcactcacactctattcttgcgcacttgttcgacattctagtgatttgagctccgttctagtgtgctagtctcttgagctcaagtctgggtcttgtgtgtgcgtatttgctgtgatctttgtgtcttgtgtgagttgctaatcccccccttactccgtgcttctctgtgaacttcaagtgtaagggcgagagactcctagttgtggagattcctcgcaaacgggattaagaaaagcaaagcaaaacaccgtggt

SEQ ID NO: 117228 - DNA, 1935 bp, Zea Mays
gagctgtccctgcctgtgttcttgcctcttgcctcttgcgccttgctagcttgcttgcctccctgctccctcctcctccctcttcctcgtcgcttctctgattcttcctggcctttgccggagcaaggctaggcgcgaggagagggtgctgtgctcagccagaggtcatcggcgctacgcgagcgcactgcctgttgtgctgcactgccggagtatcaggggaaaacgctgaaatcatggaaatcaccttattgcatgatgaatctgatgcaggaagcaccagtttgctaccgccattgttgtcatatggtccaagatcaatggttccaatacaagtaccatcgtcatcagaccttgagagtatcctgtcaccagatccagtctgcagtgatcttcagttgaaagagataaactacaatgctgcagcaatggatgaaagcactgagctccttcacttgattcttggtggcaatgatgaaggatacaataccacaactgaattacaagtttgggatgttctggacttctatgtctcagaaaacttctcggctctccaatttgatagtttgatgggttttacaaatgaagttagtacttcctacaatgattgtatgaatttagttgacatggtagagtggcccgtggctcgtctgtctctagatgatacaccaaaactcagtaacagtgatgatgcggttctggcagacaatgtcacaacggaccctgatgaaacatccttataccttcgtacaaaaccaacagattcagaaactgaaagtagctctgacgcaggagatgttgaaactgaatatctagatcaaaagctactttctagatgtctgcctgatttaatggatgttgactcgcccaaccacttactgaaaacaccagtgagaacaaaacatgtgactcttgtgcttgatttggacgagactcttgtacattcaacattggatcagtgcgacagtgctgattttaccctagaagttttcttcaatatgaaaaatcacacagtgtatgtgaagaaaaggccttacctgaaagtgtttcttgagaaggttgctcagatgtttgagcttgtcattttcacagctagtcagagaatctatgctgagcaacttatagataaacttgatcctgatggaaaatatatctcacggcgtatttatcgtgaatcttgtatattctctgacggttgctatacaaaggatctgacaatcttggggatcgacttggcgaaagttgcaatagttgacaatactccacaggttttccagttgcaagtggataacggcataccaattaagagctggtttgatgaccccgcagaccaggaattaatcgagttactcccgttcctggagagcctcgtggactcagatgacgtgaggccaataatttcgaaggccttccatgacaaacctgagtagaaatagtcctggagagctggagaggttcactggaattaatccagtgaacctctcgctgaagttagcttcgctccacacggtgcaggccattcttgggaagttaggtataggatcaagattcaccatttatgttatgttagctgttacaaatagcaagcataaactgcggtcgtcgatgaaaatggcttgtgtgtgtatgtcccttcggtgttccgtgtcacagatcattgtacagagacgaacaatagtgctgaataaagtgatctgagtgcaattttgctcatgaggacggctcgagcaggaagccgtgcttctgttcataataacgtgaattatgttaggacgtatgcactaaccagtttaatttaatagaaaaagttagccaatccatttatacactccaacattagtcaatccatttgtacacttcaacattagtcaattcatttatacactccaacattagtcaatccatttatagaaagacgtaaacatggaaataaaa

SEQ ID NO: 117229 - DNA, 1925 bp, Zea Mays
gagctgtccctgcctgtgttcttgcctcttgcctcttgcgccttgctagcttgcttgcctccctgctccctcctcctccctcttcctcgtcgcttctctgattcttcctggcctttgccggagcaaggctaggcgcgaggagagggtgctgtgctcagccagaggtcatcggcgctacgcgagcgcactgcctgtttggccttttcctactggaactgcagtactttgaacatgctttttgcaaatacttgcactaaggatgaataaaatgttaagcaacgactgtttagggacacaggagcctcatacattttgcaagaccactgaaacactggaacattcacaccctcaagaggttacacttgataaaacggtggcggggtcaacgctaataagtcatcaaaatgtgtgctgcactgccggagtatcaggggaaaacgctgaaatcatggaaatcaccttattgcatgatgaatctgatgcaggaagcaccagtttgctaccgccattgttgtcatatggtccaagatcaatggttccaatacaagtaccatcgtcatcagaccttgagagtatcctgtcaccagatccagtctgcagtgatcttcagttgaaagagataaactacaatgctgcagcaatggatgaaagcactgagctccttcacttgattcttggtggcaatgatgaaggatacaataccacaactgaattacaagtttgggatgttctggacttctatgtctcagaaaacttctcggctctccaatttgatagtttgatgggttttacaaatgaagttagtacttcctacaatgattgtatgaatttagttgacatggtagagtggcccgtggctcgtctgtctctagatgatacaccaaaactcagtaacagtgatgatgcggttctggcagacaatgtcacaacggaccctgatgaaacatccttataccttcgtacaaaaccaacagattcagaaactgaaagtagctctgacgcaggagatgttgaaactgaatatctagatcaaaagctactttctagatgtctgcctgatttaatggatgttgactcgcccaaccacttactgaaaacaccagtgagaacaaaacatgtgactcttgtgcttgatttggacgagactcttgtacattcaacattggatcagtgcgacagtgctgattttaccctagaagttttcttcaatatgaaaaatcacacagtgtatgtgaagaaaaggccttacctgaaagtgtttcttgagaaggttgctcagatgtttgagcttgtcattttcacagctagtcagagaatctatgctgagcaacttatagataaacttgatcctgatggaaaatatatctcacggcgtatttatcgtgaatcttgtatattctctgacggttgctatacaaaggatctgacaatcttggggatcgacttggcgaaagttgcaatagttgacaatactccacaggttttccagttgcaagtggataacggcataccaattaagagctggtttgatgaccccgcagaccaggaattaatcgagttactcccgttcctggagagcctcgtggactcagatgacgtgaggccaataatttcgaaggccttccatgacaaacctgagtagaaatagtcctggagagctggagaggttcactggaattaatccagtgaacctctcgctgaagttagcttcgctccacacggtgcaggccattcttgggaagttaggtataggatcaagattcaccatttatgttatgttagctgttacaaatagcaagcataaactgcggtcgtcgatgaaaatggcttgtgtgtgtatgtcccttcggtgttccgtgtcacagatcattgtacagagacgaacaatagtgctgaataaagtgatctgagtgcaattttgctca

SEQ ID NO: 117230 - DNA, 1826 bp, Zea Mays
gagctgtccctgcctgtgttcttgcctcttgcctcttgcgccttgctagcttgcttgcctccctgctccctcctcctccctcttcctcgtcgcttctctgattcttcctggcctttgccggagcaaggctaggcgcgaggagagggtgctgtgctcagccagaggtcatcggcgctacgcgagcgcactgcctgtggacacaggagcctcatacattttgcaagaccactgaaacactggaacattcacaccctcaagaggttacacttgataaaacggtggcggggtcaacgctaataagtcatcaaaatgtgtgctgcactgccggagtatcaggggaaaacgctgaaatcatggaaatcaccttattgcatgatgaatctgatgcaggaagcaccagtttgctaccgccattgttgtcatatggtccaagatcaatggttccaatacaagtaccatcgtcatcagaccttgagagtatcctgtcaccagatccagtctgcagtgatcttcagttgaaagagataaactacaatgctgcagcaatggatgaaagcactgagctccttcacttgattcttggtggcaatgatgaaggatacaataccacaactgaattacaagtttgggatgttctggacttctatgtctcagaaaacttctcggctctccaatttgatagtttgatgggttttacaaatgaagttagtacttcctacaatgattgtatgaatttagttgacatggtagagtggcccgtggctcgtctgtctctagatgatacaccaaaactcagtaacagtgatgatgcggttctggcagacaatgtcacaacggaccctgatgaaacatccttataccttcgtacaaaaccaacagattcagaaactgaaagtagctctgacgcaggagatgttgaaactgaatatctagatcaaaagctactttctagatgtctgcctgatttaatggatgttgactcgcccaaccacttactgaaaacaccagtgagaacaaaacatgtgactcttgtgcttgatttggacgagactcttgtacattcaacattggatcagtgcgacagtgctgattttaccctagaagttttcttcaatatgaaaaatcacacagtgtatgtgaagaaaaggccttacctgaaagtgtttcttgagaaggttgctcagatgtttgagcttgtcattttcacagctagtcagagaatctatgctgagcaacttatagataaacttgatcctgatggaaaatatatctcacggcgtatttatcgtgaatcttgtatattctctgacggttgctatacaaaggatctgacaatcttggggatcgacttggcgaaagttgcaatagttgacaatactccacaggttttccagttgcaagtggataacggcataccaattaagagctggtttgatgaccccgcagaccaggaattaatcgagttactcccgttcctggagagcctcgtggactcagatgacgtgaggccaataatttcgaaggccttccatgacaaacctgagtagaaatagtcctggagagctggagaggttcactggaattaatccagtgaacctctcgctgaagttagcttcgctccacacggtgcaggccattcttgggaagttaggtataggatcaagattcaccatttatgttatgttagctgttacaaatagcaagcataaactgcggtcgtcgatgaaaatggcttgtgtgtgtatgtcccttcggtgttccgtgtcacagatcattgtacagagacgaacaatagtgctgaataaagtgatctgagtgcaattttg

SEQ ID NO: 117231 - DNA, 1818 bp, Zea Mays
gagctgtccctgcctgtgttcttgcctcttgcctcttgcgccttgctagcttgcttgcctccctgctccctcctcctccctcttcctcgtcgcttctctgattcttcctggcctttgccggagcaaggctaggcgcgaggagagggtgctgtgctcagccagaggtcatcggcgctacgcgagcgcactgcctgtgagcctcatacattttgcaagaccactgaaacactggaacattcacaccctcaagaggttacacttgataaaacggtggcggggtcaacgctaataagtcatcaaaatgtgtgctgcactgccggagtatcaggggaaaacgctgaaatcatggaaatcaccttattgcatgatgaatctgatgcaggaagcaccagtttgctaccgccattgttgtcatatggtccaagatcaatggttccaatacaagtaccatcgtcatcagaccttgagagtatcctgtcaccagatccagtctgcagtgatcttcagttgaaagagataaactacaatgctgcagcaatggatgaaagcactgagctccttcacttgattcttggtggcaatgatgaaggatacaataccacaactgaattacaagtttgggatgttctggacttctatgtctcagaaaacttctcggctctccaatttgatagtttgatgggttttacaaatgaagttagtacttcctacaatgattgtatgaatttagttgacatggtagagtggcccgtggctcgtctgtctctagatgatacaccaaaactcagtaacagtgatgatgcggttctggcagacaatgtcacaacggaccctgatgaaacatccttataccttcgtacaaaaccaacagattcagaaactgaaagtagctctgacgcaggagatgttgaaactgaatatctagatcaaaagctactttctagatgtctgcctgatttaatggatgttgactcgcccaaccacttactgaaaacaccagtgagaacaaaacatgtgactcttgtgcttgatttggacgagactcttgtacattcaacattggatcagtgcgacagtgctgattttaccctagaagttttcttcaatatgaaaaatcacacagtgtatgtgaagaaaaggccttacctgaaagtgtttcttgagaaggttgctcagatgtttgagcttgtcattttcacagctagtcagagaatctatgctgagcaacttatagataaacttgatcctgatggaaaatatatctcacggcgtatttatcgtgaatcttgtatattctctgacggttgctatacaaaggatctgacaatcttggggatcgacttggcgaaagttgcaatagttgacaatactccacaggttttccagttgcaagtggataacggcataccaattaagagctggtttgatgaccccgcagaccaggaattaatcgagttactcccgttcctggagagcctcgtggactcagatgacgtgaggccaataatttcgaaggccttccatgacaaacctgagtagaaatagtcctggagagctggagaggttcactggaattaatccagtgaacctctcgctgaagttagcttcgctccacacggtgcaggccattcttgggaagttaggtataggatcaagattcaccatttatgttatgttagctgttacaaatagcaagcataaactgcggtcgtcgatgaaaatggcttgtgtgtgtatgtcccttcggtgttccgtgtcacagatcattgtacagagacgaacaatagtgctgaataaagtgatctgagtgcaattttg

SEQ ID NO: 117232 - DNA, 1893 bp, Zea Mays
agtgtgccgccacagtgcagctgctgcttcctcctacagctaccccgtggacccacccaccaaaaccttgcgagttccgccgccatggcgaccggagcactgttacagccgtggagcttgctcggttttcttgcggcgctcgcggcgctctggtgggcgtgccgggtgctgcagtcgaccctgatcgtcccgcggaggctcggtcgggccctgcggtcgcagggcctccgcggcacgacgtaccgcttcccgttcggcgacctcaaggagctcgcgcggttggccgtggctgcccgggccaaggccatgccgctctcgcacgacatcacgccgcgcgtgaatcgcctctactacaacgtcatcggggaacatggtaaagtctccgtcacttggctcggtcccacgccaagggtgatcgtgaacgaccccaagctggtgcgggagatcctggccaacaagcttggtcacttccagaaacgcaagcacgacggcatcgtcaggcggctggccagcgggctggtcaaccacgagggcgagaaatgggctgcgcaccgcaagctcatcagcccggcctttcacctcgagaagctcaagaaaatgttgcccgcgtttgcttcgtgctcagacgagttgatagctagatgggcgggttacgtggggtccgacggagcgagggagatagatgtctggccggagttccagaacctcaccggcgacgtgatctcgcgcacggccttcggcagcagcttcagcgaggggaggaggattttcgagatacagtgcgagcaagttcagaatctagtgaagttgatgaacacactgtacctcccaggtttcaggttcctgccaacgcagctaaacagaaggctgaaggcgaacgcgcgagaggtccaggcgctcctgagaggcatcgtcagcaagcgggagcgggccatgaaagaaggccgtgccaacaacgacgacctgctgggcgtgctgatggagtccaacatcgctgagaccagacaggacgggagctccgagccagtcatgaccatggacgacatcatcggggagctgaagctgttctacttcgccgggatggataccaccgctgtgctgctcacgtggacgatggtcgtcctgagcgcgcacccggagtggcaggagcgagcgagggaggaggtccggcgcgtcttcggaaacaaccggccggacctggacggcatacagcagctgaaaaccgtgaccatgatactgtacgaggtgctcaggctgtacccgccggtcgtgcagctcgatcggcagacgcacaacgaggtcgagctgggcggcgtcacgtacccgcccggggtgctgctctcgctgccgatcgtcttcgttcaccacgacaaggacgtgtggggagaggacgccgacgagttcagcccggagaggttcaaggacggcgtctccagggcgtccaaggactcgccggcgttcttcccgttcggctggggtccacggatctgcgtcggccagaacttcgcgctggtcgaggccaagatggcgctcagcagcatcctgcagcacttctcgttcgccctctcgcagtcctacactcacgcgccgttcccggtgtccactctgcagccggaacacggggcgcatctcatgctcaagaaactctagtgcccacatcttttgctcaatttcgacaagcatgctacaacgaactacccaactcttccaagtactttgatactcctatttgatatctgatcttgtgaaagacgtagaaatttacatttagcctatctcgagcagcttactttttctcatctctcatttgaaaccacactatacaattacagacagtgtttctatagtattttgcacagatatatacagatatactggtcatagccttaggac

SEQ ID NO: 117233 - DNA, 852 bp, Zea Mays
agtgtgccgccacagtgcagctgctgcttcctcctacagctaccccgtggacccacccaccaaaaccttgcgagttccgccgccatggcgaccggagcactgttacagccgtggagcttgctcggttttcttgcggcgctcgcggcgctctggtgggcgtgccgggtgctgcagtcgaccctgatcgtcccgcggaggctcggtcgggccctgcggtcgcagggcctccgcggcacgacgtaccgcttcccgttcggcgacctcaaggagctcgcgcggttggccgtggctgcccgggccaaggccatgccgctctcgcacgacatcacgccgcgcgtgaatcgcctctactacaacgtcatcggggaacatggtagaattgcactcacgcggcgttgtttgagaagagtttacagttcatatacatttgcacagtaagacaatgaatgcaattgccactttgccagcgaaggaaaataaatatgaattgcaggtaaagtctccgtcacttggctcggtcccacgccaagggtgatcgtgaacgaccccaagctggtgcgggagatcctggccaacaagcttggtcacttccagaaacgcaagcacgacggcatcgtcaggcggctggccagcgggctggtcaaccacgagggcgagaaatgggctgcgcaccgcaagctcatcagcccggcctttcacctcgagaagctcaaggtcactgctcttacagttaaaacagtttatgctagcttgttcttggacggattgatcgattaagagttcgttacatttgccgtcggatgcgatgcttggttgctgcgcagaaaatgttgcccgcgtttgcttcgtgct

SEQ ID NO: 117234 - DNA, 2108 bp, Zea Mays
agctactactcgtactccccccaccgatctagtagtaggtgaaacaacattgcgctccccgtcagcctgcagaaaacgatccagttcgtctcgctgcctagcctgcacgcacaccggccaccgcgcgccacggcctgccagccgaccacgatggcgtccagcggcgaggcagcactgctgggcggctccgtcggcgacgcgcgggcgccgccgctcccgtggaagctgctggcgctgctgtgcgcggcgctcgcggtcgcgtggtgcgccgtgcgcgcgctggagtgggcgtggtggcggccgcggcgcctggcgcgggcgctgcggtcgcagggcctctgcggcacgtcgtaccgctccctcgcgggcgacgcgccgctgacggaggagctgaaccgggaggccaggtcccggcccctgccgctgggctgccacgacgtcgcgcccagggcgatgcccttgttccaccagaccatgaaggagcacggcaagacgtcgatcacctggttcgggccggtgccgagggtgaccatcaccaagcctgagctggtgcgcgaggtgctgtccaacaagttcggccactacgagaagctcaagttgcgcaagctccagaggatgctgcacaacggcctgggcagccacgagggcgacaagtgggccaagcaccgcaggatcatcaaccccgcgttccacctcgagaaactcaagcggatgttgccggccttcgccgcgtgctgcacggacctggtggagaggtgggaaggcctggtcgcggatgggcagcagccgtgcgaggtggacgtgtggcctgagatgcagaacctgacgggggacgtcatctctcgcgccgcgttcggcagcagctacctcgaaggcaggaggatcttccagctccagggggagcaggtccagctcgtcgtccaggccatgcacaagcttcacatccctggatacctgtacctgcccacgaaaaccaaccgaaggatgaagcggatcgcgtcggagatccaggagctcctcaagggcatcatcgccaagagagagaacgcgctgagaaccggcggcggcgcggcgagcgacgacctccttggcctgctcctggagtccaacatggagcactgcaggggtgacggcggcaagtccaaggcctccggcatcaccaccgacgacgtcatcggggagtgcaagctgttctacttcgccgggatggagaccacgtcggtgctgctcacgtggaccatggtcgtgctctccatgcacccggagtggcaggaccgggccagggaggaggtgctccacgtcttcggtgacaggacgacgccggactacgacggcctcagccgcctcagaatcgtgacgatggtgctctacgaggtgctgcgcctgtacacgccgctgacggcgctccagcgccagacgtacaagccgatggagctcggcggcgtcaggtacccggccggcgtgatgctgatgctgccgctgctgtgcatccaccacgacaaggacgtgtggggtcccgacgcgagcgagttcaggccgcagaggttcgccgagggcgtctccagggcgtccagggacgcgccggccttcttccccttcggctggggcccgcgcacctgcatcggccagagcttcgcgctgctcgaggccaagatggggctctccatgatcctgcagcgcttcgcgttcgagctctcgccggcctacacgcacgcgccgtttgcacacggcatgctgcagccggagcacggcgcgcaggtcatgctcaggcgcctcccctgagacgatgatgcatggcccgggcggggttaggttatttgatttgatggcttcatgtgtgcatgtacagcatatatatgtactacgtagtagatgtaaatcatgcaaggaactacacttgcaaggcgcgcttgtgaaaagttgattgcctttctagttactgatgagatgtatctcagttgttacggctggttgagataggcagctacccatattcatggtccggtgtatgtatgatgccttagggcttgttcggttgtccaggattggacctagaattattccagctgataaaatcttatataaaataggtaaacaatccagccagg

SEQ ID NO: 117235 - DNA, 1387 bp, Zea Mays
agctactactcgtactccccccaccgatctagtagtaggtgaaacaacattgcgctccccgtcagcctgcagaaaacgatccagttcgtctcgctgcctagcctgcacgcacaccggccaccgcgcgccacggcctgccagccgaccacgatggcgtccagcggcgaggcagcactgctgggcggctccgtcggcgacgcgcgggcgccgccgctcccgtggaagctgctggcgctgctgtgcgcggcgctcgcggtcgcgtggtgcgccgtgcgcgcgctggagtgggcgtggtggcggccgcggcgcctggcgcgggcgctgcggtcgcagggcctctgcggcacgtcgtaccgctccctcgcgggcgacgcgccgctgacggaggagctgaaccgggaggccaggtcccggcccctgccgctgggctgccacgacgtcgcgcccagggcgatgcccttgttccaccagaccatgaaggagcacggcaagacgtcgatcacctggttcgggccggtgccgagggtgaccatcaccaagcctgagctggtgcgcgaggtgctgtccaacaagttcggccactacgagaagctcaagttgcgcaagctccagaggatgctgcacaacggcctgggcagccacgagggcgacaagtgggccaagcaccgcaggatcatcaaccccgcgttccacctcgagaaactcaagcggatgttgccggccttcgccgcgtgctgcacggacctggtggagaggtgggaaggcctggtcgcggatgggcagcagccgtgcgaggtggacgtgtggcctgagatgcagaacctgacgggggacgtcatctctcgcgccgcgttcggcagcagctacctcgaaggcaggaggatcttccagctccagggggagcaggtccagctcgtcgtccaggccatgcacaagcttcacatccctggatacctgtacctgcccacgaaaaccaaccgaaggatgaagcggatcgcgtcggagatccaggagctcctcaagggcatcatcgccaagatggggctctccatgatcctgcagcgcttcgcgttcgagctctcgccggcctacacgcacgcgccgtttgcacacggcatgctgcagccggagcacggcgcgcaggtcatgctcaggcgcctcccctgagacgatgatgcatggcccgggcggggttaggttatttgatttgatggcttcatgtgtgcatgtacagcatatatatgtactacgtagtagatgtaaatcatgcaaggaactacacttgcaaggcgcgcttgtgaaaagttgattgcctttctagttactgatgagatgtatctcagttgttacggctggttgagataggcagctacccatattcatggtc

SEQ ID NO: 117236 - DNA, 1976 bp, Zea Mays
aaaagcgcacacacacacaagacacaacaacgctgtgggcttgtacgtggctgtcgatcgcagcacacgtacgtaaactcgaaagcagctaggccggaagcaaaatggacgacgacgtcgtcgtagcagctgcagctgcagctgcagccgcggcggcttcgtcttcgccatcgccgccgtggagcctgctccaggggctccttgcgctgctcgtcgcgtggggggcctaccgggcggcgcagacgttctggctgcggccgcggcggctcggccgggcgctccgcgcgcaggggctcaccggcacggcgtaccgcttcccggcgggcgacctcaaggagaacgcccgcctcaacgacgaggcgcggtccaggcccatgcagccgccgtgtagccatgacgtcgttccccgcgtcatgccgcatctcttcaacaccgtcaaggaccacggcaacatctgtattacctggttcggaccgattcccagggtggtgatcacggaggcagagttagtcagagacatcctatcgaacaagtttggccacttcgagaagttcacgaacaagagtctcgggaagatgatcgccctcggggtggcgagctacgacggcgagaaatgggccaaacacaggaggatcctgaaccccgcgttccatctcgagaagctcaagcgcatgcagccggcgttcttgacgtgctgcaccgagctcattgatcgctgggacaaggaggtcgctggtggttccgacgggtcattcgagctggacgtctggccggagttccagagcctcaccggcgacgtgatctcccgcacggcgttcggcagcagcttcatggaagggcggaggatcttccagctccaggccgagcaagcggagcgagtgatcaaggctttccagtacatatacatcccaggcttcgtgttcttcccgacacccaacaaccggaggatgaaggagatcaacagggagatcgaagggactctgagaggcatgatcgagaagagggagcgcgcgatcgagaacggcgaagcgagcggcgacgacctgctcggcctgctgctgcagtccaacatggagagcgggaaaggcggcctgaggatgagcacggaggacgtggtcgaggagtgcaagctcttctacttcgccggcatggagaccacgtcggtgctgctcacctggacgctcgtcatcctaggcatgcaccccgagtggcaggaccgcgccagggaggaggtcttcagcgtcttcggcagggacaagcgccccgatttcgacggcatcagtcggctcaaaacggttacgatgatactgtacgaggtgctcaggctgtacccgccggcggtgacgctgaaccgaagaacgttcaaagacatgcagatcggaggcatcacgtaccctgcgggggtgatcctggagctccccgtgatcgtcgtccaccacgaccccgacgtctggggcaaggacgcgcacgagttcaggccggagaggttcgccgaggggatctccaaggcgaccaaggaccagcagccggcgttcttcccgttcggctgggggccgaggatctgcatcggccagaacttcgcgctgctcgaggccaagatggccctcagcatgatcctccagcgcttccagttccggctgtccccttcctacacgcatgcgccgtacaccgtccttctgctgcatcctcagcatggcgctccaattattttcgacaggatctgactgcccttgcatgacatcgtcgatcgttgtcagtatgtcacagtgcaaataaactcgtatgaataatattgtgttagggagagtctagttctgtgtatccgattttgaaggtggaaccaaaacataagggtgtaaggctatgtcccggaaaatgagtcgcatgcgagctcgcaaacaccaacagagtccacatgcggatatacatatagaactgtgaagaagaataatgtgctttggaagaaactttacatc

SEQ ID NO: 117237 - DNA, 261 bp, Zea Mays
atgttatgtcgccggtgtacttgcctacgggtcgcctaggatcttttgttggctgctttgtgtagcaggttgttgcctgggcagtggtgtttgtttctttggctggcaatgtctctgtctatcttagtttctgttgtaagacgctggttattcgcttctggaagtgtgttatggacggtggaaggccggttggctcctgttctcctttcctatcttgtgtacctcatgtgtgacatttatttaagtagggggctgtttttg

SEQ ID NO: 117238 - DNA, 1059 bp, Zea Mays
atgtcttctggaggaggagaccaccatggcgtctaccaccagcagcacggccacggccacggccatctcgcccgcgctgacggcgccgagtacgcgttccacggcaacgacgacatggagagcttcttcttcaaccatccggcgtcggcgggcctcgacggaggaggcagcaggacgactggcgccgacgagctcctggcgccgtactccagcatcacggactacctgcaggggctcctggacccctccgggctagctcggcacctcgacgccccgctcaagcacgagctgtctgtcgacgcgagccacgacagccagggcaccagcggcgcgcccggcggtgaagcggcggcgatgcacacgccgaactcgtcggtgtctctctcgtcgagcgaccgggacggggagggccagcagcctcgtcggtgcaagaagggcaggaccaacaaggcggaggacgcggagggggatgagaaagatcagcaggatggggagaattccaccaaagcgaacaaatccaagaagaaggctgagaagaggcagaggcagccgcgcgttgccttcctcaccaagagcgaggtggatcaccttgaggacggctatcggtggcgcaaatacggccagaaggcggtcaagaacagtccttacccaaggagctactaccggtgcactacgcccaagtgcggcgtgaagaagcgcgtggagcggtcgtaccaggacccgtcgacggtgatcacgacgtacgaggggcagcacacgcaccacagccccgccagcctgcgcgccggcggcgcgcacctcttcatgtccagcgcgcacgcgctgccgccgcacctgaccatgccgtcgtccagctttcgcccggacctgaacctgatgagcatgatgcaccccgccatggtgggcgcgaaccctaacatgttcctgccaagtatgcctcctcctcctcatatgtcaacgccatctcctgctcctgatcctcctcttcagcagcaccacttcactgactacgccctcttgcaagatctcttcccttccacaatgcccaataacccgtaa

SEQ ID NO: 117239 - DNA, 1681 bp, Zea Mays
ctccgccatcaactccgcccccggctcccttttgagagaattgacacccatccatccagctcggagcctgggctagctcgcacgggggcttgcctgctgcgtgcggagcggagcggacggccggcgctgcaagggaaggcccgatcgtgtttcgtttcctaccctacctaccatcgtccggttctctccaagccccccctccggcgctgacgatggacggcctccacaccgagctcgcgctggggctgctggagtgcggcgttgttggcagcggaggcgagacagcgccgttcgtggccaagacctaccagatggtgtgcgattcgcggacggacgcgctcgtccgatggggcagggggaacaacagcttcgtcgtcgccgaccccgccggcttctcgcggctgctcctcccctgcttcttcaagcacagcaacttctccagcttcgtgcgccagctcaacacatacgggttccggaaggtgcacccggaccggtgggagttcgcgcacgagtcgttcctgcgcggccagacgcacctgctgccgcgcatcgtgcgccgcaagaagcgcggcggtggaggaggagcctgctcgtccggcggcgatgcgccgcaggccggctgctgtatcagcaccatgggcgaggatcatcgtccggaggcggatccggacgagaagcaggaggcggatgccgaggcggctctgctggaggaggtgcagcggctgcggcaggagcagactgccatcggggaggagctggcccagatgagccggcgcctgcaggccacggagcggcggcctgaccagctcatgtccttcctagacaggctcgcggaggaccccgacggcgtcacgcgcaaccttgtcgagcaggccgccgagaagaagcgccgccgcatgcagctcgcgtcccagtcgcagcccgcccgcccgccgctcccgccggcgccgccgccaccggtgctccacccgctgctggcgctcggaggcgccgccgccaagggcctggacggctggcagtgggcggagctgcagaagccgtccgttgtgctccccgccttcgatttcgatcccgccgccagctgctgcggggcgcagcatgcgccgaatctcggcggcgccggcatcatcggcatgggcctgactgctgatgagaccacggtagagacccccttcccgttctgcctgctcggccagggtttcttttgacctgctgcttgctggtacggtggggtgaatcatgcacgtgcacgttctaccgttaccctacccccgcgctcgatctgctttactgctgcctactgttaccattcagtcactgctcatcctcctacaaccatgtcctctgcaaaccattgttctgcttgctctgcacatcggcatgacgacgtctgatgatgctagctatccacaaatgagcacaggctatcgcatgctactactgcatctactgtatgtaaccttagagctaaacttgatcgttggatgatcatgtccatcattagttctagtgattagtccttgcattttgtttggttggacttggacatattgctagtagctaggcctagtggagaagttcttcgatcgtgtcctccaagtctgtattgtagggccgcttttcaagggattaaacaaagctcgccgcactttggcgttcgtgcattatttacttttgctgc

SEQ ID NO: 117240 - DNA, 666 bp, Zea Mays
atgaccaccacgactactataggcacctcccaagactgtatcagaaactctcatagatgcatcctccaagccatacacatcgtcataagtacgaccacgaccaccaccactgatgttgcaatgttgagcaacatggctaacaaaatgagcaacaccatggccaccaccttggatgttgagctcgtgaacaccacgactaccaccatggctgattgcatcacgcacaacattgtattcaacaccgtggggtggatcagtgatgaccccaacataccaatgaaggagacgttggtgttgaggtccaacaattgggagttgaggtcgaggtcgtcaattcaatccgagacacgacaatgtccaccagtaaattggttgaaggatgagggtgtactatgtgcaccaaagagattgcgagctgtatttgtcaaacttgagaaattccaagggaaactggtctcttcatcctcaaaacgtggatccgtgtcttcagcatgctggtggcaaaacaacttcagatccttggcatggcacagacctaggaaaccaccaaccaataggggctgccgcaacaacaaagagggccttagagcaatgaacaaggctgtagcagcaacaaaggggaccaccaatcaacatggccacaacgcggatcttgggacacaatag

SEQ ID NO: 117241 - DNA, 2635 bp, Zea Mays
gagccgctcctccgcctcccgttgtcccctccaccagtcctcttcgggcctcagccttctcccccttacccctctccacacggcgtcgccccctcccatttcgccggcatcgacgatgaacggcggcggcgggcggcggcggtactcctcggagcagctcctcttcgacgttccgtccaatgccggtgccggccggtgggcacagcagtccggtggagtgcggcgcggggacggagagatcttcgtgtcggtggagccagcaacgccggcgcggctgcgcggaggggacgccgcggctggggactcgccgggacagaggcagcagctcagtcccgggttgctcgatctccatgctttcgacacggagctaatcccggattttcaagtaccagggatgtatgatggtgcccaaaagtttggctatggaggaggtctagatgaatctgatatgagattcacagcaaacaagctgatgagcaagtctgctgtttttcctgatggtaactacctgaaggccttcacagagaaagagaaggcagcacctgtcgcgaaaatcaaagtggtggtgcgcaaaagaccacttaacaagaaggaagtatcaaagaaggaagaagatatcatagacattgaacaaagatcaaactctttgactgtacatgagactaaacttaaggttgatcttactgaatatgtcgaaaagcatgagtttgtattcgatgccgtcttagatgaagatgtttcaaatgatgaggtttatcgtgaaacagtggagcctgtggttccttcaatttttaatcgaacaaaggcaacttgttttgcttatgggcaaactggcagtggaaagacatataccatgcgtccccttcctcttaaggcttcccaagatatcttgaggttaatgcaccatgcatatcgaaatcaaggatttcaattgcatgttagcttctttgagatatatggtggcaaattatttgaccttctcaatgataggagcaaactttgcatgagagaggatgcaaagcaaaaggtttgtattgttggtttgcaagagtatagagtgtccgatgtagagactatcaaggagttgattgaaaaaggcagtgctaccagaagtactggcacaaccggtgcaaatgaagagtcctcaaggtctcatgccattcttcagcttgctattaaacgccgtgtggatggcaatgactccaaaccacccagacctgttggcaagctgtcatttattgaccttgctggcagcgagcgtggtgctgatacatctgacaatgataaacaaacaagaattgagggtgctgagatcaataaaagtttgcttgctttaaaggaatgcattagagcacttgataacgatcagactcacattcctttccgaggtagcaaattaactgaagtcctgcgtgactcattcattggagactcacgcactgtcatgatatcatgcatttctcctagttctggctcttgtgagcatactctgaacacattgagatatgcagacagagtgaagagtttgtcaaagggaagcaatgccaagaaagatgtgtctttggcagtgcctttaagagagtcgagcccttccccactgccttcagttgtaccctcattctctgcatctgaggtgatgaatgatatcaccgagagaaacaattttggttggcccaagcagcagtatgttaaagaacggcctgctccgacatttgttgaacgaatgcccaaagtgaaggatgccgtggagttcgcaacatcagacggtgcttatttgaagggacaaagaagccagggctgtatggcaccaaatatagctgaaataccggatacaatgtaccagcagagaaggcaaccagcaaggaaggctaaagataccgctttgcggaataatatgagaaattccgttgcttacccaactagaagtgttgagccagacgaagatgatcatctgaataatcttctccaggaagaggaaggcttggttagtgctcatagggagcaggttgaagcgactctggacatcctcaaagaggaaatgaacatattaggcgaagcggatcagcctggcttccaacttgacgactacaacattacgagactaagcagtatactctcgcagaaggcggctgggattgtggacctacaggctcggttggagcagttccagaggcttttggatgagaacaatgtgctgctatatgctcagagcccccggttgtagttccatctgttgccttcatggcaccgtaaaaggtgggcatcggtggcttctaccagcgcctcaggtggcatcatatgcggtatcggcatgtcgctgtggccatgacccatgatgctgcaatttgtttttaacccataggtgccggtgaaacgcaaactagatggctagttcacagcctgttgccatggttctttggcatggccggccccgcaacctattttgtactagagttgctccattcttgtctttccgcgctccatccttaatccaatgtgtatatcttgtatttgtccgtgtcacatgagtgctctgttatttgtagctcaacaaatacatttttttacctttctgatgtatgaagttttccagagtgtacggtatcatccagttacacacatacttttgccaagt

SEQ ID NO: 117242 - DNA, 2711 bp, Zea Mays
gagccgctcctccgcctcccgttgtcccctccaccagtcctcttcgggcctcagccttctcccccttacccctctccacacggcgtcgccccctcccatttcgccggcatcgacgatgaacggcggcggcgggcggcggcggtactcctcggagcagctcctcttcgacgttccgtccaatgccggtgccggccggtgggcacagcagtccggtggagtgcggcgcggggacggagagatcttcgtgtcggtggagccagcaacgccggcgcggctgcgcggaggggacgccgcggctggggactcgccgggacagaggcagcagctcagtcccgggttgctcgatctccatgctttcgacacggagctaatcccggattttcaagtaccagggatgtatgatggtgcccaaaagtttggctatggaggaggtctagatgaatctgatatgagattcacagcaaacaagctgatgagcaagtctgctgtttttcctgatggtaactacctgaaggccttcacagagaaagagaaggcagcacctgtcgcgaaaatcaaagtggtggtgcgcaaaagaccacttaacaagaaggaagtatcaaagaaggaagaagatatcatagacattgaacaaagatcaaactctttgactgtacatgagactaaacttaaggttgatcttactgaatatgtcgaaaagcatgagtttgtattcgatgccgtcttagatgaagatgtttcaaatgatgaggtttatcgtgaaacagtggagcctgtggttccttcaatttttaatcgaacaaaggcaacttgttttgcttatgggcaaactggcagtggaaagacatataccatgcgtccccttcctcttaaggcttcccaagatatcttgaggttaatgcaccatgcatatcgaaatcaaggatttcaattgcatgttagcttctttgagatatatggtggcaaattatttgaccttctcaatgataggagcaaactttgcatgagagaggatgcaaagcaaaaggtttgtattgttggtttgcaagagtatagagtgtccgatgtagagactatcaaggagttgattgaaaaaggcagtgctaccagaagtactggcacaaccggtgcaaatgaagagtcctcaaggtctcatgccattcttcagcttgctattaaacgccgtgtggatggcaatgactccaaaccacccagacctgttggcaagctgtcatttattgaccttgctggcagcgagcgtggtgctgatacatctgacaatgataaacaaacaagaattgagggtgctgagatcaataaaagtttgcttgctttaaaggaatgcattagagcacttgataacgatcagactcacattcctttccgaggtagcaaattaactgaagtcctgcgtgactcattcattggagactcacgcactgtcatgatatcatgcatttctcctagttctggctcttgtgagcatactctgaacacattgagatatgcagacaggtgagtacttttctccattgtttctgttgctataactgctcatattcttataatatgcacaagacattctcattttttagagtgaagagtttgtcaaagggaagcaatgccaagaaagatgtgtctttggcagtgcctttaagagagtcgagcccttccccactgccttcagttgtaccctcattctctgcatctgaggtgatgaatgatatcaccgagagaaacaattttggttggcccaagcagcagtatgttaaagaacggcctgctccgacatttgttgaacgaatgcccaaagtgaaggatgccgtggagttcgcaacatcagacggtgcttatttgaagggacaaagaagccagggctgtatggcaccaaatatagctgaaataccggatacaatgtaccagcagagaaggcaaccagcaaggaaggctaaagataccgctttgcggaataatatgagaaattccgttgcttacccaactagaagtgttgagccagacgaagatgatcatctgaataatcttctccaggaagaggaaggcttggttagtgctcatagggagcaggttgaagcgactctggacatcctcaaagaggaaatgaacatattaggcgaagcggatcagcctggcttccaacttgacgactacaacattacgagactaagcagtatactctcgcagaaggcggctgggattgtggacctacaggctcggttggagcagttccagaggcttttggatgagaacaatgtgctgctatatgctcagagcccccggttgtagttccatctgttgccttcatggcaccgtaaaaggtgggcatcggtggcttctaccagcgcctcaggtggcatcatatgcggtatcggcatgtcgctgtggccatgacccatgatgctgcaatttgtttttaacccataggtgccggtgaaacgcaaactagatggctagttcacagcctgttgccatggttctttggcatggccggccccgcaacctattttgtactagagttgctccattcttgtctttccgcgctccatccttaatccaatgtgtatatcttgtatttgtccgtgtcacatgagtgctctgttatttgtagctcaacaaatacatttttttacctttctgatgtatgaagttttccagagtgtacggtatcatccagttacacacatacttttgcc

SEQ ID NO: 117243 - DNA, 1745 bp, Zea Mays
actttttcgcgaagtttgtgttgtgattgcgccgttacgttacgtgaagaagacggatcttctacaagctgacggaagggcggatcgtgaaattgcgagttgcgacgccgtcattacaaatacgttatctgttcatccgtcaagccgtcagatctcccggcctgaggattcgattattctgttcgctctcgcccaagtcatcgtctggtcgtcgcccgcagaggcgcagacgcccaaaaccggaaggggcgccatggccgcgtcggatctggagagcaaggccaaggaggccttcgtcgacgacgacttcgagctggccaccgagctctacagccaggccatcgacgccgggcccgccaccgccgacctctatgccgaccgcgcccaggcgcacatcaagctcggcaactacactgaggctgtggcggatgctaacaaagcaattgagcttgatcctatgatgcataaagcttactaccggaaaggtgctgcatgcattaagcttgaagaataccaaactgcaaaggctgctcttgagttgggttcttcttatgcatcaggcgattcaaggtttgctcgtctattgaaggaatgtgatgagcgcatcgctgaggaatctagccaggcaccagtaaagaatgttgaggctactgtggctgctactattgaggacaaggaggatttcacaaatatggagaatacaccaccagtgatagaacccccaagcaaaccaaaatacaggcatgactactacaacagtgccacagaagtggtactgacaatatttgctaagggtgttcctgctgatagtgtagtcattgattttggtgaacagatgttgagtgtatccattgaagttcctggtgaagaaccataccattttcagccccgtctgttttctaagattatccctgagaaatgcaaatatcaagtcttatccaccaaggtcgaaatacgccttgcaaaagctgagcaggtgacatggacaaccctggattatagtggaagaccaaagactgttccccagaagataagcacgccagctgaaacagccccaagaccttcatacccatcttcaaaggcgaaaaaagactgggataaactggaagctgaagtcaaaaaggaggagaaggaagaaaaacttgatggtgatgctgcattgaacaaattcttccgtgacatctacaaggatgctgatgaagatatgcggagggccatgatgaagtcattcgtggaatcaaatggcactgttctctcaaccaattggaaagatgttggagcaaagaaggtagaagggagcccccctgatggtatggagctcaagaagtgggaatactaaagtttggactgcccatcttttgtaaatccaggtcttggaaactatgacctaattccgtccacccatagtgccatgagcttgcttggttaagtctctgcttttgtaagctttctgtatgacagtctagcgtgtgtctgagtgctacttgccgtagcttttgatggacataggtatgctattatgtggtatcgaccgggaaccatctgtggtatcaaagacagcaaactataatgtatggaatgcctattctttttggtctaagatgtttttcttgtcagcgtagtgtgatcttcacaactgaataatagaaactatgcagggacctatgttacagtggtccaccgttggcacagttgcatttgcgtctctttggtggatgaattgaatttatgggaaaattgatttc

SEQ ID NO: 117244 - DNA, 816 bp, Zea Mays
cgtccgcatcagggacacactgcctccgatccgcatgcggcaagatcctccctcattctccaaacatgagaggagcagaggaggagagatctggcaccgccactgatgcgggaggagaggaggagaaacaggagaggagcgtcggcctgatggccggcctcatggacaaggccaagggcttcgtggtggagaaggtgatgcaaatccccaagcccgaggctgccctggatcacgtctccttccggagcatcagccgcgagggcgtcgagctgcatagccacgtcgacatcagcaacccctactctcaccgcatccccatctgcgagatcacctacacgttcaagagcgccggcaaggtgatagcgtcgggcacgatgcccgaccccgggtggatcgcggcgagcggcagcaccaagctagacctgccggtgaaggtgccgtacgacttcatcgtgtcgctgatgaaggatctcggaggggactgggacatcgactacatgatggaggtggggctcactgtcgacctccccgccattggcgcctttactatcccgctcaccaccgagggcgagatcaagctccccaccttccgggacctattgttctaagcaattcagatatttggtgtatgaatcgatttgttttcacaccataatcaatgctgatgtggatttgcaatatttgtggatttctttatgtggtcagggattttaaagttaaaactatctcacaccaatgtgaaatagaggagtttaagcctgcccatcacaaaaaatctaacccgatgtagcaaacgtggcccctatgcataacctt

SEQ ID NO: 117245 - DNA, 1443 bp, Zea Mays
agattcaccaccccaaacgcagccaaagccccaaagcgggctcgcgcggccgtgcctcccactcccacccacggacccaccgcccacgcacgcacgggcgtgcggccatgcagatcctacgcctcctcgcggcgcggcgcttccgccggcggcggcgcggggtgtccacgatcacctcgacggcgactgcgccggccacccctcgcagcggctgcgtcgccggcgtgtacggatacggcgaggaggaggaggacgagggcccgttcttcgacctcgacctgacctgctgctccgcgcccgcgtccagcgcgggcagccaggcggccgagtcgggctccgagtccgaggacgcctcgtcctgcgccaccgccaccgccgccgccaccgagcgcggcgacctcgactttgtcgtctcgctgcagcggagccgtatctacgatgagccgccgccgccgccgccgccgctcatgttctgcgcgtccgagccgagcccgagcgacggccgccgcagcagcgccagcgccagccgcctcgggagcaggctgcagctgcggacgctcagcttcgggtccgccaaggccgccctctacggcgggcgcgccagcttctcccggagcaccggcagcgcgcgctcggccaggctcttcgccgcgtacgggtacgggtacggctcgcccgaccaggacccgcgggacgaggggaaggccaggccgccctccggcgacgtcatccgccggtacctgagcaagatctccagccggctgcagcgccggcgcggcgcggccactgacctccggctacggaagagccgctcggcctccgcctccgccgcagcggcggcccggcgcgacgactcgctcgtcgagaagcaagacggcatcgccagcgccatcgcgcactgcaaggagtccctccaccgagcgtccgtctcggaggccgacacgtcgctggcgcgatcgcggagtgacccagggccgtaagcagcgtcgacgccgggttgcgccatctgccacgctcgccattccacgctccggagactcctgcggcggcggcggcggccgaagcttctcgctgaatttcgacaaggacgcgaggaaaagacgaggaacttgccggcgcgactgcccgagtacgaactgataaaggatggcttgccaagaacatgcagcggtcggttgaatgagggcggggagtgtctttaggattgtttatgtgtgtgtgagaaggacttctttttcgtgggtttaggcgtggggaaagagagctccttttattaggctcctttaaccaccttttttttgggggttcagttttttttctatcttttcagttcgacgctttttgtacaagaggcttgcaacaggacctgtaattagtagtagctgttaggtaggtggtcagcctcatgcaaatctttcaacatgttcgttcgttgtctcaaca

SEQ ID NO: 117246 - DNA, 1293 bp, Zea Mays
gtaaaaacgtgtagtgcaggaggaggggtgggagaagaagaagaaatcaactgggggctgccggacgacaaccactacggcaaggcagtagagatacggcgtctcctcttctgacttggccagcgcaacggcagctagttcaattgaaccagagcgctttatagatagaacaaaaatatatactgtagaaatccatcgagaaacaaccgagaagacctgcggctgcggtgaagagagaactcagtggtgaagaagagggaaaaatcaccatgctggaccatctcgtcggactgctgaagctgcgcgtggtgaggggggtgaacctcgccgtccgcgacctccgatccagcgatccctacgtcgtcgttcgcatcggcaaacagaaattgaagacacgggtggtaaagaagagtgtcaatccggaatgggacgacgaactcaccctctctatcgaagaccctgctgttcctattagactggaagtttttgacaaggacactttcgtcgatgatacaatgggtaatgcagaggtggacatccgcccattagtcgagattgtgaagatgaaactccaggacgttgccgacagaaccgtggtaaagaaactggtgcccaacagacagaactgcctagccgaggagagctcgatatatatatcggaggggaaggtgaagcaagacatggttgtacggctgaggaacgtagagagcggggaaatagagctccagcttcagtggatcgacctccctggctctaagggtgtatgagtggggggcggctatgagctctgccttgccctgctgttttcgcggatctccaactctttttctacttgaaaagaagaactagtggtttgcgtgcgctcgctcgcgtagagctgtcagttgtatgtaagaagttatgattgcgttggcgtttagtaaaatatcgtcagggagatgtatgtgcatgaacatctgagaatcaagactataaaaatgtgtacaatgcatgtactaaaggagtgtttggtttctatagattaatttttagtccctacattttattccattttagttccaaaattaccaaatatagtaactaaaactttattttaatttctatatttagcaatttatagactaaaatgaaataaaatgtagggactaaacattagtccctataaactaaacaccccctaagttcgtttcgtagacatgctcctcatccaagttaaattaatttctagggttgtcttaagttgcaaaatattaaattgtccaaaatcttgaaaaaagtaagaatgtttatgat

SEQ ID NO: 117247 - DNA, 1432 bp, Zea Mays
caaatgcttgccttgcacaaaataggaaattacgtcgtgattttgtcgcataaaatgggatatttactttgcaaaatgttggtttcgtggtggatttcttgcggggtttagttttttctctatatattatccttttttgttttgaaccttaacaagtgaaatgatttgtttatttgcacactgacatgagcaaactgaatgagaatccataatggatgatgcaggggacacgtttaaggatcttgtgggaagtgcatattatgttgctcccgaggtattgaagcggcactatggggcagaggctgacatatggagtgctggggttattctttacatccttttatctggtgttcctcctttttgggcagagaatgaggatggcatatttgatgctgtcttgcacagtcacattgatttctcttctgatccttggccttcaatatctaatggtgcaaaagatttggttaagaagatgctgcgacaagacccaaaagaacgcctgactgctgctgaaattttgaaccacccatggattagagaggatggagaggccccagataagccacttgacattacggtcatcagtagaatgaaacagttcagggcaatgaacaagctcaagaaagttgcattgaaggttgtggcagagaacttatcagatgaagagattatgggcctaaaagaaatgttcagatccctggatactgataacagtgggacaattactcttgaagagctaagatctggtttaccaaaacttggtactaaaatttctgaatcagaaatcaaacagttgatggaggcggctgatgttgatggaaatggtaccattgattacgcggagttcatatcagccacaatgcatttgaatagattggagaaggaagaccgtatactcaaagcttttgaatattttgataaggaccatagcgggtacataacagtagatgagttggaagaagctctgaagaagtatgatatgggagatgataaaacaataaaagagatcattgctgaagtagatacagatcatgatggaagaattaattaccaggagtttgttgccatgatgaggaacaatacccctgagattgttccaaaccggagacgcatgttctaactgtcatgtacaattttattgaatactttcaagaccaatatgcacccttagacataatcctggccccattttcttttgggaacaactgtaaggactcaatatttttttagatcaatttctctgcagccgggacatatttgtaccaaaataggtggtgttatagtgactcgtacttcgatgtttggagcatcatggactcatgggtggcaatgtttattcccattgtactcggagctctgctttttcagagtgttgccacttgtgaattgttctaatgtgttgtggtcttcgaaatcgttcatcgatcagatc

SEQ ID NO: 117248 - DNA, 1820 bp, Zea Mays
ccgtgcgtcgcgccaccaccgccacgccgccgacgcagacgcagcagtaccagcaggccccgccgccgccgaagccgaagccggcggcggacgcgagggcggtggggcgcgtgctggggcggcccatggaggacgtcaaggcgacctacaccttcggccgcgagctcgggcggggccagttcggggtcacctacctcgtcacgcaccgggagactgggcagcgcttcgcctgcaagtccatagccacgcggaagctcgtccaccgcgacgacatcgaggacgtgcgccgggaggtgcagatcatgcaccacctcaccggccaccggaacatcgtcgagctccggggagcctacgaggacaggcgctcggtcaacctcgctatggagctctgcgagggcggggagctcttcgaccgcatcattgccaggggccactacaccgagcgcgctgccgccgcgctttgccgggagatcgtcgccgtcgtccacagctgccactccatgggggtcttccaccgggacctcaagcccgagaacttcctgttcctcaataacaaggaggactccccgctcaaggccacggacttcggcctctccgtcttcttcaagcccggggacacgtttaaggatcttgtgggaagtgcatattatgttgctcccgaggtattgaagcggcactatggggcagaggctgacatatggagtgctggggttattctttacatccttttatctggtgttcctcctttttgggcagagaatgaggatggcatatttgatgctgtcttgcacagtcacattgatttctcttctgatccttggccttcaatatctaatggtgcaaaagatttggttaagaagatgctgcgacaagacccaaaagaacgcctgactgctgctgaaattttgaaccacccatggattagagaggatggagaggccccagataagccacttgacattacggtcatcagtagaatgaaacagttcagggcaatgaacaagctcaagaaagttgcattgaaggttgtggcagagaacttatcagatgaagagattatgggcctaaaagaaatgttcagatccctggatactgataacagtgggacaattactcttgaagagctaagatctggtttaccaaaacttggtactaaaatttctgaatcagaaatcaaacagttgatggaggcggctgatgttgatggaaatggtaccattgattacgcggagttcatatcagccacaatgcatttgaatagattggagaaggaagaccgtatactcaaagcttttgaatattttgataaggaccatagcgggtacataacagtagatgagttggaagaagctctgaagaagtatgatatgggagatgataaaacaataaaagagatcattgctgaagtagatacagatcatgatggaagaattaattaccaggagtttgttgccatgatgaggaacaatacccctgagattgttccaaaccggagacgcatgttctaactgtcatgtacaattttattgaatactttcaagaccaatatgcacccttagacataatcctggccccattttcttttgggaacaactgtaaggactcaatatttttttagatcaatttctctgcagccgggacatatttgtaccaaaataggtggtgttatagtgactcgtacttcgatgtttggagcatcatggactcatgggtggcaatgtttattcccattgtactcggagctctgctttttcagagtgttgccacttgtgaattgttctaatgtgttgtggtcttcgaaatcgttcatcgatcagatc

SEQ ID NO: 117249 - DNA, 1936 bp, Zea Mays
aatttccacttcagtcgaggccacctcctccccctttcggcacgcagccatgggcaaccgtgcgtcgcgccaccaccgccacgccaccgagcagcagccagagacgccgacccttcccaagccccagatccagccgccgccgccgccgacgcagacgcagcagtaccagcaggccccgccgccgccgaagccgaagccggcggcggacgcgagggcggtggggcgcgtgctggggcggcccatggaggacgtcaaggcgacctacaccttcggccgcgagctcgggcggggccagttcggggtcacctacctcgtcacgcaccgggagactgggcagcgcttcgcctgcaagtccatagccacgcggaagctcgtccaccgcgacgacatcgaggacgtgcgccgggaggtgcagatcatgcaccacctcaccggccaccggaacatcgtcgagctccggggagcctacgaggacaggcgctcggtcaacctcgctatggagctctgcgagggcggggagctcttcgaccgcatcattgccaggggccactacaccgagcgcgctgccgccgcgctttgccgggagatcgtcgccgtcgtccacagctgccactccatgggggtcttccaccgggacctcaagcccgagaacttcctgttcctcaataacaaggaggactccccgctcaaggccacggacttcggcctctccgtcttcttcaagcccggggacacgtttaaggatcttgtgggaagtgcatattatgttgctcccgaggtattgaagcggcactatggggcagaggctgacatatggagtgctggggttattctttacatccttttatctggtgttcctcctttttgggcagagaatgaggatggcatatttgatgctgtcttgcacagtcacattgatttctcttctgatccttggccttcaatatctaatggtgcaaaagatttggttaagaagatgctgcgacaagacccaaaagaacgcctgactgctgctgaaattttgaaccacccatggattagagaggatggagaggccccagataagccacttgacattacggtcatcagtagaatgaaacagttcagggcaatgaacaagctcaagaaagttgcattgaaggttgtggcagagaacttatcagatgaagagattatgggcctaaaagaaatgttcagatccctggatactgataacagtgggacaattactcttgaagagctaagatctggtttaccaaaacttggtactaaaatttctgaatcagaaatcaaacagttgatggaggcggctgatgttgatggaaatggtaccattgattacgcggagttcatatcagccacaatgcatttgaatagattggagaaggaagaccgtatactcaaagcttttgaatattttgataaggaccatagcgggtacataacagtagatgagttggaagaagctctgaagaagtatgatatgggagatgataaaacaataaaagagatcattgctgaagtagatacagatcatgatggaagaattaattaccaggagtttgttgccatgatgaggaacaatacccctgagattgttccaaaccggagacgcatgttctaactgtcatgtacaattttattgaatactttcaagaccaatatgcacccttagacataatcctggccccattttcttttgggaacaactgtaaggactcaatatttttttagatcaatttctctgcagccgggacatatttgtaccaaaataggtggtgttatagtgactcgtacttcgatgtttggagcatcatggactcatgggtggcaatgtttattcccattgtactcggagctctgctttttcagagtgttgccacttgtgaattgttctaatgtgttgtggtcttcgaaatcgttcatcgatcagatc

SEQ ID NO: 117250 - DNA, 117 bp, Zea Mays
caattgggggcacccacacaggtcgcatgaataaacatcggccccgtttggatgggcttattttgggattttggccgccagaagctggaatcccaaccaaacgcctagcttttcttc

SEQ ID NO: 117251 - DNA, 2831 bp, Zea Mays
gtggcctcagcgattttgctgccccccatctcctttttttagcacatcgcttgcgttctctctctggtttcctcctctgctctgcgctccgcttcccaccgctcctcccctgccgtctctcctaccacaaagccgtggcccgtgggcgctgttcgcggcggcgacgggtctctcatctcctctaccctctctcgcgcgcaacggcctaaaaaaaccctagcgactcggtcggcgctcgacttggatcgtgccggggggctaggggcaggggcagctctcttctctcgtcgtcgtccaggacattgttgataacttgatactggattttcttccttctcgaacctgtagagggctctgctttatttgcagattagaccttatatggtttgagtgccacaactgaaactttgcacctaaaacccgaggccaagttcactactttattatatccttccatacacagaaagtggagagacatggatcgtgatgatatagctggtttcgtcagtggaggttgctatgagtcctgaatttctaacccagtatatataacagagttatgatatccagaaggcagacaattgtttcttttcgttttctagttggtttgcatttgatgtttcataattggaatggatacaactactcaaggccttgagtttggtggtggtatcaactctccgaagccatattgctattggagcacaactcaagacactactgtgcacaaagatagtacaccagaggcatattccaccttttctatttccaactcaaaagcgtcaaaaaggaagcaaggtgccatgtctggagcaaaaggtggaaaccctttactcactttgggtctaggctgctcaccaagttcatcttataacagcaagctaagttctggcactgcttgcataacatcatcatctttattaaaggagattgatgaagagtcttcaatagatcttggccttaaccttgggttgtatattggaaatgatattggacactgccaacagaaatcccatgctggttttgaaaatgtgctctcgacaaactctcctaaactggatcttcagttgagtttgtctaccagttcgcctgaatcagttgtcattgatgcaaataggtcaccagatggcttggcgatgccgatggccaattcaccactcgccattgtagaagaaggatcagtaccacatagttgggttttcgagcattcaattgtttcatcatcacatgcttctaaggcaacgcatggctttccattatcaaagaaaaccaatggaggcaatgcctctgtgccttctcatgtcatgtcatcaactatgtttacaagtgtgaaaggtccagttgcctctgcttctgagacaactaactcccaacaacgcaacagtaacgctaaaagctgtcagtttccaggatgtgtgaaaggagcaagaggggcatcagggcgttgcatagcacatggcggcggtaggcgttgccagaaacctggttgtgagaagggcgctgaagggaggacaatctattgcaaggcccatggtggaggcaggagatgtcaatttctcgggtgtacaaagagtgctgaagggcgcacagaccactgcatagctcatggtggtggccgccgctgcagccatgaaggttgctcccgagctgctcgtggaaaatctggcctgtgtatcaagcatggtggtggcaaaaggtgtcagaaggagaactgtaccaaaagtgcagaaggccattctggactctgcattgcccatggtggtggaaggcggtgccagtttccagactgcacaaagggtgctcagggaagcacaaagttctgcaaggcacatggtggaggaaagcgctgcacattcgtcggatgcaccagaggggctgaaggcagcacttcattttgtaagggccatggtggaggcaagcgctgtgcctttcagggcggtggcgtgtgcccaaagagcgtgcatggtggcactcagtattgtgttgcacatggtggtgggaaaaggtgtgctagctttggttgcactaagagtgctagagggcgcacagagtattgtgtgcgccatggaggtggcaagaggtgcaagttcgagagctgcaccaagagtgcgcaggggagcactgatttctgtaaggctcatgggggaggtacacgatgcctgtggggccaggcggacacaagctttggtgctggtgcacagcaatgcgataaatttgttcggagcaagaccggtctctgctcagctcatagtgctttgatccaggaccactgtgttcatggcggtggtacattaggttccgctatctaccagtctgtgcatgtcaaaccgactgagatgatcaatggtgataaaactttactggatccggctatccctgttacaaacagtggtgttcatcctcctgtcctagctcagtctatgatcgatccgctgccagagggcagagttcatggtggtggcctgttggctttactttcgcggggcggaagcagaacaagcgctggtggctcagaattgtgcttcgggcaagatcgtgtggatctgaggctatcaggatctccatgaaactgatgactgcctgcagttttgatccaaattgtgttgctcatgctcgggttccataggatctacccggacgtgtactgtgaatctacccagacgtgtactatgaaaataagagggtagctcctagagcagatgtgttgttttattttagttaattgtttcagtgcatgtaatcacttactttaatgctcatgtttggacttgattaactctcagcaacttaaggttgaaatataatgtgcattttgctgcttattctgctga

SEQ ID NO: 117252 - DNA, 2564 bp, Zea Mays
gtggcctcagcgattttgctgccccccatctcctttttttagcacatcgcttgcgttctctctctggtttcctcctctgctctgcgctccgcttcccaccgctcctcccctgccgtctctcctaccacaaagccgtggcccgtgggcgctgttcgcggcggcgacgggtctctcatctcctctaccctctctcgcgcgcaacggcctaaaaaaaccctagcgactcggtcggcgctcgacttggatcgtgccggggggctaggggcaggggcagctctcttctctcgtcgtcgtccaggacattgttgataacttgatactggattttcttccttctcgaacctgtagagggctctgctttatttgattagaccttatatggtttgagtgccacaactgaaactttgcacctaaaacccgaggccaagttcactactttattatatccttccatacacagaaagtggagagacatggatcgtgatgatatagctggtttcgtcagtggaggttgctatgagtcctgaatttctaacccagtatatataacagagttatgatatccagaaggcagacaattgtttcttttcgttttctagttggtttgcatttgatgtttcataattggaatggatacaactactcaaggccttgagtttggtggtggtatcaactctccgaagccatattgctattggagcacaactcaagacactactgtgcacaaagatagtacaccagaggcatattccaccttttctatttccaactcaaaagcgtcaaaaaggaagcaaggtgccatgtctggagcaaaaggtggaaaccctttactcactttgggtctaggctgctcaccaagttcatcttataacagcaagctaagttctggcactgcttgcataacatcatcatctttattaaaggagattgatgaagagtcttcaatagatcttggccttaaccttgggttgtatattggaaatgatattggacactgccaacagaaatcccatgctggttttgaaaatgtgctctcgacaaactctcctaaactggatcttcagttgagtttgtctaccagttcgcctgaatcagttgtcattgatgcaaataggtcaccagatggcttggcgatgccgatggccaattcaccactcgccattgtagaagaaggatcagtaccacatagttgggttttcgagcattcaattgtttcatcatcacatgcttctaaggcaacgcatggctttccattatcaaagaaaaccaatggaggcaatgcctctgtgccttctcatgtcatgtcatcaactatgtttacaagtgtgaaaggtccagttgcctctgcttctgagacaactaactcccaacaacgcaacagtaacgctaaaagctgtcagtttccaggatgtgtgaaaggagcaagaggggcatcagggcgttgcatagcacatggcggcggtaggcgttgccagaaacctggttgtgagaagggcgctgaagggaggacaatctattgcaaggcccatggtggaggcaggagatgtcaatttctcgggtgtacaaagagtgctgaagggcgcacagaccactgcatagctcatggtggtggccgccgctgcagccatgaaggttgctcccgagctgctcgtggaaaatctggcctgtgtatcaagcatggtggtggcaaaaggtgtcagaaggagaactgtaccaaaagtgcagaaggccattctggactctgcattgcccatggtggtggaaggcggtgccagtttccagactgcacaaagggtgctcagggaagcacaaagttctgcaaggcacatggtggaggaaagcgctgcacattcgtcggatgcaccagaggggctgaaggcagcacttcattttgtaagggccatggtggaggcaagcgctgtgcctttcagggcggtggcgtgtgcccaaagagcgtgcatggtggcactcagtattgtgttgcacatggtggtgggaaaaggtgtgctagctttggttgcactaagagtgctagagggcgcacagagtattgtgtgcgccatggaggtggcaagaggtgcaagttcgagagctgcaccaagagtgcgcaggggagcactgatttctgtaaggctcatgggggaggtacacgatgcctgtggggccaggcggacacaagctttggtgctggtgcacagcaatgcgataaatttgttcggagcaagaccggtctctgctcagctcatagtgctttgatccaggaccactgtgttcatggcggtggtacattaggttccgctatctaccagtctgtgcatgtcaaaccgactgagatgatcaatggtgataaaactttactggatccggctatccctgttacaaacagtggtgttcatcctcctgtcctagctcagtctatgatcgatccgctgccagagggcagagttcatggtggtggcctgttggctttactttcgcggggcggaagcagaacaagcgctggtggctcagaattgtgcttcgggcaagatcgtgtggatctgaggctatcaggatctccatga

SEQ ID NO: 117253 - DNA, 800 bp, Zea Mays
tttccgagtccaagaggggggaaaaactaaagagaaaaaacataagaagccgcagacagaaaagatcaactcgcgcgcggccatttctcatccatcgcgctgcgcatttgcaactcccagtcccacctccggcgcggctgccagccagtagtcagtaggcttgatcatgtcgtcgcggaagcatcacgagctgccggagggaggagcaggaggcagcggcgccggccgcacggcggtgtgggacaccgggagctccctgtacgactcgtacgagctggccgccgtgcgccggctcctcgacaagcgcctcctcgccctccgcgacgacgctgaagagacgaggggcaaggagggcaggcaactggtggtcgtgccggtcgccagcagcagcaggagggtccaccacaggaggaaggccacgctgagggcgctcttcagggcggtggtggccacctgggcggcccggccgaggcaggcgccgccgctcgcctgtgcctgcgctgctggcatggtccgtgatgaccaccagggtggttccgcggtcgagccggaggatctgccgtcccacggtcaactttgatgatcatccatccctgtgtttaggccatctgttcttgcattgcattggcgaagttgttttttttttcttttgtgtttatcgattgctgtgtttttttacgctgtcatgttcatgcgatggttggtcattgagcaaccaaattctgcgtgaagagtaactgagcccaccggatctgtatatgtgaatctgcgtgaagcatacgaaagcttttggcggtgaa

SEQ ID NO: 117254 - DNA, 271 bp, Zea Mays
atgaaaatattcgagcatgtcagagatttagattgctatcctaatgtctcaatcgcttatcgagtattatttactatgcctgtgacggttgcatgttgagagaagcttttcaaaattgaaattattgaagaactatttgagatcaacaatgactcaagatagattaaatggtttggtaattttgtgcattgagaagaagttgttggatgagattgatcttaatggtataatcgacaactttgtatcacaaaatgttagaagaaatttttag

SEQ ID NO: 117255 - DNA, 123 bp, Zea Mays
acattttcaatttaaatttatattttgaattcaaatttaaactaggattcttcactcccctcaaatgtatcactaaaaaactccagcatgagtgcataacttatttatagttcatccactaat

SEQ ID NO: 117256 - DNA, 477 bp, Zea Mays
atttgaacaacccctgcatctccctcgccccgctcccctctctctagcgcctccctgccctcgggcacgaccaaccctttccggcggcgcagctccgcccttggctctcctgcgcgcagctcggcgtggcgtggcccggctccggcgagcggtcgaagaaaccccgacgccaagcaccttccccaccggagcttcgctgacctgctgtccatgttttccctcgccgttcttcatcgtgatggtctggtgagttcgtgcgtgcgcagcagacgagggagaagagaattgtgaaggagtgagcagttggtggagagaaaggagatgctagccacaccagatctcacatctaaagattttctgtggctgcacctcgtgtgaccctttttgtgactgtgatccgtttccgagcttcgagggatcgatgatcaagcttggcgaccaagtgatcgaactcttcgagttctacgaggatgaaga

SEQ ID NO: 117257 - DNA, 475 bp, Zea Mays
atttgaacaacccctgcatctccctcgccccgctcccctctctctagcgcctccctgccctcgggcacgaccaacccttttcggcggcgcagctccgcccttggctctcctgcgcgcagctcggcgtggcgtggcccggctccggcgagcggtcgaagaaacccggacgccaagcaccttccccaccggagcttcgctgacctgctgtccatgttttccctcgccgttcttcatcgtgatggtctggtgagttcgtgcatgcgcagcagacgagggagaagagaattgtgaaggagtgagcagttggtggagagaaaggagatgctagccacaccagatcccacatctaaagattttctgtggctgcacctcgtgtgaccctttttgtgactgtgatccgtttccgagcttcgagggatcgatgatcaagcttggcgaccaagtgatcgaactcttcgagttctacgaggatgaa

SEQ ID NO: 117258 - DNA, 2308 bp, Zea Mays
aacgcggacatggtggctaccgtcgctgccgcgggcgccgcggcggcggcggcgtcggggcggcgccgcggggccaggagggagccggcgaccatgcacgccggcatccggcgctcgcgctccgagccgcacctccgctgcccccgccgcgggggcgcggcgggcgccgcgctcaccaccagccgctccatcggcgtcttcccgttccagttcggcgccgcgccgctgcgcccgccgccgctgcccgacggcggcggcgacggctcccgcctcctcaccgtcgccgacgacgccgacccgccggagccctgcccggaaatgccgcccgccaggaggcccgaggcgcactggctcgaccgcctcctggaggtccgctcccgcttccacgacccgacctggcgcgacgtcctcgaccacgacgacgacgacgacgacgaggacctctaccgcctcgacgctgaccaccaccacgacggcgggtgcggcgtcagctacgaggacgacggcgaggaggaggacgccaggtgggaccgcgactccttcgccaagctgctggcgcgggccccgctcggagaggcgcggctgttcgcgcagctggccttcctctgtaacatggcctacgtcatccccgagatcaaggtcgaggagctgaagaggcactacgggttgcggttcgtgacgtcgtctctggagaagaaggcggaggccggcatcataagcgccaagctggacgcggactccacgcggccgcgcaccgcgccggcgtacgaggtggcttccggcccacagccgcgccggcccatccggtcgtcgcacctggcctacgaggtggcggcgtcggccgcgtcctacgtccacgcgcgcgcgcgcggcctgctctcgttcggcgcgccgacgcggcagcagcagcaggcagcgggtcagggcaggctgtacaactcgggcgtggccgcgtacatggccgcgtcgacggtgacggcggtggtggccgccgaggacgaggcgcggcaggaggcggcccgcgacctgcggtcgccgctgtcgtcgccgtgcgagtggttcgtgtgcgacgaggcggacgcgcggacgcggtgcctcgtcatccagggctccgactcgctggcgtcgtggcaggccaacctcctgttcgagcccaccgagttcgagggcaccggcgtgctggtgcaccggggcatctacgaggcggccaagggcatctacgagcaggtcatgccggagatcgaggcgcacctgcgggcgcacgcggggcgcgcgccgccgcggctgcggctcacgggccactcgctcggcggcagcctcgcggtgctggtcagcctcatgctgctggcgcgcggcgtggtgacgcccgacgcgctgcacccggtggtcacgttcggggcgccgtccgtgttctgcggcgggaaccgcgtcctggaggccctgggcgtcggcgaggcgcacgtccggtccgtggccatgcaccgcgacatcgtgcccagggccttctcgtgccgctacccgggccacgccatcgcgctgctcaagcgcctcaacggcgtgctccgcacccacccgtgcctcaacacgcacaaggcgctgtacacgcccatgggctccacgtacatcctgcagcccgacagcagcgtgtcgccgcggcacccgtttctccccgagggcgcggcgctgttccggctcgactcggacgacgccggcctccgtggcggcgcggagcgcccgccgagggctctggtggccagcgcgctgcgcgcgttcctcaactcgccgcacccgctcgagacactgagcgacctgtctgcctacggcgcggggggcgccatactccgggaccacgagtccagcaactacttcagggcgctcagcgcgctggccagggcgccgccgcggcgccggaagcaaccggaggtcgtgtggcagctgcccggcgtcgagcggctgcagcagtattggtggccggggatcgccagcaccgtcatccccgcaccgttggccgtcagcaaaaaggagctggtgtccgaggcatagaatttgtacgcttcgttcctttggtgtgctcgcttgagcagtgtacattctttgattctggttccgcacgaggtacataaaaatgcacaacttgttcttttggcgtttaggttcgtgtaaaaattgtaatcatgcatagcataggagcgtgtctggtttggtgtcctggtggccagcaaagatccgcggctgcttaataagacaatgagctttgtcttgggttttatgcgaaggagctcacgagttcaacatgtaaacttgtttc

SEQ ID NO: 117259 - DNA, 2392 bp, Zea Mays
ggaacgagatcctctgacgtggggaggagccactgacgcgtgggccccgcgtgtgacagggcccacgtgcagtggcccaactgctctctgcagtacgtcagaggccgaaggtgaatgcggtcccactgccacttgttgtttattttccttttttgatttttttttggaagaatttagtggggctagctcgaaacgatctgtcctgactcgatcactcgaataaagaatttcgcggcgacacatttaggtaggaccttggctttaattcgcctcgcagcatgctagctcgaaagtcgaaacgatctgtcctggcgcacacatgtattagtattaggtacaccctggcgagccccaccaagaacaacgtgtgcgcctattgcttcctattagtcctcgtgagttgtgaccattagtattcaagaatcgatgcgtagttttctagaattattatggaggaaatctgcacgtagttttctgctgtttcctccaggtagttggctggaaagttccatatagctgcaaatcgcggcgaaattattgtctatattcattattgaaaaacaacgtcgtgatgtgatggcaccatgctacttgactcctgatatttttcgatggaaaacctgttagttttagacttttagtagatcgtgaatgcagccgatcagtagtaatacgtgacagatatgaaatgcgaagtaccaggagcatttgatctctgaagagtgcccgttggtttggtttcaggtcgaggagctgaagaggcactacgggttgcggttcgtgacgtcgtctctggagaagaaggcggaggccggcatcataagcgccaagctggacgcggactccacgcggccgcgcaccgcgccggcgtacgaggtggcttccggcccacagccgcgccggcccatccggtcgtcgcacctggcctacgaggtggcggcgtcggccgcgtcctacgtccacgcgcgcgcgcgcggcctgctctcgttcggcgcgccgacgcggcagcagcagcaggcagcgggtcagggcaggctgtacaactcgggcgtggccgcgtacatggccgcgtcgacggtgacggcggtggtggccgccgaggacgaggcgcggcaggaggcggcccgcgacctgcggtcgccgctgtcgtcgccgtgcgagtggttcgtgtgcgacgaggcggacgcgcggacgcggtgcctcgtcatccagggctccgactcgctggcgtcgtggcaggccaacctcctgttcgagcccaccgagttcgagggcaccggcgtgctggtgcaccggggcatctacgaggcggccaagggcatctacgagcaggtcatgccggagatcgaggcgcacctgcgggcgcacgcggggcgcgcgccgccgcggctgcggctcacgggccactcgctcggcggcagcctcgcggtgctggtcagcctcatgctgctggcgcgcggcgtggtgacgcccgacgcgctgcacccggtggtcacgttcggggcgccgtccgtgttctgcggcgggaaccgcgtcctggaggccctgggcgtcggcgaggcgcacgtccggtccgtggccatgcaccgcgacatcgtgcccagggccttctcgtgccgctacccgggccacgccatcgcgctgctcaagcgcctcaacggcgtgctccgcacccacccgtgcctcaacacgcacaaggcgctgtacacgcccatgggctccacgtacatcctgcagcccgacagcagcgtgtcgccgcggcacccgtttctccccgagggcgcggcgctgttccggctcgactcggacgacgccggcctccgtggcggcgcggagcgcccgccgagggctctggtggccagcgcgctgcgcgcgttcctcaactcgccgcacccgctcgagacactgagcgacctgtctgcctacggcgcggggggcgccatactccgggaccacgagtccagcaactacttcagggcgctcagcgcgctggccagggcgccgccgcggcgccggaagcaaccggaggtcgtgtggcagctgcccggcgtcgagcggctgcagcagtattggtggccggggatcgccagcaccgtcatccccgcaccgttggccgtcagcaaaaaggagctggtgtccgaggcatagaatttgtacgcttcgttcctttggtgtgctcgcttgagcagtgtacattctttgattctggttccgcacgaggtacataaaaatgcacaacttgttcttttggcgtttaggttcgtgtaaaaattgtaatcatgcatagcataggagcgtgtctggtttggtgtcctggtggccagcaaagatccgcggctgcttaataagacaatgagctttgtcttgggttttatgcgaaggagctcacgag

SEQ ID NO: 117260 - DNA, 2215 bp, Zea Mays
acccctattctccatttctccttccgccgccgcacttgtcccctgaccctaggtcaaagtatcgccgacttcgccagccggatcatgtcgaccagcgccaacccgaaactgaagcggcggcgggggggcttgcggaagcagggtcctgggtaccccacggtggccaccacgggggcaatgtttgcccatgaggtgggcgccgaagggccacggagggacacgaggcaaggacccgcgttgcctagggtggttgccacctcgaccaggggaggaggtgccattgagcagggcgctgacggaatggaaggttcggcgtcgaaaactgataggagcgttcacgaggcagttggcgtcgatggcacgtacctcaccgagacacggtttgatcaatgtgccatttctccactgtcactgaaagccatcaaagatgctggatatgagaggatgactcgggtgcaggaggctactctgccaataattcttcaaggaaaggatgttcttgcaaaagcgaagacaggaacagggaaaacagttgcctttttgggagcttgcaaaccaattggctgctgaggccaggaagcttctcaagtatcatcgctcactgggtgtgcaggttgtaataggtggcacacggttacctcaagagcaacggagcatgcaagctaacccatgtcagattcttgttgctactcctggaaggctaaaggatcatcttgagaacacgcctggattctccacccgaattagaggtgtcaaggttcttgttctagatgaggctgaccgcctgttggatatgggatttagaagagacattgagaaaataattactttcatccctaaagataggcaaacactgctgttttctgctactgtttcagaagagatccaccaaatttctcacctcgcaatgagaaaggattatgatttcattaacgctgttcaagagggtgatgaggagacacatgcccaggtaaaccaaacgtacatggttgcacctctaggtctgcacctccccatattgtatgatgtgttgaagaagcatgttgcagaagatgcagaatacaaagttatagtattctgtactactgcaatggttacaagacttgttgctgaggtactctcccagctaaaactgaatataagagagattcattccagaaagacacaatctgcaagaactaaggtctcagatgaattcaggaagtcaaagggtctcatattagtcagctccgacgtatctgcccgtggtgtagattatcctgatgtcacccttgtcatgcaagtgagtcatataattgtgtaccttgccaaaagaaaggaaaataaaagaaaaatgtgtggattcatcaagaaatttatttgcacatgtaggttggtctgccagctgatagagaacagtatatacatagactcggaaggactggacggaaaggcaaggaagggcaaggcatcttactactggctccctgggaaatgcattttcttagtacagttaacgatttgtcaatatcagaggctgcaacaccttcggttgattcaagcattcaggcagcagtcaaagacgcagtcagaagagtggagatgaagagcaaggaatcagcctaccaggcatggctggggtactacaactcgcacaaggctaccaaccgtgacaaggccagactcgtgatgctggctgaagagttcagtcagagcattgggctcgcagtcccgccagccattcccaaacaaattctacggaagatgggcctcagcaacgttcctgggctccggtcttcgtaactaaccgtggtgatccagatccagcagaacttgaccagtgcttgtaccagcttgctaaacgctggctcttccaccaccatcgctgcacgtaagtagtttcttacgaagaaccagattctgtagtcatgtcttcaagcatgacggccgcattttatctgagaccgtatcttgacctgttcagtgtccacaacggacaggttcaaacaggccctacgattagtattcaactatgtcatgttttcattcaaaagggcacgggctcgtatcaatcagttccggggaggaaaagaaaatgtatgtatttgctggcactggcagcaccacatgtgagacatgccagttgatatattcattgtgatagtagacttgtcctgctacatttatttccgaagttattggcattgcaattctcgcatgcgtgcatcattcatcc

SEQ ID NO: 117261 - DNA, 2171 bp, Zea Mays
aaaaacccaaaaataaaacactgtgaatacccctattctccatttctccttccgccgccgcacttgtcccctgaccctaggtcaaagtatcgccgacttcgccagccggatcatgtcgaccagcgccaacccgaaactgaagcggcggcgggggggcttgcggaagcagggtcctgggtaccccacggtggccaccacgggggcaatgtttgcccatgaggtgggcgccgaagggccacggagggacacgaggcaaggacccgcgttgcctagggtggttgccacctcgaccaggggaggaggtgccattgagcagggcgctgacggaatggaaggttcggcgtcgaaaactgataggagcgttcacgaggcagttggcgtcgatggcacgtacctcaccgagacacggtttgatcaatgtgccatttctccactgtcactgaaagccatcaaagatgctggatatgagaggatgactcgggtgcaggaggctactctgccaataattcttcaaggaaaggatgttcttgcaaaagcgaagacaggaacagggaaaacagttgcctttttgcttccagccatcgaagttctctctgcattacctcgttcaacttctataaatttgctggtgatgtgccctaccagggagcttgcaaaccaattggctgctgaggccaggaagcttctcaagtatcatcgctcactgggtgtgcaggttgtaataggtggcacacggttacctcaagagcaacggagcatgcaagctaacccatgtcagattcttgttgctactcctggaaggctaaaggatcatcttgagaacacgcctggattctccacccgaattagaggtgtcaaggttcttgttctagatgaggctgaccgcctgttggatatgggatttagaagagacattgagaaaataattactttcatccctaaagataggcaaacactgctgttttctgctactgtttcagaagagatccaccaaatttctcacctcgcaatgagaaaggattatgatttcattaacgctgttcaagagggtgatgaggagacacatgcccaggtaaaccaaacgtacatggttgcacctctaggtctgcacctccccatattgtatgatgtgttgaagaagcatgttgcagaagatgcagaatacaaagttatagtattctgtactactgcaatggttacaagacttgttgctgaggtactctcccagctaaaactgaatataagagagattcattccagaaagacacaatctgcaagaactaaggtctcagatgaattcaggaagtcaaagggtctcatattagtcagctccgacgtatctgcccgtggtgtagattatcctgatgtcacccttgtcatgcaagttggtctgccagctgatagagaacagtatatacatagactcggaaggactggacggaaaggcaaggaagggcaaggcatcttactactggctccctgggaaatgcattttcttagtacagttaacgatttgtcaatatcagaggctgcaacaccttcggttgattcaagcattcaggcagcagtcaaagacgcagtcagaagagtggagatgaagagcaaggaatcagcctaccaggcatggctggggtactacaactcgcacaaggctaccaaccgtgacaaggccagactcgtgatgctggctgaagagttcagtcagagcattgggctcgcagtcccgccagccattcccaaacaaattctacggaagatgggcctcagcaacgttcctgggctccggtcttcgtaactaaccgtggtgatccagatccagcagaacttgaccagtgcttgtaccagcttgctaaacgctggctcttccaccaccatcgctgcacgtaagtagtttcttacgaagaaccagattctgtagtcatgtcttcaagcatgacggccgcattttatctgagaccgtatcttgacctgttcagtgtccacaacggacaggttcaaacaggccctacgattagtattcaactatgtcatgttttcattcaaaagggcacgggctcgtatcaatcagttccggggaggaaaagaaaatgtatgtatttgctggcactggcagcaccacatgtgagacatgccagttgatatattcattgtgatagtagacttgtcctgct

SEQ ID NO: 117262 - DNA, 812 bp, Zea Mays
acccctattctccatttctccttccgccgccgcacttgtcccctgaccctaggtcaaagtatcgccgacttcgccagccggatcatgtcgaccagcgccaacccgaaactgaagcggcggcgggggggcttgcggaagcagggtcctgggtaccccacggtggccaccacgggggcaatgtttgcccatgaggtgggcgccgaagggccacggagggacacgaggcaaggacccgcgttgcctagggtggttgccacctcgaccaggggaggaggtgccattgagcagggcgctgacggaatggaaggttcggcgtcgaaaactgataggagcgttcacgaggcagttggcgtcgatggcacgtacctcaccgagacacggtttgatcaatgtgccatttctccactgtcactgaaagccatcaaagatgctggatatgagaggatgactcgggtgcaggaggctactctgccaataattcttcaaggaaaggatgttcttgcaaaagcgaagacaggaacagggaaaacagttgcctttttggtactccttgcctaaagcccaactgatcaatttgactgtcgtagcagttttctcagcgatataactactggattaacccatgtgactgagttctaatttcttttagcttccagccatcgaagttctctctgcattacctcgttcaacttctataaatttgctggtgatgtgccctaccagggagcttgcaaaccaattggctgctgaggccaggaagcttctcaagtatcatcgctcactgggtgtgcaggttgtaataggtggcacac

SEQ ID NO: 117263 - DNA, 2299 bp, Zea Mays
gccgcgcgccacgacgcagcacgcccaagaaaccccgtgtcctcacaaaaaccctgcctgccggagatggccagcggcgaccttctcctccgcgcccacgccggcgccccggtcctagcgagggccttctcctgccgcctcctagtcccggcgaggcgccgcagcggactaatctcacctctggccgcttccaaggtcggcatcgccgacgtcgttgggcgggtcaggtcgggcggcgccgaccagaagaggcgacgcagggatgcgaaggagggatttgggttctccggggtggccacgaggagagaacttatcgacgacgagaaggtggagcaggacgaggaagatgaagctctcaagttgggagtggagaagaatggtggcgagacgggaggtgtggatggctcgtacctcagtgagacacggtttgatcaatgtgctatttcccctttatcgatgaaagccgtcaaagatgctggatatgaaaggatgactgaggtgcaggaggcaactctgcccataattcttcaaggcaaggatgttcttgcaaaggcaaagacaggaactgggaaaacagttgcctttttgcttccagcgattgaggttctctccactctacctcatcagcggggtcagttacggccacctataaatttgctggtgatgtgccctactagggagcttgcaaaccaagtggctgttgaggccaggaagcttctcaggtatcatcgcacgttgggtgtgcaggttgtaattggtggcacaagattaactcaagagcaacgaagcatgcaagctaacccatgtcagattcttgttgctacaccaggaaggcttaaggatcatcttgagaacacacctgggttttctaccaggctcaagggtgtgaaggttcttgttcttgatgaagctgaccgcctgttggatatgggatttagaagagatattgagaaaataattgcttcaattcctagagaacggcaaacactgttattttctgctactgttccagaagaggtccgccaaatttctcatgtggcaatgaagaaagattataggttcattaacactgttaaagagggtgatgaggagacacatgcacaggtgagccagatgtacatggttgcaccactagacttgcatttttctatcctatatgatgtattgaagaaacatgtcgcagaagatgcagactacaaagttattatattctgtactactgcaatggtcaccaaacttgtggctgaagttctctcccagctgaaactgaatataagagagattcattccagaaagtcgcagtctgcaagaactaaggtctcagacgaattcaggaaatcaaaaggtttgatactggtcagttcagacgtatctgcccggggcgttgactatcctgatgtcactcttgtaatacaggttggagttcctgcagatagagagcagtacatacatagactaggccggaccggacggaaaggcaaggaagggcaaggactcctactattggcaccttgggaaaaatattttcttggtgctgttaaggatttgtcaatagcagagtctgctgtaccaccagttgattcaagtgttgagacagaagtaagcagcatgcactatttattttctacatggctctctgattcagtcagaaatgcggtcagaaaagtagagatgaagagcaaagaatgtgcctatcaagcatggttagggtactacaactcgaacaagaccattggtcgagataagtccagacttgttcaccttgcagaagagttcagccaaagcatgggtcttgcagttcctccagccataccgagaaacattcttcgcaagatgggccttaacaatgtccctgggcttcgttcatcataatctcgatgtcacgatatcaagcagaagacgtgtgctacagcacagtacatgcatttgaccagccataatgctgttaacttcgtaaacaacacttgttgctggacttaagtaccgcagttaacataagcagattggtttgctgatgacctgaagtttctacaagcatcctcatttccaacccgtacacaagtcctcgggtgtagccagaatatgcattcattttgaagccaaattttgttcggtcgagacatcaacacttcacagagaatgctcaaacagacaaggtgattctacgtatacaaggatttgtcaaaagcatagtgatgtgtatgaagtattaaaagttcgggaagaaaaatgcgctttcctgatttatcgtcatataggggaatgcatgtgttcagtttcaaattctgacgttgtttgt

SEQ ID NO: 117264 - DNA, 2209 bp, Zea Mays
gacgccgcgcgccacgacgcagcacgcccaagaaaccccgtgtcctcacaaaaaccctgcctgccggagatggccagcggcgaccttctcctccgcgcccacgccggcgccccggtcctagcgagggccttctcctgccgcctcctagtcccggcgaggcgccgcagcggactaatctcacctctggccgcttccaaggtcggcatcgccgacgtcgttgggcgggtcaggtcgggcggcgccgaccagaagaggcgacgcagggatgcgaaggagggatttgggttctccggggtggccacgaggagagaacttatcgacgacgagaaggtggagcaggacgaggaagatgaagctctcaagttgggagtggagaagaatggtggcgagacgggaggtgtggatggctcgtacctcagtgagacacggtttgatcaatgtgctatttcccctttatcgatgaaagccgtcaaagatgctggatatgaaaggatgactgaggtgcaggaggcaactctgcccataattcttcaaggcaaggatgttcttgcaaaggcaaagacaggaactgggaaaacagttgcctttttgcttccagcgattgaggttctctccactctacctcatcagcggggtcagttacggccacctataaatttgctggtgatgtgccctactagggagcttgcaaaccaagtggctgttgaggccaggaagcttctcaggtatcatcgcacgttgggtgtgcaggttgtaattggtggcacaagattaactcaagagcaacgaagcatgcaagctaacccatgtcagattcttgttgctacaccaggaaggcttaaggatcatcttgagaacacacctgggttttctaccaggctcaagggtgtgaaggttcttgttcttgatgaagctgaccgcctgttggatatgggatttagaagagatattgagaaaataattgcttcaattcctagagaacggcaaacactgttattttctgctactgttccagaagaggtccgccaaatttctcatgtggcaatgaagaaagattataggttcattaacactgttaaagagggtgatgaggagacacatgcacaggtgagccagatgtacatggttgcaccactagacttgcatttttctatcctatatgatgtattgaagaaacatgtcgcagaagatgcagactacaaagttattatattctgtactactgcaatggtcaccaaacttgtggctgaagttctctcccagctgaaactgaatataagagagattcattccagaaagtcgcagtctgcaagaactaaggtctcagacgaattcaggaaatcaaaaggtttgatactggtcagttcagacgtatctgcccggggcgttgactatcctgatgtcactcttgtaatacaggttggagttcctgcagatagagagcagtacatacatagactaggccggaccggacggaaaggcaaggaagggcaaggactcctactattggcaccttgggaaaaatattttcttggtgctgttaaggatttgtcaatagcagagtctgctgtaccaccagttgattcaagtgttgagacagaagtcagaaatgcggtcagaaaagtagagatgaagagcaaagaatgtgcctatcaagcatggttagggtactacaactcgaacaagaccattggtcgagataagtccagacttgttcaccttgcagaagagttcagccaaagcatgggtcttgcagttcctccagccataccgagaaacattcttcgcaagatgggccttaacaatgtccctgggcttcgttcatcataatctcgatgtcacgatatcaagcagaagacgtgtgctacagcacagtacatgcatttgaccagccataatgctgttaacttcgtaaacaacacttgttgctggacttaagtaccgcagttaacataagcagattggtttgctgatgacctgaagtttctacaagcatcctcatttccaacccgtacacaagtcctcgggtgtagccagaatatgcattcattttgaagccaaattttgttcggtcgagacatcaacacttcacagagaatgctcaaacagacaaggtgattctacgtatacaaggatttgtcaaaagcatagtgatgtgtatgaagtattaaaagttcgggaagaaaaatgcgctttcctgatttatcgt

SEQ ID NO: 117265 - DNA, 376 bp, Zea Mays
ggcacaatcacctccggatcggatcctggctgtagggcacgacgcagcactggcgccgcaggaggtgaagagacggcggcgccgcacaactccgacggcaagtctccccaccaccttctcaccaatccctacaacaccaattatagttggggaaggtgaacctcctccctcttgggatccggtaccaactccaaaaggttttcccagccgccattctgcgatcacgcctgttctgttttttcctgctgcgatctgcgcttgtgcgatcggccgtcaggttacggcacacaacgacgccggcgtctgtcgtcgtccgcttgatcggcaactgggtagcgtcgcagcgaacgagcgatcttgtcgcctgatccattga

SEQ ID NO: 117266 - DNA, 114 bp, Zea Mays
gtactgactatctatagtgcacggtcgatacccagtggcgaagacaccagaggggccggggtgggcctggcacccccaacgacccaactaaggtataccactaatgtattctag

SEQ ID NO: 117267 - DNA, 2379 bp, Zea Mays
tgatcttggttggggaaaaaaaccccggcctgccaccctacttcatcctcgagtcgacttgtgcgccgccattctccgtcgccgcggtctcgcgggcccgccgccgtcctagccgccctgtccccgccctctccgtctcgcgccccacgcggcccttgtccatcttttccgtcgccggctcgtgcggtccgacgcctgccaccggttcctcctctcgagaaaggcggcggcgcccgagagagcttctttgagggaggataaggcggcgcggagcgtctctgagcggctcaggcccctccggcgctgagctttcctccggcgttgtgtgtgcctgagttgttgactcccaattgaagcgtggtcaaattacctcggctccggtatgggttggagctctttatgggttgctaaagcgtttagagtgtggctctaggcgtggattttcaccaatggcaatcgagtgcctcgtgctaggggcggggcaggaggtgggtaagagctgcgtggtggtgaccatcggcgggaagcgcgtcatgttcgactgcggcatgcacatgggctaccacgacgaccgccactacccggactttgcgcgcgcgctcgctgcctggggggcgcccgacttcaccaccgctatctcctgcgtggtcatcacgcatttccacatggatcatatcggggcactgccctacttcaccgaggtttgcggctaccacggccccatctacatgacgtatccaacaaaggctttagctccatttatgctcgaggattatcggaaagtaacgatgggtcagagaggtgaggaaaagcaatatagctacgaagatattcttaggtgtatgaagaaagtcacaccaatggacttgaagcagactgttcaagtagataaagaccttgtgatccgtgcctattatgctggacatgttataggggctgccatgatttatgcaaaagttggggatgctgctatggtatacactggggattacaatatgacaccagatagacatcttggggccgcacagattgatcgtctgaagttggatgtattgataacagagtccacatatgctaaatctatacgtgactcaaagcctgcccgagagagggagtttttaaaagcggtacataaatgtgtttctggtggaggtaaagttctaattccaacgtttgctctgggaagagctcaggaactatgtatgttactggatgactattgggagaggatgggcttgaaagttcctatttatttttcagctggtttaaccattcaagctaatgtgtactacaaaatgttgattgggtggactagtcaaaagatcaaggacagccatacagtgcataatccatttgacttcaagcatgtttgccactttgaacgttccttcattaacaaccctggtccctgtgtactttttgcaacacctggtatgattactgggggattttcccttgaggcgtttaaaaaatgggcaccatcagagaagaatctggttacacttccaggatattgtgtttctggaaccattggtcataagttgatgtgtgggaaacctacaagggttgattacgaggacactcatattgatgtcagatgtcagatccatcagctagcattcagtcctcatacagactccaaagggattatggatctgacagaattcctgtcacccaaaaatgtaattctcgttcatggtgaaaagcctcagatggcttttcttaaggagaggatcgaatctgaattggggatgccttgctactacccagggaataatgaatccgtctccattccgacaacccagaaccttaaaatgagtgctacagaaaggttcattacaggctgtgctgtggagcaaggtaaacgtagcctgcacaagcggaacctgatttatggtacaggtttgtcagaagagattggcagtgatgaggcggcgggggagggcgttcttctgatgcagaaacacaagtctccgaaaattctttgtgaggatgagctccttgaggtgctgggcatgggtcggcatcttgtccagtttgaaccaatggtctccagaattgtagctgctgttgaatccgagttgcagcgggctaaggcagcggatttagataacgatgggaaatgaatggaacaatataaatgtacattgccataattttggctgattactgtttcacctttctttcccaaaaatgcgagtaatgtcctacaccacttcagcactattactgacaagtctctttaaggtccttgggagttaccaagttatacaatatctagagagctactatcgcataaaatagggatttgttattctgtttgtatagtgaaatttgaaataaaagaagagataggccagctgtcagagacagcctcaa

SEQ ID NO: 117268 - DNA, 2101 bp, Zea Mays
tgatcttggttggggaaaaaaaccccggcctgccaccctacttcatcctcgagtcgacttgtgcgccgccattctccgtcgccgcggtctcgcgggcccgccgccgtcctagccgccctgtccccgccctctccgtctcgcgccccacgcggcccttgtccatcttttccgtcgccggctcgtgcggtccgacgcctgccaccggttcctcctctcgagaaaggcggcggcgcccgagagagcttctttgagggaggataaggcggcgcggagcgtctctgagcggctcaggcccctccggcgctgagctttcctccggcgttgtgtgtgcctgagttgttgactcccaattgaagcgtggtcaaattacctcggctccggtatgggttggagctctttatgggttgctaaagcgtttagagtgtggctctaggcgtggattttcaccaatggcaatcgagtgcctcgtgctaggggcggggcaggaggtgggtaagagctgcgtggtggtgaccatcggcgggaagcgcgtcatgttcgactgcggcatgcacatgggctaccacgacgaccgccactacccggactttgcgcgcgcgctcgctgcctggggggcgcccgacttcaccaccgctatctcctgcgtggtcatcacgcatttccacatggatcatatcggggcactgccctacttcaccgaggtttgcggctaccacggccccatctacatgacgtatccaacaaaggctttagctccatttatgctcgaggattatcggaaagtaacgatgggtcagagaggtgaggaaaagcaatatagctacgaagatattcttaggtgtatgaagaaagtcacaccaatggacttgaagcagactgttcaagtagataaagaccttgtgatccgtgcctattatgctggacatgttataggggctgccatgatttatgcaaaagttggggatgctgctatggtatacactggggattacaatatgacaccagatagacatcttggggccgcacagattgatcgtctgaagttggatgtattgataacagagtccacatatgctaaatctatacgtgactcaaagcctgcccgagagagggagtttttaaaagcggtacataaatgtgtttctggtggaggtaaagttctaattccaacgtttgctctgggaagagctcaggaactatgtatgttactggatgactattgggagaggatgggcttgaaagttcctatttatttttcagctggtttaaccattcaagctaatgtgtactacaaaatgttgattgggtggactagtcaaaagatcaaggacagccatacagtgcataatccatttgacttcaagcatgtttgccactttgaacgttccttcattaacaaccctggtccctgtgtactttttgcaacacctggtatgattactgggggattttcccttgaggcgtttaaaaaatgggcaccatcagagaagaatctggttacacttccaggatattgtgtttctggaaccattggtcataagttgatgtgtgggaaacctacaagggttgattacgaggacactcatattgatgtcagatgtcagggaataatgaatccgtctccattccgacaacccagaaccttaaaatgagtgctacagaaaggttcattacaggctgtgctgtggagcaaggtaaacgtagcctgcacaagcggaacctgatttatggtacaggtttgtcagaagagattggcagtgatgaggcggcgggggagggcgttcttctgatgcagaaacacaagtctccgaaaattctttgtgaggatgagctccttgaggtgctgggcatgggtcggcatcttgtccagtttgaaccaatggtctccagaattgtagctgctgttgaatccgagttgcagcgggctaaggcagcggatttagataacgatgggaaatgaatggaacaatataaatgtacattgccataattttggctgattactgtttcacctttctttcccaaaaatgcgagtaatgtcctacaccacttcagcactattactgacaagtctctttaaggtccttgggagttaccaagt

SEQ ID NO: 117269 - DNA, 1947 bp, Zea Mays
tgatcttggttggggaaaaaaaccccggcctgccaccctacttcatcctcgagtcgacttgtgcgccgccattctccgtcgccgcggtctcgcgggcccgccgccgtcctagccgccctgtccccgccctctccgtctcgcgccccacgcggcccttgtccatcttttccgtcgccggctcgtgcggtccgacgcctgccaccggttcctcctctcgagaaaggcggcggcgcccgagagagcttctttgagggaggataaggcggcgcggagcgtctctgagcggctcaggcccctccggcgctgagctttcctccggcgttgtgtgtgcctgagttgttgactcccaattgaagcgtggtcaaattacctcggctccggtatgggttggagctctttatgggttgctaaagcgtttagagtgtggctctaggcgtggattttcaccaatggcaatcgagtgcctcgtgctaggggcggggcaggaggtgggtaagagctgcgtggtggtgaccatcggcgggaagcgcgtcatgttcgactgcggcatgcacatgggctaccacgacgaccgccactacccggactttgcgcgcgcgctcgctgcctggggggcgcccgacttcaccaccgctatctcctgcgtggtcatcacgcatttccacatggatcatatcggggcactgccctacttcaccgaggtttgcggctaccacggccccatctacatgacgtatccaacaaaggctttagctccatttatgctcgaggattatcggaaagtaacgatgggtcagagaggtgaggaaaagcaatatagctacgaagatattcttaggtgtatgaagaaagtcacaccaatggacttgaagcagactgttcaagtagataaagaccttgtgatccgtgcctattatgctggacatgttataggggctgccatgatttatgcaaaagttggggatgctgctatggtatacactggggattacaatatgacaccagatagacatcttggggccgcacagattgatcgtctgaagttggatgtattgataacagagtccacatatgctaaatctatacgtgactcaaagcctgcccgagagagggagtttttaaaagcggtacataaatgtgtttctggtggaggtaaagttctaattccaacgtttgctctgggaagagctcaggaactatgtatgttactggatgactattgggagaggatgggcttgaaagttcctatttatttttcagctggtttaaccattcaagctaatgtgtactacaaaatgttgattgggtggactagtcaaaagatcaaggacagccatacagtgcataatccatttgacttcaagcatgtttgccactttgaacgttccttcattaacaaccctggtccctgtgtactttttgcaacacctggtatgattactgggggattttcccttgaggcgtttaaaaaatgggcaccatcagagaagaatctggttacacttccaggatattgtgtttctggaaccattggtcataagttgatgtgtgggaaacctacaagggttgattacgaggacactcatattgatgtcagatgtcaggtcgattttcacgtcatttcatatcttgcaaaaaatgtacaactttaaataataatgacaagaacatggtcaaccagggggaagccatgtaaatcactagtgttttaaacactgttgaagtctggcttttaaattcgatccatatcaatccccacttatcgttctgcatgggtgcttactcgaggcccttagttgtctattgcagttggctggctgtggtcgtttttgtttctgtctctcagttttttgtgagtagtatgtctgtatgtattgaggagctttcctagtcccctccctgttttgcacattttatactttatcttaatctactcattaccattca

SEQ ID NO: 117270 - DNA, 1781 bp, Zea Mays
ttaagtctacacggtaatatccatagatgtttttggtgcagattgggccaccgaattcacgttttttgccttccaaagacaagagtttgtgggatccaaaagatgttgcagattgcattttatctgatagatctaccctggtacatgtgtttttggagttcttttggatatgctatttcttgcatttcttgagctaaattatgtatgacaaactatagagattaataaaagaaggaatataatccgagtagtttatcagatacaccagaaaagcgaataaatgtagaaatataaattcttattatgttcctttgttctctctctgtgtgtcataagaaacatgtacattgtctcatggagtgaagcaaggataagcatggtagaactctgtcacgtgctgagtagctaatacacctagaaagctaaattcaatcatgcataaatttaaagtcagatgcggcttagtgtattataagaaacatgcacattgtctcatggactgaagcaatggtggctgctaaacaaagtataaataatccatagagctgatcagagattgttgacatgctggaaaggttttaagttccttgagtgtaacttttaacgtcaatattggacatattgattctacaatgaacttttatcaccctgtagaaggtgacgactggccagcgcatgacagagagttctgtccttgatgcacatgctacagaggtaagatctgaccattgttgtcgtcctttaagagtactttcgctttttggagttgacatgctcacatgcaccagtacacctcgaaaattatatgtaggttgacggagaaccatactggtattatgagtatcttgttcggaaatcaccaacaaaatctgtaaggttcctggcacatatacatctgacaacaaatatacttatatgaagagtgtcaaagagaggcctatgcttacatggtgcattgtattaactatttgatggccaagtggtgcaaaaggcagcttatatgttcttaatgatactctttgtttcatcaggcatcagaaccaaatttgtttcgacacaatgtaacgtgcactgctgagcgtgatggtattacttcatctttccagtttttgtcatcgaccattcactcccttacatttgaagcattctttgtccactcacctttttttatttctttcttttaatagggtacctgtactcactgaatgcttccactcttagcaaacagtgggaatctgtacgtctcgaatgtcccattgttgcataccacttcagcaaagaaatattcttttgtgtttgatttcattttgtgacttcaattacaggagggacatatatttgtcatacaaatatgtctatatatcagcttctaaccaatatttaactgttgtaacgcagatggggccctttctgcaacagactgttgcatcatttcgccttctcccacctacagaaaactatgttcctccctacaaggatccttggagattttggtgaatggagatccttttttgtagttaccatttttttcctcttcagattcaggttttagaccatatgtttttcacaccatatgtttagtgagtgttgtcctttcaacttgacagataaaattcagagacccattttggttacaccaatcctgtccgttctgattaattaacagtcatattcaccttaagagttactctctttgtcccaaaataaattaacttcttgaatcaccctaagtcaaactaccttgagtttgaccaactttatagtaaaaataacaaaaaaaa

SEQ ID NO: 117271 - DNA, 1205 bp, Zea Mays
ttaagtctacacggtaatatccatagatgtttttggtgcagattgggccaccgaattcacgttttttgccttccaaagacaagagtttgtgggatccaaaagatgttgcagattgcattttatctgatagatctaccctggtacatgtgtttttggagttcttttggatatgctatttcttgcatttcttgagctaaattatgtatgacaaactatagagattaataaaagaaggaatataatccgagtagtttatcagatacaccagaaaagcgaataaatgtagaaatataaattcttattatgttcctttgttctctctctgtgtgtcataagaaacatgtacattgtctcatggagtgaagcaaggataagcatggtagaactctgtcacgtgctgagtagctaatacacctagaaagctaaattcaatcatgcataaatttaaagtcagatgcggcttagtgtattataagaaacatgcacattgtctcatggactgaagcaatggtggctgctaaacaaagtataaataatccatagagctgatcagagattgttgacatgctggaaaggttttaagttccttgagtgtaacttttaacgtcaatattggacatattgattctacaatgaacttttatcaccctgtagaaggtgacgactggccagcgcatgacagagagttctgtccttgatgcacatgctacagaggttgacggagaaccatactggtattatgagtatcttgttcggaaatcaccaacaaaatctgcatcagaaccaaatttgtttcgacacaatgtaacgtgcactgctgagcgtgatgggtacctgtactcactgaatgcttccactcttagcaaacagtgggaatctatggggccctttctgcaacagactgttgcatcatttcgccttctcccacctacagaaaactatgttcctccctacaaggatccttggagattttggtgaatggagatccttttttgtagttaccatttttttcctcttcagattcaggttttagaccatatgtttttcacaccatatgtttagtgagtgttgtcctttcaacttgacagataaaattcagagacccattttggttacaccaatcctgtccgttctgattaattaacagtcatattcaccttaagagttactctctttgtcccaaaataaattaacttcttgaatca

SEQ ID NO: 117272 - DNA, 1204 bp, Zea Mays
tgaacagggagatcttttgctctcacgcagaaaaaatgtttggatagaactttctgcttctccgtccttaagcccaagtggaagaaggaggagggggctttgacgccggcgagccatggcgggggctctgctctcctctccccattatctctggagccccacttctcagccctcgcttcgccccaggagcaggggaccgctcggcactggggcagtgcgtgttctgccgccgaggaggagggcccgtgtgctcgcttcgtgctctcgcgagcctgccgccatgaaccgcggtttggaggtggagaggaggcgccttctcatgtccgggctcgtgtcttctttcacaatcgtgctcccgatttcaggagcatatgctgttatggagactaatgaagacgtaaaaatgaacacacaagttgatgagatcaatgcatactcttttctttacccggtcgaactgccaggaaagaaattttccttcaaatgggtagagtccagaaaaccagagcgatattcctcagcagcaccactatcacctgatgcacggcaacgaattgtatcggagcgagttgacatgatacataatgttgtcatctcagtctcgattgggccaccgaattcacgttttttgccttccaaagacaagagtttgtgggatccaaaagatgttgcagattgcattttatctgatagatctaccctgaaggtgacgactggccagcgcatgacagagagttctgtccttgatgcacatgctacagaggttgacggagaaccatactggtattatgagtatcttgttcggaaatcaccaacaaaatctgcatcagaaccaaatttgtttcgacacaatgtaacgtgcactgctgagcgtgatgatggggccctttctgcaacagactgttgcatcatttcgccttctcccacctacagaaaactatgttcctccctacaaggatccttggagattttggtgaatggagatccttttttgtagttaccatttttttcctcttcagattcaggttttagaccatatgtttttcacaccatatgtttagtgagtgttgtcctttcaacttgacagataaaattcagagacccattttggttacaccaatcctgtccgttctgattaattaacagtcatattcaccttaagagttactctctttgtcccaaaataaattaacttcttgaatca

SEQ ID NO: 117273 - DNA, 1186 bp, Zea Mays
tgaacagggagatcttttgctctcacgcagaaaaaatgtttggatagaactttctgcttctccgtccttaagcccaagtggaagaaggaggagggggctttgacgccggcgagccatggcgggggctctgctctcctctccccattatctctggagccccacttctcagccctcgcttcgccccaggagcaggggaccgctcggcactggggcagtgcgtgttctgccgccgaggaggagggcccgtgtgctcgcttcgtgctctcgcgagcctgccgccatgaaccgcggtttggaggtggagaggaggcgccttctcatgtccgggctcgtgtcttctttcacaatcgtgctcccgatttcaggagcatatgctgttatggagactaatgaagacgtaaaaatgaacacacaagttgatgagatcaatgcatactcttttctttacccggtcgaactgccaggaaagaaattttccttcaaatgggtagagtccagaaaaccagagcgatattcctcagcagcaccactatcacattgggccaccgaattcacgttttttgccttccaaagacaagagtttgtgggatccaaaagatgttgcagattgcattttatctgatagatctaccctgaaggtgacgactggccagcgcatgacagagagttctgtccttgatgcacatgctacagaggttgacggagaaccatactggtattatgagtatcttgttcggaaatcaccaacaaaatctgcatcagaaccaaatttgtttcgacacaatgtaacgtgcactgctgagcgtgatgggtacctgtactcactgaatgcttccactcttagcaaacagtgggaatctatggggccctttctgcaacagactgttgcatcatttcgccttctcccacctacagaaaactatgttcctccctacaaggatccttggagattttggtgaatggagatccttttttgtagttaccatttttttcctcttcagattcaggttttagaccatatgtttttcacaccatatgtttagtgagtgttgtcctttcaacttgacagataaaattcagagacccattttggttacaccaatcctgtccgttctgattaattaacagtcatattcaccttaagagttactctctttgtcccaaaataaattaacttcttgaatca

SEQ ID NO: 117274 - DNA, 2706 bp, Zea Mays
agcctagtagcctaccgtttcaatttttgaactcccggtccggcaaccctccccagccagcgttccactcactccggcatcgcttcgaatctccgcgcggcggcgggaccgcgtgaccgacgcgcggcgctgccccttcagaaagccgcatggacgccgccgaccccctctgcgccatctcctcgactgcgcgactccttccgcggacccttggccccgccattgggccttccccctcgaacccccgcgacgcgctcctcgaggccatcgcactcgcccggtctctgaaagggtctgaggagctggttaagcaggctacaatggtgccgaaggagcacggggacatccaggctctctaccatgatgatggagtgaaaggctggcctcctgcaaatggcagcaaagagcaacagggaagaaggccagcactggatcgtaaacgggctcggtttgctatgaaggacactggaagcaaaccggtgcctgttgtggaccaatctaagttatcaaatatttcagatccaatcacattcttcatgaccttggatcggcttgaagaagccgaggaggagatcaaacggctaaatggagaggcagaaaaacgcacattgaattttgatcctgtagatgaacccattagacagcctggtttacgtgggagaaaatcagtccgcagtttcaaggtaattgaggatgttggtactcaagatcccaatgaggcaccggcttcccaaacagcaactatgacaggatctcagttgtcacaggatgttatgcatgctgttgcgggcaaaaatggacgatctgtttcctcaagatctagtgaagctatttcagagaaagaagtttcattagctgagaaggatggccgtgacgatttgacttatatactgacctcaatccaagatttagatgaatctgaagaggaagagtttatccggaagaccttagggattaaagaaacaaggaaagaaagagttagtcttcgtaactccattcttggagttaggtccctaagaagcaatactgaacaaaaaggttcaatgaaggtccaccctccagaaagtcatttgcctcagactcgccaagatcgaatttcagagttagagaaacatttgtttcctggaggtgcagcaaatgctaaatgcacagatgatgaatctgaagggtcaccagatattgtgatgggtgaaccatcattggtgcattattcttctgatgttctgatgactgatgagaactttactgcaagtgacgttgacagggagaccccaaatctgggtgccagagcagcagaccctgttcttgatcctgaaccaaacttgcctgatcatgcatatgaaaggcaacctggaggttcctcacttggtttgtacagagacacagaagttggagttgccaaagaaaatgagacatgtaacaggagcaatatatctgtggaggaagatgatgtgccaatagactatataactattggcaggtctactaatgaaacagaagtttcttcttctcatcctttggagggcagctcgacagaagaattggtcactaaaccaggtagacatgcggctccagatggtatctgtaggacttcacatgcagctgaggatagcattcaacatctagaagcggtcaaagagggtggtgtcctacaagataagtcaagccagttgttggagatgcctcaggaagatattaatccactgaatcaggctcagatgcatggtggaagcactaagaaatcggcacctgatctatccccgaccaaacagaagaagcaacaggcagttcaagaaaggaaaaggaagcaacagtcaaagaggggcaagaaagtggctggtgaatccctggaaataccccaaacaaattttgaatcggagaatcaacctcataatgacgatgtcaacattgagaaacagacaattacgagtagcacactctcaccaaatggtgccaaggggcaaaagggagctcaaaggagaaaccagaccaaaaaaaggaatcaaagaaaaatccttggagatgctgaccttgcatgccagcctggagtgagaaaaagctcaagaacacgctcaaggcctttggagtattggcttggtgaaagattactatatgggcctatacatgacaatttgcatggagctattggcatcaaagcatactctcctggccaagatggcaagagatcattgaaagtgaaatctttcgtgcctgaacagtattcagatcttgttgctaaatctgcaaggtactgaagccaagattttccaaagaggatcacgccttgtgacctgttgctttgtcacctcactatgggatgttgacatgtattggtagaactgcagtactgcacaacgaaatgcatgttaacttaggcaggtatcaaatggatgagtatctatctagtttggatgcgctactacccattcggctactcgatacgtggagtctagggtgtcaattgacattggtacttgatagtaagacagttttaggttcagactcttgaaaattgattttgtttgtcttctcgttttcagatttaagatgcgataccacagataaaaatcttgggtaattggaggtaaaaaaaaggatagcacacctaaatatcataatgatgttatgatttttttattcagtgttatggctcatgccgtcaaggtatcatgtggtgtgatagtatcttgatgttaagatctgtgg

SEQ ID NO: 117275 - DNA, 767 bp, Zea Mays
atttattttgtggtcatgcaggagctgctggctattcagcagcaaggacctcgtgcaataggtttctttggaacccgcaacatgggatttatgcatcaacagcttattgagatcctcagctatgctatggtcataacaaaaaatcatatatttacatctggtgcttctggaacaaatgcagctgttatcaggggtgctctaagagctgaaaaaccagagctgcttactgtaattttacctcaaagcctaaagaagcagcctcctgaaagccaagaactgttgtctaaagtacaaaacttgatcgagaaaccacagcatgatcatttgccactaattgaggctagcaggttatgcaatatggacatcatctccaaggtccaacaggtgatctgcttcgcgttccatgacagcaagctgctgatggaaacatgccaggaggccaagaaccttcggaagatcgtgacactcttctacttggattagctccttcgacagggatctattctcctttttttttgttcgtggcgtaggctaatgttggggggataaaaagcaagctggacggtttagttagtttcgaaatatactggataggtggtgggatgaccttccattggaggagaaagtcattttgtttcgcccattgttttgatttttgtcacaaagaaaccaataatcttgtcgatatgcctagtcgaagggattataatctggctttatttgttgttgatctcaggcttataattagttcgtgctccagtttttcc

SEQ ID NO: 117276 - DNA, 906 bp, Zea Mays
atttattttgtggtcatgcaggagctgctggctattcagcagcaaggacctcgtgcaataggtttctttggaacccgcaacatgggatttatgcatcaacagcttattgagatcctcagctatgctatggtcataacaaaaaatcatatatttacatctggtgcttctggaacaaatgcagctgttatcaggggtgctctaagagctgaaaaaccagagctgcttactgtaattttacctcaaagcctaaagaagcagcctcctgaaagccaagaactgttgtctaaagtacaaaacttgatcgagaaaccacagcatgatcatttgccactaattgaggctagcaggtctgtgagctaccttttcaaactgctcatagttttcctatcccctctatttttgtcaccagtggtgttgcagtgtggatatatacctatttggtccatgcggtgtatcgtttagtagcacctcttctcagagagcgcacaagtgcaggttatgcaatatggacatcatctccaaggtccaacaggtgatctgcttcgcgttccatgacagcaagctgctgatggaaacatgccaggaggccaagaaccttcggaagatcgtgacactcttctacttggattagctccttcgacagggatctattctcctttttttttgttcgtggcgtaggctaatgttggggggataaaaagcaagctggacggtttagttagtttcgaaatatactggataggtggtgggatgaccttccattggaggagaaagtcattttgtttcgcccattgttttgatttttgtcacaaagaaaccaataatcttgtcgatatgcctagtcgaagggattataatctggctttatttgttgttgatctcaggcttataattagttcgtgctcc

SEQ ID NO: 117277 - DNA, 453 bp, Zea Mays
aactggtaccgtgccgtgccgtctcctctcctctctcctctctcatccccaggtctcagcccacctagcaatgttctcctcctccccttccacatgaccagcgccgcgccgcgcagcgcagccatccttgttctgtcccgggtacgccgccacacacatcgcttcaagcgcttccctccgtccctcctctttgtggattggaatcgacgcctgaaagtggatgacgatggcgggttcttgcgccgcgccgcccgttgcctgtcttccctcgttgaggacgctgccgccaactcacgtcagacttagcggcttcttgccctgttccgcggccgcgcggtgtcgcggcgccgccgtgctgggatgcgctctgggggccaagaggcagacgccgggtgttctgaaccgggtacttgcttcctacagataaacttgatttgttgtttggtctgcatg

SEQ ID NO: 117278 - DNA, 1892 bp, Zea Mays
cggtcgactattccatcagtacaaccagcagtcgtagatagacgccttgaaacaaaagactacccgagagggccagacaatgaaaagcagaaacgatcgcgcacgcacggcagcaggatcggcacacgaaaaacgcagttgcatcgtggcatgcatttggaaatatcgtaatcaaaataaaccagccgccgccctcgtgcgggcctgcgcttgccttggcctcgtcaaaagcaaggccgccccactctaggctcacctgattccttccgccttgtcagcgcagcgatccagacccacccgagccaacaacccatggccgccgcgacgccgcgtctcctgctcgcggtcgcgggcctcaccctcgccgtcctcgccgccgcggtctcgccgtctctggcggcggggccgccggtgctgcaggacccggcggagctcctgcgccttgccaaggagccggccttcgcggactggatggtcggggtgcggcggcggatccacgagaacccggagctgggatacgaggagttccagaccagcgagctcgtgcgccgggagctccacgccatggggatcccctacaggcaccccttcgccgtcaccggcgtggtagcaacagtcggcaccggcggtccgcccttcgttgctctgcgggcggacatggacgcgctgcccttgcaggaaagtgtggagtgggaacacaagagcaaagtccctgggaagatgcatggatgtggacatgatgcacatgttgctatgctgttgggatctgctaagattcttcaggagcatcgtgatgagttgaagggtacagtagttcttgtcttccaaccagctgaggaaggtggcggtggggccaagaaaatgatagaagacagagctgtggaaaacatagatgccatttttgggcttcatatagctgactctgtgcctattggtgtgctggcatccaggccagggcctattatggctgggagtggattctttgaggccgtaataagtggaaagggaggacatgctgcacttcctcatcacactatagatccgatattggctgcctcaaatgttattgtgagccttcagcaacttgtttctcgagaagctgatcccttggactcacaggttgtgacagttggaaagtttcaaggaggtggagccttcaatgtgatccctgattcggtaactataggtggcaccttccgagcctttctgaaagagagttttaatcaattgaagcagcggattgaagaggtgattgtgtctcaagctagcgtgcagcgctgcagcgctgccgtggacttcctcagcaaggaccgtcctttcttcccgccgaccatcaacagccccgagctccacgacttcttcgtgaacgtggccggcgagatggtcggctcgaggaacgtgagggacaggcagccgctgatgggcgccgaggacttcgcgttctacgccgaggcggtcccttccacctactactacttcgtgggcatgtacaacgagacgcgcgggccgcaggcgccccaccactccccctacttcaccatcaacgaagacgcccttccctacggcgcggccgggcaggcggcgctggcagctcgctacctactcgagcgtcagcagcctgctgccgccaccgctgataaggcagaaacccatgatgagctgtagatagtacatgatgtttgcgtccctgtccctgtgttgatggaattagattgagcaataatttcttcgccaagtttattcagcggctgtacatatcctggtatctccatgctttggtaatgatcggttgggatcagtcagcaaatagtctgagaaacatgctttagtctgagaaacatgattccatcccttgatcaacgtcgcagtaactatcttctgctgattccaaa

SEQ ID NO: 117279 - DNA, 1548 bp, Zea Mays
cgcagcgatccagacccacccgagccaacaacccatggccgccgcgacgccgcgtctcctgctcgcggtcgcgggcctcaccctcgccgtcctcgccgccggtgctgcaggacccggcggagctcctgcgccttgccaaggagccggccttcgcggactggatggtcggggtgcggcggcggatccacgagaacccggagctgggatacgaggagttccagaccagcgagctcgtgcgccgggagctccacgccatggggatcccctacaggcaccccttcgccgtcaccggcgtggtagcaacagtcggcaccggcggtccgcccttcgttgctctgcgggcggacatggacgcgctgcccttgcaggaaagtgtggagtgggaacacaagagcaaagtccctgggaagatgcatggatgtggacatgatgcacatgttgctatgctgttgggatctgctaagattcttcaggagcatcgtgatgagttgaagggtacagtagttcttgtcttccaaccagctgaggaaggtggcggtggggccaagaaaatgatagaagacagagctgtggaaaacatagatgccatttttgggcttcatatagctgactctgtgcctattggtgtgctggcatccaggccagggcctattatggctgggagtggattctttgaggccgtaataagtggaaagggaggacatgctgcacttcctcatcacactatagatccgatattggctgcctcaaatgttattgtgagccttcagcaacttgtttctcgagaagctgatcccttggactcacaggttgtgacagttggaaagtttcaaggaggtggagccttcaatgtgatccctgattcggtaactataggtggcaccttccgagcctttctgaaagagagttttaatcaattgaagcagcggattgaagaggtgattgtgtctcaagctagcgtgcagcgctgcagcgctgccgtggacttcctcagcaaggaccgtcctttcttcccgccgaccatcaacagccccgagctccacgacttcttcgtgaacgtggccggcgagatggtcggctcgaggaacgtgagggacaggcagccgctgatgggcgccgaggacttcgcgttctacgccgaggcggtcccttccacctactactacttcgtgggcatgtacaacgagacgcgcgggccgcaggcgccccaccactccccctacttcaccatcaacgaagacgcccttccctacggcgcggccgggcaggcggcgctggcagctcgctacctactcgagcgtcagcagcctgctgccgccaccgctgataaggcagaaacccatgatgagctgtagatagtacatgatgtttgcgtccctgtccctgtgttgatggaattagattgagcaataatttcttcgccaagtttattcagcggctgtacatatcctggtatctccatgctttggtaatgatcggttgggatcagtcagcaaatagtctgagaaacatgctttagtctgagaaacatgattccatcccttgatc

SEQ ID NO: 117280 - DNA, 298 bp, Zea Mays
tgtttcactgtcccaaataagtatatagcatgagtacatggtttccctgacaactcctattatccacaaccacattctcttttacagtagagcataacgcctccactccaaccctatttcccttaagcaagacatgtacaaatatcaacctataaaatgcattctgaagcaccatagttgcacacgttacctttcattaaaaaaaatcaaaagtggaatactaagtttgctaattcatctactcaatgatgagcctctgacagaaaccaccaggatcacatccaacggacatgaacag

SEQ ID NO: 117281 - DNA, 1182 bp, Zea Mays
gtaggagttggtaatcccgtcgaatcggattcgcgggccccaggggccactcagccagtactcaatgactaaagtgccctcccaagttccgcaattcacgcgcgaagtcattctcgtaatctcgtccaaaatgtcgcacaagcactgtttcgtccttcgtattgcccttcctatagccgcacgcatggcgaaccgaagcgaagccaaaacgcccattccccttcgccctcttcgaccctagcaagaagacggcggcggagatggtgtactacgcgcttttggtgggcgcagagctggacggcctcaccaacctgcagcccagcggcggctgcgacgaccccagcttcccctactacctcaagctcaagtgcgagaactgcggggaggtcaccgccaagtccacctacgtcactctcagcgagcaagtcgacctgcccaagggacatggcaccgctcacctcgtccagaagtgcaagctttgtgggagagatggaacaattgtgatgattcctggtcaggggacgccacttactattgagcagagccagaaagaagagaagacttgtttgatggtgtttgactgcagaggctatgaacctgttgagttttcttttggagctggctggaaggctgagtctatgaattttctgagtatgatgagaagggagaatgcccggttgagctaagcaagctgcagtcaacattcaaagtggtgaagaagcatgagaagggtggtaagacaagatttgtctagatccagtgacttggagtctgtcgggtattggaatcggaggtgtataaatggtacatttgggctaaaaggttgtgcgtaagacgtaccttctctgtctattgattttgtggatgccgtgaaccatgtgaagctttcagtgacagtgtccacagaggcattgccctggaccgattactattgttctgtggtctgaggtcatcggaaccgatctttttatcttctgctaatgcttgaacatgctgctgatttttttttgagcattgtgactgatggctctgaagacatctcacgaattggaggctcccaacgattactagccagattgcttctccaatttatactcatttcgttataatttataattcatttgactttttttatcctaagtttgaccgggtcatcttattaaaaaaatatataattattat

SEQ ID NO: 117282 - DNA, 1318 bp, Zea Mays
aaattatcatcataaatataaaaaaacaatggtcaaaagtcaggagtatgttttatttctgaattacgatgaagtccatttctgccaaccaaaggggctgtaggagttggtaatcccgtcgaatcggattcgcgggccccaggggccactcagccagtactcaatgactaaagtgccctcccaagttccgcaattcacgcgcgaagtcattctcgtaatctcgtccaaaatgtcgcacaagcactgtttcgtccttcgtattgcccttcctatagccgcacgcatggcgaaccgaagcgaagccaaaacgcccattccccttcgccctcttcgaccctagcaagaagacggcggcggagatggtgtactacgcgcttttggtgggcgcagagctggacggcctcaccaacctgcagcccagcggcggctgcgacgaccccagcttcccctactacctcaagctcaagtgcgagaactgcggggaggtcaccgccaagtccacctacgtcactctcagcgagcaagtcgacctgcccaagggacatggcaccgctcacctcgtccagaagtgcaagctttgtgggagagatggaacaattgtgatgattcctggtcaggggacgccacttactattgagcagagccagaaagaagagaagacttgtttgatggtgtttgactgcagaggctatgaacctgttgagttttcttttggagctggctggaaggctgagtctgtgcatgggactccttttgaaattgactgctctgaagatgaattttctgagtatgatgagaagggagaatgcccggttgagctaagcaagctgcagtcaacattcaaagtggtgaagaagcatgagaagggtggtaagacaagatttgtctagatccagtgacttggagtctgtcgggtattggaatcggaggtgtataaatggtacatttgggctaaaaggttgtgcgtaagacgtaccttctctgtctattgattttgtggatgccgtgaaccatgtgaagctttcagtgacagtgtccacagaggcattgccctggaccgattactattgttctgtggtctgaggtcatcggaaccgatctttttatcttctgctaatgcttgaacatgctgctgatttttttttgagcattgtgactgatggctctgaagacatctcacgaattggaggctcccaacgattactagccagattgcttctccaatttatactcatttcgttataatttataattcatttgactttttttatcctaagtttgaccgggtcatcttattaaaaaaatatataattattat

SEQ ID NO: 117283 - DNA, 1095 bp, Zea Mays
gttttacatactggttcgaccgttgcctacgaaatctaccagcccatcaacaccgaaaagggatcgcggagaggaggcccaagcaacccaagcgcttgcaatccacttgacattttctcctcctcgtctcctcacctctccgccgccatgtccatccccggtaacgggcaccttcccgcgtccgattccctcccggaccactcctccgcctctgactccgacgccgatccggaatccgactaccggccaatcaccgccgccgactccgactccgactccgaccccgacttcgacgccgccttgccccaccaccgcatcgaggagacaggaaacggcgtctccgcgctggatctcgcgtccgacgaggacgaagcggcagaaggcgcggaggaggacgatggggacggagacccgaggcccggggcggcggcggcggcgcgggccttctcggaggacgagcgtcgccgccgcgccccgctgcccgcgggcgccgcggcgcggatcgtggacgcgatgcgcggcgtcgagttccccggcgcgccgccggcgtgggcgggcagcgtccccgaggaccagtggctcgaccgcctccagtctctccgtgccggtcgtcccaactgatgtgttgagcagatcagcagaacacaatgggtcttctttcgcatctgatgtgatggccgatacaacagcgtgcaatttgtatgccaactttgatctagtttattgttattgttatcgtgactggaggactgcagctcatcggccatgaggttcatcatctgttggaactttgatcttctcatcttgaccctctaggagggtcataaagtatatgtttgcaagctcaagactttcagacaagttatatcttcttattctttagtataaatgatgttcttgatggtatctcagatgccaatgtgtcgtaaaatgcgaccgcaagcatctgttatctttgctgaaatgagggtactagcccagtggggcaaggtaaagactaaagagtgaactggatggcgcttaagcatttcaccttccgtgtcatcgtgttcttagtttatttgtggtatactattatatgtttttttgccaaaa

SEQ ID NO: 117284 - DNA, 1554 bp, Zea Mays
tatttgttgcagccgcctgccgccctcgtcccgtgcgtccccttcttaaaccttggcagtgcaagcccaggcagcctcatcccctcagtcctcagtccctcacacactcactatacactgctctgctgcagcaagaaggaagaagctagcgcctccctagctctcgttgtcagcaatggccaccaccgccgcgtccagcctcctcaagtcctccttcgcgggctcccggctcccttcggccacgcgcaccaccaccccgtcgtccgtggccgtggccaccccgcgcgccggcggcggccccatccgcgcgtccatctcctcctcccccaccccgccctacgacctgacgtccttccggttcagccccatcaaggagtccatcgtgtcccgcgagatgacccggcgctacatgacggacatgatcacccacgccgacaccgacgtggtgatcgtgggcgccgggtccgcgggcctgtcctgcgcgtacgagctgtccaaggaccccaccgtgagcgtggccatcgtggagcagtccgtgtccccgggcggcggcgcgtggctgggcgggcagctgttctcggccatggtggtgcgcaggccggcgcacctgttcctggacgagctgggcgtgggctacgacgaggccgaggactacgtggtggtcaagcacgcggcgctgttcacgtccaccgtgatgagccggctcctggcgcggcccaacgtgaagctgttcaacgccgtggcggtggaggacctgatcgtgcggcgggggcgcgtcggcggcgtggtcaccaactgggcgctcgtgtccatgaaccacgacacgcagtcgtgcatggaccccaacgtgatggaggccaaggtggtggtcagctcctgcggccacgacgggcccttcggcgccaccggcgtcaagaggctccaggacatcggcatgatcagcgccgtgcccgggatgaaggcgctcgacatgaacgccgccgaggacgagatcgtgcgcctcacgcgcgaggtcgtgcccggcatgatcgtcaccgggatggaggtcgccgagatcgacggcgccccgaggatgggcccgacgttcggcgccatgatgatctccggccagaaggcggcgcacctggcgctgaaggcactgggcaggcccaacgccgtggacgggaccatccccgaggtgtcgccggcgctgcgcgaggagttcgtgattgcgtccaaggacgacgaggtcgtggacgcctgagcgagcatccacgcgccagcatgcaagcagcgtcttatctgggccggcgccatcacggggtttcttcttttaatctgggactttgttgttgttggacgaatgaattcccttcgatcggttagctttaatctgtctcgttagtgtgtcgtgttcgtgtagcaccatgccacagctacgccatgccgtgtgctctgtcacgtgggggccactcgtggggtctcctgctgctgtcagaacgaataagagaagatggaattgtggtgaaacaataaaaatgcatggtttaaattgtcttgttggtgttgcttctc

SEQ ID NO: 117285 - DNA, 601 bp, Zea Mays
tgggaagccgaggcagcaactggtagatagatcgagggcggcagcagggaagggatggaccagatcatggggaaggtgggcggctactggttcaaccagaaggccaacaaagagctcgacgacatgaactcgatctctagcagcatcggagatggagctaaatggatggtcaacaaaatcaaagggaagatgcagaaaccgctgccggagttcctcaaggagtacgacctcccagcaggcctgttcccgcaggacgcgacgaactacgagctgaacgaggacaccaagctcctgacggtgtacatcgcgtcgccgtgcgaggtgggctacaacgactcgtcggtgctgcgcttcgccaccaccgtgacggggtacctggagaaggggaggatgacccacgtcgagggcctcaagaccaagatcctcatctggaccaaggtgacggaggtacggaccgaggccaccaaggtgcacttcgccgccggcatgaacaaggccaggaaccgggacgcgtacgaggtcgtcagggacggcatcgccgtagacaagttctagcagaccttgttaattaggcgcgtaatataacagctcgagcgagcgg

SEQ ID NO: 117286 - DNA, 3104 bp, Zea Mays
tgagaaatagtgtttgcccattaggcagattgccaaaggtaagcaacaaggattgaacggcaagatcaggacaacagaaatagaaagatgcatatgcaagcacatgcaaaaaaaaaatatgaagcataaacaagactcgcagggatttatcatagccctgagcattgcaagttgtgtagataaacttctataacagttcacaatccgatagtcacttgctatccattgaaatcactctacaaggttcctctctgatagtcacttgctatccattgaaatggctctataaggctcctctcttggtggcctctgttttcttggttatggtagtaccaacctagttggaggtgcggtacagcttcccaaaaacatggagcatagcgacaacagcgatgaacccaatgctcatgatcagaacggtgtttggtgacattttgcggcccgcagcctcatcggtgtaaaactggagcatcgagctggcaccacctccgccagcagcagcaccgcttgtggtcctacgcctgcgcaggcttgcagctgccgccgcactccctctagcaggtgcgtcgccattcgccaccatcttgtcttaacacactctgcatgacagtgaaaggggttcagattacaatatttgcattcactactgcaactgtgagtacacaacatgatgttggctgccaatagcaagtgtcacatatttaatattccatattttggaaatatagctaagaaatacctgcagcatgtagcattgatgcagttggtcgttcatgatgaaacaaaaaaaagcaatcattttgctttcttatgcttacaaagtccaactaagcacaaaactctgaactctggttttactttactggtgctaatggacaaattatgactgggatagtaggctgaaattcaatttctaaattgttcaaaaattcagctcctactttggcagacgacatattaacctttataagctagaagtgattatgatatgttacagtagtatgtgcgcacaagcttcaccgtaagattattcaatgcttgtaacagaaacagaagtgcaggcaaatacagttgcattgtgaggagcattgcaaaatcaacatgcatgttgtcatgttgacatacacagggatgatataacaattacacacaaatcaagcccgaagcaaacaacaaggcccaccaggaccaaccaaggattaggttatataaccagaatgtatctgatctatgtttgcattttggttgtatttgcaagccataatgatcaactttagttgttcttggtcaattcatccagatcgtacggccagaaaattgtagttttgtttaagtgttgatttattatctattgagcagtttaagtagaaatggtgcaagccatcatgttatcaaacacatgcagcatgctactttgtcatgcaggatgcagcatgttacttctgtgtacatgtgttcaaacgaacatgaaattgcagctgcaagaccaaacagccagcaaaggcaagggctgaattgtgttagtaaatggagtctctggatttaggaggtgtttcgtatgaggtctacctcatagcagctctgctctaaaactccagaatggagtagctctagagttttttagatttcaaagcagcaaacgagatactcaaaaaaacttgaactgcaactcccaaaacttcaaaaagtttgtaactctagagttagagtgtttggttggctctagtcagctctcttttggagttttgttctagagccatatcagacacccccttagttagggtcatgactggagtaggattttattcacacagatcctgcattcgtcagtgatgataaaatgtgtatgtttactggcaggaggagaaaagaaaggtgatccaatttgcattgaatgaggagcaacccagtaagttgcatccgtgagaagtagaggatctcaaatatcttttaaagattgtgatgccagttgacagcatgtgaactgcaaggatcccttgcattctccaggctgacaaatatttatctccaaaacatttatgcaaaatatagtctcgttactgatgaatgcagtgcaataactgtggttgttagtatgtttgtgttcatgagaaaagaattatgtgttggtgaaccttagttgtgttctgtttttcagtttgtgatcttacactaatggcaaagcattgttgttttttgtagtttgtggacttttgttcaaaggttgctgccttgcacagcatcaggttcttgctggttaggctttgacaatccatggaactgcggcatagccaagaaaatatgtattcgtcggttcaattctcaattcgcttgttctacttgtgtggttaaaaaccataaagcatttgtataaacaatcgttcaaggtactgcaggaagacaacgagctcttagaaatctataaagacaaatatgtgggcaaattgcttcatccaatcaacaatggacccaggccggcagatggcttcgatcggagcatgtagcgccacaccgctagctcatcatccaatcgacccacccgatccattggagcactgggtcgaagcaggattacatgtatggacagaccggtgcttctggactctggagtattcatttggttctatgggtccatccggtttgctccacggagcaactaaccccatatttagccacgatccattacgggtcctaaacgtatctgatctacgttatggagctcaggcacaattacagggccggcataagcatgaatcagcagcgcacaagtaaaacaaggcaaccatatgtaggggtcagatctggacgaaacatgtaccctaaacgcaggaattcaaacaggcgagatatgcagaatggaattcgaataggcgaaacatgtccaatcgacagaagagcaatacgcagagtgatctaaccaaaacaaacctcgcaaccaccggcagaagagcgggtggagggaaccgccggcagaagaagagcgggtgaagggtggcagatggatgtatgcgcacgcacctgacctgacgcctggcggtgatgaatccgctgttctcttctccctctcgtccttgtacagtcccgatggccgagcgagatccgtg

SEQ ID NO: 117287 - DNA, 3050 bp, Zea Mays
cgctcccaatcccatgcgcccctctgctctcacggtttgatttccctttcagttgggccgccatggccgcggtagcagctgtgcgcctgcaccccggcctcccccatcgccggccctgacactgggtaaacgtggtggctgaagctgctgctgaggattcgggatcttcttgctgccgccacgagctgcctgcgtgatattgacacggcgcgctcccctggctcctgggcatgacgaggggaggcggtggacaaggaggcaaggaggagccggggaaggtgatgggtccgctgttcccgcggctccacgtcagcgacgcaggcaagggcggcggcccgcgggctccgccaaggaacaagatggcgctctacgagcagttcaccgtgccgtccaaccgcttcagctcccccgcggcctccgcccgcgccgcgggggccagcctcgtgccctccacggcggctgcccaggtttatggttatgacaggacgctgttccagcccttcgacgtgccttcaaatgagcctcctcgttcatctgaaaagttcaaaggaaacactatcaacgggcagtctaatagtacaagaagagaacctttgaggatgtcctcacagaccaagaacaaggacgtctgtgcttcaaaatcaattgccaagtgcacctcacagcatagagtgggcaacaccatcatgtcttctggaaagaaagtggtcagtgatgatgaatttatggttccttccatctgttatcctagattttatcgacagtctactcaagatcatgcagataaatcaaaaccccaatctactacaaacccacacaaaagtcctgcaatgtccaaatcatctgtagagtgctatagtactgtgaacaagcacttggacaaaatcaatgaagctgataggaggttaatgaactctccaaaggttaaggagaaagaagcagtgcaaggatcaaaagctgtggaagttaaagaaaagagttcatcatttcaggcatcagaaaagttcaaagacaaatatgctaagctatgtcaaatgaggaataaggcaagtaatataaatcattgtgacaacaacggttgccaacctgcaagcgtgaatggaaatttcacagaagcaaagaaccctacagcagctagaaatacatcttcctgtaaaccatgtactgatgtagatagctctaacaggaagtctaatttactggaaagaagcccacgggaagttggtgctaagagaaaaagaggacatcacaatggagagcaaaatgatgatttatctgactcctcagtggaatgcatacctgggggggagatctctccagatgaaattgttgctgctattggtccaaagcatttctggaaagcaagaagagctattcagaatcagcagagggtttttgctgtccaagtgttcgagctgcataagctgataaaagtgcagaaattaatcgcggcatctccacatctgcttattgaaggtgatcctgtccttggcaatgcattaacaggaaaaaggaacaaacttcctaaaggaaattcgaaagttcagaccctgtcaatcacaaacaaagatgatatccagccaaccctagagcaaccagagttatcaaaacaagacacagaaggaaacttattggcccattctcatgatgatggacttggtgacaaccatcataatcaagctgcaacaaatgaaacctttacaagcaaccctccagctatgcatgttgctcctgacaacaaacagaataactggtgcatgaatccaccgcagaatcaatggcttgtcccagttatgtcgccttctgaaggtcttgtctataagccttttgccggcccttgtcccccagttggaaatctgctgacaccattttacgccaactgtgctccgtcaaggctgccttctacaccatatggcgttcctattcctcaccagccacagcacatggtccctcctggtgcccctgccatgcatatgaactacttcccgcctttcagtatgccagtgatgaatccaggaacaccagcatctgcagtggagcaagggagccatgctgctgcgccacagcctcatgggcacatggaccagcagtcgctgatctcatgtaacatgtcacacccgagtggcgtttggaggtttcttgcatcaagggacagcgagccacaggccagcagcgccaccagccctttcgacaggctccaagtccaaggtgatggaagtgctccgttgtcattctttcccacggcttcagctccgaatgtccagcctccgccctcatctggaggccgggaccgggaccagcagaaccatgtaatcagggttgttccgcgtaacgcacagactgcttcagtcccgaaagcccaacctcagccgtcatccggaggccgggaccaaaagaaccatgtaatcagggttgttccgcataacgcgcagactgcttcggagtcagcagcgtggatcttccggtcaatacaaatggagaggaaccaaaatgattcgtagctggttaccatatactttcgtgtcatccgatggcagcttagtgcagcattgcagtttacagggctacccgagctgcagattatggtggctcctgtattctgaccactgattgcgctttacccgatcgtcatagatattggatgatatgatcttgtgttctatgcagagttgtaagccaaagttgtgcccctgaagactgaagtgacagccctgaagttgggagtccttcctgattgtgctatgactggaattggtatatatataggttacttgaacggtttcactgtgttgagctcaccacacggccgcgcttctgtaacatacaatacaatagactatgagtggtacagtaggaagcagcagtcagaaaatgactgctggtaccatgctacggggtcgctatagattgatgtgtaccggtactctggttctggtagtatatgctgctgtataattcagtgtttaattatctatatattgtacattagctgtcaagcctgtaaggcattgtattgtgggcaatgaatttggttgcaaatgttcgtgtac

SEQ ID NO: 117288 - DNA, 95 bp, Zea Mays
ccattttgctacagaattctcagtccaaaaccacaagaatttgctgcaccaagactctaaactgatcactaacactgaaattcagtctctgccag

SEQ ID NO: 117289 - DNA, 489 bp, Zea Mays
atgtcgttggagtctagcgcctcatcgagcaatccacctacacggaggcgcgaccggcacaccaaggtggagggccggggcggcagatccacatttggaggcgggcgggcttgggctgagcggcgtgctgaaggcggcagtggtggcggcgtgggaggtgggagcgagggagcaagttgcctccacggagccgcgaccggcacaccaaggtggagggtcgggggccacggatccgcattggacctctgcttattccatctagggggaggggttcgcagcggggcaaacatcacgggggcacttctgggggaggctatcgcggcggaggtggtggggcatcgggtgagcgaaggacgggggcggggcacgcacggaggagggggcgcgcgcgtggggaaggaaggtgatggcgcagatggcgacctcggcgcatggggaaggaaggtgatgccgcagatggcggccgaggcacgtggggaagggtggtga

SEQ ID NO: 117290 - DNA, 668 bp, Zea Mays
tttttgaccaagagtgccaagttatttatccgattgcgatatgtcctatttgtccagttgtcagtaaacagatgtcacacaggttgcacaaaaacagtaactaaacctagaatctgaccacattgtatcataatttatcgatatagcacatgatggcagatacattgattgccaaatctgaccacaacataccactcaacccctggaaaaacacagacattcaaattaatgcttaccaatgcattagttacaatgtatcataaaaatctagtctatatgaattgcagttctgacactttcagtttccttgtttaatgaagcttgtaagttaggagcaccatactgctattacacagataaatccagatacaaataatgaagagatgtgttggagcctccatattggatggatgaacgcaaaccaccaaggaagtctagtatcacttagtagtattcccgaaaccaagcaacaattgaaaattgtttatcacattcagaaatactcctttattgaaggaaaagtaactgctgtaaacataagcgaccaaagttgaacaaaatggtgctacaaaaatcacctttgttgtggtaagctttcagtcccaagaaacgagaaaagtttctttgcaatgaagaaacaaatacactaggacttggaagttcgacga

SEQ ID NO: 117291 - DNA, 330 bp, Zea Mays
atgtgggcaaattgctacatccaatcaacaatggacccaggccggcagatggcttcgatcggagcatgtagcgccacaccgctagctcatcatacaatagacccagccgatccattggagcactgggttgaagctggattacatgtatggacagaccggtgcttctggagtactcatttggttctatggatcacatccggtttgctccacggagcaactaaccccatatttagccacgatccattacgagtcctaaacgtatctgatctatgttctggagcttaggcacaattacagggctggcataagcatgcatcagcagcgcacaag

SEQ ID NO: 117292 - DNA, 1700 bp, Zea Mays
ctcgatccatgtatgcatacaaatactcgctcgcatgcatgcatcatgtggttgctttgctgatcagaccagctaacttgcaagcaggggtctgattcttccaagttaaagatggatcataacctgagcgacatgacgatcctgagcgagcacgcatggggcgacgaggccggcgccgtcttgctgtcgccaccggaggtgggcagcgtcatcgaaggcggcgggggcatgacggtgctggagaggctggtgctcgacgaggcgctggcagccgcgatcctggagctgcaggccatccagcaggccgcccccgggcccgcctcctgcgccggcaagcagcagctggcggccggtggcggtggtggtgtggttggggcggaggccgctgtcgccttcccctcgatgatggcgatggcgatggcggcgccaacgcccgcctacgcggacgcggacgtggacgcgggtgtcctgcagcgacagcagcatcaccatcgccctcacgccgcgatggggatgcctagtcccgactacgacctcgcaccagcagcagcagcaacacccgcggtcgcggtaactgctgccgcgccgcccgccttcaccacaaacacaaacgccgcggttgacagcggatgcagcggcctcgtagtccttggacgctcgccgccgccgccggtcttctccgccagcaacgagaccgcagcaacggcgagcctggactgtgaacatggcggcggaggccgtggtggtggccgaaggcaacgccggcccaacaggaagaggaaggccgccgccgaggccgagcggtcgcgacctgtgcgtgtggcggcggcagcggcacaggaagagagcaccttgtgcagcctcctggcgtccaccgccccgaccaccgcgggcggcatccagatcgcgttcagcacggcggccgtgcatcagcagcagcatgctgccggtggggccggcggcgccaagacatcagcgaagccgtcgtctctgagtctgagcagcagcggctcgtcgagcaacatcagcttcgacggccggaaccccgcgcgcaacggcggcggcggcggcggcggcgaccccgtgtacgagccggacacggaggcgctggcgcaggtgaaggagatgatctaccgcgcggcggcgatgcgcccggtgtccctcggctccgaggacgacgccggcgccggcgccgagcgcccgccgcgccgccgcaacgtgcgcatctcgtccgacccgcagacggtggcggcgcggcagcggcgggagcgcatcagcgaccgcctccgcgtgctgcagaagctcgtcccgggcggcgccaagatggacaccgcctccatgctggacgaggccgccagctacctccgcttcctcaagtcccaggtccgggacctgcaaaccctagaccgccgcaactacggtgcagcttcttcgaatgacgccgccgccaccatggctgccgttgtcgggtcgtcactcagctacaaccgtggcaccggtgccatgcccgcattcaccttcccggcagcaggcgaaaccctacgaggagcaggatgatgatagatttgtaacacacccacgcagcatgcatgttgttgttaaccctttttttatgttcgtctaatgtgcatgagaccatctttatgatgtatttcatcattattaatgttagatcaaagactaggtagacgatgatgatc

SEQ ID NO: 117293 - DNA, 1453 bp, Zea Mays
cgatccatgtatgcatacaaatactcgctcgcatgcatgcatcatgtggttgctttgctgatcagaccagctaacttgcaagcaggggtctgattcttccaagttaaagatggatcataacctgagcgacatgacgatcctgagcgagcacgcatggggcgacgaggccggcgccgtcttgctgtcgccaccggaggtgggcagcgtcatcgaaggcggcgggggcatgacggtgctggagaggctggtgctcgacgaggcgctggcagccgcgatcctggagctgcaggccatccagcaggccgcccccgggcccgcctcctgcgccggcaagcagcagctggcggccggtggcggtggtggtgtggttggggcggaggccgctgtcgccttcccctcgatgatggcgatggcgatggcggcgccaacgcccgcctacgcggacgcggacgtggacgcgggtgtcctgcagcgacagcagcatcaccatcgccctcacgccgcgatggggatgcctagtcccgactacgacctcgcaccagcagcagcagcaacacccgcggtcgcggtaactgctgccgcgccgcccgccttcaccacaaacacaaacgccgcggttgacagcggatgcagcggcctcgtagtccttggacgctcgccgccgccgccggtcttctccgccagcaacgagaccgcagcaacggcgagcctggactgtgaacatggcggcggaggccgtggtggtggccgaaggcaacgccggcccaacaggaagaggaaggccgccgccgaggccgagcggtcgcgacctgtgcgtgtggcggcggcagcggcacaggaagagagcaccttgtgcagcctcctggcgtccaccgccccgaccaccgcgggcggcatccagatcgcgttcagcacggcggccgtgcatcagcagcagcatgctgccggtggggccggcggcgccaagacatcagcgaagccgtcgtctctgagtctgagcagcagcggctcgtcgagcaacatcagcttcgacggccggaaccccgcgcgcaacgtgcgcatctcgtccgacccgcagacggtggcggcgcggcagcggcgggagcgcatcagcgaccgcctccgcgtgctgcagaagctcgtcccgggcggcgccaagatggacaccgcctccatgctggacgaggccgccagctacctccgcttcctcaagtcccaggtccgggacctgcaaaccctagaccgccgcaactacggtgcagcttcttcgaatgacgccgccgccaccatggctgccgttgtcgggtcgtcactcagctacaaccgtggcaccggtgccatgcccgcattcaccttcccggcagcaggcgaaaccctacgaggagcaggatgatgatagatttgtaacacacccacgcagcatgcatgttgttgttaaccctttttttatgtt

SEQ ID NO: 117294 - DNA, 1781 bp, Zea Mays
agccttttgctatactgctgcatacacacacacacacacacaggatagtgagagatgattaagtcgctcccacatagcaaagccaaaagtttagcagctcaccgcaggcatcttcttgtcctcttgctctttccttgatccatccatggaccatgcatggtgcttttgcaggccgccggctcccctctcaagctatagcggttactagtactactagactactagctagtgcacgaatgcccccttctgcacctcgcttgccatagcttgcatcatcatcagctgctagcctgctagcagctcggtccacgcgcgactactagtctactagtagatgagcagtccagcagtgaaagtgtagtggcagtggcagcggcagccatatccccaccacactgctcgatcatcaccacgcctccgtcgtcagacctgcacctagctttgcatcgcgcattaatcaggaatcggaggaggggtctgattcttccaagttaaagatggatcataacctgagcgacatgacgatcctgagcgagcacgcatggggcgacgaggccggcgccgtcttgctgtcgccaccggaggtgggcagcgtcatcgaaggcggcgggggcatgacggtgctggagaggctggtgctcgacgaggcgctggcagccgcgatcctggagctgcaggccatccagcaggccgcccccgggcccgcctcctgcgccggcaagcagcagctggcggccggtggcggtggtggtgtggttggggcggaggccgctgtcgccttcccctcgatgatggcgatggcgatggcggcgccaacgcccgcctacgcggacgcggacgtggacgcgggtgtcctgcagcgacagcagcatcaccatcgccctcacgccgcgatggggatgcctagtcccgactacgacctcgcaccagcagcagcagcaacacccgcggtcgcggtaactgctgccgcgccgcccgccttcaccacaaacacaaacgccgcggttgacagcggatgcagcggcctcgtagtccttggacgctcgccgccgccgccggtcttctccgccagcaacgagaccgcagcaacggcgagcctggactgtgaacatggcggcggaggccgtggtggtggccgaaggcaacgccggcccaacaggaagaggaaggccgccgccgaggccgagcggtcgcgacctgtgcgtgtggcggcggcagcggcacaggaagagagcaccttgtgcagcctcctggcgtccaccgccccgaccaccgcgggcggcatccagatcgcgttcagcacggcggccgtgcatcagcagcagcatgctgccggtggggccggcggcgccaagacatcagcgaagccgtcgtctctgagtctgagcagcagcggctcgtcgagcaacatcagcttcgacggccggaaccccgcccgcaacgtgcgcatctcgtccgacccgcagacggtggcggcgcggcagcggcgggagcgcatcagcgaccgcctccgcgtgctgcagaagctcgtcccgggcggcgccaagatggacaccgcctccatgctggacgaggccgccagctacctccgcttcctcaagtcccaggtccgggacctgcaaaccctagaccgccgcaactacggtgcagcttcttcgaatgacgccgccgccaccatggctgccgttgtcgggtcgtcactcagctacaaccgtggcaccggtgccatgcccgcattcaccttcccggcagcaggcgaaaccctacgaggagcaggatga

SEQ ID NO: 117295 - DNA, 1406 bp, Zea Mays
gcgcatccctcgtcctcgtgtctctttttgtccttgttcttctccgtcgccggtgcgctcgcctcctgcctccctccccctttgcgagcgatcgtgaggggatcgagatggcctcagcctcacaccaatccgagcccctcgactccgctgccaccagcgacaccgacgccccctcagataacatcccagaattaccatgccccccctgtcatatcgttaccaaacctggtcaactcccagtcgagtttcttgaaccctcagctgcccagaagttggtaattggatttgactgtgaaggtgttgatctctgtcgcaatggtgctctctgtattatgcagcttgcattccctgacgctgtttacctagttgatgctattgagggtggaaaagaacttattcaagcttgtaagcccgcacttgagtctgatcatatcaccaaagttattcatgattgtaaaagggacagcgaggctttgtattttcagtttggcatcaaactgcacaatgtgatggatacacagatcgcttattctctgatacaagagcaggagcagaaaggaaaaaagaagacatctgatgattacaattacatatcttttgtcagtcttcttgctgataaacgatactgtggcataccatatcctgaaaaggaagaagttcgtatccttctaaggcaggaccctaacttttggacaattaggccattgtctgatatgatggttcgagctgccacagacgatgtccgcttccttctcaatatctacgagaaaatgatggaaaagttaaacaaagtatctttatggcgtctggcagttcgcagtgagctgtactgtaggtgcttttgcttaaatgacaaccagtttgcagattggtcacctcttcctcctgttcctgatggcattgaagctgatgtttatgttcctgaagttgatatcctatcagtcttagatgttcctcatgggaaaatgggacgagttattggcagaaaggggtcaacgataatggttgtgaaagaatcttgcaatgttgaaatccatattggtggtgctaaggggcctccagacagggttttcatcattggatcagtgaatgaagtcaggaaagccgaggccatcttcagaggccgaatgctggagttctagagatgttaccctttgcgccccatgtttcgactgctttatatcttttgaacgcaaaaagggggaaatacacaaaaggcgtatgcggtgccgtggatctcttgcccatccgtgaatcatgtgaagaaagtataaatgatttcaacttggcctatgtcagtgttgcgcttcctgtctcaactactcgccatctggttatacactctcgtttctggcctgtttcaggatgcggaagtatgctttagatttcactctcttaagcctcta

SEQ ID NO: 117296 - DNA, 686 bp, Zea Mays
catttctcctcccactcccaaccaaaccgtcgctaactatcactagtcgccgtgtggtggtcgtcgtcatatccctcgcctctgcctcgaccgcccgatcgcccatagcctgctggcctgctctgctagccatggaccggtccaagtcgtacgcgggcgggcgcatgcagatcgagccgtactacggcggcggcggcggcggaggaggaggcgcgcgggcggacttccggtcctactcctacagcgccggcgggacggggccgtcgtcctactcgtacaaccagtacgagtacggaggcccgggggcgggtgaggaggaggtgaagcggagcaagtcgaagcggcggtggctggcggacccggacatggaccgcaagcgccgcgtggcggcgtacaaggcgtacggcgtggagggcagggtgaagggctccctccgcaagagcttcaggtgggtcaaggaccgctacctcgacctcgtctacggttggtcctgatcctcagagcacgcacaccaccgctctccatggttgttgtttggctctcgtagatgttgttcatccttcctggtgatgtgaaaccaaccagtacagtgtatgtattcatgagatgtgtgactcaagaggttgtttcagaccaaattggtacagataaattcatcgttcaggtgatcaatgagcgtacgtggt

SEQ ID NO: 117297 - DNA, 1796 bp, Zea Mays
aattcctacgaccccttcgctccaccacgcccctatcagatttgtttcttttcctccgatcagatcctctcagcgatcatggcgggcggcaccttcaccgagaagggcaagcaatatccggggaagatgacggtgttcgtcttcctcacctgcctcgtcgcctcctccggcggcctcatcttcggatacgacattggcatctcaggcggcgtgacgtccatggacccgttcttgaagcgcttcttcccgtcggtgtacgccaaagagcaggaggtggtggagaccaaccagtactgcaagttcgacagcgtgctactgacgctcttcacctcctcgctctaccttgccgcgctcgtcgcctccctcttcgccggctacgtcaccaagaagtgcggccgcaggatgtccatgctcggcggcggcgccatcttcctcgtaggcgccgtcctgaacggcttcgcgcagaacgtggccatgctcatcgtcggcaggatcttcctcggcatcggcgtcggattcagcaatcagtccgtgccactgtacctgtcggagatggcgccggcgaggatgcgcggcatgctcaacatcagcttccagctcatgaccacggtcggcatcctcgtcgccaacctcatcaactacttcacggccaagatccccggcggctggggctggcgcatcgggctcggcctggccgccgtcccggccgtcatcatggtcggcggctccatcttcctccccgacacgcccaactccctggtatcccggggcaaggtggagagcgcccgcgccatgctccgccgcatccgcggcaccgacgacgtctcgctggagttcgacgacatggtggcggccagcgaggccaccaaggccatccagaacccgtgggggaccctgctgcagcgccggtaccggccgcagctggtgatggcggttctcatcccgacgctgcagcagctgacggggatcaacgtcgtcatgttctacgcccccgtgctgttcaagaccatcgggttcggaggcaccgcctcgctcatgtcggccgtcatcacgggcctcgtcaacatgttctccaccttcgtctccatcgccaccgtcgaccgtctcggccgccgcaaacttctccttgagggcggcatccagatgatccttgcccagttcgtgcttgggacgctgatcgcggtcaagttcgggacggcgggcgtggcggccatctcgcggccgtacgcgatcggggtggtattctgcatctgcgtcttcgtggcggcgttcgcctggtcctggggcccgctggggtggctggtgcccagcgagatcttcccgctggagatccgatcggcggggcagagcgtggtggtcgtcttcaacatgatcttcacctttatcatcgcgcagatcttcctcatgctgctctgccgcctcaagttcggcctcttctacttcttcggcgcctgggagatcgccatgacgctcttcgtctacttctttctccccgagaccaagggtatccccatcgaggagatggaccagatctgggccaaccactggtactggaagcggttcgtcgacggcggccgcaaggtcgagctcatgtccaccgccgtataacaattattatcttagtcagtcaatcgttatattagtcagtactcttctcttagtcagtagttcgtgttactttttttttatctcgagagaaattattactatttctatttatctcagtaatcaatggaaactgtcgtccctggatattgtttattactgtctcttttacgtaaaaaaaatgagcatcc

SEQ ID NO: 117298 - DNA, 1261 bp, Zea Mays
tcaacttattagctagcttgtttagaggttaaggtgatacaattagacggtaaactgttgattttactttttatttagtcattctacgatagggtttggtttgagaaataaaaaaaaatctatgatcttttcatttcttacttttttgtttgatttgtgaaaaataagtttatcacatcaaaattgaggaaagaacttgtggagacgtaatgattccttaaagcaaacgctcccaaaatctccattagcaaatatttaatgtacttttcaatcgtgattcttcaaaggtgaatgtgttaattatcgtacgctttttcagtagaatgcagaaccaaaagcagacgtaagaaacacggcatttcctattccattaggaatgacataaagcaacttgagcgaagcagatacacagccaatcacattgcccgcttacaacctacacatgacaacatcggatccgcctccaaaccctatgccttcttgggggacttggcggccttcttgggcgacttggcctccttgctcccgccgctggacgccttctccgccgtcttcttgggcagcaggaccgggttgatgttgggcaacacgccgccgtgggcgatggtcacgccggtcagcagcttcccgagctcctcgtcgttgcggatcgccagcagcacgtggcgcgggacgatgcgcgtcttcttgttgtccttggcagcgttgccggcgagctccaggacctggccagagtgggaagcaaagcgaatcagcacatcggaatcaggatgccggtgcaagatcagattcggaacaatggtcccagttcgagacgctgctgatcgtgatgccatttacctcagcggcgaggtactccaggacggccgcgaggtagacgggggcaccgctgccgacgcgctgcgcgtagcggcccttcttgaggtagcgcccgatgcggccgacggggaactggagcccggccttcacggacctcgtcaccgacttcttcctcggcccgccggccttgcgaccggccgctcccttcttcgccttccctccagctccagtgccggtggcgtccatggccgcagctgcgcttctcgggtctgaggaggtcttgggagatgggaggaatgcgttcagagcaagatgaggggattgtctggtggtgccgggtagttaaacgcggaggctagtgggcccgtcgatccgcgttcgaggggacgggcggtcggatatgaaggcgcgcgaacggccgcgatggagctcctactgcacg

SEQ ID NO: 117299 - DNA, 1014 bp, Zea Mays
ttaatagatgattttttctttatatgatatattagcacctattatcatagatcaaataactaataattagtcaacttattagctagcttgtttagaggttaaggtgatacaattagacggtaaactgttgattttactttttatttagtcattctacgatagggtttggtttgagaaataaaaaaaaatctatgatcttttcatttcttacttttttgtttgatttaaacacggcatttcctattccattaggaatgacataaagcaacttgagcgaagcagatacacagccaatcacattgcccgcttacaacctacacatgacaacatcggatccgcctccaaaccctatgccttcttgggggacttggcggccttcttgggcgacttggcctccttgctcccgccgctggacgccttctccgccgtcttcttgggcagcaggaccgggttgatgttgggcaacacgccgccgtgggcgatggtcacgccggtcagcagcttcccgagctcctcgtcgttgcggatcgccagcagcacgtggcgcgggacgatgcgcgtcttcttgttgtccttggcagcgttgccggcgagctccaggacctggccagagtgggaagcaaagcgaatcagcacatcggaatcaggatgccggtgcaagatcagattcggaacaatggtcccagttcgagacgctgctgatcgtgatgccatttacctcagcggcgaggtactccaggacggccgcgaggtagacgggggcaccgctgccgacgcgctgcgcgtagcggcccttcttgaggtagcgcccgatgcggccgacggggaactggagcccggccttcacggacctcgtcaccgacttcttcctcggcccgccggccttgcgaccggccgctcccttcttcgccttccctccagctccagtgccggtggcgtccatggccgcagctgcgcttctcgggtctgaggaggtcttgggagatgggaggaatgcgttcagagcaagatgag

SEQ ID NO: 117300 - DNA, 1409 bp, Zea Mays
gcgaggcgggggcgcagagagcgcgggcgttgatggcgggatcaaaatttccttccttggagcagccgcgcgggcgacggagtggagcggcggggattgcgggatcagcgaggcgggggcgcagagagcacgagcgcgagagggagcggactgcaggcagaactgtgcaccaaaaaagtgtgtacgtctatactatggtcttatatagtagtagagattcgtggggctggtgtgggtaatttattgtagtagagaaatctcagaaacgtgcggaactgcgaacgccctgcgtcctacttcgtctatgctttcacaactcgctgaaaattcaacgattccctcctcgccgtcaatcctcccacaaatccaacgcctgcagttgacgccaactcatcgatccgcgccgcacccatctccaccaatatccttccattgcgctcctctacaaaagctcccctcccccaatccaccccattccacaacaccaagaagcaagaaaactagaaaaggctcctcccgaccgcaacgcccctcatctccctcgaccccgacatccccgacccgatggcgcccaaggcggagaagaagccagcggagaagaagccggcggccgaggagaaggcggagaagacgaccgcagggaagaagcccaaggccgagaagcggctgcccgcgtccaagtcctccggcaaggagggcggcgagaagaaggggaagaagaaggccaagaagagcgtggagacctacaagatctacatcttcaaggtgctgaagcaggtgcaccccgacatcggcatatcctccaaggccatgtccatcatgaactccttcatcaacgacatctttgagaagctggccggcgaggccgccaagctggcgcggtacaacaagaagcccaccatcacgtcccgcgagatccagacctccgtgcgcctagtcctccccggagagctcgccaagcacgccgtctccgagggaaccaaggccgtcaccaagttcaccagcaactgagcgcgctgcgggatccgcggatctgttagaagggttctttgctgtgtcctttccccagtcccccaccctacccgcctagtagctagcttgcctgctctataaatccggcgcgccggattgtaatggtcctcttagatttgatgtccctgttgtggaatatagttgtatctctccgcttgctatttttctcattctttaggaacttggaaatctggtaattttgccgggagataactaggatcatcacaaattcgcgttgacaacgcgacctcacaaggtcgaaggctcgtgcgtttgttgtttcagtctcagattcttcagcacaagggtatttgtgagcggcaacgatgtctgtcttgcagccatacgatgattacaattttttttgtctgccagaa

SEQ ID NO: 117301 - DNA, 1576 bp, Zea Mays
atttggtagcaactacaatcgtctcatcctctgtttcttcttttcctcgtctcagattgacccgcgccaccgctacggccacaacctgcatctctactacgacatctggtccgccagctccagctgcgagcccttcttctactggctggacgtcggcaacggcagggacttgcatcaccacaagtgtccacggagcaagctcaactcgcagctcatcatgtacctcggaccaaacgagagggcggcgtacgaagtcgtcgtggaggaagggcggctcgtgtacaggcagagcggggacccggtgagcacgaacgaggagtccaagtggatcttcgtgctgagcaccagcaggtcgctgtacgtggggcagaagcgcaagggcaagttccagcactcgagcttcctgtccggggccgccacctcggccgccgggaggctggtcgccaaggagggcgtcctcagggcgatatggccctacagcggccactacctcccgaccgaggagaacttcagggagttcatcgccttcctcgaggacaacaacgtcgacctcgccaacgtcaaggtacgcaacgcaatggatccgtcgtctgtctgtccctgtgattgactgccgaataaaggagatggggggggcttgttgtctgacgacaagacggttctcgtgtatgtgttttcagcgatgctcggtggacgacgacgagttcccgtcgttcaagaagccggcggcgggtacagaagagaagcagcaggcagcagaggaggcagccccagtggcgacagaagaggagccacgacccgtgccggagctgcccgcggtggacatcgtgaaggagggcacgggcacggccgcggacgcggagccgccgaagacggcgatgggcaggcggccgtcgttcaagtggtcgacgcccacgggcgcgcgcatcggctgcctccagaactacccggccgacgtgcagagcatggccctggagcaggtgaacctgtcgccgagggtggcggcggtggcgccgtcgccgcgcctgcccatcccgtcgccgcgccccagccccaggatcaggctgtcgcccggcctgcactacatgggctgccccaccccgacgggcgccagcaggctcgcgaccccgaccccggcgtgcaggcgctcctcgcccaagcagcagcagcagcagcagcacttgatggggttccgcgcgccggccgtggcgctcacgctccccaagcacaaggccaagtgatctgcttgctgcccattgacacctcgccgcagcggcgttttccgaggtgttgctgcgttgcgccgggttaacaattttgttgattggtttgttgcgttctctgatcggctaccattctttcgtacgttagttcgttcctgggtcatcgtattttgacctcactctggtagtctggtagcactctggtgcttgcgctctgcgtgcaccactgctgtacaactctaaactacagcctgcaatgcaaggccctactgtaacctgaacctgcatcctgcagttcctcagacaaaatgactgcaggttccgttttgaataaaaggattcgttcatgaata

SEQ ID NO: 117302 - DNA, 2545 bp, Zea Mays
caaagttactcccttatctttcttccctccggctaggttctattttattgcttagcatccccgtttggatcctccgggctgacccggggaagcgccgaagcgggagacgggcgggctgacgtgcgaaaccaggcaggcagggacgcggacccttcgtcgactcgtcgtccatccctcctcctcccttccaccggccccggcaacgaccggtcgctcggtctccgtcgtcgtcttcttccgttccttccgccccctctgcaacgcacaacttggactcgtactcctctgctccaccgtagacgcgcctagctagctcatgccatatataggcgcccccatccgcgctgggagaaccacacgaggctgaacgcttgaacctgaacctccaaagcagcaaccccagcagctttagctcctcctcatcgcagccgcagcgccgtcccctactcttccagcgaccaactgctgtctctccggcgacggcagaaccgtctctgcaggtgcagggagggacccgggagatgagtctggggctgctcaacacagagcgcaaccaccttctctccccgaagccgcagagccctcgggatgccgccgtgtcgtcgctgctgaggtcacccagggcgtcctgcggctcctgcagccagagccccaagccgaagcccaccaagatggcgcacggcggcctggagcgctcgctcagcttcaagaactgggaggcggacgacagccggggcggcatcaacggagcgcgcccgggcgccctggcgctgcagcagcaggagagcccccggcgcgtggtctccgtgtccccgcaggcgcaggccatgatcgagtacatctcccctcgcccccgcgtggagctggaccaggcggccaccacgctgcagaagatgtacaagggcctgcgcacgcgccgcagcctcgccgacggcgccatcatcgccgaggagctgtggtggaagacggtcgactcggtgtacctcaacatcaagtccatctccttcttcgacgaggacaagcaggagaccgccgcgtcccgctggtccagggccggcaagaggatcgccaaggtcggcaaggggctctccaaggacgacaaggcgcagaagctcgcgctccagcactggctcgaagctattgacccgcgccaccgctacggccacaacctgcatctctactacgacatctggtccgccagctccagctgcgagcccttcttctactggctggacgtcggcaacggcagggacttgcatcaccacaagtgtccacggagcaagctcaactcgcagctcatcatgtacctcggaccaaacgagagggcggcgtacgaagtcgtcgtggaggaagggcggctcgtgtacaggcagagcggggacccggtgagcacgaacgaggagtccaagtggatcttcgtgctgagcaccagcaggtcgctgtacgtggggcagaagcgcaagggcaagttccagcactcgagcttcctgtccggggccgccacctcggccgccgggaggctggtcgccaaggagggcgtcctcagggcgatatggccctacagcggccactacctcccgaccgaggagaacttcagggagttcatcgccttcctcgaggacaacaacgtcgacctcgccaacgtcaagcgatgctcggtggacgacgacgagttcccgtcgttcaagaagccggcggcgggtacagaagagaagcagcaggcagcagaggaggcagccccagtggcgacagaagaggagccacgacccgtgccggagctgcccgcggtggacatcgtgaaggagggcacgggcacggccgcggacgcggagccgccgaagacggcgatgggcaggcggccgtcgttcaagtggtcgacgcccacgggcgcgcgcatcggctgcctccagaactacccggccgacgtgcagagcatggccctggagcaggtgaacctgtcgccgagggtggcggcggtggcgccgtcgccgcgcctgcccatcccgtcgccgcgccccagccccaggatcaggctgtcgcccggcctgcactacatgggctgccccaccccgacgggcgccagcaggctcgcgaccccgaccccggcgtgcaggcgctcctcgcccaagcagcagcagcagcagcagcacttgatggggttccgcgcgccggccgtggcgctcacgctccccaagcacaaggccaagtgatctgcttgctgcccattgacacctcgccgcagcggcgttttccgaggtgttgctgcgttgcgccgggttaacaattttgttgattggtttgttgcgttctctgatcggctaccattctttcgtacgttagttcgttcctgggtcatcgtattttgacctcactctggtagtctggtagcactctggtgcttgcgctctgcgtgcaccactgctgtacaactctaaactacagcctgcaatgcaaggccctactgtaacctgaacctgcatcctgcagttcctcagacaaaatgactgcaggttccgttttgaataaaaggattcgttcatgaata

SEQ ID NO: 117303 - DNA, 2318 bp, Zea Mays
ggacgcggacccttcgtcgactcgtcgtccatccctcctcctcccttccaccggccccggcaacgaccggtcgctcggtctccgtcgtcgtcttcttccgttccttccgccccctctgcaacgcacaacttggactcgtactcctctgctccaccgtagacgcgcctagctagctcatgccatatataggcgcccccatccgcgctgggagaaccacacgaggctgaacgcttgaacctgaacctccaaagcagcaaccccagcagctttagctcctcctcatcgcagccgcagcgccgtcccctactcttccagcgaccaactgctgtctctccggcgacggcagaaccgtctctgcaggtgcagggagggacccgggagatgagtctggggctgctcaacacagagcgcaaccaccttctctccccgaagccgcagagccctcgggatgccgccgtgtcgtcgctgctgaggtcacccagggcgtcctgcggctcctgcagccagagccccaagccgaagcccaccaagatggcgcacggcggcctggagcgctcgctcagcttcaagaactgggaggcggacgacagccggggcggcatcaacggagcgcgcccgggcgccctggcgctgcagcagcaggagagcccccggcgcgtggtctccgtgtccccgcaggcgcaggccatgatcgagtacatctcccctcgcccccgcgtggagctggaccaggcggccaccacgctgcagaagatgtacaagggcctgcgcacgcgccgcagcctcgccgacggcgccatcatcgccgaggagctgtggtggaagacggtcgactcggtgtacctcaacatcaagtccatctccttcttcgacgaggacaagcaggagaccgccgcgtcccgctggtccagggccggcaagaggatcgccaaggtcggcaaggggctctccaaggacgacaaggcgcagaagctcgcgctccagcactggctcgaagctattgacccgcgccaccgctacggccacaacctgcatctctactacgacatctggtccgccagctccagctgcgagcccttcttctactggctggacgtcggcaacggcagggacttgcatcaccacaagtgtccacggagcaagctcaactcgcagctcatcatgtacctcggaccaaacgagagggcggcgtacgaagtcgtcgtggaggaagggcggctcgtgtacaggcagagcggggacccggtgagcacgaacgaggagtccaagtggatcttcgtgctgagcaccagcaggtcgctgtacgtggggcagaagcgcaagggcgatatggccctacagcggccactacctcccgaccgaggagaacttcagggagttcatcgccttcctcgaggacaacaacgtcgacctcgccaacgtcaagcgatgctcggtggacgacgacgagttcccgtcgttcaagaagccggcggcgggtacagaagagaagcagcaggcagcagaggaggcagccccagtggcgacagaagaggagccacgacccgtgccggagctgcccgcggtggacatcgtgaaggagggcacgggcacggccgcggacgcggagccgccgaagacggcgatgggcaggcggccgtcgttcaagtggtcgacgcccacgggcgcgcgcatcggctgcctccagaactacccggccgacgtgcagagcatggccctggagcaggtgaacctgtcgccgagggtggcggcggtggcgccgtcgccgcgcctgcccatcccgtcgccgcgccccagccccaggatcaggctgtcgcccggcctgcactacatgggctgccccaccccgacgggcgccagcaggctcgcgaccccgaccccggcgtgcaggcgctcctcgcccaagcagcagcagcagcagcagcacttgatggggttccgcgcgccggccgtggcgctcacgctccccaagcacaaggccaagtgatctgcttgctgcccattgacacctcgccgcagcggcgttttccgaggtgttgctgcgttgcgccgggttaacaattttgttgattggtttgttgcgttctctgatcggctaccattctttcgtacgttagttcgttcctgggtcatcgtattttgacctcactctggtagtctggtagcactctggtgcttgcgctctgcgtgcaccactgctgtacaactctaaactacagcctgcaatgcaaggccctactgtaacctgaacctgcatcctgcagttcctcagacaaaatgactgcaggttccgttttgaataaaaggattcgttcatg

SEQ ID NO: 117304 - DNA, 2061 bp, Zea Mays
gtcgtccatccctcctcctcccttccaccggccccggcaacgaccgctcctcctcatcgcagccgcagcgccgtcccctactcttccagcgaccaactgctgtctctccgggtgcagggagggacccgggagatgagtctggggctgctcaacacagagcgcaaccaccttctctccccgaagccgcagagccctcgggatgccgccgtgtcgtcgctgctgaggtcacccagggcgtcctgcggctcctgcagccagagccccaagccgaagcccaccaagatggcgcacggcggcctggagcgctcgctcagcttcaagaactgggaggcggacgacagccggggcggcatcaacggagcgcgcccgggcgccctggcgctgcagcagcaggagagcccccggcgcgtggtctccgtgtccccgcaggcgcaggccatgatcgagtacatctcccctcgcccccgcgtggagctggaccaggcggccaccacgctgcagaagatgtacaagggcctgcgcacgcgccgcagcctcgccgacggcgccatcatcgccgaggagctgtggtggaagacggtcgactcggtgtacctcaacatcaagtccatctccttcttcgacgaggacaagcaggagaccgccgcgtcccgctggtccagggccggcaagaggatcgccaaggtcggcaaggggctctccaaggacgacaaggcgcagaagctcgcgctccagcactggctcgaagctattgacccgcgccaccgctacggccacaacctgcatctctactacgacatctggtccgccagctccagctgcgagcccttcttctactggctggacgtcggcaacggcagggacttgcatcaccacaagtgtccacggagcaagctcaactcgcagctcatcatgtacctcggaccaaacgagagggcggcgtacgaagtcgtcgtggaggaagggcggctcgtgtacaggcagagcggggacccggtgagcacgaacgaggagtccaagtggatcttcgtgctgagcaccagcaggtcgctgtacgtggggcagaagcgcaagggcgatatggccctacagcggccactacctcccgaccgaggagaacttcagggagttcatcgccttcctcgaggacaacaacgtcgacctcgccaacgtcaagcgatgctcggtggacgacgacgagttcccgtcgttcaagaagccggcggcgggtacagaagagaagcagcaggcagcagaggaggcagccccagtggcgacagaagaggagccacgacccgtgccggagctgcccgcggtggacatcgtgaaggagggcacgggcacggccgcggacgcggagccgccgaagacggcgatgggcaggcggccgtcgttcaagtggtcgacgcccacgggcgcgcgcatcggctgcctccagaactacccggccgacgtgcagagcatggccctggagcaggtgaacctgtcgccgagggtggcggcggtggcgccgtcgccgcgcctgcccatcccgtcgccgcgccccagccccaggatcaggctgtcgcccggcctgcactacatgggctgccccaccccgacgggcgccagcaggctcgcgaccccgaccccggcgtgcaggcgctcctcgcccaagcagcagcagcagcagcagcacttgatggggttccgcgcgccggccgtggcgctcacgctccccaagcacaaggccaagtgatctgcttgctgcccattgacacctcgccgcagcggcgttttccgaggtgttgctgcgttgcgccgggttaacaattttgttgattggtttgttgcgttctctgatcggctaccattctttcgtacgttagttcgttcctgggtcatcgtattttgacctcactctggtagtctggtagcactctggtgcttgcgctctgcgtgcaccactgctgtacaactctaaactacagcctgcaatgcaaggccctactgtaacctgaacctgcatcctgcagttcctcagacaaaatgactgcaggttccgttttgaataaaaggatt

SEQ ID NO: 117305 - DNA, 976 bp, Zea Mays
tgcatatctggggctcagttagcgccataaccccacgattataaagcttcacattgaaaggcaattcccctctcagttttggtcagttagcctttccccactccttgcttacttcactagccttcgaatctgcagtctggttcagcttgtaaggaagtgtttcttcctcactatagcgaggaagcgaggaacaggggaacaacaaggacatggacgctttcagtgcagtgatggacaaggtgaagggccacccagaagcgatggagaaggtcagcgctgtgatggacaaggtgaagagccacccggaagtggtggacaaggtcaaggacgaggtgatgagcctcgctggcgctctccgtctgcggagacatggatccgaagataaagaagctgagtccgaagagaaggcagaaggagcgcagagcgccgacgagggtgcctctgatggcatggctggagaacctagtgtgttggagcaggccgtgcaagagattcaggctgtcgccgcagctttgcagcagacagctgaacccgaagctgaaattccagctgagaccgctgctgctgctgctgcagaaacttctgctggaggagacaagcctgaagaaacgaacggggaggtggagcaagatgacccgaagaagcggctcgacttcgctgggttcttcgccatgctgctcgagaggttctgctccccggccagcaagaagaaagattaagttggttgcaggtccggcttgtggatttctcgttctgtcttctgtgatcttcgacttggacattacatggagtgcgtgggattgtgggtggtgtacagtctgcagttgtgttatcttaaaacaacaaatcagctattggttttttactaccttactttgatgacggggcaatggctacgttttacttgatgtaattatcatcgccattgtggatttaatttattttatctctactatatttaaagcacaagtttcaa

SEQ ID NO: 117306 - DNA, 1232 bp, Zea Mays
atacgcttgttctcctcctcctctgtaattctccctgttgcaacgactctaattttcatttcaaggaagacaactgatcattatattgaactcgcaactcacgtataataaacagctgccgaggcagagaagatgctgacatggcagatcgtcttcaaaatgtaattaagagaaggaacgggacaagatgttctttcagaggaagaaatcaaagaaagccaaagactccagaggatcgcagaagaaggggaaagatgggcgtgggaagaatgatcttttcgatcgtgccaagggagggcttgatgccctcgcaggaagcctgcaggaagccaagaaggacgccgaaacggcgactgagaagcttcaaggggatgtgaagtcgggcatggaaacgatccggcacaagggctcaggcctccttgagaaagccaaagaagaactcgggagtcactccgacgccagccgttcctcaaaggaactagagcgaggaagcgaggaacaggggaacaacaaggacatggacgctttcagtgcagtgatggacaaggtgaagggccacccagaagcgatggagaaggtcagcgctgtgatggacaaggtgaagagccacccggaagtggtggacaaggtcaaggacgaggtgatgagcctcgctggcgctctccgtctgcggagacatggatccgaagataaagaagctgagtccgaagagaaggcagaaggagcgcagagcgccgacgagggtgcctctgatggcatggctggagaacctagtgtgttggagcaggccgtgcaagagattcaggctgtcgccgcagctttgcagcagacagctgaacccgaagctgaaattccagctgagaccgctgctgctgctgctgcagaaacttctgctggaggagacaagcctgaagaaacgaacggggaggtggagcaagatgacccgaagaagcggctcgacttcgctgggttcttcgccatgctgctcgagaggttctgctccccggccagcaagaagaaagattaagttggttgcaggtccggcttgtggatttctcgttctgtcttctgtgatcttcgacttggacattacatggagtgcgtgggattgtgggtggtgtacagtctgcagttgtgttatcttaaaacaacaaatcagctattggttttttactaccttactttgatgacggggcaatggctacgttttacttgatgtaattatcatcgcc

SEQ ID NO: 117307 - DNA, 1219 bp, Zea Mays
atggcgaacaaggtagtggcaactaaggcgaggaccatcattatcgtgcggagaggagaaaaaacccccaagaagaagaattcctctcgctcgaggggtgggaaagaagcggaagggcagacgagtcgagaggaagccctcgcctccggcacacgccatggtggagactcgccggagctccgccgccgccgccgggaagcgcacgtctccatcgccatcctcttcgtccgtacctcccccgaagcggcccaagatcaaggagtcgataagcagtcttccgctgctgcagagagttcaaagcggaggaaggagcaggagcaacagcaacccgcagtgccatgggcaaagctgctctcggagtgctcacagaaaatggttgtctttgtcatgcgacaggctgtttggaatgctgtcactaataatgaggtcgttcaaggtttcagaagatctttacatgatgagacaagattatcctacatgttgtcttgtggttcactagagaggctgctcaacatgaggaatctgaagttatggatggtgaggatgacgatgatgaagacaatgatgatgattatgatacaaagtttggaacagaagaacaagggaactgctggaggggaagggcaacagggaaaacgacctacaaagtgcaagcagcagtgagcggcggtgtgctctttgcaaagccttggagctgcctctcctgcaaagtctgaacttgcagagatagtcccacaagagaaatcaccaaaagcttccattcaaccaatgccgccgagtccaaggtcttctacctcaagatgaagggcgactaccatagtcaggtgcgtagaggaaggatgctgcggggagcaccatgaattcctacaaagctgctcaggtttcctctgactgttcaccattattggaagcagggcaggcagagagccttggaaccgaactcttggagatggtgcctagcagggaagaggagattaagttgaaagaatacagggaggatgttgtgtcgacttttgtagttgatgattatgtgagacttgagtttaagggctcaacttttaccggttcttggaagtcatttagtagccctaagatttcatcaacattcttattagtaattgctatagtatcaaatgggattgtggtacgagttgctcgagtactaacgttgttgtacattgtgaagctaagtgggtaatatcaaaagggattaagattt

SEQ ID NO: 117308 - DNA, 115 bp, Zea Mays
aattcttatcccacattcaaaatattattctcctaaaaagaaaggaacaatatgagtgtgtttcatatttcaaacatttatcaaacaaataaattaattagaataaatagatatc

SEQ ID NO: 117309 - DNA, 531 bp, Zea Mays
ccaaaggctaaaaccctaaatctctaatcctcactctcctctcacgcggtcacgtactcacgttggcggctggccagtggccactccctatctcgtgctcacggcgggcggcagaccgccaggcgccaccacaccagaccagcaggcggcagtgcaggccgtcacggctcacgggctcacggccggcggcagaccgccagaggccaggtcagcagtgcagtaatgtcaactccgggagacagtgccagtggtgctggacctgctagtggtggtggtcgacgcgattctagagctccaactccatcatctacgccacgagatcctactcctacaccatctgatgtaatagcgcctactcctactgatggtcaaggtactggtaccaccaacactgatgctgttgaaatagatgaggatgttagggttggtagtaaaaggaagcttaaatctgatgtatgaaaagactttgaaagagtctgtgtaggtggtacttggaaagctaaatgcaattggtgtcacaaaacactatca

SEQ ID NO: 117310 - DNA, 1330 bp, Zea Mays
accgtctcgtacatgcccttatccctctcgccccgcatcccatcacccgcaggccggaacagcagccgtcagccatgcccgcggcggccttcttctccgccgcgctgccccctccctcgcgtacgctgtcccgccgcctcgtcgtgtcccgcgcggctgcggccgcggcctcagcatcagcatcctcgtcctccgggtggcaaggtggcgggggagtggagttccagggcaaggtggggttcctggggctcgggatcatgggcgcgcccatggcatccaacctcatcaaggcaggctgcgacgtcacggtttggaacaggaccaagagcaagtgcgatcccctcctcagtctcggtgccaagtacgagcctacaccggcccaagtcgcttcatcttgtgacgtgacattcgcgatgctcgctgatccacaaagcgcggctgaggttgcatgtgggtccagtggagctgctgaagggttggcccctgggaaaggctatgtcgatgtgtcgacggttgatggtgctacatccaagctgattggtgaacgcattacaagtactggagcatctttccttgaggctccagtttcaggctcgaaaaaaccagcagaagatgggctgctcatctttcttactgcaggtgatgagtccttgtacaagagagtggcgcccctccttgatgtcatggggaagtcaaggttttatcttggcgatgtaggcaatggtgctgcaatgaagctcgtggttaacatggtcatggggagcatgatggtttccttctcagaagggttgctcctgagtgaaaaagtcggtttagacccgaatactctcgtcgaggttatttcccagggtgctatcagtgcccccatgttctctctcaagggcccatccatggttaaagctgcatatcctcctgcatttcctctgaagcatcaacagaaggacttgaggctcgcattggccctggcggaatcggtgtcccagtccattcctacagttgcagctgcgaacgagctgtacaaggctgcaaaatcgctcggccttagtgaccacgacttctcggcggttattgaagcgctgaaagccaaagtgcagagccagagctcacaatagtagttgcctgttcagcagagctcacagtagttgttgcctcttcagcagctaccattgaggcagcattttgtctcgatggatgaagttgacacttaggaaaatttctcaagatcgctacagaaaagtctcagaacaatacaatttctgtattcgtaaatattttctcaaacatcacaacgacgacatttccttaaggaagaaaaaaaactttcattaaa

SEQ ID NO: 117311 - DNA, 1429 bp, Zea Mays
accgtctcgtacatgcccttatccctctcgccccgcatcccatcacccgcaggccggaacagcagccgtcagccatgcccgcggcggccttcttctccgccgcgctgccccctccctcgcgtacgctgtcccgccgcctcgtcgtgtcccgcgcggctgcggccgcggcctcagcatcagcatcctcgtcctccgggtggcaaggtggcgggggagtggagttccagggcaaggtggggttcctggggctcgggatcatgggcgcgcccatggcatccaacctcatcaaggcaggctgcgacgtcacggtttggaacaggaccaagagcaagtgcgatcccctcctcagtctcggtgccaagtacgagcctacaccggcccaagtcgcttcatcttgtgacgtgacattcgcgatgctcgctgatccacaaagcgcggctgaggttgcatgtgggtccagtggagctgctgaagggttggcccctgggaaaggctatgtcgatgtgtcgacggttgatggtgctacatccaagctgattggtgaacgcattacaagtactggagcatctttccttgaggctccagtttcaggctcgaaaaaaccagcagaagatgggctgctcatctttcttactgcaggtgatgagtccttgtacaagagagtggcgcccctccttgatgtcatggggaagtcaaggttttatcttggcgatgtaggcaatggtgctgcaatgaagctcgtggttaacatggtcatggggaggtggcacaaaatcattcgttatctagtgcattttaaatttgagcaaaacctctggatgttgtcactaaatgttttggttcctttggtgaaatattgcagcatgatggtttccttctcagaagggttgctcctgagtgaaaaagtcggtttagacccgaatactctcgtcgaggttatttcccagggtgctatcagtgcccccatgttctctctcaagggcccatccatggttaaagctgcatatcctcctgcatttcctctgaagcatcaacagaaggacttgaggctcgcattggccctggcggaatcggtgtcccagtccattcctacagttgcagctgcgaacgagctgtacaaggctgcaaaatcgctcggccttagtgaccacgacttctcggcggttattgaagcgctgaaagccaaagtgcagagccagagctcacaatagtagttgcctgttcagcagagctcacagtagttgttgcctcttcagcagctaccattgaggcagcattttgtctcgatggatgaagttgacacttaggaaaatttctcaagatcgctacagaaaagtctcagaacaatacaatttctgtattcgtaaatattttctcaaacatcacaacgacgacatttccttaaggaagaaaaaaaactttcattaaa

SEQ ID NO: 117312 - DNA, 284 bp, Zea Mays
gtgtcgtcttcctctccgccgcttctcctgtccaccctcgactgcttgcgcgtgacctgagccgccgccgcctacatccgctcatccccgcgcccgcctcaaccacgccgccaccgaccacgtataatcctgcctccccttcgcgcggtttcgaggctcgtttcctttgggatcgttcgtctgccccgaccgcgtgggcgcttcttcttcgggatctcgctggaccgagcggcccagggctagggattcaggcccatggcgtggcggcgcgtcctcacccaggt

SEQ ID NO: 117313 - DNA, 887 bp, Zea Mays
tttgaactttaaagcaacatggcgatgatgcgaggcaaaaaaggctgcggtgatgtggggatggaatggaagcaaaggtgggagaggatgcggcacccacgcagaaagcccaagccgccaaatggctagacgctgaagcgcacctgatgctctgagcagagcagttaatggatgcaaagttggtgctcgcgccctgactgacacaccctctgtcgtgctgtgcggcggcggcaactccctgccgaccactggcgcggacgggtcgaagcgccgcgtctgctacttctacgacgcgaaggtgggcaactactactacgggcaggaccacccgatgaagccgcacctctccgcatgacccacgcgctgctcggccgctatggccctcctcgaccagatgcaagtgttccgccctcaccctgcccgcgaccgcgacctctgccgcttccacgccgacgattacgtctccttcctccggtccgtcacccccgaaacgcagcaagaccagatccgcgcgctcaagcgcttcaacgtcggcgaggactgccccgtcttcgacggtctctacagtttctgccagacatacgcggggggctccgttggcggctggaagtgagcgaggatggaaggggagcgtggcatgggggcgacgatggaaggcagggctgcgaccttgcatacgacggaatcagggcgccgaagcgagatctgcgggcgtggctggcgggcggaatcagacgggcgcggcgcgtggtgtgggagagggaaataggattttgggggctgggaatgccggctgccgctgccgcggagggggacctgagcggagggggtggagggcgttgatggcggcttcgatcacggcttcagggagcggagcgaaggtgagg

SEQ ID NO: 117314 - DNA, 328 bp, Zea Mays
atgattctcagctcacctttttcttttaaaatcagtagttggcacaaccactgtatagcacagctcaaaacacagaagcagacgcctaagaaacacaacacccgccggtaccagcgcaacgtgttgccggtcggtgacacaatgacgcgcaagacattattgtgccagctaccacctccttgaacatcttcaggaacgggtccatgctgtagtggtaccagccattttgcctcactcctatagatgttgctctgcagggcaggtgagttcttggttttgctcacagcttgctgctcatcgtcggaccagtcgccagcacgtcgcgcat

SEQ ID NO: 117315 - DNA, 1512 bp, Zea Mays
gttactattctattggtatttgttagtattgctgctcaaatcagtagagcaatctagtggtcaccctaacgaacgcgcactaccgtggtaattcgaacagaaagtaaggtaatcaatcacgtacgctcatgctcatcggagaaaaccataaaatccaggatggatgactgattgaaatattaaaaaaaacgctgtggataaacagtgcatatataaatggtccaattatcgcgctcctctccttctcctcttctccgcgttttccactccacctcagtcctagctagcactagcacctcctttactcatcacccgtcatcgcctccctctccatccccgagcagccaagccagccaagaaccgaacgagagtagaaagcgcgtataatgggggaccgggcgtacgcgccggccgcgaagccggttcccgtacgggccaccaacggcgcggcgagcaacggcggcgggccgccgccgcggccagcgccgccgtccatgctgccgggcggccgcgtgccccctccgccgatgtaccggccgaaacccgcgcaggcgcggccaccggcgccgcggcggcaccttccccggcggagcggccgcgggtggtgctgcgcctgctgcctgtggctggcgctggcgctggcgggcctggcgctcctgggcggcgtggcggcgggggcgttctacgtggcgtaccgcccgcggccgccgcgcttcgcggtgacgtcgctgcgcctggccgcgctgaacgtgtccgactcggacgcgctcacctcccgcgtcgacttcaccgtcacggcgcgcaaccccaacgacaacctcgccttccgctacggcgacatcgcggcgtccttcgcctcggacggcgccgacctgggccacgccgtcgtcccgggcttcctccacccgccgggcaacaccacggtcgtccgcgccgccgcggccgccgacgccaacaccaacaccgtcgaccccgtccaggcggcggcgctcagatccaggagggcccacgtcgtgtcggcgcagatggacgccagggtcgccttccagatcggccggttcaggtccaagagcatcagcgtccgcgtcacctgcgcgggggtctcggttgggctcgccaagccagcgccggcgccggcgccggacgcggagccccccgtggtcgtcgctgcggccccggccccggcacgcggccgtgcgcgtggccactcgccgcgctcggttgtacggacgacgacgtcgtcgtcatcgtcgtcgtcctcctcctccagcggcggcggcggcgggaagatgacgccgacggacgccaagtgtaaggtccgcatcaagatctggatttggtcgttttgatggatgggcggattccatttgggatttggggaggcggcggcggcggcggcgggggtagagtgacaattttttcctttcgacttctttttttttcttcctttctcttgacaacagtgtatgtggatttattggagtatagtctatatatggttttcatcttcga

SEQ ID NO: 117316 - DNA, 113 bp, Zea Mays
ctccaattccattgcgtgctgtgtacctgtgctgaaatacactaaggggccgttcggttatctgggaaccatgatccggaataattccaaaccacattccttttctaatttat

SEQ ID NO: 117317 - DNA, 1866 bp, Zea Mays
gctgttttatcttatgttttgtttcttctgctctacaggtcagcaaattatgtaacgttagttactgcacagctcattctcatggcaactcacatggctggattgggattacctgacattgactcttggaatatgattgagaaaatagccgagagaaacaacttgggttataaacagcttatcaaacttagagcattgctcacacatctgcaacaactccggattggctattggggggttgctacagggaaaagccaaccattgcagtcatatggcatggcttcacctcatgcgatcgatgtgattgatgaaagccaacaacctgctgaagcatctgggttgggccgaagttgggtgcaaagtatgtttagcagagacagaagtttaagagccagctctttcaaccgagctagtgatggaaatgctgttgctgccacgggcaaaaccgaaatctcagctgcacaaaagaaaactcaaactaacatgaggacccttagagggcatacaggtgctattactgctcttcattgcgtaacaagaaaggaggtctgggatcttgttggtgatcgtgaagatgctggttttttcatcagcggaagcacagattgcacggtaaaaatttgggatccaagtttgcgtggttctgaacttcgagcaacacttaaagggcatactagggcaattcgaacaatcagttcagatcgtggcaaaatagtttctggagctgatgatcagtctgtcatagtatgggataagcagacttttaagcttttggaagaactgaagggccacgaggcaccggttagttctgtccggatgctctcaggagaacgtgtccttattgcatcccatgatggtactgtgaagatgtgggatgtccggactgatacttgtgttgttaccgtgggtcgttgccaaagtgctgttctctgtatggaatatgatgattccactgggattctggcggctgctggaagagatatcacggcacatgtctgggatattcgctccagcaagcagatgttcaagcttcaagggcatacaaagtggataagatcaatgaggatgaccggagagaccataataacaggtagtgatgattggactgctagagtgtggtcccttaaccggggaacatgtgatgcagtgttagcatgccatgctggtcccgtactatgtgtggaatactcaccttcagataaaggaattatcactggttcagctgatgggctcatacgattttgggaaaatgaaggaggaataaaatgcgtcaagaatcttacacttcacacagcatccgttctgtccattagtgccagtgatcactggctagcgattggtgctgctgataattctatgtctctttttcatcggccacaagaaagattcggtggcttctcaaatgcaggatcaaaagttgcaggatggcagctttacagaactccccaaaaaactgctgcagtggtgagatgtatagcatctgacctggataggaaaagaatatgtagtggtggtcgcaacggactcctgcggctttgggatgcaactacaagcatctaggactgatagatgttcatgtgaaaaggcaattgacatgatgttgcatgccattttccttttagctaggaatttatgtgctatttagaggatgcgaaaggagccggactttgttctactgtttctttatcatctaaaaaaccctgcccagttgagtatatgtttgacgtcgtgtaaaattttgtttatattttcgggttcagatagccttacgtggctacgattttgtaagaactatgagaaacttgggaagttctgtactactaccagtgcaaatgtttgttttagtacaacattattttttatgtg

SEQ ID NO: 117318 - DNA, 268 bp, Zea Mays
tatcaacacaagcactgctatccaatttgtttgtggaaatcactgtcctagtagcaagttcagagtaccaactatttagtcttttgatctgttgagtgtatatgacttgattttccgaaccagtagactagtttagaaattcgtaattttcctgttcttatttatcgatttatttcatgtcatcaatttgtgtcttcgtttatgatttcttctcttgcagcttctgggatggctacttcgaatatttgatggaaaattgttcaaataa

SEQ ID NO: 117319 - DNA, 2357 bp, Zea Mays
aaacacagaagcgaagaaaacgaacgaattgccgctgaatccttaagaacagacgacgatctgacccgcgggcctctcgtccccttcttcctgcacttcaggtctgcaaccatcatctatctggcttcctattccgcttggtcgcttccctccctccctcgtcctgctcgcgcgcggagtgagcctacaccacagggagaagcaggcgccaaccgtgacaccgagggtacctaactggaggccggtgatctccggttccggcggcggagatggggtcgtcgtcgcggatcttcgagtacttcgtagtgtgcgggctgggcccggagatccggtccctggatggcatcaagggtttccatggcgttgaggagatgtacatgtcggccttccttgaccagttcccgccgtccaaccacgctctgtaccctcctcctcctccgcagctccccacctgtgttttgccagcgggagtaagaatatattcttcagggctggacacagatgatgtctcaacttatccacgtagttatcctatagttttaacagagggagatggctcaaaaatttatgtcagttgtattgcatttcgggatcctatttgtgaagacataattgaggcttaccaaattccggcgaattcgtttgctgataaatgcatctgccttgtgtcccattctcctagtttccaagtccttcgtgatgcccttgaggaaatatttgttctttgtttttctccttcagggtgcagcaagcctttgtgggacataatatctcatatggtgtcacatgtgacattacccacaccaggaaagaatcgtgtcttatttgccattgagaattgtcttctttctgcggaagctcctccaaaagaatggcttccccatgctgatatatcattccagccattggtgcagtgtctggatgttgataaactaatacttctctttacagctgtcctgcttgaaagaaggatattgcttcgatcaaataagtatactctactgactctagtttcagaagccatttgccatttaatatacccaattaggtggcagcatgtctatattccaataatattctctagtggggttgattacattgatgccccgacaccctacatgatggggcttcattctggtgttgacacatctgcagtgacaatggatggtgtagtggtggtagatctcgaatacaaccgtataacaataacggaagaaattcctccaataccagaaactgaacataactttcttcgtgttgagattttaaaattactacaacccaatgtcatgggaattgatttcatgaaaatcaatcttgccaatatgggtgacctaagggctggcacaaaatcatggagtcaggaacatgatttccaacttaggctgatatttttgagattctttgcacagatcctgagtggttatcgtaacttcattgatactacttcagcgactggtttcaattctcaagcttttcttaaaaagcgttctcgagcaactaaccagcctgtcgactccatgtcaatgattatgcagtttttggagactcaagggttcttggattatctggagagatgcaacactgcagaagaaaatgcccacaaccttctcgataagttgcaggatgcaaccggaagaggacaaaaccctctaaccatatttccttctcaagtttctgatcctgagattataacaatagccaatcctgagattgaaggttcaagactagacaatagacactgctataagaggtttccagcaaatgcaagaacagaagaacaagaagaaaaacgtaagtcgattctagcgttagctagtggggctagtaagcaagtaccgagttctccttctatccgagtaaatgggggcccaaaggcagaaagtctgagcccaagagagagggcggctgagagagaaaggatggttctggacataaaagtgaagctccagggactctggcttcgtcttctgagactaggggcaactgaggatcctctctcatcttttgaatatggcaccatcctagctttgattgagtctgacgcagaaggcatcgggggaagtggctttgttgaatgcatcagagagcatattcattcgggctggcaatgtcgcttgactgatgaacaattcattgctgtaaaagaattgcttaagatggctataactcttgcgaactctcgcaacgacctggcgaccattagagatgctcttgaagtttctgctgaaatgtacagaaaagacccaaacaatgttcaagattatgttcagcgccatctattatcattgtcagtatgggaggagcttcggtatgtcatacttagtgtgaaaacgatcatttccgtattaaattga

SEQ ID NO: 117320 - DNA, 748 bp, Zea Mays
cttccccacgcgcgccctgttctcttctccaccgagctctttatctgtgcgccacctccgctgtcgcctgctcctagccggtgtcctcggttggcccgagctccggtgacctgctcccacgactgcacccgagcccctccttctcctatgctgtgtgactgcatgcccgctcgcgagactgggtcgaaagcggttcaggccaggacgacttcatagggaaaacccccaaggcatctccatatagacttaaaaatccttgagtgttcatgagtgttgccctcttgcaagcgccaaactctaggttgtggttccttacccggctggagtctacgtctccgacatttggtgcgctaggtagcgggatgttaagtccctgtgagttttgtgccctccctctagtgcctccgatgggtgcattcggtcacccgaccggagtctacgtcaccgacattcgatgctacagggatgggggaatggaggtgtttcccctatgagccccttcctcgtcttggtagggagaatctcgaatatgattctcctagccaggcgttgaagttcctcctctgacgaccggtgcactccgtcgcccggccagcgagggctacgcctgcgacaacctcatctcgtcggaggtggcctacgggccatggggcccctgggggcacaccacgtgcactagtggggtttcaagagcagtgctaagacccacgtcgccccctacgtcggcctactactaggctctgtggcg

SEQ ID NO: 117321 - DNA, 2543 bp, Zea Mays
cccattcggcaattccattcctcgaagccctcacacctgcacgcgcccacgccttcgccttgtctccctcctcgcgcacccgcacccgcacccgcaccgagacccacgcgccggcctgtccctgtcccagcacacacgcgcgacagggtgcgcgccgctcgggcgatggcctccgcccgcctcgtcgcgctcgctgcattcctccttctcctcctcttcgccctgggcccgggcgaggcgcgcgcggcggacgacggcgaggtgcgcgcgctgctggcgctgggggccgcgctggacccgacgggccgcctgctcccgtcgtgggcgcccggccgcgacccctgcgcgccggcgccgtccgggggattcgagggcgttgcgtgcgacgcccgcggcgccgtcgccaacgtctcgctgcaggggaaggggctcgccggcacgctcccgcccgccgtcgcggggctccgctccctgaccggcctctacctccactacaacgcgctccgcggcggcatcccgcgggagctggcggcgctcgccgctctcaccgacctctacctcgacgtcaacaacttctcgggacccatcccgtcggagatcggcgccatggcatcactgcaagtggtgcagctctgctacaaccagctcaccgggagcatccccacgcagctgggcaacctcaccaggctcaccgtgctggccctgcagtccaaccgcttcaacggcgccatccccgccagcctcggcgacctgccgctgctggcgcgcctggacctgagcttcaaccgtctcttcggctctatccccgtcaggctcgcgcagctgccctgcagccttgtggtgctcgacgtcaggaacaactcactcaccggcagcgtacccgccgaactggccgccaagctgcaggccggcttccagtacgggaacaacagcgacctgtgcggcgccgggctgcccgcgctccgcccgtgcaccccggcggacctcatcgaccccgacaggccccagcccttcagcgctggcatcgcgccgcaggtcacgccctccgacggccgcggcaacgggcgcgtgccatctaccagggcgctcgcggcagtggtcgtcgtcgccgtggccctccttttaaccacaggggtcggcctgttcgcgctctcgtggcgccggtggcaccggcagaaggtggcgggggcctcgccgtcgacgatctccggcggccggtgcagcactgaggtcgtgccttccgcggcgaaggcgtcgtcggctcgcaagagcgcgtcgtcggcgctggcgagcctcgagtactccaacgcctgggacccgctggccgacgcgcggggcgggctgggtttcgtctcgcaggacgtgcagctggcccagagcctgcggatcagcacggaggaggtggagtccgcgacgcgctacttctcggagctcaacctcctcggcgggcacggcaagaaggccggcggcctcgcggccacgtacaggggcacgctccgcgacggcacctcggtggccgtgaagcggctgggcaagacgtgctgccggcaggaggaggccgacttcctgagcgggctgaggctgctcgcggagctccggcacgacaatgtggtcgcgctgagggggttctgctgctccagggcgcgcggggagtgcttcctcgtgtacgacttcgtgcccaacggcagcctgtcgcagttcctcgacgccgacacaaccgccggcggcagcggccgtgtcctccagtggtccacgaggatctccatcatcaggggcatcgccaaaggaattgagtatctgcacagcacaaggacgaacaagccggccctcgttcaccagaacatctcggcggacaaggtcctgctggactacgcgtacaggcccctcgtctcagggtgcggcctgcacaagctcctcgtggacgacctcgtcttctcgacgctcaaggccagcgccgccatggggtacctcgcgccggagtacaccaccgtgggccgcctctcggagaagagcgacgtctacgctttcggggtcatcgtgctccaggtgctcacaggcaggaggaaggtgacggcgacggctcagctgctagcaggcaatgtcgatgacgatgagctcgtcgacggcaacctgcaggggagttactcggcggctgaggccgccatgctggcgaagatcggctcggcttgcaccagcgaggaccccgaccagaggccgacgatggcggagctgcttcaagaactggacaccatctgattctgatggcggtgcgaatgcgaacacccatccactgtaaccgtttcatgcaagagtcacatgcctgacagtttgccatgggcctgttgtaaccttcctagctacatgtctaggatcaccagtcagtaatcgctgatcttagaaacaacctgagctaggctctactaattagctagcaataatcactctagttaggaagcacatgcctaggatcatgaaatcttgtatgctaatgatgtgccgttaccaccgctctgaaaagcgtgcatcgtttggatgtgttctct

SEQ ID NO: 117322 - DNA, 228 bp, Zea Mays
atgggggcggggattgttgagatgggggagcagatcgtgggggagggagaacagatcgtgggggaagggagagggaggatgatggagaataatggggtggggtggttgagggcggggggagcagaaccatcacgatcgagggtgaggattgagaagagagcccttgcagcctgcacgctcacgatcgcgatcacgaccactatcttttgcttcgagggtgaggattga

SEQ ID NO: 117323 - DNA, 774 bp, Zea Mays
ctttttttttctacagtgaggttggatggatgtgtgccaagaaaagaaaaatagggtttttaagtagatgggtgactgtagctttcctcctctgttcagtgacatatttcttctgaatagttcatgggcactggacacttaaccgattattccaagataagataatgaccttgttatgcaggtgacagctggtcccactcatgcacgaaccggttgattctgcactggaatgggaacgaacgatacgcacatcttgataagtctccttcacttccagtagcctcagcaccgtatgcagtgacaggcaaagggattagagatgctgtgagctcaaaccacaagcgagcccgagtaacgtagcattcttggtgtcaagcacttgtatgtccactacgctcctgcagctttcttcgccatggatcttttggactagtgaggtgagactggagaatagtaccattttgttgattctcagttgctttgtgccgttggctaccaaccaaccttaagagagaagtaaatacaacagaacaggctaatatagtgttttgtatctgaacatctggcccatcgtacattcagtaaagcctataatagcgggcatatatgtgcttctctgatcaccgatcagcaaaaacagctgcagggtggccagtagccagttgacatggataacagttagaaaaaacgtgcggaagatggagtgttgctcactttcctagttctcattgctttacgatttgtgggcatatcaagatttgcacacttgtttgt

SEQ ID NO: 117324 - DNA, 1353 bp, Zea Mays
tctcttccacttgactcccagtctcccactgtgcgcagttcgcttggtccccggagccccaaaggcggcggctctagaaatggaccacaacagaagtacgtttcaggagcccagaatgcctgggatatgttctctgatgagctgtcacagaaacacatcactactggttctggtgacctcaatgacatacttggtggcgggattcactgcaaagaagttactgagatcggtggcgtcccaggggttggtaaaactcaactggggattcaactagcaatcaatgtacaaatcccagtggaatgtggtggccttggtgggaaagcagtttatatagatacagagggcagtttcatggttgaacgtgtctaccagattgctgaagggtgtattagggacatactggagcactttccgcacagccatgagaagtcctcttctgtccaaaaacaattacagcctgagcgtttcctggcggatatctattacttccggatatgcagttacaccgaacaaattgcagtcataaactacatggagaagttcctcagagagcataaagatgtgcgtatagttattattgatagtgttactttccactttcgacaagattttgaagatctggcactgaggaccagagtgctaagtggattatcattgaagttaatgaagattgcaaagacatataacttggcagttgtcttgttgaaccaagtcactactaaatttacagaagggtcatttcaattgactcttgctctaggtgacagctggtcccactcatgcacgaaccggttgattctgcactggaatgggaacgaacgatacgcacatcttgataagtctccttcacttccagtagcctcagcaccgtatgcagtgacaggcaaagggattagagatgctgtgagctcaaaccacaagcgagcccgagtaacgtagcattcttggtgtcaagcacttgtatgtccactacgctcctgcagctttcttcgccatggatcttttggactagtgaggtgagactggagaatagtaccattttgttgattctcagttgctttgtgccgttggctaccaaccaaccttaagagagaagtaaatacaacagaacaggctaatatagtgttttgtatctgaacatctggcccatcgtacattcagtaaagcctataatagcgggcatatatgtgcttctctgatcaccgatcagcaaaaacagctgcagggtggccagtagccagttgacatggataacagttagaaaaaacgtgcggaagatggagtgttgctcactttcctagttctcattgctttacgatttgtgggcatatcaagatttgcacacttgtttgt

SEQ ID NO: 117325 - DNA, 1347 bp, Zea Mays
tctcttccacttgactcccagtctcccactgtgcgcagttcgcttggtccccggagccccaaaggcggcggctctagaaatggaccacaacagaagtacgtttcaggagcccagaatgcctgggatatgttctctgatgagctgtcacagaaacacatcactactggttctggtgacctcaatgacatacttggtggcgggattcactgcaaagaagttactgagatcggtggcgtcccaggggttggtaaaactcaactggggattcaactagcaatcaatgtacaaatcccagtggaatgtggtggccttggtgggaaagcagtttatatagagggcagtttcatggttgaacgtgtctaccagattgctgaagggtgtattagggacatactggagcactttccgcacagccatgagaagtcctcttctgtccaaaaacaattacagcctgagcgtttcctggcggatatctattacttccggatatgcagttacaccgaacaaattgcagtcataaactacatggagaagttcctcagagagcataaagatgtgcgtatagttattattgatagtgttactttccactttcgacaagattttgaagatctggcactgaggaccagagtgctaagtggattatcattgaagttaatgaagattgcaaagacatataacttggcagttgtcttgttgaaccaagtcactactaaatttacagaagggtcatttcaattgactcttgctctaggtgacagctggtcccactcatgcacgaaccggttgattctgcactggaatgggaacgaacgatacgcacatcttgataagtctccttcacttccagtagcctcagcaccgtatgcagtgacaggcaaagggattagagatgctgtgagctcaaaccacaagcgagcccgagtaacgtagcattcttggtgtcaagcacttgtatgtccactacgctcctgcagctttcttcgccatggatcttttggactagtgaggtgagactggagaatagtaccattttgttgattctcagttgctttgtgccgttggctaccaaccaaccttaagagagaagtaaatacaacagaacaggctaatatagtgttttgtatctgaacatctggcccatcgtacattcagtaaagcctataatagcgggcatatatgtgcttctctgatcaccgatcagcaaaaacagctgcagggtggccagtagccagttgacatggataacagttagaaaaaacgtgcggaagatggagtgttgctcactttcctagttctcattgctttacgatttgtgggcatatcaagatttgcacacttgtttgt

SEQ ID NO: 117326 - DNA, 1690 bp, Zea Mays
cgagcagtgtagcccaaacactcttctcttccacttgactcccagtctcccactgtgcgcagttcgcttggtccccggagccccaaaggcggcggtgagccggagcccggagacgacggcgcggcgcgactcccccctaagcgacagcggcggcgtcgacgtaagcggctgcgtggcgccaccgacggaggctacgagcggttgtggaggcagatatgagaggtggaggtggctacaacgggtcggcggctgtgagatactgaaatccgcactgcagttctcttcttcccccaatcagtaccacctctccaagtggcaatcaccatgggagatcaatctggctctagaaatggaccacaacagaagtacgtttcaggagcccagaatgcctgggatatgttctctgatgagctgtcacagaaacacatcactactggttctggtgacctcaatgacatacttggtggcgggattcactgcaaagaagttactgagatcggtggcgtcccaggggttggtaaaactcaactggggtatgttgcacttagtaatgagtacaagtacagcagatccccctactaaatacatacttttcttcaggattcaactagcaatcaatgtacaaatcccagtggaatgtggtggccttggtgggaaagcagtttatatagatacagagggcagtttcatggttgaacgtgtctaccagattgctgaagggtgtattagggacatactggagcactttccgcacagccatgagaagtcctcttctgtccaaaaacaattacagcctgagcgtttcctggcggatatctattacttccggatatgcagttacaccgaacaaattgcagtcataaactacatggagaagttcctcagagagcataaagatgtgcgtatagttattattgatagtgttactttccactttcgacaagattttgaagatctggcactgaggaccagagtgctaagtggattatcattgaagttaatgaagattgcaaagacatataacttggcagttgtcttgttgaaccaagtcactactaaatttacagaagggtcatttcaattgactcttgctctaggtgacagctggtcccactcatgcacgaaccggttgattctgcactggaatgggaacgaacgatacgcacatcttgataagtctccttcacttccagtagcctcagcaccgtatgcagtgacaggcaaagggattagagatgctgtgagctcaaaccacaagcgagcccgagtaacgtagcattcttggtgtcaagcacttgtatgtccactacgctcctgcagctttcttcgccatggatcttttggactagtgaggtgagactggagaatagtaccattttgttgattctcagttgctttgtgccgttggctaccaaccaaccttaagagagaagtaaatacaacagaacaggctaatatagtgttttgtatctgaacatctggcccatcgtacattcagtaaagcctataatagcgggcatatatgtgcttctctgatcaccgatcagcaaaaacagctgcagggtggccagtagccagttgacatggataacagttagaaaaaacgtgcggaagatggagtgttgctcactttcctagttctcattgctttacgatttgtgggcatatcaagatttgcacacttgtttgt

SEQ ID NO: 117327 - DNA, 1623 bp, Zea Mays
cgagcagtgtagcccaaacactcttctcttccacttgactcccagtctcccactgtgcgcagttcgcttggtccccggagccccaaaggcggcggtgagccggagcccggagacgacggcgcggcgcgactcccccctaagcgacagcggcggcgtcgacgtaagcggctgcgtggcgccaccgacggaggctacgagcggttgtggaggcagatatgagaggtggaggtggctacaacgggtcggcggctgtgagatactgaaatccgcactgcagttctcttcttcccccaatcagtaccacctctccaagtggcaatcaccatgggagatcaatctggctctagaaatggaccacaacagaagtacgtttcaggagcccagaatgcctgggatatgttctctgatgagctgtcacagaaacacatcactactggttctggtgacctcaatgacatacttggtggcgggattcactgcaaagaagttactgagatcggtggcgtcccaggggttggtaaaactcaactggggattcaactagcaatcaatgtacaaatcccagtggaatgtggtggccttggtgggaaagcagtttatatagatacagagggcagtttcatggttgaacgtgtctaccagattgctgaagggtgtattagggacatactggagcactttccgcacagccatgagaagtcctcttctgtccaaaaacaattacagcctgagcgtttcctggcggatatctattacttccggatatgcagttacaccgaacaaattgcagtcataaactacatggagaagttcctcagagagcataaagatgtgcgtatagttattattgatagtgttactttccactttcgacaagattttgaagatctggcactgaggaccagagtgctaagtggattatcattgaagttaatgaagattgcaaagacatataacttggcagttgtcttgttgaaccaagtcactactaaatttacagaagggtcatttcaattgactcttgctctaggtgacagctggtcccactcatgcacgaaccggttgattctgcactggaatgggaacgaacgatacgcacatcttgataagtctccttcacttccagtagcctcagcaccgtatgcagtgacaggcaaagggattagagatgctgtgagctcaaaccacaagcgagcccgagtaacgtagcattcttggtgtcaagcacttgtatgtccactacgctcctgcagctttcttcgccatggatcttttggactagtgaggtgagactggagaatagtaccattttgttgattctcagttgctttgtgccgttggctaccaaccaaccttaagagagaagtaaatacaacagaacaggctaatatagtgttttgtatctgaacatctggcccatcgtacattcagtaaagcctataatagcgggcatatatgtgcttctctgatcaccgatcagcaaaaacagctgcagggtggccagtagccagttgacatggataacagttagaaaaaacgtgcggaagatggagtgttgctcactttcctagttctcattgctttacgatttgtgggcatatcaagatttgcacacttgtttgt

SEQ ID NO: 117328 - DNA, 1589 bp, Zea Mays
cgagcagtgtagcccaaacactcttctcttccacttgactcccagtctcccactgtgcgcagttcgcttggtccccggagccccaaaggcggcggtgagccggagcccggagacgacggcgcggcgcgactcccccctaagcgacagcggcggcgtcgacgtaagcggctgcgtggcgccaccgacggaggctacgagcggttgtggaggcagatatgagaggtggaggtggctacaacgggtcggcggctgtgagatactgaaatccgcactgcagttctcttcttcccccaatcagtaccacctctccaagtggcaatcaccatgggagatcaatctggctctagaaatggaccacaacagaagtacgtttcaggagcccagaatgcctgggatatgttctctgatgagctgtcacagaaacacatcactactggttctggtgacctcaatgacatacttggtggcgggattcactgcaaagaagttactgagatcggattcaactagcaatcaatgtacaaatcccagtggaatgtggtggccttggtgggaaagcagtttatatagatacagagggcagtttcatggttgaacgtgtctaccagattgctgaagggtgtattagggacatactggagcactttccgcacagccatgagaagtcctcttctgtccaaaaacaattacagcctgagcgtttcctggcggatatctattacttccggatatgcagttacaccgaacaaattgcagtcataaactacatggagaagttcctcagagagcataaagatgtgcgtatagttattattgatagtgttactttccactttcgacaagattttgaagatctggcactgaggaccagagtgctaagtggattatcattgaagttaatgaagattgcaaagacatataacttggcagttgtcttgttgaaccaagtcactactaaatttacagaagggtcatttcaattgactcttgctctaggtgacagctggtcccactcatgcacgaaccggttgattctgcactggaatgggaacgaacgatacgcacatcttgataagtctccttcacttccagtagcctcagcaccgtatgcagtgacaggcaaagggattagagatgctgtgagctcaaaccacaagcgagcccgagtaacgtagcattcttggtgtcaagcacttgtatgtccactacgctcctgcagctttcttcgccatggatcttttggactagtgaggtgagactggagaatagtaccattttgttgattctcagttgctttgtgccgttggctaccaaccaaccttaagagagaagtaaatacaacagaacaggctaatatagtgttttgtatctgaacatctggcccatcgtacattcagtaaagcctataatagcgggcatatatgtgcttctctgatcaccgatcagcaaaaacagctgcagggtggccagtagccagttgacatggataacagttagaaaaaacgtgcggaagatggagtgttgctcactttcctagttctcattgctttacgatttgtgggcatatcaagatttgcacacttgtttgt

SEQ ID NO: 117329 - DNA, 934 bp, Zea Mays
cgagcagtgtagcccaaacactcttctcttccacttgactcccagtctcccactgtgcgcagttcgcttggtccccggagccccaaaggcggcggtgagccggagcccggagacgacggcgcggcgcgactcccccctaagcgacagcggcggcgtcgacgtaagcggctgcgtggcgccaccgacggaggctacgagcggttgtggaggcagatatgagaggtggaggtggctacaacgggtcggcggctgtgagatactgaaatccgcactgcagttctcttcttcccccaatcagtaccacctctccaagtggcaatcaccatgggagatcaatctggcaagtttcttctctgcttccatcgcattctcatcttttgcttgtatgttctggacatccttggtaaagatttaaatatctatgtttgttgaactagtcaattagttttatcgtcgcttagttttagtctttgcgtatgacctacgcttgcaagtagtaaaggttatgaatcagttagcaattgttatcaggctatgccaaggttctgtgttttttctcctaatttttgcaaaaatagctaaatagcttagccctacagccatctccggctacagttgctcataactgttgtgtaggaaaacagctaagaggcttagaccgagatttaaaaccttggcatatacattatctatatcataatccaggcaacgactggtatgcaagcagtccttctgtgcaagcgtgcaagcaaactatctgatccattagattacgatccaaccacaggtacaaccatggtttgttagggatttttttataaagattattgagctggtggtggaagggtttaagtgttaaatgtgacctacgtaattcatacccactaatttcgaattttagtgaaagaagtattgatctagacctgtgtcctaa

SEQ ID NO: 117330 - DNA, 220 bp, Zea Mays
agagtgttatgttgtaatgaatgcatactgcgaagcatcgcagttgagctttaggatctctgcagctgcaggtgacttctttcgtactcgaattagagttagctgtgaattgcaattcttttgttatttttctctaacttgtacgaggaaagcaatccataggaatttttaaatatgcaaacaaaatccataggaatatttggtgcatggctgatttttt

SEQ ID NO: 117331 - DNA, 97 bp, Zea Mays
gtcacctgccttaacccgttagcctcccctattgttgctgctccgaccatccatgttgtgccttctgcagtatcacctacaccagcacctgttgttg

SEQ ID NO: 117332 - DNA, 1005 bp, Zea Mays
atggcggtcggcgttgggtggaagaagaggggagagcaagggaaacgagtggagagtggaggaaatgaagtgctggacgaggcgtgcacgcgaggaggagcgatgtgcgcgctagggcgcgagcttctcgcgtcccagagggtgctacatggcgaacatggtctgcggctcttgcagacgcgaggtagtgcaaggcaactgtttcagcgccttcaaggaccgtttgaggaagggactctcaagacacactttgagaaaataatattgcttggtcaaaaattgcatcaaactcgtagaaaggatgagatccatgagctgaggcaaaaaaatccacttcatacttctcatggttttgcactttctcaagcatgtccagggaacttatctggtgtcattttgacgccacttgacctttgcgatggaccttcgaactcggatgcactttctattggttatacaggatccaacacaagtgggttaggtcttccgaacaataactgctctgttggtgctactcttcctacatcaaatatgaacttaagattaccaggttctcctggtatggttttgggaagcaattcaccattgcctttgaatgctccctctagggatgttcagaggtatggtgtgcctagaccaacctcgatacagggtgacgagcaatcaagaattcattataaccagatggtaaatggcagaaaccttcagcaacctggagttcctgttcctggtgtgttgccatctggtgttgatcagggtgcccgaatgatgccacctgcccatggtgttggaatcatggctggactaaatcgaggcacaccaattactaggccaggttttccaaggcttggttctcttggaaacatgtcacccaccaatggtcaaggcttaaaaaatactgtaaacgttcatcctggtgccatactgggacctggaagtactatgttgaggccacgtgacccaatgcagatgcttagagtaagcactcaatctgatatgcattaa

SEQ ID NO: 117333 - DNA, 577 bp, Zea Mays
cttcaggtgctccaaagtcatgcttatatagtaccaaaaagctacagctttgtttccatacttcacttctttgctttctttggcaccctgcgacatggaaacaaatgcagttaaggatcaatgcaacattatcatacctgggccagcctctcctccctcctagcaatcttcctctcacggcttgccttgctctttgcacgcttggcctcaaactgatcagaaagtgtcttctctctggccttctcagccttggacttgtggatactctccataagcaccctcttgttcttaaacatattacccttgaccttcatgtacatgtcatgatacatgtgcttgtcgatcttcttggcctcacggtacttgcggagcaggcgcctcagaacacgcatcctcctcatccacagaatcttggtggggagcctagcctccctggtacccctgcgcttcataccgtatccagagtgccttcccttctgcttggcctcatgtgcccttcttgcacgggacctagagtgaaccttctgaggcttcctgatgataaacccatccttaaccaacttccggatgttctggc

SEQ ID NO: 117334 - DNA, 1107 bp, Zea Mays
gattttttttttttttttgtgggcgcagtgctgatgtttttgtactcaatttcccagacatttgaagatgctgatgcggataaggatggaaaaataaataaagaggagtggaaggaatttgcgttacgccaccctaacctgttaaagaatatgacactgccttatctgaggttcacccccgatctcctgatctttatgaaaagtaggttagcctgatgtcctgtcaaacatattaatatgtgcagtccttccaaaaaaaggaactgcacagaaaaaaaaggggtgatgcgtaattacaaggcagaacttcaggagagcttactttgctgcctttttgttttttgttaacgcaataattgctgattccgtggtccttaaaaatccagggacatcacaaccgtcttccctagtttcgtcttcaacacggcggtggaagattagtcgttcgaattgaaggcaataaagcagtattggggattgcttgaggtgcacaaggttcctgaaacctgacggctgttggtcgccttcaaccactgagaatccgatgtgttctgagcatcaaggcagccacccgaccatcactcctgctataaattataatataaattataaggctcatccggggtggcagatcggcagcgggaacttagggggtgtttgggaacaaagtttttctacagttttgaaagaatactgcagtattctcaaatactgcagtattatatacagaatggtgtttggcaagctagctaaaatctcagtttttaaaactgaagtattgcaaatactatagtagttttaagctattctaaacttaagtctggacctcagtttttaaaactgcggtattgtaaactgcggtattgtcatgactaaagtatactgtagtatttcaaaaactttgttcccaaacagggccttacctgatataatttcttgctgccgttttttgcgcagcaatggattgagagttggtagctgtagatacatctagcttccattctgtacgtagggatccaggaactgtaaatacgttctatggaattgtatcggaaagttcctagtacgccagccagatctagaataagccagagcttgtttcttgca

SEQ ID NO: 117335 - DNA, 1863 bp, Zea Mays
gaaatgaaactcgcgacagacaggtcgtcctctgctccgtggaccctattcctgcgattatctggttgctcacatggacggtgatccgtgatccccggtgaccaagggtgttgaatcctcatgcaggcagaggcagaaacactgcccgaggctgatgcctgatggtgcgatcccgttccctgtcgccatcgagttcgttttttcgttgcttgacagccttaaagcggcgcacgaatgccacgagccactgaggcggcttcccagttcactccaggcccagggcgcccggtcgccatgaactcccgctcctcctccggcggcgtgcggtccgagagctcgctgtcgttgggggagcgcctctgcgcggtcttcttccccgtcatcgccatcgccgaggccgttttcttcgccttcaccgactgcctcgcggacctctgcaccgactccggctcctcgcactcgcgccgcttcggcgcgggcgcgtcctcctccgccgccaggaacagtcggagcaaccattgccagccccaccacagacctttcctacgccgcgccactgcgggtggatggacctcccccaacctccgccagctcgcacgcctcgccgacgagtcccgatgcttctcggtgaacgaggtggaggcgctctttgagctctacaagaagatcagctgctccatcatcgacgacggcctcatccacaaggaagaacttcagctggcactgttcaaaactccaagcggcgagaatctttttcttgatagagttttttatttgtttgatgagaagaaaaatggtgtgatcgagtttgatgagtttattcattccctaagtgtcttccaccccttggcaccaattgaagacaagatcgattcatgcatttcgtatgtttcagttgcatttaggttgtatgacttgagacaaactgggtttattgagcgtgaagaggttaagcaaatggtaattgctatattgatggaatctgatttaaaattatcagatgacttactcgaggccatcatagataagacatttgaagatgctgatgcggataaggatggaaaaataaataaagaggagtggaaggaatttgcgttacgccaccctaacctgttaaagaatatgacactgccttatctgagggacatcacaaccgtcttccctagtttcgtcttcaacacggcggtggaagattagtcgttcgaattgaaggcaataaagcagtattggggattgcttgaggtgcacaaggttcctgaaacctgacggctgttggtcgccttcaaccactgagaatccgatgtgttctgagcatcaaggcagccacccgaccatcactcctgctataaattataatataaattataaggctcatccggggtggcagatcggcagcgggaacttagggggtgtttgggaacaaagtttttctacagttttgaaagaatactgcagtattctcaaatactgcagtattatatacagaatggtgtttggcaagctagctaaaatctcagtttttaaaactgaagtattgcaaatactatagtagttttaagctattctaaacttaagtctggacctcagtttttaaaactgcggtattgtaaactgcggtattgtcatgactaaagtatactgtagtatttcaaaaactttgttcccaaacagggccttacctgatataatttcttgctgccgttttttgcgcagcaatggattgagagttggtagctgtagatacatctagcttccattctgtacgtagggatccaggaactgtaaatacgttctatggaattgtatcggaaagttcctagtacgccagccagatctagaataagccagagcttgtttcttgca

SEQ ID NO: 117336 - DNA, 1842 bp, Zea Mays
gaaatgaaactcgcgacagacaggtcgtcctctgctccgtggaccctattcctgcgattatctggttgctcacatggacggtgatccgtgatccccggtgaccaagggtgttgaatcctcatgcaggcagaggcagaaacactgcccgaggctgatgcctgatggtgcgatcccgttccctgtcgccatcgagttcgttttttcgttgcttgacagccttaaagcggcgcacgaatgccacgagccactgaggcggcttcccagttcactccaggcccagggcgcccggtcgccatgaactcccgctcctcctccggcggcgtgcggtccgagagctcgctgtcgttgggggagcgcctctgcgcggtcttcttccccgtcatcgccatcgccgaggccgttttcttcgccttcaccgactgcctcgcggacctctgcaccgactccggctcctcgcactcgcgccgcttcggcgcgggcgcgtcctcctccgccgccaggaacagtcggagcaaccattgccagccccaccacagacctttcctacgccgcgccactgcgggtggatggacctcccccaacctccgccagctcgcacgcctcgccgacgagtcccgatgcttctcggtgaacgaggtggaggcgctctttgagctctacaagaagatcagctgctccatcatcgacgacggcctcatccacaaggaagaacttcagctggcactgttcaaaactccaagcggcgagaatctttttcttgatagagttttttatttgtttgatgagaagaaaaatggtgtgatcgagtttgatgagtttattcattccctaagtgtcttccaccccttggcaccaattgaagacaagatcgattttgcatttaggttgtatgacttgagacaaactgggtttattgagcgtgaagaggttaagcaaatggtaattgctatattgatggaatctgatttaaaattatcagatgacttactcgaggccatcatagataagacatttgaagatgctgatgcggataaggatggaaaaataaataaagaggagtggaaggaatttgcgttacgccaccctaacctgttaaagaatatgacactgccttatctgagggacatcacaaccgtcttccctagtttcgtcttcaacacggcggtggaagattagtcgttcgaattgaaggcaataaagcagtattggggattgcttgaggtgcacaaggttcctgaaacctgacggctgttggtcgccttcaaccactgagaatccgatgtgttctgagcatcaaggcagccacccgaccatcactcctgctataaattataatataaattataaggctcatccggggtggcagatcggcagcgggaacttagggggtgtttgggaacaaagtttttctacagttttgaaagaatactgcagtattctcaaatactgcagtattatatacagaatggtgtttggcaagctagctaaaatctcagtttttaaaactgaagtattgcaaatactatagtagttttaagctattctaaacttaagtctggacctcagtttttaaaactgcggtattgtaaactgcggtattgtcatgactaaagtatactgtagtatttcaaaaactttgttcccaaacagggccttacctgatataatttcttgctgccgttttttgcgcagcaatggattgagagttggtagctgtagatacatctagcttccattctgtacgtagggatccaggaactgtaaatacgttctatggaattgtatcggaaagttcctagtacgccagccagatctagaataagccagagcttgtttcttgca

SEQ ID NO: 117337 - DNA, 2034 bp, Zea Mays
gaaatgaaactcgcgacagacaggtcgtcctctgctccgtggaccctattcctgcgattatctggttgctcacatggacggtgatccgtgatccccggtgaccaagggtgttgaatcctcatgcaggcagaggcagaaacactgcccgaggctgatgcctgatggtgcgatcccgttccctgtcgccatcgagttcgttttttcgttgcttgacagccttaaagcggcgcacgaatgccacgagccactgaggcggcttcccagttcactccaggcccagggcgcccggtcgccatgaactcccgctcctcctccggcggcgtgcggtccgagagctcgctgtcgttgggggagcgcctctgcgcggtcttcttccccgtcatcgccatcgccgaggccgttttcttcgccttcaccgactgcctcgcggacctctgcaccgactccggctcctcgcactcgcgccgcttcggcgcgggcgcgtcctcctccgccgccaggaacagtcggagcaaccattgccagccccaccacagacctttcctacgccgcgccactgcgggtggatggacctcccccaacctccgccagctcgcacgcctcgccgacgagtcccgatgcttctcggtgaacgaggtggaggcgctctttgagctctacaagaagatcagctgctccatcatcgacgacggcctcatccacaaggaagaacttcagctggcactgttcaaaactccaagcggcgagaatctttttcttgatagagttttttatttgtttgatgagaagaaaaatggtgtgatcgagtttgatgagtttattcattccctaagtgtcttccaccccttggcaccaattgaagacaagatcgattgtatgtatgctaactgcagaaacggtggtcaatataataataataataatatgtaggcttttttatatttatatttgcagcatgcatttcgtatgtttcagttgcatttaggttgtatgacttgagacaaactgggtttattgagcgtgaagaggtaagctcgcaaagatgttctgtatctatgcataccttttatgtggattcttttctagtaaagtggctaattgccatgccttgccttataggttaagcaaatggtaattgctatattgatggaatctgatttaaaattatcagatgacttactcgaggccatcatagataagacatttgaagatgctgatgcggataaggatggaaaaataaataaagaggagtggaaggaatttgcgttacgccaccctaacctgttaaagaatatgacactgccttatctgagggacatcacaaccgtcttccctagtttcgtcttcaacacggcggtggaagattagtcgttcgaattgaaggcaataaagcagtattggggattgcttgaggtgcacaaggttcctgaaacctgacggctgttggtcgccttcaaccactgagaatccgatgtgttctgagcatcaaggcagccacccgaccatcactcctgctataaattataatataaattataaggctcatccggggtggcagatcggcagcgggaacttagggggtgtttgggaacaaagtttttctacagttttgaaagaatactgcagtattctcaaatactgcagtattatatacagaatggtgtttggcaagctagctaaaatctcagtttttaaaactgaagtattgcaaatactatagtagttttaagctattctaaacttaagtctggacctcagtttttaaaactgcggtattgtaaactgcggtattgtcatgactaaagtatactgtagtatttcaaaaactttgttcccaaacagggccttacctgatataatttcttgctgccgttttttgcgcagcaatggattgagagttggtagctgtagatacatctagcttccattctgtacgtagggatccaggaactgtaaatacgttctatggaattgtatcggaaagttcctagtacgccagccagatctagaataagccagagcttgtttcttgca

SEQ ID NO: 117338 - DNA, 1860 bp, Zea Mays
gaaatgaaactcgcgacagacaggtcgtcctctgctccgtggaccctattcctgcgattatctggttgctcacatggacggtgatccgtgatccccggtgaccaagggtgttgaatcctcatgcaggcagaggcagaaacactgcccgaggctgatgcctgatggtgcgatcccgttccctgtcgccatcgagttcgttttttcgttgcttgacagccttaaagcggcgcacgaatgccacgagccactgaggcggcttcccagttcactccaggcccagggcgcccggtcgccatgaactcccgctcctcctccggcggcgtggtaggtgccaggtggctgcaatgtccacccttctcccgcggtccgagagctcgctgtcgttgggggagcgcctctgcgcggtcttcttccccgtcatcgccatcgccgaggccgttttcttcgccttcaccgactgcctcgcggacctctgcaccgactccggctcctcgcactcgcgccgcttcggcgcgggcgcgtcctcctccgccgccaggaacagtcggagcaaccattgccagccccaccacagacctttcctacgccgcgccactgcgggtggatggacctcccccaacctccgccagctcgcacgcctcgccgacgagtcccgatgcttctcggtgaacgaggtggaggcgctctttgagctctacaagaagatcagctgctccatcatcgacgacggcctcatccacaaggaagaacttcagctggcactgttcaaaactccaagcggcgagaatctttttcttgatagagttttttatttgtttgatgagaagaaaaatggtgtgatcgagtttgatgagtttattcattccctaagtgtcttccaccccttggcaccaattgaagacaagatcgattttgcatttaggttgtatgacttgagacaaactgggtttattgagcgtgaagaggttaagcaaatggtaattgctatattgatggaatctgatttaaaattatcagatgacttactcgaggccatcatagataagacatttgaagatgctgatgcggataaggatggaaaaataaataaagaggagtggaaggaatttgcgttacgccaccctaacctgttaaagaatatgacactgccttatctgagggacatcacaaccgtcttccctagtttcgtcttcaacacggcggtggaagattagtcgttcgaattgaaggcaataaagcagtattggggattgcttgaggtgcacaaggttcctgaaacctgacggctgttggtcgccttcaaccactgagaatccgatgtgttctgagcatcaaggcagccacccgaccatcactcctgctataaattataatataaattataaggctcatccggggtggcagatcggcagcgggaacttagggggtgtttgggaacaaagtttttctacagttttgaaagaatactgcagtattctcaaatactgcagtattatatacagaatggtgtttggcaagctagctaaaatctcagtttttaaaactgaagtattgcaaatactatagtagttttaagctattctaaacttaagtctggacctcagtttttaaaactgcggtattgtaaactgcggtattgtcatgactaaagtatactgtagtatttcaaaaactttgttcccaaacagggccttacctgatataatttcttgctgccgttttttgcgcagcaatggattgagagttggtagctgtagatacatctagcttccattctgtacgtagggatccaggaactgtaaatacgttctatggaattgtatcggaaagttcctagtacgccagccagatctagaataa

SEQ ID NO: 117339 - DNA, 1762 bp, Zea Mays
gaaatgaaactcgcgacagacaggtcgtcctctgctccgtggaccctattcctgcgattatctggttgctcacatggacggtgatccgtgatccccggtgaccaagggtgttgaatcctcatgcaggcagaggcagaaacactgcccgaggctgatgcctgatggtgcgatcccgttccctgtcgccatcgagttcgttttttcgttgcttgacagccttaaagcggcgcacgaatgccacgagccactgaggcggcttcccagttcactccaggcccagggcgcccggtcgccatgaactcccgctcctcctccggcggcgtgcggtccgagagctcgctgtcgttgggggagcgcctctgcgcggtcttcttccccgtcatcgccatcgccgaggccgttttcttcgccttcaccgactgcctcgcggacctctgcaccgactccggctcctcgcactcgcgccgcttcggcgcgggcgcgtcctcctccgccgccaggaacagtcggagcaaccattgccagccccaccacagacctttcctacgccgcgccactgcgggtggatggacctcccccaacctccgccagctcgcacgcctcgccgacgagtcccgatgcttctcggtgaacgaggtggaggcgctctttgagctctacaagaagatcagctgctccatcatcgacgacggcctcatccacaaggttttttatttgtttgatgagaagaaaaatggtgtgatcgagtttgatgagtttattcattccctaagtgtcttccaccccttggcaccaattgaagacaagatcgattttgcatttaggttgtatgacttgagacaaactgggtttattgagcgtgaagaggttaagcaaatggtaattgctatattgatggaatctgatttaaaattatcagatgacttactcgaggccatcatagataagacatttgaagatgctgatgcggataaggatggaaaaataaataaagaggagtggaaggaatttgcgttacgccaccctaacctgttaaagaatatgacactgccttatctgagggacatcacaaccgtcttccctagtttcgtcttcaacacggcggtggaagattagtcgttcgaattgaaggcaataaagcagtattggggattgcttgaggtgcacaaggttcctgaaacctgacggctgttggtcgccttcaaccactgagaatccgatgtgttctgagcatcaaggcagccacccgaccatcactcctgctataaattataatataaattataaggctcatccggggtggcagatcggcagcgggaacttagggggtgtttgggaacaaagtttttctacagttttgaaagaatactgcagtattctcaaatactgcagtattatatacagaatggtgtttggcaagctagctaaaatctcagtttttaaaactgaagtattgcaaatactatagtagttttaagctattctaaacttaagtctggacctcagtttttaaaactgcggtattgtaaactgcggtattgtcatgactaaagtatactgtagtatttcaaaaactttgttcccaaacagggccttacctgatataatttcttgctgccgttttttgcgcagcaatggattgagagttggtagctgtagatacatctagcttccattctgtacgtagggatccaggaactgtaaatacgttctatggaattgtatcggaaagttcctagtacgccagccagatctagaataa

SEQ ID NO: 117340 - DNA, 2256 bp, Zea Mays
gaaatgaaactcgcgacagacaggtcgtcctctgctccgtggaccctattcctgcgattatctggttgctcacatggacggtgatccgtgatccccggtgaccaagggtgttgaatcctcatgcaggcagaggcagaaacactgcccgaggctgatgcctgatggtgcgatcccgttccctgtcgccatcgagttcgttttttcgttgcttgacagccttaaagcggcgcacgaatgccacgagccactgaggcggcttcccagttcactccaggcccagggcgcccggtcgccatgaactcccgctcctcctccggcggcgtggtaggtgccaggtggctgcaatgtccacccttctcccgcggtccgagagctcgctgtcgttgggggagcgcctctgcgcggtcttcttccccgtcatcgccatcgccgaggccgttttcttcgccttcaccgactgcctcgcggacctctgcaccgactccggctcctcgcactcgcgccgcttcggcgcgggcgcgtcctcctccgccgccaggaacagtcggagcaaccattgccagccccaccacagacctttcctacgccgcgccactgcgggtggatggacctcccccaacctccgccagctcgcacgcctcgccgacgagtcccgatgctgtaaaaaaaatcgatccaagcctactccaccttttgctcttccttggtttctccgcctccatctcgcaatgccgtttcatctgactctgtttcgattgaactgaattggactaaatgaagtctcggtgaacgaggtggaggcgctctttgagctctacaagaagatcagctgctccatcatcgacgacggcctcatccacaaggtgcatccaacaaaatccctcttcgattccctgtatctaccgtccatattcttgtcattcatgacgtgatttggggttaatttgaacatctatttctttgagtgaagtatttcttgctgtacttggaagatgcgattttttttgtttttttagcctgcggacaattgcctccttggctttaaatatggaagaaatagttacataagacctgggatagtgacactctgtcatccccgcatgattgacgagtatattaggccattgagggcgacgtgcaatttagtacacaaatccatctttaattttgcagggcatgcagtggattggattattttctgagggctggattggttaagacaatgtaatattcttctttttgagttgattggagaccgtcatgtgacaagcacacatgacaaaattttaaaagtttgtttgacagcccattaagattgctcgcctgaattttcccatattccgtgtgccattatatcctaggataacacctgcatctcggtatgcttggatccctgtatgcatgattgaagagtaggtgattgaggacgatgcttaacttagtacatagatccatgttgatttgttgcactacacgcaatggattggattatttcttgaggactgaattagctaagacgacatcttattcttctttttgagtcgattggagactgtcatgtgacaggccacatgagtgcattataaaactttgtttgacagcccataggatcacttgtctgaattttcccatgttgcgtgtgcaattgggtcgtaggataacacctgcatctcagtatgcttggttgtcatgttccttcctctgccataccaaggttgaaggttttgattggtgaagcatgtgatcacatttttttattaaactaacacagcagcaattttgtgtgcgtgtgatgcggttcaaaatcagagaaatatttttcagccttacattttcagcagcatcttctatgtgtgctgtgtgcacaatagtccaattagaaaataaaatatgaatgtccttgctcgttttgtatgcaactagacgaatggccaatgtcatattaatttttcttaaccattccactgctggatggttcttcatcaggaagaacttcagctggcactgttcaaaactccaagcggcgagaatctttttcttgatagagttttttatttgtttgatgagaagaaaaatggtgtgatcgagtttgatgagtttattcattccctaagtgtcttccaccccttggcaccaattgaagacaagatcgattgtatgtatgctaactgcagaaacggtggtcaatataataataataataatatgtaggcttttttatatttatataaaaaaaggaactgcacagaaaaaaaa

SEQ ID NO: 117341 - DNA, 1620 bp, Zea Mays
aactttctttcgtgcgcgcctgtcatcgtccggctcagagccgccacagcctcgccgtcgattctctcccctccccttcgtcctcacgagcgacgaacgtcacgaacccctcctccacctcctgctactatcggcgccggagccctcctctggtctcaccgtgcaaatccccaaccccgaggcagacgcaggccagcccctgtgatggcacagaccaacggcaacgaccccttcagtccccctgtttcccaagaaagggttgtgataacaaacaagcatggtgagaggcttgtggggctgctgcatcacaccgcttcaaacaagattgtggtcttgtgccatggttttatagctaccaagaatgacagcctcattcttgacctggcggaagcgttgacaaaggaagggatcagtgtcttccgcttcgatttcagtggaaatggagaaagtgaaggccagtttgagtatggcaactacaggaaggaggctgacgatttgcattctgttgtattgtatctgtgtcaaaaaagttatgatatagcagctgttgttggtcatagcaaaggaggagatgtggtgattctatatgcttctgtccatgatgatgtgggcacaattgttaatttatcgggccggtttgatttaagaaaaggcattgaagaacggataggggaagggtctatcgataaaataaacaaagaaggctaccttgatgtcaaggataaatctgaaaatgccagctacagggtaaccaaagaaagtttgatggaacggcttaatactgatatgcgcgctgcaagtgtttccataagcaagggatgcaggttcttaacagtccatggctcagctgataagaccatacccgtagaagatgcccatgagtttgcgaagcatatacccaaccatgaactgcgtgtcatagaaggagcaaatcataactacacctcacatcgcaaagaagttgctgatgcagtagtagatttcatcacgtccaatgtaaccgtataataaggctgggggatgaatgtcattccagaccacttggtcatgcacctatcgatcccctccatcatggggcaatactggtactaggtgtctattatcttctgaaccgaaaaccccatgtcatgcaggtttgatatgatgatgttgctcgtatgtgctcttaagaattactgtaaatattgaactcctggtagacttgtatgccgcagctcgcagtttatataggctcatatctctatagtttttttttctttcttctttgttcgagggctctattcccttgctcttttttgcctggttcatgtaagttttcttccttgtaccctatagttatttaatttatttaaatttggcactgtggactattttgtacaagaagtcttagtacaaacgtacaagcaggcctattggttcttttagatcgtgatctaatcatagttgtacattttagtacttaaaacctgccccaccaacaggtatataagtattgggcaacaatctgcgtgagctggtggaggatttaaacacacaagaccatttcaacacacgtgaataaattttactctaaaccatttcgacatggtttgttcactagtgcaaaaagaaaagaaaaga

SEQ ID NO: 117342 - DNA, 916 bp, Zea Mays
aactttctttcgtgcgcgcctgtcatcgtccggctcagagccgccacagcctcgccgtcgattctctcccctccccttcgtcctcacgagcgacgaacgtcacgaacccctcctccacctcctgctactatcggcgccggagccctcctctggtctcaccgtgcaaatccccaaccccgaggcagacgcaggccagcccctgtgatggcacagaccaacggcaacgaccccttcagtccccctgtttcccaagaaagggttgtgataacaaacaagcatggtgagaggcttgtggggctgctgcatcacaccgcttcaaacaagattgtggtcttgtgccatggttttatagctaccaagaatgacagcctcattcttgacctggcggaagcgttgacaaaggaagggatcagtgtcttccgcttcgatttcagtggaaatggagaaagtgaaggccagtttgagtatggcaactacaggaaggaggctgacgatttgcattctgttgtattgtatctgtgtcaaaaaagttatgatatagcagctgttgttggtcatagcaaaggaggagatgtggtgattctatatgcttctgtccatgatgatgtgggcacaattgttaatttatcgggccggtttgatttaagaaaaggcattgaagaacggataggggaagggtctatcgataaaataaacaaagaaggctaccttgatgtcaaggataaatctggtatgaatgggggcttaggtagctattgctgtgcaataacttattcactttcatttgtgtgtgtgttttttaccgtgttggaaccaatgtagaaaatgccagctacagggtaaccaaagaaagtttgatggaacggcttaatactgatatgcgcgctgcaagtgtttccataagcaagggatgcag

SEQ ID NO: 117343 - DNA, 2567 bp, Zea Mays
caatcggagagcactcgccctcgcactcgcccaactcatggtggattgacggcatggagggaggcgaggctggaggcttgagattcctcctccggttcgacccggcaaggcccgggctcgaccgcgcgctgctcggcttctccttctccgccctcttcagccgcctcgtcgttggatggagcaagcatggccagacgggaggaggaggaggaggagggtttccggcgatcgcggcggagggtgagggtggggagggctccgggaacgccgccgtgtccgtggccgcgcttgccgccgccgccgccgccgcttctctctgcctcgcggcgatgtacgcgtccgatcagcggcggcctcgccatgctcgcgctcgacggctgccggcgctggcttcagctccgcggtcccgtgcgctgcatgctcctcatgatgggctcaggattctgtcgtcagacgacccaaacgacgaatctccggacaaggtgatccacggcgcgtcgatcggcgccggagacgacgagccggatatcgtcgcgcgagtggagatggacgctaccccgccggcagttcccgtgccaaatgccgacgacgacgacgacgacgacgaaaccgaaacggaagcagaggaggaggaagaagaagaggagcggcaggagctccagcggctgagggagctgtggctgtcgctggaggagcgggagcagaggctggagctccgcctgcaggagctggagggcctccggtcgcaggaggccgccgcgcgggagctcgaggcccgcgtcgccgccgccgacgcggaggtgcggatcctgcagctcagtgtctccgcgctgcaggaggagaacgggaggctcagggcgcgggcggaggacctggacgccgcccgcgctgagctggcgcgcgccaaggagaagctgcgcgcggtcaaggcgcgcgtgcagggcgagcaggaggcggcggcggcggcgctccggaggaaggtggaggagctcgagagcggcgggcgggagagggtcggcgcgctggtggcggaggtcgcggagctgcgcaaggcgaacgccgcgctggaggcggacaatatggagctcgccctcaggctgcaggacgcagagcagcaggctgcatccggcgcctctgctagtaatctggcccctgaggagggcatgattcaggagatgacgtacctgagggagagcaacgagcgactgacgaggcagatcgagcaactgcacaacgaccactgcgcgcacgtcgaggagctcgtctacctcaagtgggtcaacgcctgcctccgccatgagctccgtgaccatgacggccagcccaccgccgagcaacaaggccccagcgccggctccagagacctgtcggccctggagctgagcaagagcatgagcttccggtccagcgagagggccaagcagctcatgctgaggtacggtagccccggcctggaccgcttcgaccctgccctcttctccccgctgcacgagtcagtcgacggcgacggctacggctacgagcggtcgccggcgcacagctacgagcccgagcggagcccttgcgctaggcccgcgacggcgacggcctcgtcctcccccgccgcagcaccggggaagaaagcggggccgcgcaggctcaagcttctcggtaacatcaagaagctgctgccggcggtcggcaagagaagccactcaaaccacgggcacgggcacgccggccacgatggcaggaaggcgccggcgccggctccggctcggagggacgagtacctcgacaaggccatgcagtggctgtcggcccacgacgtgctcgacggcgaccactcgtacgtgagcacgccgctgtcgtcgtgcgagaggacgccgctgagcagcgccacgaccagcacgaccgcggactcacgcgcccgctgcggcgacggtggtggtggccgcagcgagcgcggggaggcgacgcggccggaggcggagccgaccttggcgagatcgaagagcgacgccggcggagcgtacgggcgggaggcgagcaggtaccacgcgctcagacctgaacacccgggcagagaggcggacgagcccgacgggttccgtgcgccggagaagcgggaggcaaggaggcagtcggcggaggagctgaggactccggcggtggcgtagtacttgatggccccattgcagttaacggattaattgacaggaacgactgttagtctgttatgcagtgatgcacaaggctgtttttttttttgtgtgtgtgtgtgtgaatatttgtactcatgtatggttaggggcagatctagctgtaggacggatggagcttgattagcccacccctactgcctctcaaacaaaagccctccttgaaccccctccgtagctttttattaggaagaagaaagaagaataatggagagaaagagagaggaaggaaggagtccctgctaggttcatgctctgcgtccgtacccatgtatgggtgaatcaagatacagagtttaattccctttgtattatcatcaagcttttcacaaatcctggtaattcaagagctcaggagacgatggc

SEQ ID NO: 117344 - DNA, 229 bp, Zea Mays
ccaccacaccaccctccacctcctccgcgtctgtgtacccaggcaaaagatcgcacgcacccaagttcaagttcgacccaaactgtttccacagcacagtgcaggccgggagggggaaaaaaaagaagggatcgagtcgagagacactggcctctgctttccgtgtgtgggggttctcctctctcttgatgctttttctccgccgcacttcctacgtccatgcaacaag

SEQ ID NO: 117345 - DNA, 747 bp, Zea Mays
tccgttcgttttcctcgttcccaatcatcctgccgcgcgccgcacctaggtagctagggtttcgtcctgcacccgcattactagcattcagtccacaccaatggctgagaagaagatgattacgctgaggagctccgactacaaggatttcgaggtggaggaggcggtggcgatgcagtcagagatcatccgtttcatgatcgaggacgactgcgccgacagcgccatcccgctccccaacgtggattccaaaactctcgccctggtcatcaagtactgcaacaagcacgtccacgccgccgccgacgactccgccgccgcggagaccagcagcagcgcctcatcagctgggggcggcggcgaggtcgacctcaagaagtgggacgcggagttcgtcaaggtcgaccaggtgacgctcttcaacctcgtcctggctgccaactatctcgacatcaaggggttgctggacctgacctgccagacggtggccgacatgttcaaggacaagtcaccggaggagatccgcaggacattcaacatcaagaacgacttcaccaaagaggaggaggaggagatccgcagggagaactcctgggccttcgactgatgtgtcttccgtcgtctgcctgttagatttcatctcttgagtgctagcttgttcgtcttctgttatcttctgatacattaataagtactagttcgtttgtctacaattatcagctaatatattggggagttcgtttgtga

SEQ ID NO: 117346 - DNA, 2132 bp, Zea Mays
cgccacgcccggccggaggtccgaccgacgcctagaccgttccaaagggaagggagcacgcgcgcgcgaggtagagcagcggcggcggcggcaggagtgaggcaggatgtcttcggtatacgtgcttgagcccccgacgaaggggaaggtggtggtgcagacgacggccggcccgctcgatatcgagctgtggcccaaggaggcccccaaggcggcgcgcaacttcgtgcagctctgcctcgagggctactacgacggcaccctcttccaccgcgtcatcaagaatttcctcgttcagggtggcgaccccactggctccggcactgggggtgagagcatctatggggctccatttgcggatgagttccactcgcggctgaggtttaaccacaggggtttagtggcttgtgccaatgctggtacatctcattctaatgggagccaattctttatcacccttgaccgttgtgattggcttgataagaagaacaccatctttgggaaggttactggtgattctattttcaaccttctttccttggccgacgttgagactgataaggatgatcgacctgtgtacgtgcagaagattctttcagtcgaggttctctgggacccatttgaggatattgttccaaggcaacttaagaaggctgaatctgttgctaaggctgatgctgaggtgaaacccaagaagaaggcagttaagcaacttaacgtcctctcgtttggtgatgaagtagaagaggaggagaatgaagcagctacctctgttcaggccaaaataaaaagtattcatgatgtgttggacgatccccgttttcttaaaggggaaccggaggatgtacagttgtccaaggagcaagaggagatgaaaaaggttactgttcaaactgtcagggatgctttgatctcaaagaaagttgaatcaagggagcaagataatgctccattatctgatgattttcctgaagacgagaatgaagaggattttgataacaggatgcgcgcacaaatccttaaaaaacgtagagagcttggtgatgtttgccctcatgaaacctctaaagcagataaacctcatcataaggataaggaattatcagaccgcaggtccaatattgaacataggagggacactgaggacgatgatcaggagcatgagctacaaaaagctaaaaaactatccttgaagaaaaaaggtgctggctcagaagcgagtgctgagaggatgtccaaagcagatgctaatttgcagctactaaatccagctgaacaagagagacatttgcaaaaacagaaaaaacgtcggctccaaggccgtgaagatgagactctagcgaagttacagaagttcaagtcttctttcctcagtaagaatcttgctaccaatcatgtcgaagagaagaatccttctactgataaggcggaaaaggaagatgaagaggaggatgactacaaagggtggcacacaaacctactgtctttcttacccagttcttccaaggatggaatgactaggaaagatgatccagatgactatgtagtggtagacccacttctggagaaaggaaaagaaaaattcaacaagatgcaagcaaagcttaagcggagagagcgcgaatgggcaggcagatctctcacctgattggaaagcttaactcaaattatgtcaatgctccttacgtccttacctaccctggacggttggaaacactggaaatgatgcagttttggcatggtcttgggactgcgcgcagatgattggtagtgaccgtttgtggactagtgttttcctttttggcatgtgtcatgattgcttacactgtaaatgcaattgtacaatagattggttataagctcactgtgaaagcagctctctgtatcactagctatttaatatccgtttcttcaaggagccgattggctgaagttgacactatagcttttgtctcaatttccttatttttattaagaagcggaatagacagtaattggccttcctagtttgttaggtagtgtttggttctggagctaatttggatggagtcgctatgtccgagagattttgaggagtcccgagagattttgaggagccggatggtttattatttgagtataattttttaagt

SEQ ID NO: 117347 - DNA, 610 bp, Zea Mays
cgccacgcccggccggaggtccgaccgacgcctagaccgttccaaagggaagggagcacgcgcgcgcgaggtagagcagcggcggcggcggcaggagtgaggcaggatgtcttcggtatacgtgcttgagcccccgacgaaggggaaggtggtggtgcagacgacggccggcccgctcgatatcgagctgtggcccaaggaggcccccaaggcggcgcgcaacttcgtgcagctctgcctcgagggctactacgacggcaccctcttccaccgcgtcatcaagaatttcctcgttcagggtggcgaccccactggctccggcactgggggtgagagcatctatggggctccatttgcggatgagttccactcgcggctgaggtttaaccacaggggtttagtggcttgtgccaatgctggtacatctcattctaatgggagccaattctttatcacccttgaccgttgtgattggcttgataagaagaacaccatctttgggaaggtaatgtggtctagctcgagactcgagagcttctttcagtgcatgtcatggtacagtgtgccgttcctttggaattatcatggttggctacatgtttttttgcag

SEQ ID NO: 117348 - DNA, 87 bp, Zea Mays
agttttcaatgattgccgttgttggaatgggattggagatgccaaatgtttcgtctagatatctgtgtaggagcactggatgcatgc

SEQ ID NO: 117349 - DNA, 75 bp, Zea Mays
gtcatcttccaaccttctaggcacacaccgctgccaagccatagtactttagttgagtacttgagttccactggc

SEQ ID NO: 117350 - DNA, 326 bp, Zea Mays
atcgcagagggcaggaagggcagcaggagcagcgcgaacaggagcacgaggacccagacctttgggcccccggcgcccgccgcattgtcgtcggcgtcggcgtagcgggcgtgcgcgtccgcgctaccgctcgtgctgggcccgccgtcgtccgcggcggaggaagcaggactcctcctcacctggccctccatccgatctcctccaccgcgtctccgtcgttggttggccggcggcgtcgttggctggccgggaaaaagggcaaagcgcactctccgccctccctatcccttttggtctgtgacggttgctgttggctttttggg

SEQ ID NO: 117351 - DNA, 5390 bp, Zea Mays
catttcaggaccagagcagaattcctcgtttctttcaaaccgcaagaaaactaagcagcacataattaccatttctgccctccgtcccctctcaactccgtcgtcgcgacctgccgcgccgtcatcgccggcggcgaccagcacgtgcagtggaccagtcgcgaagcaaccgcgcagaagagaagggtaaaaacaggactgttggaagtcgagtcgagaagcaacagcaagcagcagcttggggggtaggtggggcaacgcagcagagatagtccaattcgccgccttgccggccactgacctcgccggcggcggggtcccctctgttggagccgacggatccgttgccccctcctatccgaacctgatccacccatgggaactccagttaatatcatcgttggttctcatgtttgggtggaagacccaaatctagcttggatagatggagaagttattagcataaaaaacaatgaagtacatgtgcagacatcgaatgggaaaaaggttaccacagacaggtcaaaagtatttcccaaggatatggaagctccaccaggaggagttgatgatatgacaagactttcatacttacatgaacctggtgttctacagaatcttgctacccgctatgaactgaatgaaatatatacttacacaggcagcattttgattgctgtaaatccatttcaaagattgccacatctttatgatacccacatgatggaacagtacaagggtgcagattttggggaattgagtccccatgtctttgctatcgcggatgttgcttacagggcaatgataaatgaagggaaaagcaactctatattggtcagtggtgaaagtggtgctgggaagactgagacaacgaagatgcttatgagatatttagcacatttaggtgggcgatctggagtagaaggacgtacagtggaacaacaagttttagagtccaacccagttcttgaagcttttggtaatgctaaaactgtgcgaaataacaactcaagtcgctttggcaagtttgttgagatccaatttgacaagactggacggatctcaggagctgctatcagaacttacttgctggaaagatcacgtgtgtgccaaattaattctccagaaagaaattaccattgcttttattttctttgtgccgcaccacctgagtacactcagaggtacaagctgtctgatcctagatctttccattacctcaatcagtcgagctgtattgaggtggatggaatcaatgatgctgaagagtatttagcaacacgaagagctatggatatagttggaatcaatgaggaagagcaggaaggtatattccgggttgtagctgctgtacttcatcttggaaatataaattttgccaagggaacagaaatcgattcttctgtaatcaaggatgataaatccaggttccaccttaatatcgcagcagaacttttgaaatgtgattgccagaatttagagaaggcgctgataacacgagttatagtcacgcctgaagaagttatcactagaacacttgatcctgcttctgcagttgctagcagagacgcattagctaaaataatatactcccgattgtttgattggattgtggaaaaaattaatgtctcaattggacaggacccaaactcaaaacagttaattggagttcttgatatctatggttttgagagcttcaaagttaacagttttgaacagctatgtatcaattatacaaatgaaaagctgcaacaacattttaaccagcacgtgttcaaaatggaacaagaagagtataccagagaagagataaactggagttacatcgagtttgttgataatcaagatgtgctagacttgatagagaagaaaggtggattgattgcacttctggatgaagcatgtatgtttcctagatctacacatgagacgtttgcgcagaagctatatacaacatttaagaataacaagcggtttgccaagccaaagctttcacgcactgattttacagtagtccattatgctggcgatgtgacataccaggctgattatttcttagacaagaacaaagattatgtagtggctgaacatcaggatctgctgaatgcttcttcatgcctattcgtagctggtttattccctcctctcccacaggagacagcaaagtcttcaaaattttcatccattggatcacgttttaagcttcaacttcaatccctcatggaaactttgagctctaccgaaccccactatattagatgtgtgaagccaaataatctccttaagccagctatttttgagaatacaaatgttatacaacaactaagatgtggaggtgttctcgaagctatcaggatcagctgtgctggatatcccacaagaaaaacattttatgaatttgtcaatcgttttggtgtccttgctcctgaagttttagaagggagcaatgatgataagattgcgtgccaaaagattttggaaaaaatgggtctggagaattaccagattggaaaaacaaaggtgtttctaagagctggacagatggctgatttggatgctcgtagagctgaagtattaggaagagcagcaagaatcatacagaggcaaatacgtacatatattgcaaggaaacagtttgctgagcttaaaagatcagcaacacagctgcaatcttttgtcagaggaaccttggctcgtaagttgtatgagtgcatgaggcaggaagcagcagcagtgaaaatacaaaagaatatgcgacgccacaaagcacgggaatcttatttacaattgcaagcagctgcaatcacattgcagacaggtttaagggcaatgtctgctcgcaaagaattcaggttcagaaaggaaacaaaagctgctgtccacatccaagctcaatggcgccgccacagagactactcacattacaagaatctgcaaggagcagctcttacttaccagtgtgcctggaggcaaaggcttgccagaagggagctcaggaagctcaagatggcggcaagagaaacaggagccctaaaagaggccaaggataaacttgagaagcgtgttgaagaactcacctggcgcttaggattggagaagcgattaaggactgaccttgaggaagcaaaagcccaggaaattgctaagctgcaagagacgttgcatgatatgcagcttcaagttgaagagtcaaaggccatggtagttaaggagagggaagctgctagaaaggcaattgaagaagcacctccagtaattaaagagactcctgtgctagtcgaagacacagaaaagattaactcactgacgaccgaagttgaacaactgaaggctttgctgctaactgaaagacaagcaacagaagctgcaaaaagagaacacgctgaatctgaactgagaaatgaagaactaattaagaaatttgagagcgcagagaaaaagattgagcaacttcaggaaactgtccataggctggaggagaaagcaaccaacatggagtctgagaacaaagtgctccgtcaacaagctgttgcaatttctcctacgtcaaaatcattagctgcatatcctaagtctcctttccagctgaaaactccggagaatgggaatgctctaaatggagaagtgaagtcatcaccagatatcacccctatcttaccaaaccccaaggagcttgaggctgaagagaagccacaaaaatcacttaatgaaaagcagcaggaaaatcaagacctactgatcaagtgtgtatcacaagatctgggattctccagtggcaaacctattgcagcttgccttatctacaggtgtcttctacactggagatcattcgaagttgaaagaactggtgtttttgaccgtattattcaaacaattggctctgctattgagtcccaggacaacaatgacaagttggcatattggctctcgaattcatccacactgctgctgctgctgcaacgaacactgaaaacaactggagcagctggattcactcctcaaaggcgcaggtcatctgctgcatcttttgggagggtgttttcggggatgcgagcctcaccacaaagtgctgggcgtgcttttatgggaagtcgcttgattggaggtctaggtgaccttcgtcaagttgaagccaagtaccctgccctgcttttcaagcaacagctcacagctttccttgagaagatctatggaatgataagagacaatttgaaaaaggagatatctcctttgcttggcctttgcatccaggcaccaagaacatcccgtgcaagcctaattaaagggtcacgttcccaagcaaatgccttagctcagcaaactctgattgcacattggcagagcattgtgaaaatattgacaaattacttgaatgttttaaaagcaaattatgtcccttcagtcttaatcagcaaagtgttcactcaaatcttttcatttattaatgttcagttatttaatagtcttcttcttcgacgggagtgctgttcatttagcaacggagaatatgtgaaagctggattggcagaattagagcagtggtgcatttatgcaacagaagagtatgcaggttcttcctgggaagaattaaaacatattaggcaggctgttggattccttgtgattcatcaaaagccaaagaaaacattgaaagaaattaccaacgatctgtgccctgtccttagcatacaacagctatatcgaatcagtacaatgtactgggatgataagtacggtacccacactgtttcatcagatgtcatctcaagtatgagagtaatgatgacagaagattctaataacgcggtcagcagttcgttcctgttggatgatgattccagcattccgttttcggtggacgacatctcgaagtcgatgacagaaatcgaggtaacagatgtcgacatgccacctctgatccgggagaattctggcttcaccttcctacaccaaagaaaggactaacagggtggtccttccagctgcatgtccctttttgcacattctttttctccgctcaacctgtgcataactcatgtacatacgctcgtgccttttgctctctggtcagggcttgttagatgtattgtctttggtttgattggttggttggttctttcctcgatcctctcccaattttgttgggcgaagggtccacaatctatgtttctccatactgtagtgaaaaggggccggatgcccctggtctccccgagctgcttttggaaaagctcgtggtcattaagcagttaagcttgtggaaaaggttctccacatctaccgagtcgttcgttgtgtcgccttcttcatatggatcatcgccatattgtaaattgcaaatacgattatagttgaaaaaagagatattacagtgatagcagtgttctgga

SEQ ID NO: 117352 - DNA, 1521 bp, Zea Mays
atggccccgcctccgccatggcttgccgccctcctcttcctcctcctacccgcgctgctgccggcggtcggctccgtctccggcgcggcggctgccggcatcttccgggtgcggcgtaagttaccagccggagttggaggggacactggcgccaacatcagcgcccttcgtgcccacgacggtcgccgccacggccgccttctcgcggctgccgacctcccgctcggtggcctaggtctccccactgacaccgggctctacttcacggagatcaagctcgggacgccgcccaagcgctactacgtccaggtcgacactggcagcgacatcctgtgggttaactgcatctcctgctcaaaatgcccccgcaagagcggactcgggttagacttgacgttctatgaccccaaggcgtcctcgagcgggagcacggtgtcctgcgatcagggattctgcgcggccacctatggggggaagctgccagggtgcactgccaatgtgccctgcgagtacagcgtcatgtacggtgatggtagctcaacgactgggttcttcatcaccgatgcgctgcagtttgatcaggtgactggggatggacagacacagcctggcaatgctaccatcacattcgggtgtggtgctcagcaaggtggggatttgggcaactcaaaccaagctcttgatggaattcttggttttggtcaggcaaatacgtcaatgttatcacagctagctgctgctggtaaagcgaagaagatatttgctcattgcttggataccataaagggtggtggaatttttgctattggaaatgttgttcagccaaaatgctactttgtgttcttttttgcccatggcctcttgaacatacccctgtttttgcttgtcatgattttactttccaggccgcactacaatgtgaaccttaagtcaattgatgttggtggcactacattacagctcccggctcatgtttttgaaacaggagagaaaaaaggcaccataatcgacagtggtactaccttgacataccttccagaattggttttcaaacaagtaatggatgtggtatttagcaagcatcgagatatagccttccataatttgcaagattttttgtgtttccaatattctggaagtgtagatgatggattcccgaccatcaccttccattttgaggatgatcttgcactgcatgtgtatccacatgagtactttttcccaaatgggaatgacatatactgtgtgggattccaaaatggtgcattacaatcaaaagatgggaaggacattgtgcttatgggagatcttgtgctttcaaacaagttggttgtctatgacttggaaaatcaagtcatcgggtggactgactataactgttcgtcgagcattaaaattaaggacgacaagacaggcacaacctatactgtcgaatcacatgacatatcctccggatggaaattccactggcacaagtccctggttctgttgttggtaacaatggtgtggagctatttatag

SEQ ID NO: 117353 - DNA, 1764 bp, Zea Mays
atggctgcaatacctgcagcgatcccgggctgctgctcttcgtctcgcctgcctcagcttgctggcctccctgcctccacaagcagaaggcgcttcaaggtcacggccatggcgcccaaaaagaaggtgaaccgctacgacgagagctggtcgaagcagtggttcggcgcgggcatcttcgcggagggcagcgaggaggtgtccgtggacgtgttcaagaagctggagcggcgcaaggtgctgagcaccgtggagaaggccggcctgctgtccaaggccgaggagctgggcctgacgctctcctcgctggagaagctgggcctgctctccaaggccgaggacctgggcctgctcagcctcgtcgagaccgcggcggggacgtccccgtccgtcctcgcctccatctcgctgccgctcctcgtggccgccgtcgccgcggtggtcgtcgtgcccgacgactccgtcgcgctcgtcgccctacaggccgtcgtcgcggcggttcattgtgaagttgaggtgggtggtataagcatcgaagagagcatgagcactgccagtggtacaaggcgtgcaccaagaagacagtcgcaagatgggtctgctgataaagtagtggtgatcatcgaagcaacctccccggtggtggggagccgtcgtggaccaccgacccctgttcctggcgcccaaaactcacccattgatgtggaggccatcgaagatgaagttcagacagtatctccttcgcgagtgcccccaccgaggagggacaggagaaccaggagggaacctataacagtggttgacttggaggttgacgctagccaggaagaagagattttggctgcagcaaacgcaaactgtagccaatggccagctcccgagattgatcttctggagagaacaagcaatgagaggatatatgcagaaatgttcttgcctagcattggatggtcttcgccatcaaggatccagccactgcttgcagccattaatagctgcaagattccagagttcagttacgatctatcttggctaaaccatggttctcacatgggcaagcagatccaggatcagaagaagttacttgaggagtgcttggcgagatacttgaccgaatcagcccggctgttagatgaaagccaggtggtcaccgaagtgaatgttatggtgcagaattgtgttggccttgaactccgggattcgtcttactatctcgctcccagatgggtggcgatcttccatcgtatttacaactggaggctagcaaagctctctaccggaaagttctcagaagcttatgttctgactcagcacctgtatcaggctcctgcagcagctggctcaaacggtaccacacaagggcttactgctaacaccgccagcagcgatgctgtggatcacatcatgatgcctgccgtttcaaccggcatcacactagacgaaatcatcgagatcagttgtgacctcgatgttgttgatgcgcagccagtaactctgccaccacgactgcctgtgcatgttcatgaagaacctcaggcacttgctgacaacaacgacgtgcatggagttgatgaaatgtacataccaagaagagtagagttgggggaggtgatgcccatcgacacagacgacaagctttctcggctaagagtagagttgggggaggtgatgcccatcgagacggacgacaagctttcccggttactggagcaatgcaccaagctgcaggacaggatcgatgagacactttccatatacttttga

SEQ ID NO: 117354 - DNA, 829 bp, Zea Mays
ggtcctctaatgcagtgacgaatctttataaaaaaattgttcgaagtcgaactgacacatgtagagtccaaaaaaattacaacaatagctagactagaaataacatcacatctcatattacaggcaacagaagactaagtagccaaaaccagttgccacccaaagaatgttctcaggtaccatataccatgccacgacgtctgccaccaaagcacatgaactggagggtgaatttcaaagaaaatgaccagtttcagacaaggcgacttatgtgcgttagtcaatggtgctcatttgtacagtgatatgccaccgttgatggcagaacaatcacttgcttattgtacagcagtttgcttcaggctatcttgtggcagctgagcacaggctacactccagtgttttcagttcgcaagtaattgctctgatcagctcagtccaacatgttgctaattcactcgcttgctttggctacatcagttttctttgcattaacgtcctcatcaggagcttccttgactggttgctgcacatcagtgtcatgggcaacttgttcggaagaggcttccgagttggcaggctcactaccattaacaggagcaggcaaaggtatagagacagaactgtccaaagatgattctgccggttcatccactgttctttctgcctccgatggttcatctactgttttctttgccactatctcaactgatggggctgaagattctgctgcagcagaggcagcctcatttgtacatatgtcggtatagtgatttgaaacatctggatgccgttcaatcccttcagtatttttcaatcgctcatcctc

SEQ ID NO: 117355 - DNA, 1216 bp, Zea Mays
tctgttgccatctcgcgttcggtggtgactccgggctccgggcgccctgcgcccctggatttcgaaccgagaaagaaagctgctgcccaccgtttcccaagtcccatcgccgcccaagaaccggagccacgccgcagatccgccaaaatcacacctcctagcccgtcctccgtcccaatctcttctcgggccagggaggcggcgggacttggtgcctgcatccgagccctagacatggatcaacctgaggaaaaccctgaattcccaagctgtgatgcctactttgaagctatccagtccaagaagaagttgccactgactttgcaagaatcactaactgctgccattactcagactggtgttgtcaaagggctgcagcaatgtaaaggaagggactggtttgactacatttctgcacttcctctttcagacttaggacttccatttatgtccattgatgaggttatcaccgtcaacagtgatgatcttatcttagaagctttcaagtgcatgaaggataacaagattggtggtgtcccagtagtagaaggccccaaaagaaaacttgttggcagtgttagcataagggacatccgctttctgttgcttagacccaacttattttcaaatttcaggcagttgacagtcattgaattcatgaagactctaggctccactcttcctgattcagagagcaattgcctggtgaagccaccacccacttgcactcctgacgcttcccttggtagtgttattgacagcattgcatcaagaataacacacaggatatatgtagtggatgatgaccttgaggttgttggtgttgtgactctgcgtgatgtgatctcatgctttattcatgagccacccggttattgcgacaactatttggcttcagcgatggagaagcttgaggggaaaggagtcagatcagtggagaaaatttgagcttttctgtagcgtgaatgttgataataacaggtcagtatgtgaggaaggtttatttggttggaacggtgcattcgtgtcgtgttaatccagcaaatcctgtgtaggttaagtaacaaggcttctgtgctgttaaaaatattttactatgtcatttctttggacggttttctgaacaaatgtgtggtaaccattaggccttgttcggttattcctacaccaaatggattggatgtgattgaaaaaaaaatagtagagatttttgact

SEQ ID NO: 117356 - DNA, 1886 bp, Zea Mays
ggcctccacccagcgtacatgcgctgcggtcgtctgttgccatctcgcgttcggtggtgactccgggctccgggcgccctgcgcccctggatttcgaaccgagaaagaaagctgctgcccaccgtttcccaagtcccatcgccgcccaagaaccggagccacgccgcagatccgccaaaatcacacctcctagcccgtcctccgtcccaatctcttctcgggccagggaggcggcgggacttggtgcctgcatccgagccctagacatggatcaacctgaggaaaaccctgaattcccaagctgtgatgcctactttgaagctatccagtccaagaagaagttgccactgactttgcaagaatcactaactgctgcctttgctcagattccagtctcatccttccctgaggttccagctggtcgagtaattgaaattcctggtgatacttctgttattgatgctgtaaggactctctctgaacagaacataagggcagcaccagtactgaatccagaacctggggctcctactgattggcaggggaggtaccttggtgtcatcgattactcggcaatcatcctttgggtactagaaaatgctgagcttgctgctgttgcactctcggctgcatcggcaactgctgctggagttggcatgggtgctgttggtgctgttggggtggcagctttgggaacaactggcccagctgctgtagctggcttaactgcagctgcaattggggcttctgttgctggtggattaactgctgaaaagggtgtggcgaaggatgggctaactgctgcagatcatttaggggaggatttctacaaagttttacttcagcaggaacctttcagatcaacaacagttcgatcgattgttgagtcgtaccgctggtctccttttgtccccattacactggacacttccatgctgactgtacttctgttgctctctaagtacagattgcgaaatgtccctgtgattgagcctgaaaagcctatcatcaggaatttcattactcagactggtgttgtcaaagggctgcagcaatgtaaaggaagggactggtttgactacatttctgcacttcctctttcagacttaggacttccatttatgtccattgatgaggttatcaccgtcaacagtgatgatcttatcttagaagctttcaagtgcatgaaggataacaagattggtggtgtcccagtagtagaaggccccaaaagaaaacttgttggcagtgttagcataagggacatccgctttctgttgcttagacccaacttattttcaaatttcagttgacagtcattgaattcatgaagactctaggctccactcttcctgattcagagagcaattgcctggtgaagccaccacccacttgcactcctgacgcttcccttggtagtgttattgacagcattgcatcaagaataacacacaggatatatgtagtggatgatgaccttgaggttgttggtgttgtgactctgcgtgatgtgatctcatgctttattcatgagccacccggttattgcgacaactatttggcttcagcgatggagaagcttgaggggaaaggagtcagatcagtggagaaaatttgagcttttctgtagcgtgaatgttgataataacaggtcagtatgtgaggaaggtttatttggttggaacggtgcattcgtgtcgtgttaatccagcaaatcctgtgtaggttaagtaacaaggcttctgtgctgttaaaaatattttactatgtcatttctttggacggttttctgaacaaatgtgtggtaaccattaggccttgttcggttattcctacaccaaatggattggatgtgattgaaaaaaaaatagtagagatttttgact

SEQ ID NO: 117357 - DNA, 1881 bp, Zea Mays
ggcctccacccagcgtacatgcgctgcggtcgtctgttgccatctcgcgttcggtggtgactccgggctccgggcgccctgcgcccctggatttcgaaccgagaaagaaagctgctgcccaccgtttcccaagtcccatcgccgcccaagaaccggagccacgccgcagatccgccaaaatcacacctcctagcccgtcctccgtcccaatctcttctcgggccagggaggcggcgggacttggtgcctgcatccgagccctagacatggatcaacctgaggaaaaccctgaattcccaagctgtgatgcctactttgaagctatccagtccaagaagaagttgccactgactttgcaagaatcactaactgctgcctttgctcagattccagtctcatccttccctgaggttccagctggtcgagtaattgaaattcctggtgatacttctgttattgatgctgtaaggactctctctgaacagaacataagggcagcaccagtactgaatccagaacctggggctcctactgattggcaggggaggtaccttggtgtcatcgattactcggcaatcatcctttgggtactagaaaatgctgagcttgctgctgttgcactctcggctgcatcggcaactgctgctggagttggcatgggtgctgttggtgctgttggggtggcagctttgggaacaactggcccagctgctgtagctggcttaactgcagctgcaattggggcttctgttgctggtggattaactgctgaaaagggtgtggcgaaggatgggctaactgctgcagatcatttaggggaggatttctacaaagttttacttcagcaggaacctttcagatcaacaacagttcgatcgattgttgagtcgtaccgctggtctccttttgtccccattacactggacacttccatgctgactgtacttctgttgctctctaagtacagattgcgaaatgtccctgtgattgagcctgaaaagcctatcatcaggaatttcattactcagactggtgttgtcaaagggctgcagcaatgtaaaggaagggactggtttgactacatttctgcacttcctctttcagacttaggacttccatttatgtccattgatgaggttatcaccgtcaacagtgatgatcttatcttagaagctttcaagtgcatgaaggataacaagattggtggtgtcccagtagtagaaggccccaaaagaaaacttgttggcagtgttagcataagggacatccgctttctgttgcttagacccaacttattttcaaatttcaggcagttgacagtcattgaattcatgaagactctaggctccactcttcctgattcagagagcaattgcctggtgaagccaccacccacttgcactcctgacgcttcccttggtagtgttattgacagcattgcatcaagaataacacacaggatatatgtagtggatgatgaccttgaggttgttggtgttgtgactctgcgtgatgtgatctcatgctttattcatgagccacccggttattgcgacaactatttggcttcagcgatggagaagcttgaggggaaaggagtcagatcagtggagaaaatttgagcttttctgtagcgtgaatgttgataataacaggtcagtatgtgaggaaggtttatttggttggaacggtgcattcgtgtcgtgttaatccagcaaatcctgtgtaggttaagtaacaaggcttctgtgctgttaaaaatattttactatgtcatttctttggacggttttctgaacaaatgtgtggtaaccattaggccttgttcggttattcctacaccaaatggattggatgtgattgaaaaaaaaatagtagaga

SEQ ID NO: 117358 - DNA, 1551 bp, Zea Mays
tctgttgccatctcgcgttcggtggtgactccgggctccgggcgccctgcgcccctggatttcgaaccgagaaagaaagctgctgcccaccgtttcccaagtcccatcgccgcccaagaaccggagccacgccgcagatccgccaaaatcacacctcctagcccgtcctccgtcccaatctcttctcgggccagggaggcggcgggacttggtgcctgcatccgagccctaggtgatacaaacttgtgctctggcgatgcaccttgctacatggatcaacctgaggaaaaccctgaattcccaagctgtgatgcctactttgaagctatccagtccaagaagaagttgccactgactttgcaagaatcactaactgctgcctttgctcagattccagtctcatccttccctgaggttccagctggtcgagtaattgaaattcctggtgatacttctgttattgatgctgtaaggactctctctgaacagaacataagggcagcaccagtactgaatccagaacctggggctcctactgattggcaggggaggtaccttggtgtcatcgattactcggcaatcatcctttgggtactagaaaatgctgagcttgctgctgttgcactctcggctgcatcggcaactgctgctggagttggcatgggtgctgttggtgctgttggggtggcagctttgggaacaactggcccagctgctgtagctggcttaactgcagctgcaattggggcttctgttgctggtggattaactgctgaaaagggtgtggcgaaggatgggctaactgctgcagatcatttaggggaggatttctacaaagttttacttcagcaggaacctttcagatcaacaacagttcgatcgattgttgagtcgtaccgctggtctccttttgtccccattacactggacacttccatgctgactgtacttctgttgcttagacccaacttattttcaaatttcaggcagttgacagtcattgaattcatgaagactctaggctccactcttcctgattcagagagcaattgcctggtgaagccaccacccacttgcactcctgacgcttcccttggtagtgttattgacagcattgcatcaagaataacacacaggatatatgtagtggatgatgaccttgaggttgttggtgttgtgactctgcgtgatgtgatctcatgctttattcatgagccacccggttattgcgacaactatttggcttcagcgatggagaagcttgaggggaaaggagtcagatcagtggagaaaatttgagcttttctgtagcgtgaatgttgataataacaggtcagtatgtgaggaaggtttatttggttggaacggtgcattcgtgtcgtgttaatccagcaaatcctgtgtaggttaagtaacaaggcttctgtgctgttaaaaatattttactatgtcatttctttggacggttttctgaacaaatgtgtggtaaccattaggccttgttcggttattcctacaccaaatggattggatgtgattgaaaaaaaaata

SEQ ID NO: 117359 - DNA, 1620 bp, Zea Mays
aaactgttgagagtgagaaggccgaggccgacgtgccacgctcggatctcacaactagtcacaagctgcttctccatattccacaatccacacatccggaccgagcgcgaccccacctcccagatctcatctgcgacgacctcctccctcccgatcccgctccgtctccccccaccgccaccgctgccgctgccgcctcccccaccgaggtcttgtcttcggcgatccagccggagcccgcggcggcgacgatgtacgggtgggagatgctgtcgttcaacatacacgatgggttcctggaggccatcgtgcggggcaaccgctcgggcctcctcaccgccgccgactacaacaacctctgccagtgcgagaccctcgacgacatcaagatgcacctcaccgccaccgagtacgggccctacctccagaacgaaccttcacccttgcacacaacgacaattgtggagaagtgcactcttaaactagtcgatgagtacaagcacatgctgtgccaggccactgaaccactatctacgtttttgcagtatataacttatggccacatgattgacaatgttgtccttattgtaactgggacactgcatgagagagatgttaacgaacttttggagaaatgccacccattgggcatgtttgacagcattgcatcacttgctgttgctcaaaacatgcgtgagctttatagattggttctagtcgatacaccactggccccttacttctcagagtgcattacatctgaggatttggatgacatgaatattgagattatgaggaacactctctacaaagcatatcttgaggacttctacaaattttgccagaaactaggtggtgcaacagctgagatcatgtgtgatctcctttcatttgaagctgacagaagagctgttaacattacaataaatagtattggtactgagttgacaagagatgaccgcaggaagctgtactccaactttggtttattgtatccatatggccacgaagaattggccgtttgtgaagatgttgaccaggttcgtggtgcaatggagaagtacccaccataccagtctatattttccaggatttcatatggagaaagtcagatgttggataaggcattttatgaggaggaagtcaagaggctatgcttgtcctttgagcagcagttccactacgctgttttcttcgcttacatcaggctccgcgagcaggagatcaggaacctgatgtggatctctgaatgtgtcgctcagaaccagaagtcccgggtccatgacagtgtcgtcttcatattctgagaacccccgccactatatatgtatgtacaaaatgcctgctttgatgatggcacaatcgctcgacaattataaatctgggacttattattattcccattccctctgttagacgccggcgtaaaaaatgccagacctggagttgatgtattatttgttttgtagtcaaataaaggtgtgattatctggcacacaaaataaaatcttgtgtattttggaacagaccttcatcgtcaatgcacagtatgctgtcaatgcacaatatgtgtgtgcaaaagcaaaatagatatatcatgcacacatgtagggggagata

SEQ ID NO: 117360 - DNA, 1627 bp, Zea Mays
aaactgttgagagtgagaaggccgaggccgacgtgccacgctcggatctcacaactagtcacaagctgcttctccatattccacaatccacacatccggaccgagcgcgaccccacctcccagatctcatctgcgacgacctcctccctcccgatcccgctccgtctccccccaccgccaccgctgccgctgccgcctcccccaccgaggtcttgtcttcggcgatccagccggagcccgcggcggcgacgatgtacgggtgggagatgctgtcgttcaacatacacgatgggttcctggaggccatcgtgcggggcaaccgctcgggcctcctcaccgccgccgactacaacaacctctgccagtgcgagaccctcgacgacatcaagatgcacctcaccgccaccgagtacgggccctacctccagaacgaaccttcacccttgcacacaacgacaattgtggagaagtgcactcttaaactagtcgatgagtacaagcacatgctgtgccaggccactgaaccactatctacgtttttgcagtatataacttatggccacatgattgacaatgttgtccttattgtaactgggacactgcatgagagagatgttaacgaacttttggagaaatgccacccattgggcatgtttgacagcattgcatcacttgctgttgctcaaaacatgcgtgagctttatagattggttctagtcgatacaccactggccccttacttctcagagtgcattacatctgaggtaaatactgcagctgatcatttgtgcattacatatgtgctccaacaaatatcagctcatcattgttcttacttttcttgacagctaacattgctttggtaatgagaactgctggtattttgtaggatttggatgacatgaatattgagattatgaggaacactctctacaaagcatatcttgaggacttctacaaattttgccagaaactaggtggtgcaacagctgagatcatgtgtgatctcctttcatttgaagctgacagaagagctgttaacattacaataaatagtattggtactgagttgacaagagatgaccgcaggaagctgtactccaactttggtttattgtatccatatggccacgaagaattggccgtttgtgaagatgttgaccaggttcgtggtgcaatggagaagtacccaccataccagtctatattttccaggatttcatatggagaaagtcagatgttggataaggcattttatgaggaggaagtcaagaggctatgcttgtcctttgagcagcagttccactacgctgttttcttcgcttacatcaggctccgcgagcaggagatcaggaacctgatgtggatctctgaatgtgtcgctcagaaccagaagtcccgggtccatgacagtgtcgtcttcatattctgagaacccccgccactatatatgtatgtacaaaatgcctgctttgatgatggcacaatcgctcgacaattataaatctgggacttattattattcccattccctctgttagacgccggcgtaaaaaatgccagacctggagttgatgtattatttgttttgtagtcaaataaaggtgtgattatctggcacacaaaa

SEQ ID NO: 117361 - DNA, 763 bp, Zea Mays
aaactgttgagagtgagaaggccgaggccgacgtgccacgctcggatctcacaactagtcacaagctgcttctccatattccacaatccacacatccggaccgagcgcgaccccacctcccagatctcatctgcgacgacctcctccctcccgatcccgctccgtctccccccaccgccaccgctgccgctgccgcctcccccaccgaggtcttgtcttcggcgatccagccggagcccgcggcggcgacgatgtacgggtgggagatgctgtcgttcaacatacacgatgggttcctggaggccatcgtgcggggcaaccgctcgggcctcctcaccgccgccgactacaacaacctctgccagtgcgagaccctcgacgacatcaagatgcacctcaccgccaccgagtacgggccctacctccagaacgaaccttcacccttgcacacaacgacaattgtggagaagtgcactcttaaactagtcgatgagtacaagcacatgctgtgccaggccactgaaccactatctacgtttttgcagtatataacttatggccacatgattgacaatgttgtccttattgtaactgggacactgcatgagagagatgttaacgaacttttggagaaatgccacccattgggcatgtttgacagcattgcatcacttgctgttgctcaaaacatgcgtgagctttatagattggttctagtcgatacaccactggccccttacttctcagagtgcattacatctga

SEQ ID NO: 117362 - DNA, 386 bp, Zea Mays
caattcatggctagctgcgagccaaagggatcagcgaagggcgctcgcggcgcgccagaggcctgcgccgtcgccgacatcgaccccaagctggagttatacgacggcgccaacacctacgtcattcgcctcaatcttccagggttcaagaaggaggacttcaaggtccagttgaactccggcggctggcttacggtccgcggcgagcgtcccgccgggtacgtgcggttccacagacggccaacctcgacggggtcgccggccgcttcgacggcaccgtgctgtacctcaccgtgcccaagcagccggtgtgcgagaccgacatggtgatggcgaggccgctgatcgaggccaaggaggagtgcgcggccgcgccggcgcgggct

SEQ ID NO: 117363 - DNA, 1209 bp, Zea Mays
acgtgcacaagaacacccgcggcgccggcgatgacgaccgttaacgtgaaccccgtctacgagtggctcgacgacggcgccagccacctcctccgcctcgacctcccagtcccagggttcaagggggaggactttaatgtgtacgtggacggcgaggcccgccggatcatcgtcttcggcagcgacggcaaggcgctgtggctccacaacacgttccagctgcccgatacggccaaccatgacaccatcacctacagcttcgacagcaacgtgctcacgctcaccatgcccaagctgcccgccgcccccgcaccgccccctccgccgcaggccaaggaggaggcgcgagtcgccggcggtaagaagccagctgatcaggagggcaagctgggcgccaaggttggcggtggccatggtggcgcggcgacggaggagcggacgaccgccgaggcggaggagaggacgacgagcttgacggccagtagcaaagaggaagacgagaaggccaggcccacggcgccgccgccgccgccgcctcagtcgaacgagaaggcgcaagatcatcaggatggcaaggcgagggccggccacagggagatggtcgcccgcgaggccgcgcgcaggatcgaggcagcgcgggcgagggtggcggaggccaaggccaaggcggagctggagaggaagtgggagcactggaaggagcgcgccgtggaggagggggtgaagttggcggaggcgctcaacaagaataaagaggtgatcgctacggccgtcgccgccttcgcacttggcgtcttggtctccaataggatcttctgcaggaattaatcaacccgtgcatcatcatggatcggacagacatcatcgtcagaacaagagcaggatcgccaactctatatattgattcttacacttgtagatatccatcatccatcagtaatatgcatgaagataagagacgatgcatgcaatgtacatttggaagtaacggtcattgttgtacatcggtgattaggtgtatatatccccatgtttcacaacgatacttgttgtcttagccttcgacacaacacgttggtccttggtcgttaaccttattgtccctctctaatgtgtacatttgttatttcaaaagtgtaatggcactaacccaacacgttgtacgctcggactcttaagtcttcgctaatatatggggcaagattgaat

SEQ ID NO: 117364 - DNA, 1511 bp, Zea Mays
gtgggtcccgaactgcctgacccagctgtcagcctccgcgtgttgcatcccacgtcccgcgaagtacgaggagacacgatgatgtgatattcctgaaaagaaaaagaaaagacaggagaataacgaagcaagatctgccgcgggtccattttaactggtcggcgactccgccgctgccatcttccccctctccccctccgtaccactcgtcttcgtctagcctcccgcccgcagccaccatggcacccggcctctacaccgacatcggcaagaagaccagagatttgctgtacaaggactacaacacgcaccagaagttctccctcaccacctgctcgccccatggcatcgcaatcacagctgcaggaacaaggaaaaatgagtccacctttggcgatcttcacactcaaattaagaacaataaattgacggtcgatgtcaaagcgaactcagaatcagatcttttgacaacaatcactgttgatgagattggtactccagggctcaaatcaattctcactttggttgttccggaccagaggtcagggaagcttgaacttcagtacctacatgaatatactggtgtgaatgcaagcatcgggcttaattccaaccctatggttaacctttctggtgcctttggaagcaaagcactctcagttggcgttgatgtttcatttgatacggagactagcaatttcactaagtacaatgctgccctgagcctcgccaatccagatcttattgcttcccttcatttgaataaccacggtgataccctggttgcgtcttactaccacctggtaaagcatcattcaggcactgctgttggagctgagctgtctcacagcatctcaagaaatgagagcacactaatatttgggtctcaacactcactggatccccacacgactgtcaaggcacgtttcaacaactatggcatggccagtgcccttgtccagcatgaatggcgtcccaagtcattcatcaccgtctccggtgaggtcgacaccagggcaattgagaagagtacgaaagttggcctgtccttggtgctcaagcactgaaatgctgagtgtttggggctctaggattttattttcgattcggatggattggaataagcatggcctggtgtcatctttgcggcaccgtttggatcttgaattacatattcctctccatgatcaatttcataggaaaatattaggattgattttatgctttaattcccagcgccctgttaataattctggtgattgagacctattgttaagcttgccaaatatgatggtggttattttgtgttcacttctatgtccattccttagtctgtcatgcgtttggatgtctggataatagtgggattgtttattgtggaatacatatattatgtaattatatattccagcttttattgggggtaatgacaagaaaaaccaacgttgagtccttggtttcagaactacagttagtcactttttttcttcttaaaagactgcctttgcgat

SEQ ID NO: 117365 - DNA, 2108 bp, Zea Mays
cttctaagtttcatattgcaagtcttcctcttcttctctggtggtctccgacggcatagcaccaatggaggcctgcggcttcttatttggttggcgtatttgatggctgactttgttgcagtttacacccttggccagttatcccgtcaaaagacagatgcgactagacttggagaacctcaccagctcacgttcttgtggacgcctttccttctcattcatcttggtgggcaggacacggtaactgcgttttctgtcgaagataatgagctgtggctcagacacctgctcaatttactgacccaagttggtctggccttgtatgtgttctggaagtcagcagcacacagttggtttctagcctcagccatctttgcctttgttgctggaattatcaagtatggagagaggatatgggcactcaagtctgcgagccagaaagccctcaggagctccaccaagtcagtaatagatcaatttcctgagctggaagaagatgaacaagagttaggatactttaccatggtcaagtttgctctttctacctcaccgggtgtcagaaacgtattcgttggacgcaaactcgaacagatggaggtagacatacaggccgcatttactggcagccaaatggggaaaaacatacaaggtgcatttatctgcttaagcatctataacgaaaaccaaaatggtgagcttgttttcaaggttatagagattgagcagggaatcatgtacgagaacctctacactaaggcaatggtgctccgtacatgggctggcgccatgcttcggtgtgtcacgctcatctcccttgtggttgcttttgcactctttgtcgcagataacaagcggtggcatcgtcacagcagaatcgatgtagcggtaactcttacactagtcacaggagcattctgcctggaaatctgtgccgtcgttgttatggttttggcgtcaccgtggacatgggctatcctcaggtcctgcaagtgccgcaagctctcccgtgctgcatggtgtattttcaagagtgtaaggccggagtctaggccgttatggtcgaactcgatggggcagtacaatttcatcagctcctgcttctctgacagtgtggttggaaagttgatgagtctcgttggtgccaagcagctctggaggaacttcctgcacaccaagtacgtggatgtcaaaccagatatgaagaagctcctgtttgaagaccagtgcttccaagcggtttttggtacaagcatatcgccaggcctttgcgcgaatccaacatcaggagtcggttcagcattggatattatgctgcgtaaaccgttcgaggaggccatcctgtctctacatatctacacagacatattcctttaccgttgcaagaaccccacgggtgctaccagctgtgagtacacagatgagaagcggctactgatgcacaggtgcaggacgctatccgagtacgtttgctacctgttggtcgtccatcctgagatgctgccagtgagtggcagtgtcactgacgtactccagaaagcttcggataccgtggccacagccagccagccaggtctacggctccaaccaagaataaacttctggagaagctggcagcgcacggtgaccgtaatcgcctagacgatcctgtgcttgcagctgcgtctcttttccgagggcttgcggaagaagccgtgcactctcacgaatcgctgcaggttcttgtgcgtgcatggatggggatcctcctctacgccgccggcaaatctcgtggagacgtgcacgcgcggcagctcaataagggcggtgagttgctcacctttctctggttgcatttggcgcataacggccatggagatctgggtagcttccagattgaactcgttcgactgagtgccgtaaatgagggaggacgtaaaatttttgtttggggttatcagcgtccttggtgaaggataaccttgtctatccttactcatcccattgttctttctcgacaaggtatttatattgtccgatgcatgttgtgctatgctagaaaacatgatattatggctcctgagatgattttcattttcgggttctccacatatttaaacagaagccgtatc

SEQ ID NO: 117366 - DNA, 1860 bp, Zea Mays
gctttcttagcatgtaagcaacgaatcgtaatgtggctttagcttcaatactgtcctcctcctccaccaccgccgccgactgtcctgacagctgccgccctttgcctagctcgccgtgcctgccgtcgaatccatcgttctcggcgtgctcaagctactggtaggctctgtgcgactgtacctgaacttgtggtgcgtgggcgcgtggcttctgagagtgttctgctggtgctcctgcgggtggtgtgcactgtgttgggttgctgcgtgcagctcgctgcttgcttctcggcaactgagggcagccaaggacagaatagaatatggacaacagagcaaggagccaaggagaggaagagcgaagggggaccatttcatatcctccgtaatttcgtgaccacactcgaatggtaacctctaattaatcctaggttcacgagtttcttatgagagccatcagtaattatgctaatttattaaacgaatttctggaagcatttggtgcatactttcagattttccctaaaacagaagttgcggatctggctgatatctttccagtagagctggtttcgctcagattcaaatagcagtttagaaataatggtcaaaaactcaaaataatgctgctgtccggctaggtttagtttgtactaaaatctagttgtcttgttttggcgtagtcagaggcagaaatcgtcctggccacccaaggaaaagttgtaagaaaatttccatagatacccaagatatattagttgctacatttagttaaagcagattaagataagggtagaacagtgaacaacactggttttagcgttttttcgataatgtctgaatttacttagtgtttcatgaagagattaattcaaggaattctgaaacagacgcgattgttgttgactagttcttaagtgtagttttttgtccacgggtttcggagctgtcgaaggcatgatgctgtgttctcatcaaggttaagactagtgcattgtgaacttgggttacgacattgcatgctggttgtggtttgattatgttcttccatcgttccgataggaaataggaatttttggtgtgtatgcttttctacattgtgtttgctttggttcctatttcctatctaatggatgcgtgtatgcttttctagttccatattgtgtttgctgaatatttttgctcacccttgttttttttttcttggtgtttttcttgtttttatgtaggaaatgtagatgacacaaataggaattgggagaagcatcttttatttgagcacatttactatctaacacttaattagattttagtttggttattagacttattaatgatagttgaactggttgtttggttcttaaaattgaggcaatcttgtggaggtgtttctactttcattatgtttcagtgatggtcattttttattactatgctactccgatgcttactatgtcagattgctcaaggatgttccatttacaaaacagacttccaaaaaaattcaataattctcagtctttgttttgtgtttcatgtacattccatgtttatggaaacctggggtgtacaccatgatacaagttggcatgagcactggtttctgatattctgataaatattttgcacacaaaatgctttatgtaattatgtttgtatgcaataatagattatataaagatgtaatcatgtagcagatctattgcactggtgcccttccgtaaagctaatgcagtcagtatttgcatatacacagtgttgaggaaactatatgcactgcttgaaacctacaaagatggcaacattgttgcaactatggaatgattgggaactacaggccttggtgcttctaagtttcat

SEQ ID NO: 117367 - DNA, 503 bp, Zea Mays
agtgtctccggttttctgatcgtgcagacgctcatcatcgacatcgagcccgacgaggtggtcaagcgcgccatgaacgacatcaacgcggcggcgcggcggcgcgtggcggcggcggagcgcgcggaggccgagaagatacagcaggtcaagcgcgccgagggggaggccgagtccaggcacctggccggcgtcggcgtcgcccgccagcgccaggccatcgtggacggcctgcgccggttcgtgcccgacgagaagtccgtcatggacatggtcctcgccacgcagtacttcgacaccatcagggatatcggcgccacgtcgcgcgccgccaccgtgttcatcccgcacggccccgccgcggtgcacgatgtggctgcgcaggtccgcgacggcgtgctccaggccgcggcgtacaacccctacgccggaaccaagtgaccggccgccgcacggccacggtgcctttccgccctgtcttttcttgcttcttggacatgttc

SEQ ID NO: 117368 - DNA, 2161 bp, Zea Mays
cgttccaggtcgtggtctttgccaaattcccacgcccctgcccaccctgcccgaatcctctcgccctttacccccgcccgcgaccccattcacactctcgctgctccactccgctccgctcagctcgtcgggacgcgcccccgcctcccatcccatgcccgcccccgcgctcgtcggaggccgctcgcggcggcctcccatcccgccgcgctgacgagagggcctctcggtgggggcgcttcgggtgttcattttgtccgttcggggaaggggagtgcggcgatggggaagcagcaggaggggaagcggcggcgcggggagaaggacgggaagcggaaggggagggggaagacagctgcagcggcggtgccggaggacgcggcgccagtggccgggtgctggatccgcttcccgcgcctccgcggctgcatgccgtcgcgcgccaaggtcgactcctccaccagcgcgcgtggcggcggccgggaaaccaaaccatctactgatgatgcttgccaggaccaatcagtaccaccagcctctggttccgcaacaaccagtaacactggaagtatctcaccttcttccatagttggagaggagctaaaactagctttccaactgcgtagatttacttttagtgaactgaaatgtgccacgagaaacttccgacctgagagtcttcttggcgagggaggttttggctgtgtctttaaaggatggattgaggagaatggaactgctcctgttaagccaggcaccggattaactgttgctgtcaagacactcaaccatgatgggttgcaggggcataaagagtgggtggcagaagttgattttcttggaaaccttcagcatccacatctagtgaaattggttggctactgcattgaagatgaccagaggttgcttgtgtatgaatttatgccccgtggaagtttggagaatcatctttttagaaagtcattgcctctaccatgggccattagaatgaaaattgctcttggtgctgcgaaaggcctcgcttttcttcatgaagaagctgaaagaccagtaatctatcgggacttcaaaacctccaatattcttttagatgcggactataacgcaaaactctctgattttggacttgctaaagatggccctgagggtgataaaacacatgtgtcaactagggtcatgggaacatatggatatgctgcacctgaatatgtaatgacaggtcacctgacatcgaagagtgacgtatatagctttggagttgtactactagagatgatgactggtagaaggtcaatggacaagaacaggccaaacggagaacacaacctggttgaatgggcacgcccttatctgggagaaagacgcagattctataagcttgtagaccctcgtttggatgggaacttctccataaaaggcgcccagaagacggctcagctggcccatgcctgcctcagccgtgaccccaaggctaggcctctgatgagccaggtggtggaggtgctgaagcctctccagaacctcaaggacatggccagctcttcctactacttccagtccatgcaacatgagcgtcgcacagcacttgccaacccatatggcagtcaaagcatgaaagcgcagagcacctttgcgcggaacgggcagcagcccatgaggagcctctcgtatggccctcatgcttccccgtatcgccagtcgccaagacttgacagcaagcggcaatgagtcatggtgcttgtctgtcgaccataacatattttcaagactgaagttgtaaccagaactggtgtatgaactcagccatccaacaagcatctgagctatctattattgtggatgaagcagcaacattgattcgaatttgcatatcatctgcgagtgaatttttctctcttgttatcgcttacattttagctgtactgtctttacggctctagataccttgacttgaaaggtggaactaaacagggttttgatcggtctttgaaacaatgctcaggcagcaaatgcttggaatttgttccttcctggaaaccagcagtaggcaagtctgatatatgttacatagttgtcctaaggctgttcataatctatggtttcttgtcacaatatccaaatttgccacgtcacatattactttaaaaggtatatttgtccc

SEQ ID NO: 117369 - DNA, 2074 bp, Zea Mays
cccaccctgcccgaatcctctcgccctttacccccgcccgcgaccccattcacactctcgctgctccactccgctccgctcagctcgtcgggacgcgcccccgcctcccatcccatgcccgcccccgcgctcgtcggaggccgctcgcggcggcctcccatcccgccgcgctgacgagagggcctctcggtgggggcgcttcgggtgttcattttgtccgttcggggaaggggagtgcggcgatggggaagcagcaggaggggaagcggcggcgcggggagaaggacgggaagcggaaggggagggggaagacagctgcagcggcggtgccggaggacgcggcgccagtggccgggtgctggatccgcttcccgcgcctccgcggctgcatgccgtcgcgcgccaaggtcgactcctccaccagcgcgcgtggcggcggccgggatgatatatctacatgtgtagaaaccaaaccatctactgatgatgcttgccaggaccaatcagtaccaccagcctctggttccgcaacaaccagtaacactggaagtatctcaccttcttccatagttggagaggagctaaaactagctttccaactgcgtagatttacttttagtgaactgaaatgtgccacgagaaacttccgacctgagagtcttcttggcgagggaggttttggctgtgtctttaaaggatggattgaggagaatggaactgctcctgttaagccaggcaccggattaactgttgctgtcaagacactcaaccatgatgggttgcaggggcataaagagtgggtggcagaagttgattttcttggaaaccttcagcatccacatctagtgaaattggttggctactgcattgaagatgaccagaggttgcttgtgtatgaatttatgccccgtggaagtttggagaatcatctttttagaaagtcattgcctctaccatgggccattagaatgaaaattgctcttggtgctgcgaaaggcctcgcttttcttcatgaagaagctgaaagaccagtaatctatcgggacttcaaaacctccaatattcttttagatgcggactataacgcaaaactctctgattttggacttgctaaagatggccctgagggtgataaaacacatgtgtcaactagggtcatgggaacatatggatatgctgcacctgaatatgtaatgacaggtcacctgacatcgaagagtgacgtatatagctttggagttgtactactagagatgatgactggtagaaggtcaatggacaagaacaggccaaacggagaacacaacctggttgaatgggcacgcccttatctgggagaaagacgcagattctataagcttgtagaccctcgtttggatgggaacttctccataaaaggcgcccagaagacggctcagctggcccatgcctgcctcagccgtgaccccaaggctaggcctctgatgagccaggtggtggaggtgctgaagcctctccagaacctcaaggacatggccagctcttcctactacttccagtccatgcaacatgagcgtcgcacagcacttgccaacccatatggcagtcaaagcatgaaagcgcagagcacctttgcgcggaacgggcagcagcccatgaggagcctctcgtatggccctcatgcttccccgtatcgccagtcgccaagacttgacagcaagcggcaatgagtcatggtgcttgtctgtcgaccataacatattttcaagactgaagttgtaaccagaactggtgtatgaactcagccatccaacaagcatctgagctatctattattgtggatgaagcagcaacattgattcgaatttgcatatcatctgcgagtgaatttttctctcttgttatcgcttacattttagctgtactgtctttacggctctagataccttgacttgaaaggtggaactaaacagggttttgatcggtctttgaaacaatgctcaggcagcaaatgcttggaatttgttccttcctggaaaccagcagtaggcaagtctgatatatgttacatagttgtcctaaggctgttcataat

SEQ ID NO: 117370 - DNA, 1999 bp, Zea Mays
gctcaagctcaggcaagcggcagcaaggcgttggcaatcccagtccagtcgtcggagcactcgcaatttcccgtcacagctggccaccgccccaccctcacggcctcacctcctcccgctacacgcacgcgcccacctacccaaaacgaccgcgcgcggcgccctcctcccgcggtgccaccaccaccaccacctcgtcggaccatcaccacgccgatcggcagctaagcagctcccgcccccagcaccgcgagctgcgatggcaatggacgcggccgtggccgtgaagagcggcggtggcggcgccggatcgaccggggtcaccgcggcggcctcgcagtccccgcaggcggcgactaacggcggcgagcggcggtcccggttccagcgcatctgcgtgtactgcggcagcgccaagggccggaagcctagctaccaggacgccgccgtcgagctgggcaaggagctggtggagaggggcatagacctggtctacgggggcggttccatcggcctcatggggctggtctcgcatgcagttcatgacggagggcgccatgtgattgggtcactggcgagcctgttggggaagtaagggccgtctccggcatgcacgagaggaaggccgagatggcccgcttcgccgatgccttcatagcgttacctggtggctatggaactctggaagagctgctggaggtcatcacctgggcgcaactagggatccataagaagccggtcgggcttctgaacgtggacgggttctacgacccgctgctgtccttcatcgacatggccgtcaacgaagggttcatcaaggaggacgcccgccgcatcgtcatctcggctcccacggccaaggagctggtcctcaagcttgaggtttgtgtgtgggagctttcgctccaggttcctgtgtatcgactggccgacggaggcgtcgtttgctgacgggcgcgcgtgaatgtgattatttctcgcaggagtacgttccggagtacgaggtaggcctggtgtgggaggaccagatgccaccgtccgccgccgccgcgcacgggttcgccccggagcttgtggagcccgggatcacctcctcgtcctgatctggactggacggggacgtcggccgggcctgcctacctacgctaaccccagattctgaccgacggccagcccggcaccaagtagaaaggctatccatactagtaccacctaattaataccgtaatctactactactactactaacaaagaagattgttgggatcgaggatgacagctagctagcgtctgctcagtcagcagcatatcgtcgttagccgcgcagtgtgcagctgcgtcagctctgccattgctactgctccttttgggcttttgtgttgtgctctcctagaagtagggaggaaggaaggaaggcatgctatgtatattccccgggtatatggttgtggtatggcgattggatttgtcttgctcgcagcctcgcacgtgtgatggatggatcttggaacaaaagctagttgcaatgcaaaagcgattcatttctatcctacagtaaatcataccagagtttgctgctgtgctgtgctttctgctttgtttgcttgtttactagtagttgtcgcgcgccctgtgcgcgtgctgctgcccactgatgaatataataacccgttcctttagagaattaattcatatttatgtaataatctagatgctatgtctgaatggagacctctccggacatgaaccgttgcattgccgcatcatccagggcacaggtcacaggggctaggaagcacaagcaatggtagagggaagctatttagagagcctgagcacacaatatatagataatagggttttatatgtctggaatattcacatcagcatggaatgaaaaagaggggtaaaggaatgatacatcatacctgtgggcatcactaaatgaaacaaatgtctgaaaatggaacttcattctcctttgaggatgctttacttc

SEQ ID NO: 117371 - DNA, 1604 bp, Zea Mays
aagctcaggcaagcggcagcaaggcgttggcaatcccagtccagtcgtcggagcactcgcaatttcccgtcacagctggccaccgccccaccctcacggcctcacctcctcccgctacacgcacgcgcccacctacccaaaacgaccgcgcgcggcgccctcctcccgcggtgccaccaccaccaccacctcgtcggaccatcaccacgccgatcggcagctaagcagctcccgcccccagcaccgcgagctgcgatggcaatggacgcggccgtggccgtgaagagcggcggtggcggcgccggatcgaccggggtcaccgcggcggcctcgcagtccccgcaggcggcgactaacggcggcgagcggcggtcccggttccagcgcatctgcgtgtactgcggcagcgccaagggccggaagcctagctaccaggacgccgccgtcgagctgggcaaggagctggtggagaggggcatagacctggtctacgggggcggttccatcggcctcatggggctggtctcgcatgcagttcatgacggagggcgccatgtgattggggtcatcccgagatccttgatgcccagagaggtcactggcgagcctgttggggaagtaagggccgtctccggcatgcacgagaggaaggccgagatggcccgcttcgccgatgccttcatagcgttacctggtggctatggaactctggaagagctgctggaggtcatcacctgggcgcaactagggatccataagaagccggtcgggcttctgaacgtggacgggttctacgacccgctgctgtccttcatcgacatggccgtcaacgaagggttcatcaaggaggacgcccgccgcatcgtcatctcggctcccacggccaaggagctggtcctcaagcttgaggagtacgttccggagtacgaggtaggcctggtgtgggaggaccagatgccaccgtccgccgccgccgcgcacgggttcgccccggagcttgtggagcccgggatcacctcctcgtcctgatctggactggacggggacgtcggccgggcctgcctacctacgctaaccccagattctgaccgacggccagcccggcaccaagtagaaaggctatccatactagtaccacctaattaataccgtaatctactactactactactaacaaagaagattgttgggatcgaggatgacagctagctagcgtctgctcagtcagcagcatatcgtcgttagccgcgcagtgtgcagctgcgtcagctctgccattgctactgctccttttgggcttttgtgttgtgctctcctagaagtagggaggaaggaaggaaggcatgctatgtatattccccgggtatatggttgtggtatggcgattggatttgtcttgctcgcagcctcgcacgtgtgatggatggatcttggaacaaaagctagttgcaatgcaaaagcgattcatttctatcctacagtaaatcataccagagtttgctgctgtgctgtgctttctgctttgtttgcttgtttactagtagttgtcgcgcgccctgtgcgcgtgctgctgcccactgatgaatataataacccgttccttt

SEQ ID NO: 117372 - DNA, 1497 bp, Zea Mays
aagctcaggcaagcggcagcaaggcgttggcaatcccagtccagtcgtcggagcactcgcaatttcccgtcacagctggccaccgccccaccctcacggcctcacctcctcccgctacacgcacgcgcccacctacccaaaacgaccgcgcgcggcgccctcctcccgcggtgccaccaccaccaccacctcgtcggaccatcaccacgccgatcggcagctaagcagctcccgcccccagcaccgcgagctgcgatggcaatggacgcggccgtggccgtgaagagcggcggtggcggcgccggatcgaccggggtcaccgcggcggcctcgcagtccccgcaggcggcgactaacggcggcgagcggcggtcccggttccagcgcatctgcgtgtactgcggcagcgccaagggccggaagcctagctaccaggacgccgccgtcgagctgggcaaggagctgggtcatcccgagatccttgatgcccagagaggtcactggcgagcctgttggggaagtaagggccgtctccggcatgcacgagaggaaggccgagatggcccgcttcgccgatgccttcatagcgttacctggtatgcactatgcagcatgcactgcagagagggatttggtcacacagtggggaaaaaaggattcagagtttttgacacacgctcgctcggactctcggcaggtggctatggaactctggaagagctgctggaggtcatcacctgggcgcaactagggatccataagaagccggtcgggcttctgaacgtggacgggttctacgacccgctgctgtccttcatcgacatggccgtcaacgaagggttcatcaaggaggacgcccgccgcatcgtcatctcggctcccacggccaaggagctggtcctcaagcttgaggagtacgttccggagtacgaggtaggcctggtgtgggaggaccagatgccaccgtccgccgccgccgcgcacgggttcgccccggagcttgtggagcccgggatcacctcctcgtcctgatctggactggacggggacgtcggccgggcctgcctacctacgctaaccccagattctgaccgacggccagcccggcaccaagtagaaaggctatccatactagtaccacctaattaataccgtaatctactactactactactaacaaagaagattgttgggatcgaggatgacagctagctagcgtctgctcagtcagcagcatatcgtcgttagccgcgcagtgtgcagctgcgtcagctctgccattgctactgctccttttgggcttttgtgttgtgctctcctagaagtagggaggaaggaaggaaggcatgctatgtatattccccgggtatatggttgtggtatggcgattggatttgtcttgctcgcagcctcgcacgtgtgatggatggatcttggaacaaaagctagttgcaatgcaaaagcgattcatttctatcctacagtaaatcataccag

SEQ ID NO: 117373 - DNA, 772 bp, Zea Mays
gctcaagctcaggcaagcggcagcaaggcgttggcaatcccagtccagtcgtcggagcactcgcaatttcccgtcacagctggccaccgccccaccctcacggcctcacctcctcccgctacacgcacgcgcccacctacccaaaacgaccgcgcgcggcgccctcctcccgcggtgccaccaccaccaccacctcgtcggaccatcaccacgccgatcggcagctaagcagctcccgcccccagcaccgcgagctgcgatggcaatggacgcggccgtggccgtgaagagcggcggtggcggcgccggatcgaccggggtcaccgcggcggcctcgcagtccccgcaggcggcgactaacggcggcgagcggcggtcccggttccagcgcatctgcgtgtactgcggcagcgccaagggccggaagcctagctaccaggacgccgccgtcgagctgggcaaggagctggtggagaggggcatagacctggtctacgggggcggttccatcggcctcatggggctggtctcgcatgcagttcatgacggagggcgccatgtgattggggtcatcccgagatccttgatgcccagagaggtcactggcgagcctgttggggaagtaagggccgtctccggcatgcacgagaggaaggccgagatggcccgcttcgccgatgccttcatagcgttacctggtatgcactatgcagcatgcactgcagagagggatttggtcacacagtggggaaaaaaggattcagagtttttg

SEQ ID NO: 117374 - DNA, 1712 bp, Zea Mays
acgccttggccggccggaacgcccgcaaccgacgaaatgccgacgccggcgccggcccttcctttcgtcccgaagccgcaacccatccttcacgtcgctaaagccctggtcccatcccctcgccagacgcagccccaggcccgagggcgaggcctaccgcagccggtcaattgtgccaactccaagcgcctcgacgacgcactctccgctggcttcgtccgccttctcaacgccggccaagtacaggatgcggactctgctagcggaacctgccggcgctatgaccccaagccgggtgacttcgcggtcggggtcgtagtttctggcacggaggcgcgcctcgacgttgcggtcggcgccgaccgtctcgccacgctgctctccaaggagcttctcccgctcgaccgcgacagttctgacccgccgacgcgacaagctctgcctcggctggggagcatcggcgtcgtggcgggcccctccgtggacgacgacagacagaagcgcgggagcaggacgctggtggcgcccgggacggtagtattcgctgaggtgcttggacggacgcttagcgggcgtccactactgtcggcacggcggctcttccggcgcctcgcatggcaccgcgccaggcagattctgcaactcaacgagccaattgaggtaaaaatttacgagtggaacaccggggggctactcacaagaattgagggtctgagagcatttcttccaaaatttgagctcgtggacaggataagttcatttacagacttgaaaaataaagtcggttgcagcattcgtgtgtgcattgcaaggctcgatgaagaaactaacgacctgataattagtgagaagaaagcatgggaaatgacttatcttaaagaaggaaccctcctacaagggactgtttgcaagatttttccgtatggtgcgcgggttaggattgctgggacaaacagaagtggcttacttcacatatcgaatattagtcgaggcaatgttttgtccgtaagtgacatcctgaagatagatgatgaggtgaaagttatcgtgatcaagtcaaatgtcccagacaaaattgcagtgagcatagcagaccttgagagtgcacctggtttgtttctgtcagacagagagaaagtgttctcggaagcagaggagatggcaaagagatacagggagcagcttccagttacccctcagaaccctatattagatgatggccttccaggagaaaagctaccatttgataacgaaactaaactgtatgcaaactggcaatggttcaaatttctgcatcatagctaagctgctgacaacagcgacagagacatatctggtacttgttgaccatgcaaaggtgaactgtcgctagagaacctgccaacctgttgaagtccaatactgaccagtggtgggtagttctccacttccataacccagcatcagtcatggagaagtatgttggacaggaacaggcaacttcatcccgcagacaagatagggtacaaggtttccaggctgcagaacattggtgtttcgaattgcctcattcctagtgcccctggagtgaaatgttgtgatatcattttatctgtccggagaatgtagcttcattgcattcatgttatgtcaaaactagtcgggctgcccaagcactccgtgccaacaacttgcatctgcccatgaaatagattctgaaattttagcaccgt

SEQ ID NO: 117375 - DNA, 1712 bp, Zea Mays
acgccttggccggccggaacgcccgcaaccgacgaaatgccgacgccggcgccggcccttcctttcgtcccgaagccgcaacccatccttcacgtcgctaaagccctggtcccatcccctcgccagacgcagccccaggcccgagggcgaggcctaccgcagccggtcaattgtgccaactccaagcgcctcgacgacgcactctccgctggcttcgtccgccttctcaacgccggccaagtacaggatgcggactctgctagcggaacctgccggcgctatgaccccaagccgggtgacttcgcggtcggggtcgtagtttctggcacggaggcgcgcctcgacgttgcggtcggcgccgaccgtctcgccacgctgctctccaaggagcttctcccgctcgaccgcgacagttctgacccgccgacgcgacaagctctgcctcggctggggagcatcggcgtcgtggcgggcccctccgtggacgacgacagacagaagcgcgggagcaggacgctggtggcgcccgggacggtagtattcgctgaggtgcttggacggacgcttagcgggcgtccactactgtcggcacggcggctcttccggcgcctcgcatggcaccgcgccagacagattctgcaactcaacgagccaattgaggtaaaaatttacgagtggaacaccggggggctactcacaagaattgagggtctgagagcatttcttccaaaatttgagctcgtggacaggataagttcatttacagacttgaaaaataaagtcggttgcagcattcgtgtgtgcattgcaaggctcgatgaagaaactaacgacctgataattagtgagaagaaagcatgggaaatgacttatcttaaagaaggaaccctcctacaagggactgtttgcaagatttttccgtatggtgcgcgggttaggattgctgggacaaacagaagtggcttacttcacatatcgaatattagtcgaggcaatgttttgtccgtaagtgacatcctgaagatagatgatgaggtgaaagttatcgtgatcaagtcaaatgtcccagacaaaattgcagtgagcatagcagaccttgagagtgcacctggtttgtttctgtcagacagagagaaagtgttctcggaagcagaggagatggcaaagagatacagggagcagcttccagttacccctcagaaccctatattagatgatggccttccaggagaaaagctaccatttgataacgaaactaaactgtatgcaaactggcaatggttcaaatttctgcatcatagctaagctgctgacaacagcgacagagacatatctggtacttgttgaccatgcaaaggtgaactgtcgctagagaacctgccaacctgttgaagtccaatactgaccagtggtgggtagttctccacttccataacccagcatcagtcatggagaagtatgttggacaggaacaggcaacttcatcccgcagacaagatagggtacaaggtttccaggctgcagaacattggtgtttcgaattgcctcattcctagtgcccctggagtgaaatgttgtgatatcattttatctgtccggagaatgtagcttcattgcattcatgttatgtcaaaactagtcgggctgcccaagcactccgtgccaacaacttgcatctgcccatgaaatagattctgaaattttagcaccgt

SEQ ID NO: 117376 - DNA, 94 bp, Zea Mays
gaatccaagtttcctcgcagtccaacgaagatggcaaaccattcatccttgtctgttactcgtatgtgtggcaatcggtaagagaacactcagc

SEQ ID NO: 117377 - DNA, 1817 bp, Zea Mays
aatccgccgtcaccatctgctccgcttcccagcggccactggccagcgtggttctgcagggaggagaggagactaggagaagcggcagcgttccaacctgcctcggaagtcacggaaaatggcgtcgtggaagctcgccaaggcagtccaggatccgccgcgcttgtctcgcctcgcccgtaggacaatcgaggtcaccgaagccggcagaggtgggcaggctgagagggccctcgagatgttcgaggcaatgcctgtgaagagtcaggtgtcctggaacgccgcgctggctgcgctcgtcgacgccggccgcaccgactgggcgctctccttcttccggaagatgcccaggaggaacgccacctcttacgccaccatgatcgggggcctctcccgcgccggcggagctgcggccgccgaggcgcggcttctcttcgaggagctcacacttgatcagcacaacgtcttcacctggacggccatggtgtcgtgccacgtccggaacggcgagcctggtaaggcggtggagctcttcgtggcgctctacgccgagttctttgcgcggggggtgctgcccaacgcgcacacgttcagctccctgctcaaggcctgcgtgggtgtccagtcaccagccatgctgttgcagctccatggggtcatcttcaagctcctggacgaggggagcaggtcctgtttcgtgtggaatgctttggttgatgcacacgccaagctgggcgcactgtcggacgccgagaaggtgttccacggaatgcggcaaagggacatctgctcttggaacatcatgatggacggatattcccggcataagctcgtcgacagggcccttgatctattcagaagtatgagggaaaaggatacctcgacgtggaacatcataatatgctgcctgggggagaacagactcggtgaagacgctctccgcctcttcatcgatctggtcagatcgtatggccattgtggcggcgatgccgaggtaaacgcctcaatatacacaacagttctgcacatctgctcggtgctggcactccttgcgtttgggaggcaagtgcatgcacgcgccgtaaaggacgggttcggccggagtaacgtgttcgtcagcaattctctgatcagcatgtacagcagctgcggcgcgacgcttgatcttgagcaggtgttggaagaaatggctgtcagggacgtcgtgtcgtggaactcggcgattcaggggcttggtcagaacggacttgggaggcaagctctggcggctggagagcgtgcgctggagctcgggatgtacaacgggaacaccttcatcgccatcctgacatcctgcagccacgcggggatggtcgtggaggggttgagctacttcgatgccatggccaagaagcatggcgtggaaccaacgcttgaccactacatcagtgtcatcgatctcctcggccgtgcagggaggcttcaagacgcgtacgacctgctccggaagatgccgttcgcaccggacgcggtggcgtggcgcactcttctgcattcttgcttggcccataagaacaccgccgtgggaagcattgcggtgcaggagctgatggcgctgcagcccgacggtggcgccaggaactatgagagactggttcagggctgcggaggcagcagcacggctgatgaaacgcaggctgggaacgagaagagtgctgatcacacgcctgggtgcagctgggtcacctgagtggctgagttcctcctgaacatcaaaatcaagggccaaagctgcatcagtagcttcaccttttgtcctgctaagaatcagcagcaag

SEQ ID NO: 117378 - DNA, 1045 bp, Zea Mays
gaacggactaggtggaataggggaagcatgccttcaattgaagcaatccgcaaaccctttctactttcttcccctgctcgattcgcgcagctgcatcaccggcgacggcggcgatggcacggaggagaaagacggacgccccgccgcggctggacgaggcagatcgcacgctctactccaccttctgcggcgccgccaactccctctcccagctctacgcgcaggccatggcccagcagaagctcaacttccatgccggcgagcgccacgccttagaaaagctctaccagtggatcttgaggaagcacgatgaagaggctaggctcactgtggctgaaataatgtctcatatccagcatgagatagactatgtaggtactgatgcacatgtctccccaagagtacctcagcatcctcagattgcaaatccattcgccaattcagttgtcccacctggaactggtttgtatgggcaatcagcagctgggtttgctcctagacccagtgtcactgaccagtcgaagaatacaatattctctaatgccttatcaagcccagtgcgcaggagtctccagaactctcataccactcaaggtgctggcaatggaggccggaatgcagaagcaaacttagcaggtgcaaatagagaggccaattctacaagctccaacgacacttctatggatatggtttcagacacgaatgaattctaccagtgatttgcagtaagatgcttctgcaatcaagcagcatcgcatgccagtgttttttttgggcctttcctttcgttgaggttttcacataaactctcaccattatgtgagcaatgtagttgtatatccggtgattctggtttgttcaagttggtatttaagttgaaacgtgttgggcatgctttattccccacaatgtgttcgtgagttcaaatattatgaatgtacatgcagattgcgttgtgatataatctgatacaggaagttgactgaacttgttgaaacttcttctcaatgcggggcagcagaacattatagaagagtaaaaggca

SEQ ID NO: 117379 - DNA, 560 bp, Zea Mays
gaacggactaggtggaataggggaagcatgccttcaattgaagcaatccgcaaaccctttctactttcttcccctgctcgattcgcgcagctgcatcaccggcgacggcggcgatggcacggaggagaaagacggacgccccgccgcggctggacgaggcagatcgcacgctctactccaccttctgcggcgccgccaactccctctcccagctctacgcgcaggccatggcccagcagaagctcaacttccatgccggcgagcgccacgccttagaaaagctctaccagtggatcttgaggaagcacgatgaagaggctaggctcactgtggctgaaataatgtctcatatccaggtccaacctttaaacttcctggactatggtgctttgcttgaacatgtttgactatgagttgccttacttcttgtggagaagacgcatttgaatttatttacctaaacaaaatcttacctgtgcatcttttgatagctgtttaggccctgctgaaatgtgattttctttaattattggaaaaatactaagtttgcaaaaaaaaaa

SEQ ID NO: 117380 - DNA, 3367 bp, Zea Mays
agaccgatttgtgtcgcagagtcccgatatatgggtcatgcacgggtgaaagcccagaatatggtcgactttaggtggtctgttggagaaaatatggatcacaaatcgtgtctatttacaacctattttgggtttaagttggatttggatcctttgttggactcagtctcacgcatctgttccgacacccatgcaccggaaggtaagggtgccgccattacctcacctcacgctccgctgcgcctcttcctcttcagccgctgcctccgtttccccgccgccacctagacgcctccctcctcccgtcccactctgcgacctccttgctcaccgtctcgggcctcctcgctcgccgctctcacctccaccgcctcgccctcacgccgacctcctccccctgctccgccgcggcggcgacgccaactctccggaaaacctccacgtcgagctcatcaagcggggcctcaatcatgacctcttcttatgcaaccatctcgtcaactcctacgccaagggcgcgcgcctggctgccgcgagccaggtgttcgacgaaatgcccgagcggaacgccgtctcctggacctgcctcgtctccgggtacgtgctgcatggaatcgccgaagaggccttccgggtgttccgcgccatgctgagggaggtgcaggctgggtgcaggcccacgtccttcaccttcgggaccttgctccgggcgtgccaggatgggggacccgaccgtctgggcttcgcagtccaggtccatgggttggtgtcgaagacggagtatgcgtcaaatactactgtgtgcaatgccctgatctcaatgtatggtagctgcactgttggcccgccgatcctagcgcagcgggtgtttgatggcacgccgatcagggacttgatcacatggaacgcattgatgtctgtttatgctaagaaaggtgatgtggcttcaacgttcacactgttcaaggatatgcagcgaggtgattccaggattcagctgcgtccgacagagcatacctttggcagtttgatcactgctgcatctctgtcatcaggcagctcggctgtgcttgaccaagtattggtgtgggtgctcaaatctggctgttctagtgacctctatgtgggtagtgctctggttagcgcttttgctagacatggcttgactgatgaagctaaggacatatttctcagtctgaaacagaagaatgcagttaccttaaacggtttgatagttgggttggtcaggcaagacttcagtgaagaagcagtgaagatttttgtggggacaaggaatactgttgatgttaacgcagatacatatgttgtattgctcagtgcattagctgagtattctatatctgaagaagggctgaggataggtagggtagtccacgggcatatgcttagaactggacttactgatctaaaaatcgctgttagtaatggactggttaatatgtatgccaaatgtggtgccatcgagagtgcctctaaaatttttcagttaatggaagcaacggataggatttcctggaacaccatcatctcagctctcgatcagaatggtaactgtgaagaagcagttatgcattactctcttatgagacaaagttgcataagcccatcaaattttgcactaatcagttccttgagttcatgtgcaggtttgaaacttttaactgctggtcagcaagtgcattgtgatgctgttaagtggggtctagatttagatacttctgtttcaaatgtactggttaaaatgtatggggaatgtggagctatgtcagattactggaaggttttcaactctatggctgaacacgatgaagtttcttggaacactatgatgggtgtcatggccagttcacaaacacctatttctgaaattgtcaaagttttcaacaatatgatgaggggtggtttgatcccaaataaagtaacatttataaacttacttgctgctttgtctccactgtccgttcttgaattggggaagcaagttcatgctgcagtgatgaagcatggagttatggaagataatgtggtagataatgccctcatatcatgctatgcaaaatcaggagatatgggttcctgtgagcatctgtttactaacatgtctgacagaagggatgccatctcgtggaattctatgatttcaggttacatctacaatggcaatctacaggaggctatggattgtgtatggcttatgatacacagtggccaaatcatggattgttgcactttctccattatactcaatgcatgtgcttctgtggcagcattggagcgtggaatggagttgcatgcttttggtattaggtcacacttggaatcagatgtcgtggttgagagtgctcttgttgatatgtactccaagtgtggtagggtggattatgcctctaagcttttcaattctatgactcagagaaatgaattttcatggaattctatgatttctggttatgcaagacatggtcttggaaggaaagccattgagatatttgaggaaatgctgcgcagcagagagagtccagaccatgtcacttttgtcagtgtcctatctgcctgcagtcatgctggattggtggaaagaggtttagaatacttcgaaatgatgccggatcatggtatactaccacagattgaacattattcttgtgtcatagaccttctcggtcgagctggtaagattgacaagataaaggagtacattcaaagaatgccaattgaacctaacgctctcatatggaggactgttttagttgcttgtcgacaatcaaaagacgggtctaacattgatctggggagagaagcttcaagggtgcttttggaaatagagcctcaaaatcctgtaaactatgttctggcatctaactttcatgcagctacaggaatgtgggaagatacagccaaagcccgaactgcaatgaggcaagcgacagagaaaaaggaggctggtcgcagttgggtaaccctaaatgatggagtccatactttcatcgctggtgatagatcacatccaaacaccaaagaaatatatgaaaaactgaattttttgatacagaatataagaaatgctggttatgttcccctgacagagtatgccttgtatgatcttgaagaagaaaacaaagaagagctgttgagctatcatagtgagaagctagccattgcctttgttctgactcgttcctcaagtggcccaataagaataatgaagaaccttcgggtttgcggagattgtcacatagcatttcgatacatttctcagatgattagccggcaaatcattttaagggattctatccgatttcatcatttcaaagatgggaagtgttcttgtggagattactggtaa

SEQ ID NO: 117381 - DNA, 1132 bp, Zea Mays
ctcttaaaaggcttgtctttttccatagacatgaatctttttttaaccatctccatggtttaaagcgttgtgttaattatttgtgtaccagtgataatggcaagccgtgaccagaaaaaaaagactaatgtcactaagatattttgttcaaggctgaaggagtgaaggctccaagctaaacttgaatttataaaacaagagtttatatggtgtacttaacatactatttgcatgtccggcagctacgtacagaaggatagggtgcagactaacacacatgagccacaaaccagagacgaacacaagcacaaagcagcaacccagctgtgtgagcacgcacgcatgacgcatgtacactgcacaagaagagatcgatggggttccatcggtccctggctcaactcagtaccatggcgagtccgggagcgcggtgatgacgctcttgacctgcaggtacttgtccatggctgccagcccctggtcccggccgaagccgctcatcttgtacccgccgaagggcgcgtccgggtcgaaggcgaagtagcagttcacccacacggtgccggcgcgcaccgaccgggacacccggttggcgacgtccaggctcttggtcacgatcccggcggcgagcccgtacctggtgcagttggccttctcgatcacctcatcaaccgtcctggggaatggggatgcatggcgggagaagaaatgtgcaaacaacggccgtcagtcatcagaacctcagaatgcaagaggcatgaacaatatcaatttcgatgttagtgtatggtgtacgtacttgaacttcatgagggacatgacggggccgaagatctcttcctgcgcgatcttcatgtcctcctggtcaatccatccagatgatgagatgagcatgcgtcagtgactcgccattgtttctaatcgtatgtatttttcgttgtgctgtgcttgtcgtttaacttacagtgacatcgacaaagatggtgggctcaatgtagtaccctttgtcggcggcaggcttgccgccggtgagcagagtcgctccctcgctcttgccatgctcaatgtactttaggaccctctcaaactggtccttgtcaacctagcacgaccaacagagaattatccgttc

SEQ ID NO: 117382 - DNA, 618 bp, Zea Mays
tacatgactcaattgatggacttggtgcgtctgcagatcctgatgtaccagctgtgcaagggcgtgggttttgttcacagcagcggggtgctccaccgtgatctgaaaccgcacaacctgctcatggaccgctagaccatggcgctcaagatcactgacctcggactcagccgtgccatcatcgtccctgtaaagaagtacacgcacgagattctgacgctgtggtacagggcgcccgaggttcttcttggcgccacacactaatccacgctggttgacatttggtccgcgggctgcatatttgctgagttggttactaatcagccgcttttccctggcgactccgagttacagcggctcctccacatcttcaagttgctgggcaccccaaatgaggagatgtggccaggagtaggcaagctgccgaactggcacgtgtacccccagtggaagcccactaagctgtccactcttgtccctggtcttgactccgatggctatgatttacttgagaaaatgcttgcgtatgagccagggaagcgggtctcggcgaagaaggccctggagcacccgtacttcaatgatgttaacaaggaggtgtactgaacaattaatagg

SEQ ID NO: 117383 - DNA, 652 bp, Zea Mays
aatacgaggaggagcagagcaggtctctccatggatgcgagccaggatgtgtgggactgggactgggaggtggtcatgccagatcacaggagcttctccacgagccatggcagcaagaatcttgatgataaagaaacagaggagcattatctgctgccaccgtcaggagacgttgacgtgcacgacgactgcaagggcatcggcgtcgtgctggatgagacctgcaaatccgccgtgcctagtgttgccgatccgattatggcttctgagggtggcaaggaagagaaggcgatccagagccctgatgccgaggagtccgtcaccaccgacagcaactttgctcaagaagaggaggaggaggaagaagatatcaagaaggacggcaacgataaggttggagccctgatcggcgcgctgtgctcgtttggggtcgcagccgccaccgcctgcgtctttctcatcggcggcaggctgcatcatcaccacatgcagcagcacaaaattcagctgcagttcttcggcgatgataagagcatccagcaagttgtgcgccagacgtcaaggctgaaccagaaggccatgtcgtttgcgatgggggcaggagcgtcacgacattttggaagggcacgtgtaaaacgtagcaaaaacatta

SEQ ID NO: 117384 - DNA, 93 bp, Zea Mays
ttttctgtccgtttttaaaattagggacgcaattacaaggaactatcgtggagttgctcaaagtaacaaccatgactttagcagcctccacac

SEQ ID NO: 117385 - DNA, 733 bp, Zea Mays
aatacgaagaggagcagagcagcaggtctctccatggatgcaagccaggatttgtgggactgggactgggaggtggtcctgccagatcacaggagcttctccctgagcaatggcgttaagaatcttgatgaaacagaaactgaggagcaggatctgctgcccccgtcaggagacgttgacgtgcacaacgagtgcaagggcatcggcgtcgtgctggatgagacctgcaaatccgccgtgcctagtgttgccgatccgataatggcttctgagggtggcgtggaagagaaggcgatccagagccctgatgccgaggagtccgtcaccgccgacagcaagtttgctcaagaggaggaggaggaagaagatatcaagaaggacgtcgacgataaggttggagccctgattggcgcgctgtgctcgtttggggtcgcagccgcgaccgcctgcgtctttctcatcggcggcaggctgcatcatcagcacacgcagcagcacaaaattcagctgcagttcttcggcgatgataagaggatccagcaagttgtccgccaggcgtcaaggctgaaccagaaggccatgtcgtttgcgatgggggcaggagcgtcacggcattttggaaggccacgtgtaaaacgtagcaaaaaacattagttactaaaatgtatatatatgtaatatgtatatatatgtacacataataatatatatgttgttcgtcaccctaagtaaa

SEQ ID NO: 117386 - DNA, 1077 bp, Zea Mays
aagcgacccatacttcgtgacagacgtccgctgatacgacccgatggagagaggtcttggatggttttggagactgcagggggtcacggccgcaaccccaatggcatcctcggccttctatgccgggaacactttcctggacttgtcgagtacgccggagtgacgagcccagcatacaccttcgaccactacgccgtcgcccccgatgcagtagatcgggacggcagacaattcaacaacaaggcggagcgggtgaagcaagagctgtgggatttcttcaggtgcgatgctggatacgaggccagggcggatgtggtgtctacgacgtgctgtaagaagctcgtcgtggacatgcactacgaggcgcgcatccaggccatcgtcacttaccacggctccgtccttggggagaaggtgaacaagaaggacgcccgaaccatgtcattgactgcggaccagtacttgcagtgctgggagaagatggtgcagaggtggtgctcggctgagtgggacgaggcgcacaacgctagccgggaacggcgtttgctgatgcaaggtccctcccaccatcaaggcagccgcagcctgggcaaatacgcggaagcatggtcggcggcacatggtggcgcgccttgctccacgttctcggcatatgccatggcccacaaggggaaggcgacgtccgacgtcacctacaacccggatgacgggcccgaggcgtacaccaaccccgccatccacagccgactcagtgagtacaccgcaatggccaaggaggtccatgggccagattacgatccgaggaccgaggacatcgacggagatgtcctcatgagggtcggaggaggcaagaggcatgggcggtactggattgccgacggggcaatcgactcgtcctccactcccactctctctcaggtgcgagcaaggagcacgagcgcgagcccagccatacgacctcggcaggacacctcacagcatcgtatccagcaactccagactcagctagatgatgagaggaggcaacgtgaggagctggagaagaggatggcggagatgttcgcgtacatgcagagc

SEQ ID NO: 117387 - DNA, 780 bp, Zea Mays
gcacgtcctggttgttgtcggcgtcaggtgcctacggcggcgtcaaatgatggggaggcaacctgcggcaacaaagcagagggcacactgttggattggaggctatcagcttgcttgcaatgcaatacgaggagcagagcaggtgtctccatggatgcaagccaggatgtgttggactgggactgggaggtggtcatgccagaccacaggagcttctccacgagccaaagccatggcagcaagaatcttgacgacaaagaaacagaggagcatgatctgctgtctccgtcgggaaactttgatgatgtgcaagtcgagtgcaaggacatcggcgtcgtgctggatgagacctgcaaatccgtcgtgcctagtgttgtcgatccgataatggctcctgacggtggcgaggaagagaaggcgatccagagccctgatccgataatggctcccgacggcaagtttgctcaagaggaggaggaggatgaagaagatatcaaggacggcgacgataaggttggagccctgatcggcgcgctgtgctcgtttggggtcgcagccgccaccgcctgcgtctttctcatcggcggcaggctgcatcatcaccacacgcagcaccacaaatttcagctgcagttcttcggcgatgataagaggatccagcaagttgtgcgccagacgtcaaggctgaaccagaaggccatgtcgtttgcgatgggggcaggagcgtcacgacattttggaagggcacgtgtaaaacgtagcaaaaacattaattactaa

SEQ ID NO: 117388 - DNA, 661 bp, Zea Mays
acgaggagcagagcaggtgtctccatggatgcaagccaggatgtgttggactgggactgggaggtggtcatgccagaccacaggagcttctccacgagccaaagccatggcagcaagaatcttgacgacaaagaaacagaggagcatgatctgctgtctccgtcgggaaactttgatgatgtgcaagtcgagtgcaaggacatcggcgtcgtgctggatgagacctgcaaatccgtcgtgcctagtgttgtcgatccgataatggctcctgacggtggcgaggaagagaaggcgatccagagccctgatccgataatggctcccgacggcaagtttgctcaagaggaggaggaggatgaagaagatatcaaggacggcgacgataaggttggagccctgatcggcgcgctgtgctcgtttggggtcgcagccgccaccgcctgcgtctttctcatcggcggcaggctgcatcatcaccacacgcagcaccacaaatttcagctgcagttcttcggcgatgataaggttggatgcatggctcattcaactcaaaataacccatccgtaatctctcttttccagtaggattttctttgaccttgtaattaattggataggataccgtgatactgataactgtgatgcctgcctgatttggttt

SEQ ID NO: 117389 - DNA, 88 bp, Zea Mays
gtgttgtgtgtgttctgtttgtcccgggccacaggccctttttccctctactttaatttaatgatacgcagccctcctgcgtattcga

SEQ ID NO: 117390 - DNA, 390 bp, Zea Mays
atggatgcaagccaggatgtgtgggactgggtggtcctgccagaacacaggaggttctacatgagccatggcagcaagaatcttgatggtaaggatcgcttattgtttcacgcgatccggagccctgataccaaggagtccgccaccgccgccgacaactttgctcaagaggaggtagaagaaggtatcaaaaaggacgactacgacgacaagacgtggccgcaaccgcaatgcccggtgttcagcgtggggaagctgaaggtgaacgtgatccgcgctgtgctcgtttggggtagcagccgccaccgcctgcatatttctcattggcggcaggctgcatcgtcaccaccggcagcagcagaaaatccagctgcagttctacggcgatga

SEQ ID NO: 117391 - DNA, 399 bp, Zea Mays
atgtgccaagctatcagagcttccaacaacagctacgacaatatgccttcaacaaacaattatcctactaaaatttctgaaaaagtactattttacccaaaaaatacagaaatgaaattgtgtagactactactaggaacctacaagagaaaggtggagcacagagttcatgtaccaatgaaacgaaatgtatctggaaaggagaaggcaatggtacaacaaaaaaaaaatctacatcagtcgaaagagtcaccataccatctagtacttgctcagttcatgcattcgcctatcaaacattggtcaaatagcttggacaaaaggaagccatccacccaaaatatattggctttgcaatgtgagatcaagataacctcactggacccacgttgggcttag

SEQ ID NO: 117392 - DNA, 210 bp, Zea Mays
atggcgtccctgaaggcgtacgtgcttttgttcacggcctttttcttctccgggctcatgcagctgtccatggcggcgcacgacaagcagccggcgacgacggcgcgggtggtggtcgacgcaaaggcgatcgatcaggctgttgcgtacctgctcatgttcgctgcgctctttgtcacctatttcgctcactcacgatcggtagtatag

SEQ ID NO: 117393 - DNA, 496 bp, Zea Mays
accgccctcctggctgctgcctcctctcttggcggtcacaaacagcagcagctgcagggcggccgacgtcctaacaccaagaagagtggccatcagccttccccaactccttcggtggcacctccagcagcaccagcacctacaaacgcgttccctggggcttgaatccctggaccggcgaacgtgtggcccttggagagcgcttcacccgtcctggtcagcaccgtcagggcagttctggtgcccctagaggtcctggtgcctaggctggacgcaacccaggtatactagggccttccccgcaggccaataccgcctttgctccgctccaggcctcctcaagcggctccaacacctccagcacctggaatgcagccggcctcatcgctgctctgcagaacatgggattgcagggcgactggattgttgactccggcgcctccacgcacatgacatcctcgtctgatatgcttacccaacgccttcccccctcaat

SEQ ID NO: 117394 - DNA, 2380 bp, Zea Mays
cgggtcacatcaaacgtttgacttttaaataggagtatgaaatatagacccaaccaactgaactagattcgtctcgtcttttaattttcggctgacaaattagttttataatccgactacatttaatacccggaacggaggttcaaacattcgatgggacatggctaaattttagcgggttgtgcgatacggcccaagtgtggttcagcaacgccgaagaaaaatcagacaagaagcccctccggccctcgccctccctagtccctattcgccgcgcccgcgcccgcgccgtctcgaggtccgccggtctccttccgccgcaagctttgctccattccaccgccgcctcttccgcctccgtcggcaaaatgccggtctacagcatccgcggcgtcaacgtcgacttccccttcgacgcctacgactgccagatcacctacatggaccgcgtcatcgagtccctgcaacaggggaagaacgcgctgctggagagtcctacgggtacggggaagacactgtgcctgctgtgtgcgtcgctcgcgtggcgccgcactttcggcgagttcctgcgggtcgggcgtgggggcggtgggactaagcagttgccctacgggagtcagccgtccgctagccagcagtcagaggactctacgtctcagaagcagcagcagtcgcggtacccagtcatcatctacgcctcacggacccacagccagcttcggcaggttatcaaggagctcaaggctaccagctacaggccgaagatggcagtgctaggttcccgtgagcagatgtgcatccacgacgaagtgagcaaactccatggaagagcacagaacaatgcctgtcacttcctctgcaagaaacgacggtgccctcataataaccatgttgctgagttcataaaaaacaaacctgagcttgggaatgagccttttgatatagaagatttgataaatattgggaggcataagggcccgtgcccatattacatctcccgggaactttcaaagtcggttgatattttgtttgccccttacaactatcttattgatccgggaaaccgtcgttccctaaatggcataccatgggacaatgcagtacttatatttgacgaagcacacaacttggagagtatatgtgcagatgcagcctcttttgatttatttccgaataacctcacagcttgcatagcggaagctcatgaatgcatcaaactgtgttcagcaaagaggtccattgaaaattctgctgataaacaatttgatcctgaaaactatgcaatcctcaaagctcttttaatggcacttgagaaaaaaattgctgagctgttaattggatccgagttgggctacacaaaagctgggagttacatatacgattttctctctgaactgaacattacatcagacacatccaaaaaactgattgagacaattgattgtgcttctttgctactagaggaaggaaattctgctcaaactgggccaggggtccaggcaaaggctgcagtgtctagattggagtcaattagggacatgttagacataatttttaggggtggtggtcaaaaccatgcaaaatattatcgatttcatgtgaacgaatctcaacaaacacatggagatgcattgaaatttttgggtaagtcttcaaggacccttagttggtggtgtttcaacccggggctggcgatggaagaatttctcaagttgggtgtgcgctctatcatattaacctcaggcaccttgtctccgttggattcactagccatggaactaaaccttgaattcccagttagactagaaaatccgcatgtcatttcttcagaccaagtctgggttggagttgtgcctgtcggcccttcgggacatgctcttaattcttcttatcgtacgcgtaatactatacaatataaacaagagttgggcactgcaatagtaaatttcgcacgcattgtgccagacggactccttgttttcttcccttcatattctatgatggacatgtgtgttgacttctggaaaaataggaaccattcaaattcagcgtctgagaacacaatttggcagcggatctgtaagcacaagcagccagttatagagcctaggcagtcatcaaactttcagagtgcaattgaggattatagagccaaattacacgattcttcttctggggcaatattttttgcagtttgtcgtggcaaagtttgttcctgttctttgtaacctttgctatctattatcaccactttttttatatccagtctcaatgatcttgagctaaatgcttcttttgccaggtctgtaacatgctaatcaatttattaaccattatgtgtacccttttttgcgctgaaagataaaacatgcttagtggc

SEQ ID NO: 117395 - DNA, 603 bp, Zea Mays
atgttgattgccgagataatatttttttccccatgaatccagtgaattcccagttagactagaaaatccgcatgtcatttcttcagaccaagtctgggttggagttgtgcctgtcggcccttcgggacatgctcttaattcttcttatcgtacgcgtaatactatacaatataaacaagagttgggcactgcaatagtaaatttcgcacgcattgtgccagacggactccttgttttcttcccttcatattctatgatggacatgtgtgttgacttctggaaaaataggaaccattcaaattcagcgtctgagaacacaatttggcagcggatctgtaagcacaagcagccagttatagagcctaggcagtcatcaaactttcagagtgcaattgaggattatagagccaaattacacgattcttcttctggggcaatattttttgcagtttgtcgtggcaaagtttgttcctgttctttgtaacctttgctatctattatcaccactttttttatatccagtctcaatgatcttgagctaaatgcttcttttgccaggtctgtaacatgctaatcaatttattaaccattatgtgtaccctt

SEQ ID NO: 117396 - DNA, 291 bp, Zea Mays
ttgtcatagaaaatcatcaaaatacaattaaatcattaaaatattgtagtatcgaccgaaaaatacaaataagttatcaatactaataaatagtcaataaaaagataaccttaagttcccatgtggagataactttaagcccacacataaaaatggtaaagtctattaatttgatataaatttggacattatttcaatgattttggtctaaagatatgtttaaacaaaaaattgatgtattacaaacttatagatctcttcaagctctacaattttcatttaaactttatc

SEQ ID NO: 117397 - DNA, 3313 bp, Zea Mays
cgcctccccctctccctccccgcgtgagccgccgcccctgctccccctgttcgcacccgccgcccctgctccccctgtcccgcgccgcggtgacaggatccgagaacacccctgcggatgcgtccaggattcaaggcctccccctcccttcccctgccctcacccccctcggcgatgcccggattcatggtggcgcaggcgctggaggcgtccacagggggcgacaccgtgaccctgcccccgttcgacatcagcgctcctccccccgaccaccgtcgatttgtagaagctcctcgcccgtgcttaaggacgcagtgagggcgtccacaccaccgtgcccccgcctgccgagatgtcgtgcgcgtcttccttccccggctgccgagatgccgcgcacgaccccccaccaacggcgcccttcctccccaaatgctgccgagtccccaccaacggcgcccttccttccccggctgtcgagatgccgcgcggccttcaacgccggatctcgccccatggccaccaacgacgcccttccttccccggctgcaaggatgcgactaccccaccaacggcaacgacgcccttcctcccccacatgctacatgctacgcgcggccgagatcccgcgcggctcccccaccaacggtgcccttccttcccccggctgccgaggtgccgcgcggccttcaacgccggatctcgccccatggcctccaacgacgcccttccttccccgactgccgagatgcgaccactgccgctccccgaggaggtggtgccgatgtacctacgacctgctccttccacctccccgcctttctatgagaacgccgccaacctgctcaacctggcaccgccgcctccatatcagccatctcccgcatggtgtctcgacgtcgtccctcgctgagcaccccctcgtgcttggccatgagcggcggcgtgctgaactcccgttcgttcggttcgtcgctcggtggaagcgctgtggcggagctcggcagtagacctcaccgtggactcaggagaccgacatccccaatcatagcgagagggacgaccagcaggacacagtccaagcggcaaggcttccccatggtagatacgagacgatttctagagttcagttatcctgagatgctcagatgtttgctgcgcgaaaatcttcctctcctttcaagctctcaggttgattcagaacgggaattttttagtcgtggtataaaaagagtttgtacaaagtatgttctaactttatcaactaaatcactcactttgccaagtaaagcttgggacttcctgatcaatagtaaataccattcctaatactgcaaaagggcactatcgccttccaattcttttttgcatgtgacatataatacatgcaaaactgtttttaatccatttctctatgatggcagttaaaatgtgtataatattcgattcatgagagaaacattggagatattccggtgtgcttttatatggaatgacccgacctgcagcacaactgtctaatagtctcatagttcatttctgctatatttacatttttagtatttcttatttcatttgtagttcagtttgtttgtccataaaactagatcctagactgctttgcactcagctcagaccaaagccccactctacatggaccagtgtgtaatctttctgtatgcatcatctctctctcatgtaatttatctctatcacacatgtaggttgtagttacgcaacccatatggttagtgcattatcctggagttgcagaatttatgcagtagtttcatgagatgttaatcagatcaaaagaattaaagagtttgtttatcctgattcccgagttcattactaattacactagcaattccttgtccaatatccaattaactacttttccccctgcctcctctactagagaaggagaacttttgttgatgaacttaatatacggagcatctttgaagaaaatgatgttatctgtgtcagtgtgatacttgctctatttatttcaagcagttattttgtcttagtgctggagtcaacatttggggtatagtgacttcaaatctgtttttacttagggtgttgagctgacactttttgcttctatatgactgtatctataatgccagcacatcacaaacaaatgcacgatcaatgtggcagtgcccaatttttgtcattattatatgtcaaggaataatcttatttgcttgtgcttccctgtttgcaaatgccggggtcctggagcaagtcttccacccccgaaccctcacgccaccgccgcagctgtcttcggtctcccgtgcttcccttcgagagatcaaggctaaagtaacctgtctctgtttggtcattatgctctaggatccttcaacttgacatcacagcaatcgttgaggagagcctagacttttcaacggaggttatggatttggcagcagaggaactcttggagattgtgcctcttggaaaaggcttctttcttgccaactatcctatttcaaatttggattgaccattatcgttcgttcctttgttctccatcttttacctcttgtagttacacaagaacaacttgattgtgctaaagaggcaatcaaatctacagttctgatgaacttggaatcaagggctaaaataacctgtctctgtttggtcattatgctctaggatccttcaacttgacatcacagcaaacgttgaggagtgtaaccagcaacctcagctctgaaagaaccctagagtaaacactcacatcaagacactccattgttcactcttgggctgctcctaccaatgaagcaagagcatctccacctcgcaatggtccactcgttgtattcatcactaagttagcttgattccaccaatgggtgttcatgcttggcttgaacccctacaagtgcacctggcattggttaccaatctgcagattcataacatctcatgaaaaggatgcgtgttggacaaccagataaggtattacagagaatatgaataatctggaggttctgctgatgcatgtaaattatggaattatggtttcaattctagattatttgagaatggcacctctatatgctcattgggcaatgatcagaaagttggagatcatagaaatactgagaacgctgtatcttgtttacatttatgggcacttttgaaaagaaattattttgtatggtagtattgttgaaaagatcaataatttagaggatttgatgatcactgtggatcgctgtgcatgggataagcggagctactcatagcttctactatcacggaagaatatatattgctaacccca

SEQ ID NO: 117398 - DNA, 1424 bp, Zea Mays
aaagtaaatgctgcagcgggcgattggttatttctcggcctcatcgtcgtcttctccgatcccaccctccttccctcccccccaagtcccaattcccaaccccgtcaccccgtgctccaaaccctagcaagcagcaatagagcggaacccatgcaatcctaatcgtttcgctgcctaatcctctccctttctcatctcatgacctgtgcctcatcgccgccgccgtcgccacgggctatgaagcgcgagctcgccttcgcgctctagtccctgtccgagatctcggcctcccccggccgcacgcgctccggccgccccatctcttcccttccgaacccattggcatcagcatctcccaagaggcgcaagagatccgcccccctcggcctcgcctccgcagccgatctcatctccccgcccatgccgcctatcgacgccgagccgcctaaccagcccctctgtgacatcatccaaccgctccatggatctaatcctcccactgcctctgaccaccgatccgattccaatgccgatcaagagctcatcccacaaacgatgctggaatcccccaaccatcgcactctgagactgcaatagggtgtgcaacagcaacagaggtctcgacagtgaaagtgatcgccaacccgaatctgctcgcatcagaaaatagtgcagcagatgactccacaatggaagtgattgcaaagccgaatgtggccacaaaggatggtgcatcaaagttcaatgtgggcatggaggatacaacatcaaagctgactgtggctgatactgcagcagtagaaccaactttgctggaaaccagcattgcagctggatcaaccgttgtagctggaaatgaacagtgtgataactcaaactcaagtggagcaagtctacagcagcaagccattgacaatgtattgatgtccactgttatgctagctgaggacattgccacacctgtggctactgccgagctcaagcctgcaagacgcttcactcgattgctgctcaagaatcatgagccaaacaaagaagagtctgcagcttgtgaaagtcaggcaacaccagatggcagcaaggatacctcatttgattttgctttgctcctggagaagcctcagagaaggtttacaaggtcgttgctcaagacaaaggttgagagcaatttggttggatctgacgatgcgctggacagtgcatctgatgcccgtccatcagtgaagaagatggagatgaaaatgtcagcacacttgcctcccgatcgtgaaacgaactaaacacgccagtaagctcatccacaacagcctccagggcggttggcacttccacacaacatccttcagctgggtcgacaggcttctgtagaactgttttacaattacaatacagttaattttgggtattagtacaatgtgccaatg

SEQ ID NO: 117399 - DNA, 1780 bp, Zea Mays
ctgcagtagccagtgcgagtggagtgagcggcccggacgagcggaggaggaagacaggatggctgccggacgagcggttgcggtggctatggtggcggcggcggcgctgccgctgctcgtgggtggcgcgtacgcggactgctacaactactgcttcaacgactgcatgaacaaggacaagtccatgagagactactgcagctacgcctgcgacaagacctgcgcgcccgacgcggcgccccggcgccccgtcgccggactccccataaactgccagctcgcctgcgtcagggactcctgccgccgtcgccgtgcagatgccaacgacatgaaggcctgctacgggcagtgctacgaccgctgcgagaccaaggccggcctgccgaggcctctccgcgcaggcggcggcgttggcattgtctggccggcggcgttgccggaccacccattccacaagaagcaggacgctgtctggccggcggcgttgcctgaccacccattccacaagaagcaggacactggcgggcctgcggcggaattgccggaccacccattccacaagaagcaggacgctgtctggccggcggcgttgcccgaccatccattccacgagaagcaggacgttgtctggccggcggcgttgcctgaccacccattccacaagaagcaggacactggcgggcctgcggcggcattgccggaccacccattccacaagaagcagggcgctgtctggccggcggcgttgcccgaccatccattccacaagaagcaggacgttgtctggcctgcggcgttgcctgaccatccattccacaagaagcaggacactggcgggcctgtggcggcattgccggaccactcattccacaagacgaagcagggcgctgtctggccggcggcgttgcccgaccatccattccacgagaagcaggacgctgtctggccggcggcgctaccggatcacccgttccacaagaagcaggacgctgtctggccggcggcgttgcctgaccatccattccacaagaagcaggacactggcgggcctgcggcggcattgccggaccactcattccacaagacgaagcagggcgctgtctggccggcggcgttgcctgaccatccattccacaagaagcaggacactggtgggcctacggcggcattgccagaccactcattccacaagacgaagcagggcgctgtctggccggcggcgttgcccgaccacccattccacgagaagcacgacgctgtctggccagcagcgttgcccgaccacccgttccacaagaaggaggatgctgtcgggccggcggcgttgcaggtggaccacaagatgcacgacgcggtcaagcgggcaggggagccggatcccggatacgtcatgtatccggcatggagccccgtccgcccctaatcgtcgattcgttgttggagaacgacgacgctccgccggcaacggcgaatgccacatgcatacatgctcgtggctcccatgcgatattaagcactagtagaggaagtgtgtgatgtgtcaacgtgctactgctatactgtatatgcatgcctactgtatatgcatgcctattctcacgtttatgcatatgggcattagtgttccaacagacacaggaatgccgactgaagagagcagagctttgttctacaagtggcaccaagggagcaagtggcggtagatgctaagcgtgccaacgaactcatctcctcctgtcctagctagttggctgcttcaattcatgtgtcttctaatctc

SEQ ID NO: 117400 - DNA, 1050 bp, Zea Mays
atgcatcccatctccatccccatccatagagctgcaggcggcctgcgctgcagccaacaagctcatcagctcaccgtacctaggaggacgaccgagcagctaaggtagtagtagctagctagccagtgatggcgggctacaaagcgcagggcggggcgctcggcgtcgtcctggctgtcgccgcgctcttcgcggcggcagcgatggcgatggcggtggacgacgagcacatgtaccactggaagtgcttcaagtcgtgcacggggaactgccgcgacgaggacgcctttgacgacgtcgtcgcccgccactccgagggctcctcccacgtcgtcgtcgctgccgtctccggcggcaagtgcaaggacaggtgcctcagcgagtgcttcgaggacctgccggccctctgctaccaccagtgcgtcgccaccaactgcctctgctacccaccctttagcaacgagaaagtgatgtgcctgaagagctgctgcaacaagtgcttccaccacggcccgcctgccccgaagccgaggccgccaatgcctggtcctccgaagccgcctgccccggcgaagcccaagccaccgccgacgccgacgccgacgccgacgccgaggccgccagcgccaaagccaccgacgcccagggcgccgccaccgccaaagaagccgtgtccctgcccccccggcagcgacgaggtcgaggccagcgaaaacaactgatacgtacgatggatcggccagtcgtcgtcgtctcagaataactccatatactataccacttgacttcgcaagtgtacgtgtgtgggtacgtcggcacatcaagtaggccccactatacgacgcgacgcatatatgtacgcaacgtacttaattgctgctaccaaggaaaaggaaggaaagcaattctagctccgttgttgtaaatgatgcatgtactgaaatttatcttctatagagtgcgcagaggcacattgcgcacttagtattatgtatagcatacatcgaatgttcaagtttactgaaaaacaaatcggtgcgagtgcaaaag

SEQ ID NO: 117401 - DNA, 1085 bp, Zea Mays
atgcatcccatctccatccccatccatagagctgcaggcggcctgcgctgcagccaacaagctcatcagctcaccgtacctaggaggacgaccgagcagctaaggtagtagtagctagctagccagtgatggcgggctacaaagcgcagggcggggcgctcggcgtcgtcctggctgtcgccgcgctcttcgcggcggcagcgatggcgatggcggtggacgacgagcacatgtaccactggaagtgcttcaagtcgtgcacggggaactgccgcgacgaggacgcctttgacgacgtcgtcgcccgccactccgagggctcctcccacgtcgtcgtcgctgccgtctccggcggcaagtgcaaggacaggtgcctcagcgagtgcttcgaggacctgccggccctctgctaccaccagtgcgtcgccaccaactgcctctgctacccaccctgtatgtgctagctctgctgcatggtcaagcagctgataagacccatggatcgtatacaattttgtttctggaatgagtcttattatctggaatcctaatgatctctctccctgtcatgccctgtcctgtccatgtgttgctttacttctgtacatgcaatcgattttatttgcagttagcaacgagaaagtgatgtgcctgaagagctgctgcaacaagtgcttccaccacggcccgcctgccccgaagccgaggccgccaatgcctggtcctccgaagccgcctgccccggcgaagcccaagccaccgccgacgccgacgccgacgccgacgccgaggccgccagcgccaaagccaccgacgcccagggcgccgccaccgccaaagaagccgtgtccctgcccccccggcagcgacgaggtcgaggccagcgaaaacaactgatacgtacgatggatcggccagtcgtcgtcgtctcagaataactccatatactataccacttgacttcgcaagtgtacgtgtgtgggtacgtcggcacatcaagtaggccccactatacgacgcgacgcatatatgtacgcaacgtacttaattgctgctaccaaggaaaaggaaggaaagcaattcta

SEQ ID NO: 117402 - DNA, 1311 bp, Zea Mays
aatcggtgtatattgacctgcaaattctgtgcattttgctgtcgccctgtactgaacatttttttggctctacctgaaagaggatgtctaataaaaatcagacaggtatgctgccactgctattgccaggaacaagaaaagcatgaatctatccgcgcggatttcactcactcgctctgctcagcgcttactccgtttcccgtgcgcgtatcagcccgggccgttggacatcgcggcctcacgcgttcgacgtgcgcgcgtgcgttactcgtcgtcgtcgggccgcggcgcttgttgcatcacactgtagtatatagaacgagccatccacgcacataaagctacagcatctgctcgatcgtctagcttggacggtggaccgagagaccagccagctagatggcgcgcagggcggtcggcgttctactggccgtggccgcgctcctcgcggcggcgacggcgagggcggcggacgacgacgacaagacgcagccctggcagtgcttcaagtcatgctccagaggctgccaccaccaccacgaccacgaccacgacaacggcgctgctgccgtggcggacttcctctccggggccgccgccaaggtctccgccgccgtcacccgcgagtgcaagaacaacagctgccatgacaacgcgtgcttcaaggacctgccggccatcacctacccgcagtgcgccatcgccacctgcctcagccatccgcaccatagcagaaagaaaacggcgtgcttgaaggactgctgcgagaagtgcttcatcaatggcccacctgcgcctggcccacctgcgcctggcccgcctgtgcctggcccacctgcgcctggcccgcctgctcctggtcccagcccgacgccaccatctccgccaaattaagcccatgttgcatggatgctcttggtacacatgcatgaagtagtagagagcaacggtcaacttactccttatattcccataataataaaatacttaggagtacttacttcaaaaaaagaaggatctcatgactgtaaccgaagtgacattttctcttgagttggggtgtaacataaacccagcaccaaagctatttgccatctcattccagtttcaatatattaagacctagtttgggtaatactagaagtggtttggagggattgaagagtgtataaatccttaatagatcaaaaactctcataatacatctcaatccacttaaatcccttttattactagattacttcaatatcttttattactagattatccaaactaggcctaattaataaacgagcttgttggaacaagaaa

SEQ ID NO: 117403 - DNA, 502 bp, Zea Mays
acataaagctacagcatctgctcgatcgtctagcttggacggtggaccgagagaccagccagctagatggcgcgcagggcggtcggcgttctactggccgtggccgcgctcctcgcggcggcgacggcgagggcggcggacgacgacgacaagacgcagccctggcagtgcttcaagtcatgctccagaggctgccaccaccaccacgaccacgaccacgacaacggcgctgctgccgtggcggacttcctctccggggccgccgccaaggtctccgccgccgtcacccgcgagtgcaagaacaacagctgccatgacaacgcgtgcttcaaggacctgccggccatcacctacccgcagtgcgccatcgccacctgcctcagccatccgcaccgtacgtgcacggtcaaacgccccatcaaaacaatcgaggagcagagcagcacgcgatattatactgtactatagtatggttgtctgattaatgcctctcttctgttca

SEQ ID NO: 117404 - DNA, 255 bp, Zea Mays
atggctgccctgcccggggccacccttgccgtgacggcagccgtttcgttggcctcctggctagctgggttgaccggagcgcggtggagcagaggcctgcacatggcggccctggccaccagcaggcatcatgggcgacgaggcgatgagggccgcaggcggggacggtgggagggcgtcgacgtcgacctcctcaaggagcaggcaggaatgggtcccgactcccgacggatcagggaaatcgccgacgagtag

SEQ ID NO: 117405 - DNA, 537 bp, Zea Mays
attatgcaggaggggacaaggcccaatccggacgccatgcttcctagcgttgagatcctggcagtaaagatacggtttggcgtacgggaggatgaaaggacgctcatgtcttacctcagagtttttcctaacattagaaccttgcacattcagtcggctccaggtccattacatctagaagatgaggatgctggtggcgctttctggatcgatggcatttttagctcgatcaaatgcatttccaaaattaagaaattctcattttacgacttctacgacatgggcaacgacagcgagctcttgttcattaagagcattgcacaggcatgtagctcgctggagcacatgcttattgccatcagtgcaagtattatggaaccgcccagttggttgaagtccaggttaatggacgctatgtctgaggttgaatgggctagtgaagcaagtatgttggatatcgtcactggtaatcacaaggagtgggagtacgggacagcatctgatcagtcgcttagtgatccttttgagtacatttga

SEQ ID NO: 117406 - DNA, 1751 bp, Zea Mays
agaggctgcggcgtgcaaccgttggaacttggaagcttcgtttgctcagtcactcaacaacatgcagcagcacgcggcacgccggagctctgggcgactatataaatctgaccactcggtgctagctccatcaagctcgagagtcacggcatctaaagccataccatacaatacaacctcctctcctctccatacactgctccgcgtagcagctacagctagcgggatccgaaaaatggagagccagaacacctgcgaagaagtgttgccggtgagcacgctgagcgagcctctcctcccggggaaagccgacgacgacgacgacctggaggtgcagctcacaccgtacgaccgccgcgccaccgccaccgccaccggcgcgtcgtccttctccaggacgtgcctcaacctcaccaacgccgtctcggggatcggggtgctgtccatgccgtacgcggtggcgcagggcggctggctcagcctggcgctcttcgccctcgtcggcgccgtctgctactacaccggcaccctcatcgagcgctgcatgcgcgccgacccgggcgccatcgccagctacccggacatcggcaagttcgccttcggctccgcgggacggagggccgtcgccttcttcatgtacgtcgagctctacctcgtggccatcagcttcctcgtcctcgagggcgacaacctcgacaagctcttcccgggatccagcgtccggctcgcgggcgactaccggctgcaggggaagcagctgttcatcgctctggccgccgccgtcgtgctgcccaccacgtggctcaagagcctcggcgtgctcgcctacgtctcggcggtcgggctcgtcgcgtcggcggtgctgacggcgtcgctggtctgggccggcgtgtccgagaccgggttccgcaggaacagcaccagcgtcctcagcctgtccggcctgcccacctccctgggcctctacttcgtctgcttcaccggccacgcggtcttccccaccatctactcctccatgaggaacaacaggcacttctccaaggtgctgctcatctcgtcggtgctgtgcagcgtcaactacgggctgaccgcagtcctgggctacatgatctatggcgaggacgtgcagtcgcaggtcacgctgaacctgccctcgggaaagctctacaccaaggtcgccatagtgacgaccctgatcaacccgctggccaagtacgcgctgctggtcgcgccgataacggcggcggtcgaggagaggttctatcttcctgctggaagcgcgccggcgagggtgtccgtcagcaccgtggtggttgtcagcacggcggtggtggcctcaacagttccattcttcggctacctcatgtccttcatcgggtccttcctcagcgtcatggcgacagtcatattcccctgcctctgcttcctcaagatctacagggccgagggaatttcccgcatcgaggtcgcggcgatcgcaggtatcctgatgatgggcgtgttcgtagccgtcaccggtacctacacttctctgcagcaaattataggcagtttgtaagattagtggttgcagctctctaaaatgctcaagaaatagagcatatcaatttttgtatgacctgtatactaaccttgaattgattatatgatgagcaaaatgcatatatagcgatcctttcacttgccacactatgttattttgggtccctaactcgataaaccagaaaaacaggtcatgtaactcagttgac

SEQ ID NO: 117407 - DNA, 2347 bp, Zea Mays
cctcctctccattcccctcgtccaccaaaaaaaaaaaatatccgcaacaaattcctagctaaaccctcctccccgtcgtccaccgccggtcgccgccatggcgctctccaagcctctcctctctcgcctcctcccccttcctctccgcctacgtcctcaggcccgcttcctctgcctcgccaccccgcctttgaccccgacccccacccaaatcgacgaccagccacccgcggacgccgccgccgagcgccgccgccgcaagcgccgcctccgcgtggagccccctctctcccgaggccccgcgccgcagcgcgcgccgggggctccccgccccgcgtcaaaccccaacgcgcccaagatcccggagccggcctcggtgctgtcggggaagcgcctcgacctgcaccgccgaatcctcacgctcatccgcgagaacgaccttgacgaggcggcgctcctcacgcgccactccatctactccaactgccgccccaccgtcttcacctgcaacgccgtcctcgccgcgctgctccgccaggcccgctacgccgacctcctatccctccaccgcttcgtcacgcaggcctctgtcgcgcccaccgtcgccacctacaacctcctccttcaggcctactgcgactgccgccgccctgacgtcgcgcttgagcacttccgcctccttctcaaggacgactcgcccgtgctcccatcccccaccacataccgcatcctggcgcgctccctcgccgagaacggcaagctagaccaggcgctcgagctcaaggatggcatgctcgagcgtggccttattgcccctgatacccaggtgtatgccttcatcatgggtgggtttgtcaatgccggggatggggacaaggcagtttcgttgtttgaggagatcaaggagaaacttggcggggagtctattcttgatggcgtagtgtatggcaacctaatgaaagggtattttctcaagggcatggagaaggaggccatggattgctatgcagaggtgcttggagagggttccaaggtgaggttcggtgctgtgagctacaacatggtgcttgatgcacttgggaggaatgggaggttggatgatgcactcaacctgtttgatagaatgtgcatggagcatgacccgcccaggacaatcactgtgaaccttgggagctttaatgtgatggttgatgcatactgccgcgctgaaaggtttcaagatgcgattgaggtgtttggaaagatggccgagaagaagtgtgctccagatgcactctcgtacaataatctgattgactggttagggaagaacaaacttgttggggaggctgagggattgtacaaggagatggaagagcgaggtgtaaaccctgatgagtacacctatgtcttgctcattgaatcttgctttaaggttgatagggtggaagatgcagttgcttacttcaacaagatgtttgatgctggcctgaggccgaatgcgaatgcatttaacaaagttatagatggcttggtgaaggttgataggctcagcgaggcacagggtttttttgatatgatgcctgagaaggaggtcaaaccaaacattgctagctatgagttgctattgaaggcatatattgatgctgcaaggttggatgatgcgattaaggtcgccaaatgtatcctgttagatgagagtgtcgtctttagtgatgaaacgaaagcacttctggaggaggcactagacaaagagggtagaaatgggcaaatgacaaagttatatgaagatgttgagatggagaaagcagaggcggctgcacgtgcagctgaagagaaggctagagcagaggcccttgctaaagaagaagaagaggagaggaagaaggccgaggcaaaggctaaggaagaagctgctgccagggctagccgagcggctattgaggcagtgctgggtcgcaagagggaagcagaaaaacaggaaccagttgatggactgaacgttgaggatgcagaggttgtggaatccaagagtgacaccagcgatgtttctggagaacagaatgaaggcgatgagcacaaaaagcaagagccggctgaagcatcatcgtgttcttagcttcgttatctttataagttccttactagttactatcatgaatgatctttagatccatttcagtagtataatgtgcttgggagaggctatctgagaaggttggctcaatgcttttatatgaacttacatggtttcaagtcgtgctgattgtttgctacattgaatcattggtgcaatcttgtgtaccacatctagcatttcttagataagagataaatataagttataaaatttctttatccttgtgat

SEQ ID NO: 117408 - DNA, 264 bp, Zea Mays
atggaagatggaattcaattctcacgccgcagtgttccagtagcaatattaacaaaatctggaagatccactttctcacaagatgtttcagcagcaagggctacagcttcccgtgtatccagcaagtgcggcgatcgactggcgtgctttgtttgcagacagcccatcgcagctcctccaaatggaatatcaagcaaagtgcaaactcggagaagagcaaaacacagtgtccggaatcttgtggtcgtattctgtaaacagtaa

SEQ ID NO: 117409 - DNA, 1975 bp, Zea Mays
ccgagtataatcaccactggtagtcctagcaccagcccaccgcagcgccgctcaccgtctccatttaattaatccccctcctcccttcatatatgccttgccaccaactccctctgccagtacactccacttgctagccatgacgaccctcgccgcgctgctccttctggttgccgcttccaatgtcgtcaaggccgtggagtaccacagctttgtagccaccccgctgtctccccacttgtacaccgctccgtccttggacgcggacgaggatgtcttcggcggcagccttgccgtcgcggaggaggcggccgcggcgtcagactcggccgtgcacttccgcgtggtccaccgggacaccttcgcggtgaacgccaccgcgggcgagctgctgaagcaccgtctgcagcgggacaagcgtagggcggcgcggatctcggaggcggccggcgccggcggtggcaacgggagaaagggcgtcgcggcgccggtggtctcggggctggcgcaggggagcggggagtacttcaccaagatcggggtgggcacgccggccacgcaggcgctgatggtgctggacaccggcagcgacgtggtgtgggtgcagtgcgcgccgtgccggcggtgctacgagcagtcgggcccggtgttcgacccgcggcgctcgagctcgtacggcgccgtgggctgcggcgcggcgctgtgccgcaggctggactcggggggctgcgacctgcggcgcggggcgtgcatgtaccaggtggcctacggcgacggctcggtgaccgcgggcgacttcgtgaccgagacgctcaccttcgcgggaggcgcccgcgtggcgcgcgtggcgctcgggtgcggccacgacaacgagggcctgttcgtggccgcggcggggctgctggggctcgggcgcggcgggctgtcgttcccgacccagatctcccgccgctacggccggagcttctcctactgcctcgtcgaccgcacctcctccggcgcgggcgccgcgccgggctcccaccggtcctccaccgtcagcttcggggcgggctccgtcggcgcgtcgtcggcgtccttcaccccgatggtccgcaacccgcgcatggagacgttctactacgtgcagctggtgggcatcagcgtgggcggcgcgcgcgtcccgggcgtggccgagtcggacctccggctggacccgtccacgggccgcggcggcgtgatcgtggactcgggcacctccgtgacccgcctcgcccgcgcgtcctactccgcgctccgcgacgcgttccgcgccgccgcggcgggggggctccggctctcccccggcgggttctcgctgttcgacacgtgctacgacctgggcgggcgcagggtggtgaaggtgccgaccgtgtcgatgcacttcgcgggcggcgccgaggccgcactgccccccgagaactacctcatccccgtggactccaggggcaccttctgcttcgcgttcgcgggcaccgacggcggcgtgtccatcatcggcaacatccagcagcaggggttccgcgtggtgttcgacggcgacggccagcgcgtggggttcgcgcccaaaggctgctgagagcccccaggccggagtggtgaacccgtcctctctcgagcgaggagagagagaattaattagcgagtgattagctggtaatcaagtgagccgccttgttagtcataattaatggatgcggtggcttgtgggtttgctttgcttggccttggatgctgtgctgttaaaaaaaacgcgggcactgggcacttgtcagagttgtcttgtgtctctctgacagtgctgtgtagtagtttggttggatgcgcgagaggagggaagatatcagcagcagcaggcggttggtcgatgaatggctgtaaaaggcactgtcaaaagtgttggggttataaaaaaagcggcgcttttaactttaaaaaatgttggctttgtgctgct

SEQ ID NO: 117410 - DNA, 1019 bp, Zea Mays
actcgagaaacggatccctaatcgctgaaccaaaactacaaaacgaagtgacgatactgccctcgacctctcgaggtatcgagtctcgaccaacccatacgcacctaccctccgccaccgttcccccctccccatctcgcccgccgttctcgtccttgtagatctcctcgcacctcgcccattcgcttcaccaaggtgagcttgcgattctgcactctaaagtctgatctcgtcccgccggatctcctccccaccccatgcgttcagatctggttcctttcgatttgactcggttttcccttcctgtgcggggtgacatagggtttaagaccggcggcgatggcggcgaagctggcgcagctgcgcacacaggtaacgcgtgcggcggagttcgcctcgaagcacggctgctcctactacaaggaggtaatggagaagaacaagcagtacgtcgttcagccccccaccgtcgagaagtgccaggagctctccaagcagctcttttacacccgcctcgcaagcctaccaggtcgctatgagtcattctggaaggagcttgattgtgtcaagcaggtatggaagaacaggaaggacctcacggtcgaggaccttggcattgcgagtttatttggagttgagctctatgcatggttctgcgtaggcgagattgtcggcagaggtttcaccttgaccggctataaggtctagatgatttccactggtcaagacctgctttataattgatactcttagctgatgcttgtcgaaacgacgacgatggtacctgccttggttcacaattttgtttctttgtaagagtttacctagtgctgaatgccagcaaagacgggcacatcgttgcaacattgcctcaataatttgctcgctcaattgttgattttggtgcatgtaattctttgttggttgcaatcccccgcgtgcggactgatttctgcctttatttcttccctcaaaataaattccttgtgttccgtatgtgattttttggatgaacataa

SEQ ID NO: 117411 - DNA, 893 bp, Zea Mays
actcgagaaacggatccctaatcgctgaaccaaaactacaaaacgaagtgacgatactgccctcgacctctcgaggtatcgagtctcgaccaacccatacgcacctaccctccgccaccgttcccccctccccatctcgcccgccgttctcgtccttgtagatctcctcgcacctcgcccattcgcttcaccaagggtttaagaccggcggcgatggcggcgaagctggcgcagctgcgcacacaggtaacgcgtgcggcggagttcgcctcgaagcacggctgctcctactacaaggaggtaatggagaagaacaagcagtacgtcgttcagccccccaccgtcgagaagtgccaggagctctccaagcagctcttttacacccgcctcgcaagcctaccaggtcgctatgagtcattctggaaggagcttgattgtgtcaagcaggtatggaagaacaggaaggacctcacggtcgaggaccttggcattgcgagtttatttggagttgagctctatgcatggttctgcgtaggcgagattgtcggcagaggtttcaccttgaccggctataaggtctagatgatttccactggtcaagacctgctttataattgatactcttagctgatgcttgtcgaaacgacgacgatggtacctgccttggttcacaattttgtttctttgtaagagtttacctagtgctgaatgccagcaaagacgggcacatcgttgcaacattgcctcaataatttgctcgctcaattgttgattttggtgcatgtaattctttgttggttgcaatcccccgcgtgcggactgatttctgcctttatttcttccctcaaaataaattccttgtgttccgtatgtgattttttggatgaacataa

SEQ ID NO: 117412 - DNA, 860 bp, Zea Mays
actcgagaaacggatccctaatcgctgaaccaaaactacaaaacgaagtgacgatactgccctcgacctctcgaggtatcgagtctcgaccaacccatacgcacctaccctccgccaccgttcccccctccccatctcgcccgccgttctcgtccttgtagatctcctcgcacctcgcccattcgcttcaccaagggtttaagaccggcggcgatggcggcgaagctggcgcagctgcgcacacaggtaacgcgtgcggcggagttcgcctcgaagcacggctgctcctactacaaggaggtaatggagaagaacaagcagtacgtcgttcagccccccaccgtcgagaagtgccaggagctctccaagcagctcttttacacccgcctcgcaaggtgaaaccgtttgcctcttttgctgttgcgtctcgttgcgattagccaattgggttctattgcctgaagcgctgtacgatctgtttgtgcgcgcagtaatcagtaacgggtcttgttcaggtcgtttgttcgatgggtacagtgctgtgcacgtaatgtttttgtcctggctactattgcaatcaccttgttaaacctgaacgtagtatggatgtatggtgtgatttgcttatggccagtataagtgatgaggatagccaagctgtctgtctgattctgtgagcggattaaggttgctagcaagataatgttgttggttttttggcggtgtaactgagcatttgtatctagcgcagcatatttatgttcttcacctttgagggcagtccatgtcttaccctcttggctaacatggttcttcatggctgcactgtttgacttaacacttagtatgtcttttatcat

SEQ ID NO: 117413 - DNA, 1170 bp, Zea Mays
agacggggacggcaccggcagcgctccacaggcccaacctgccgtccacggcgcgaaagaagagccgcgaacccgggagtcctgcctgtcctcgtcctcctcccccttgccatccgccgcccatggcgtccgcgtccgcccccgaagtggtggtggtcttcgacttcgaccggaccatcatcgactgggacagcgacgactgggtcatcaccaagctcggcgccgccgacgccttccagcgcctgcgcccaaccatgcgctggaacccgctcatggacaggatgatggcggagctccacgccagggggaagacgcccgaggacatccgcgactgcctcaggagcgcgccgctcgacacgcacgtcgtttccgcagtcaagacggcggcggcgctggggtgtgacttgaaggtggtgagcgacgccaacaccttcttcatcgagaccgtcctggcgcaccacggcgtgctcggctgcttctccgagatcgtcaccaatccggcgagcgtcgacgcggacggcaggctcaggatctcgccgttccacgaccccgcgtccgcgccgcacggttgcagcctctgccctgacaacatgtgcaagtgcagggcaagatactggggaggatccaggcaacaggcagtgacaagaagcggcgccggcgcttcatctacatcggtgacgggaagggagattactgcccgtccctcaagctgggggaaggggaccacgtcatggcaagggagaactaccccctgtggcatctcatctgcgacaacaagcagcttctcaaggctgaggttcatccgtggaacagcggcgaggaactggaaaagacgctgcttaagttggccggcgaagtgatcagtccacctgcacaggcttcacaatttgactacagcaaatgcgagatgagcaatccagcatcctgccctccgtcgtgtgccgcactgattaccgaccaactcttagttcgcaagtactgataaaagtctccatcctgcattcaacatgatatatgtcgtcaatctgcacagcaatttagagatggattatctatgctatacactatgttatcaaataaactgtagcgtggcatggaaggacatgagttgagaattaattgatgccagtgtgggaaactatagtctctaactcctcaggaaaatccaaa

SEQ ID NO: 117414 - DNA, 1244 bp, Zea Mays
gcaccggcagcgctccacaggcccaacctgccgtccacggcgcgaaagaagagccgcgaacccgggagtcctgcctgtcctcgtcctcctcccccttgccatccgccgcccatggcgtccgcgtccgcccccgaagtggtggtggtcttcgacttcgaccggaccatcatcgactgggacagcgacgactgggtcatcaccaagctcggcgccgccgacgccttccagcgcctgcgcccaaccatgcgctggaacccgctcatggtactgctacctctcctcgtccggtaactaacctccctcgtccttcctgagggaagacatgcgccaagtcgatttcggtttctctttccaggacaggatgatggcggagctccacgccagggggaagacgcccgaggacatccgcgactgcctcaggagcgcgccgctcgacacgcacgtcgtttccgcagtcaagacggcggcggcgctggggtgtgacttgaaggtggtgagcgacgccaacaccttcttcatcgagaccgtcctggcgcaccacggcgtgctcggctgcttctccgagatcgtcaccaatccggcgagcgtcgacgcggacggcaggctcaggatctcgccgttccacgaccccgcgtccgcgccgcacggttgcagcctctgccctgacaacatgtgcaagtgcagggcaagatactggggaggatccaggcaacaggcagtgacaagaagcggcgccggcgcttcatctacatcggtgacgggaagggagattactgcccgtccctcaagctgggggaaggggaccacgtcatggcaagggagaactaccccctgtggcatctcatctgcgacaacaagcagcttctcaaggctgaggttcatccgtggaacagcggcgaggaactggaaaagacgctgcttaagttggccggcgaagtgatcagtccacctgcacaggcttcacaatttgactacagcaaatgcgagatgagcaatccagcatcctgccctccgtcgtgtgccgcactgattaccgaccaactcttagttcgcaagtactgataaaagtctccatcctgcattcaacatgatatatgtcgtcaatctgcacagcaatttagagatggattatctatgctatacactatgttatcaaataaactgtagcgtggcatggaaggacatgagttgagaattaattgatgccagtgtgggaaactatagtctctaactcctcaggaaaa

SEQ ID NO: 117415 - DNA, 1159 bp, Zea Mays
agacggggacggcaccggcagcgctccacaggcccaacctgccgtccacggcgcgaaagaagagccgcgaacccgggagtcctgcctgtcctcgtcctcctcccccttgccatccgccgcccatggcgtccgcgtccgcccccgaagtggtggtggtcttcgacttcgaccggaccatcatcgactgggacagcgacgactgggtcatcaccaagctcggcgccgccgacgccttccagcgcctgcgcccaaccatgcgctggaacccgctcatggacaggatgatggcggagctccacgccagggggaagacgcccgaggacatccgcgactgcctcaggagcgcgccgctcgacacgcacgtcgtttccgcagtcaagacggcggcggcgctggggtgtgacttgaaggtggtgagcgacgccaacaccttcttcatcgagaccgtcctggcgcaccacggcgtgctcggctgcttctccgagatcgtcaccaatccggcgagcgtcgacgcggacggcaggctcaggatctcgccgttccacgaccccgcgtccgcgccgcacggttgcagcctctgccctgacaacatgtgcaagggcaagatactggggaggatccaggcaacaggcagtgacaagaagcggcgccggcgcttcatctacatcggtgacgggaagggagattactgcccgtccctcaagctgggggaaggggaccacgtcatggcaagggagaactaccccctgtggcatctcatctgcgacaacaagcagcttctcaaggctgaggttcatccgtggaacagcggcgaggaactggaaaagacgctgcttaagttggccggcgaagtgatcagtccacctgcacaggcttcacaatttgactacagcaaatgcgagatgagcaatccagcatcctgccctccgtcgtgtgccgcactgattaccgaccaactcttagttcgcaagtactgataaaagtctccatcctgcattcaacatgatatatgtcgtcaatctgcacagcaatttagagatggattatctatgctatacactatgttatcaaataaactgtagcgtggcatggaaggacatgagttgagaattaattgatgccagtgtgggaaactatagtctctaactcctcaggaaaa

SEQ ID NO: 117416 - DNA, 1159 bp, Zea Mays
agacggggacggcaccggcagcgctccacaggcccaacctgccgtccacggcgcgaaagaagagccgcgaacccgggagtcctgcctgtcctcgtcctcctcccccttgccatccgccgcccatggcgtccgcgtccgcccccgaagtggtggtggtcttcgacttcgaccggaccatcatcgactgggacagcgacgactgggtcatcaccaagctcggcgccgccgacgccttccagcgcctgcgcccaaccatgcgctggaacccgctcatggatgatggcggagctccacgccagggggaagacgcccgaggacatccgcgactgcctcaggagcgcgccgctcgacacgcacgtcgtttccgcagtcaagacggcggcggcgctggggtgtgacttgaaggtggtgagcgacgccaacaccttcttcatcgagaccgtcctggcgcaccacggcgtgctcggctgcttctccgagatcgtcaccaatccggcgagcgtcgacgcggacggcaggctcaggatctcgccgttccacgaccccgcgtccgcgccgcacggttgcagcctctgccctgacaacatgtgcaagtgcagggcaagatactggggaggatccaggcaacaggcagtgacaagaagcggcgccggcgcttcatctacatcggtgacgggaagggagattactgcccgtccctcaagctgggggaaggggaccacgtcatggcaagggagaactaccccctgtggcatctcatctgcgacaacaagcagcttctcaaggctgaggttcatccgtggaacagcggcgaggaactggaaaagacgctgcttaagttggccggcgaagtgatcagtccacctgcacaggcttcacaatttgactacagcaaatgcgagatgagcaatccagcatcctgccctccgtcgtgtgccgcactgattaccgaccaactcttagttcgcaagtactgataaaagtctccatcctgcattcaacatgatatatgtcgtcaatctgcacagcaatttagagatggattatctatgctatacactatgttatcaaataaactgtagcgtggcatggaaggacatgagttgagaattaattgatgccagtgtgggaaactatagtctctaactcctcaggaaaa

SEQ ID NO: 117417 - DNA, 646 bp, Zea Mays
atactccgtataaagcagagaggagaggagaggagaggagacggggacggcaccggcagcgctccacaggcccaacctgccgtccacggcgcgaaagaagagccgcgaacccgggagtcctgcctgtcctcgtcctcctcccccttgccatccgccgcccatggcgtccgcgtccgcccccgaagtggtggtggtcttcgacttcgaccggaccatcatcgactgggacagcgacgactgggtcatcaccaagctcggcgccgccgacgccttccagcgcctgcgcccaaccatgcgctggaacccgctcatggtactgctacctctcctcgtccggtaactaacctccctcgtccttcctgagggaagacatgcgccaagtcgatttcggtttctctttccaggacaggatgatggcggagctccacgccagggggaagacgcccgaggacatccgcgactgcctcaggagcgcgccgctcgacacgcacgtcgtttccgcagtcaagacggcggcggcgctggggtacgcacggcacaaccacaccatgccgaccacgttctcacctgccgctgcagcacttgcgtttgggaccgaccgaccgatgttctttgatgctggcaatggcatggctgctgctgctcc

SEQ ID NO: 117418 - DNA, 998 bp, Zea Mays
cgctcacttgccggggacgaagttggtggcgtaagcccaggcgttgttgttgacggggtcggtgaggtggtcggcgaggttctcgatggggcccttgccggtgacgatagcctgcacgaagaagccgaacatggagaacatggcgaggcggccgttcttgatctccttcaccttgagctcggcgaacgcctccgggtcgtcggcgagcccgagcgggtcgaagctgccgccagggtacagcgggtcgaccacctccccgagcgggccgccggcgacgcggtacccctcgacggcgcccatgagcaccacctggcacgcccagatagccaggatgctctgcgcgtggacaaggctcgggttgccgaggtagtcgagcccgccctcgctgaagatctgggagcccgccttgaaccacaccgcctcgccgaacttgacgccgttgcgggcgagcagctccgggaacacgcacccgagcgcgccgagcatggcccagcggcagtggatcacctccagctcgcggttcttggcgaaggtctccgggtccgccgacagccccgcggtgtcccacccgtagtcgccggggaactcgccggtcaggtagctcggaggtgagccggacagcgggcccaggtacaggacgcggtcggcaccgtaccaggggctgccggaggccgccggcttgggcttggcggcggtcttgcgcatggtgatgcggccctcgccgaagacgtccctcgtgccagccgccggcttgccgacgagcgcgcgggaggtgatagccatggtggcggcagccatgtcgatcagatcgtagctccttctgatgctctgtgttgtgtatgcagtatgcgtgtgatggctgtgtcataacagaacacagcagctgccttttatacagttgggtttggatagcaggtcatcttttcctgaactgcgattggctggttggtctcgccggggtggcttggcgtctgacgtggctcctcgtgggccccaat

SEQ ID NO: 117419 - DNA, 1642 bp, Zea Mays
aggtcttcacgtgaatttggctccaattgtcgttgtcagcatcaactacgattgcaacctactcactccgttcttttttattcgttgaccttgtattttaggacgtgctcacaacctgatcatcagtacgcataaatgaagacataatatatttacagcatattttattgttcagctccacagcatgcatacaaatacactagcggtacaatctctggctcccaaagctcccttcacaaatactggtgcaacctgcagtacgtaggaatacgtacgtctacggtacacgcatgcaagcatcatgccctcgctcacttgccggggacgaagttggtggcgtaagcccaggcgttgttgttgacggggtcggcgatgtggtcggcgaggttctcgagggggcccttgccggtgacgatagcctgcacgaagaagccgaacatggagaacatggcgaggcggccgttcttgatctccttcaccttgagctcggcgaacgcctccgggtcgtcggcgagcccgagcgggtcgaagctgccgccagggtacagcgggtcgaccacctctccgagcggcccgccggcgacgcggtacccctcgacggcgcccatgagcaccacctggcacgcccagatggccaggatgctctgcgcgtggaccaggctcgggttgccgaggtagtcgagcccgccctcgctgaagatctgggagcccgccttgaaccacaccgcctcgccgaacttgacgccgttgcgggcgagcagctccgggaacacgcacccgagcgcgccgagcatggccccagcggcagtggatcacctccagctcgcggttcttggcgaaggtctccgggtccgccgacagccccgcggtgtcccacccgtagtcgccggggaactcgcctgtcaggtagctcgggggcgagccggacagcgggcccaggtacaggacgcggtcggcaccgtaccatgggctgccggacgccgccggcttgggcttggcggcggtcttgcgcatggtgatgcggccctcgccgaagacgtccctcgtgccagccgccggcttgccgacgagcgcgcgggaggtgatagccatggtggcggcagccatgtcgatcagatcgcagctgcttctgatgctctgcgttgtgtatgcagtatgcgtgtgatggctgtgtcataacagaacacagcagctacattttatacagttgggtttcgatagcaggtcatctttttcctgaactgcgattggccggttggtctcgccggggtggcttggcatctgaccgtcgcctcacggcggcagcatgaggaacgagaagagcaagtagagggagaggagtgctcggactgcggtgggactgggctgtacgaccgctgcaaaggagagtgcttcgtcttcaagcagctctcgaaggagacgaccaccagggcacgcaaggccgccaagaacatggccaccagatacacttcagggtactgctatgcacatcgttaattaattccttgcttgcatatctacatatccatcctcacctctcaccaagcaagaacatgaccaatttcaattgcattgcatctgttgcaggttgtccaccaatggacctactgcaaaaagtgctcctccacccgcgtgcctgtat

SEQ ID NO: 117420 - DNA, 1554 bp, Zea Mays
ttctttttttatttgttgaccttgtattttaggacgtgctcacaacctgatcgtgagaacaatcatgtacagtatgcataaatgaagacataatatatttacagcatatttcattgatcagctccacggcgtgcatacaaaaatacactagcggtacaatctctggctcccacgcacagctcccttcacaaatactggtgcaacctgcagtacgtaggaatacggtacgtctacggtacacgcatgcaagcatcatgccctcgctcacttgccggggacgaagttggtggcgtaagcccaggcgttgttgttgacggggtcggcgatgtggtcggcgaggttctcgagggggcccttgccggtgacgatagcctgcacgaagaagccgaacatggagaacatggcgaggcggccgttcttgatctccttcaccttgagctcggcgaacgcctccgggtcgtcggcgagcccgagcgggtcgaagctgccgccagggtacagcgggtcgaccacctccccgagcgggccgccggcgacgcggtacccctcgacggcgcccatgagcaccacctggcacgcccagatggccaggatgctctgcgcgtggaccaggctcgggttgccgaggtagtccagcccgccctcgctgaagatctgggagcccgccttgaaccacaccgcctcgccgaacttgacgccgttgcgggcgagcagctccgggaacacgcacccgagcgcgccgagcatggcccagcggcagtggatcacctccagctcgcggttcttggcgaaggtctccgggtccgccgacagccccgcggtgtcccacccgtagtcgccggggaactcgccggtcaggtagctcgggggcgagccggacagcgggcccaggtacaggacgcggtcggcaccgtaccatgggctgccggacgccgccggcttgggcttggcggcggtcttgcgcatggtgatgcggccctcgccgaagacgtccctcgtgccagccgccggcttgccgacgagcgcgcgggaggtgatagccatggtggcggcagccatgtcgatcagatcgcagctgcttctgatgctctgcgttgtgtatgcagtatgcgtgtgatggctgtgtcataacagaacacagcagctacattttatacagttgggtttggatagcaggtcatctttttcctgaactgcgattggccggttggtctcgccggggtggcttggcatctgacgtggctcctcgtgggccccaatggcctatcacacatgaatcctggggtgtgccacgtaggaatgggcgtagctaatcaggagctgccacttgccatcgtgggaaaaaaatggatgagataggatgggctttgttgccccgcgcttcttgctatttgtcaaatgcataatcaatgaagtctttttgctgattcatcgaaatggatcatgtgtatctttctcgttcatcgggacagtcgacgccgcctgcctcctgattcgctcctcctcgcccagcatcgcctcacggcggcagcatgaggaacgagaagagcaggt

SEQ ID NO: 117421 - DNA, 702 bp, Zea Mays
tcaacgccgttttccaaccggctttgtaatataggaaattacccatttctactatacaccagggcaatgtatcagcaaaagctttcggcctacaaattgctacgaagtgaagacaaaagagcaagccaaaaaaaattgagaccgggaggtagggcgaaggaataatacaggactaaacaatctcagctgcactgcattatgagacggcactaatatctgttggagatactctgcttgtctcggtcccaagaggccctcaaggcactgtaggagcgtttcccctcgcctgccctttgcgactcttgttgagccgggctactgtactcctggcaatgttgctgttcgttcagcatcctccagcttctgctcccagaatcactactgccagtaacagaaccaccagattccacgaccatgtcaccctcaagaatgcgaagaaccttttattcaaaagatagaaggcgtaagcatagatgcaatctagctttgtcaatggatatggagacgtaaaaattttagtttttatcactaacatgggacatgcgaggccttgaatgtgggtcgcgtcttatgcacaagtttgccgcgtgcagcatgcagtacacctcattttcagagtagcgctctccgagtcgtgggtctatgagctcgtcaattgcatactcctccaagaatgggcgtgcctgtacaatccaaatcttg

SEQ ID NO: 117422 - DNA, 601 bp, Zea Mays
tcaacgccgttttccaaccggctttgtaatataggaaattacccatttctactatacaccagggcaatgtatcagcaaaagctttcggcctacaaattgctacgaagtgaagacaaaagagcaagccaaaaaaaattgagaccgggaggtagggcgaaggaataatacaggactaaacaatctcagctgcactgcattatgagacggcactaatatctgttggagatactctgcttgtctcggtcccaagaggccctcaaggcactgtaggagcgtttcccctcgcctgccctttgcgactcttgttgagccgggctactgtactcctggcaatgttgctgttcgttcagcatcctccagcttctgctcccagaatcactactgccagtaacagaaccaccagattccacgaccatgtcaccctcaagaatgcgaagaaccttttattcaaaagatagaaggcgtaagcatagatgcaatctagctttgtcaatggatatggagacgtaaaaattttagtttttatcactaacatgggacatgcgaggccttgaatgtgggtcgcgtcttatgcacaagtttgccgcgtgcagcatgcagt

SEQ ID NO: 117423 - DNA, 222 bp, Zea Mays
cagtatttgtgtgtgcataccatgtcaaagaggctggagcggcgcttcttcttccccaagctgctctgcctgaggaagaacttctgtgcatggctggcgacctgcgtcggggtcctcgtcggcacgtagctcctggagatgcctcgccagtcgcccttgcccagcttctccaggccggaaaggaactgcctgtgctcctcctcgctccatggaactcctgca

SEQ ID NO: 117424 - DNA, 1680 bp, Zea Mays
ggtttacagtaaaaaaattccctacaaaagggtacgcaatttgtgaaatttgtgaaaacagcatctccgccgcaatgaagcgcgagggcttggagaccccgccgccgccggcgaagcacccaaaaaattcaagccccacaagtgccacccccatccactccctcacggacgacctcctgctccagatcttcctccgccttccctccctcgcgacgctcgtccgcgccgccctcgcctgccgggcttggagccgcgcggtggtctcctccccggccttccgccgccgcttccgggagctccaccggacgcccctcctcggcttcttcttcgagtgccctagccccgtccaagacccggccatcccgctcttcccctcattcgtccccgtgcgccgccgcgaaggggacctgtccatcgccgtccgcggcggcgacttcttcctcacatgcctccaggagcaccccatcaagtcccagtcctgggacattctcgactgccgtggcgggtacgtcctcctctgtaatgatggccaaccaggtgcgcaagcaatggcggtggtgaatcccttggcgcgacagtgccggtcagtagactatcgccatgtggacgccttggaaggtcgccgtgggactttctttgatctcaacggctacttgctctgctcggaggaggaccccgcatcgtttcgggtggtccttattgcccacgacgagtccagggtgcgggctactgtcttctcctcggacacatgtgagtggcaaattcacccgtgggttgatgtcccagggccaccacggggatcagaaagctggcttctgaagtgcaccatgcaatcaaatgggttcttgtatatggtttacaagaatgacgggtatatggtcacgcttaacacggcgacaatggagttctctgctgaggagctccctcaattgttgaagaatgaacgctgcagcttcagtgtcggagaaacaatcaatggtgcgccctgtattgtttatgctattggcttcactgttggtgtgatgttgagcagcacagatgtggatggcactaagaagtggatgctggacagggtcactaggtttcgttggaatcagaagtgcatgtatgacgggctcctggttctggcagtcagggatggctttgcgtacttggcaacttcaaacaagacctgttttttcgcgaaatcaagttggttctggtccctctgcctgcaaacaatgaaagtggagaatgcgtttcagaggacatatggcactgttgcatacccctatgttatggcatggcctccttgtttagttggtaacaatgggaggtctgcacttgatgatggtatgtagtgcattaagtgccttcaaagtagggaggagatgatataaattagggcaaggggctatagagtataagctgcttgctaaaccaatattagttttttttggggctatagagtataagctgcttgcagaaactatgaaagatgactcgagccattgctagctagtttcatgtaacttacaaaattagtgatgcataagttttcatagcgcaaggagatcgattatagatcagaacccatattgtaagctgtactgtataagatcgtacgtcttttatgcattcttcaggcacctatgacactgattgtttggctttctatagatgttgggtacgttgagcttt

SEQ ID NO: 117425 - DNA, 991 bp, Zea Mays
gatcggtgacgagtcccgctaatttaagcgcaaccgcaggcggcagctgttgagaaacgaaaggaagcaaccaacaacacgaccgcatccgtccaaaaggcacctcaacggaaagcagaggaccgcaccccgcgcgaagcaaacgatctctctctctctctctctctgccgcctcgccacgggagtcaggagtcaggacgccatgcagagcccccggcccgaagaagaccgcgtccgagacggcagcgcgaccgcaccgccacccgttctgcccgcgaccgcgaccacgtccaccaccaccgcccggacgaagcgctcggcgtccatgcccctctccggcgctagcgccgggaccggaagggacagggacccctccccggcaccggcaccggcaccggcgcccggcgggcgctcgcggctccgcgacgagcagttgagccagctccgggagctcttcatccgcttcgacctcgacggcgacgggagcctcaccaagctggagctggcggcgctgctccgctccctgggcctccgccccgcggccggggacgagatccacacgctcatcgccgccatggacgccgacggcaacggcaccgtggagttcgacgagctctcctcctccctggcgccgctgctcctggggccctgccgccccgccgtggccgtcgaccacgcgcagctcgccgaggccttccgcgccttcgaccgcgacggcaacggcttcatctccgccgccgagctcgcgcgctccatggcgctcatgggccaccccatctgctacgccgagctcaccgacatgatgaaagaggccgacaccgacggagacggcgtcatcagcttccaggagttcaccgccatcatggccaagtccgccgtcgacttcctaggcctcgctgctctgtgacttcctctctctctcttcctacacatcggaggcgatctccttctctgttcgtgcgttccttcccttttcttctccatttggcaa

SEQ ID NO: 117426 - DNA, 1854 bp, Zea Mays
gtgaggaaaaatctccccatctgctgaaaatccttcactcgtccctctctcggtctgtccctttggagcgaaggcgaaccgcgtcgcgaacccaggatcccatcgagggcaggcgggcagatcccggcgtccgacggcgatgggcgaggaggacgcgagcgccgggggagatccgcagcggctgaagcggatcgccgctgcggcgtacgactacgagaacgatgcgcggtgggccgggtactggtccaacgtcctcgtgccgccccacctcgcctcccgccccgacgtcgtcgaccacttcaagcgcaagttctaccagcgatacatcgatcctggtttggttgttgaaccgatgtcctccatgacttcaactcagtctagcagaccagcagcgaagtcttcagctacaccatctagtgagaatgtcagagctcgggactcaggtttggtgaatttatgcttgaaaggctctagcacgagatcaactgggacctcccaacatccaccagcagagaggactgcaaattcattacagctagacggacggacaataaacttttctatcaatgcctgggtactggttgtagctagtctcggaatactcccagttctacccaaccatatctcgagtaaagcataccgtctttcattgctaggaacaatatgctcgtctgcatattctttatatggcacttatgggaaaccaagagcatggaatatgcctgcaattcagtcctggttgcagtctattattgtagctaaggactttgttcacttgatgttctctcttatgatgttcacatctaatgtgcactttaagattgctctacttcctgtgctttgctgggcgcttgatcatgttgctcgattcctaaggcgtaattttacacactcttctttatacaggaagtacttagaggacccttgcctatgggtagagacaaacaacactacactcagcctactttgttcgaatgctgaaatcaccctggggtttctcatgatcatctcgcttttctcgtcgagacgcaatataatccagacatttatgtactttcatcttttgaagttgatgtaccattctcctgtgacatctggttaccaccagagcgtgtgggcaagaataggccgggctgtaaacccgtacatttaccgctatgcgccattcctgaacacacctatttcggcagtccagagatggtggctgaggtaggaaagcatggaccgcagcacagtgaaaatatgcctaaacagctactctgatctcagcgcctcgatcttttagaaggcgtgcttgcacggcgtgttcttttcttgtaaaggttgtattctcagttcatgtcttactgagctactgaaggcataacactagagaatttcttacgatgagcagtagcgcttgagcaaactgtcgatttgatgggatacagttacaggcataaagtgattgcacagaattttcataaggatgcttgctgcagtcaataggatggaacatgcgagtggcactattgattcttgaagtaataaatgatgttcttgtctattttattttgctactgctaggttatcttggttctgcactgttctgtgtctgttattatggaggaaatgccttagcaactctaacaaactctctatattcttcctaatctatataaatagagttttttttaaaaaaatacctctaacagcttatttaaatggctatctaaatatagccatttttttatttcgggttttctttagctaaatatagaaaaatatgaatggctctttagagtgcaaacaatatatataaaagattgttgaaaattaaaaaaatatagaaattgaattttatataaatgactc

SEQ ID NO: 117427 - DNA, 1830 bp, Zea Mays
gtgaggaaaaatctccccatctgctgaaaatccttcactcgtccctctctcggtctgtccctttggagcgaaggcgaaccgcgtcgcgaacccaggatcccatcgagggcaggcgggcagatcccggcgtccgacggcgatgggcgaggaggacgcgagcgccgggggagatccgcagcggctgaagcggatcgccgctgcggcgtacgactacgagaacgatgcgcggtgggccgggtactggtccaacgtcctcgtgccgccccacctcgcctcccgccccgacgtcgtcgaccacttcaagcgcaagttctaccagcgatacatcgatcctggtttggttgttgaaccgatgtcctccatgacttcaactcagtctagcagaccagcagcgaagtcttcagctacaccatctagtgagaatgtcagagctcgggactcaggctctagcacgagatcaactgggacctcccaacatccaccagcagagaggactgcaaattcattacagctagacggacggacaataaacttttctatcaatgcctgggtactggttgtagctagtctcggaatactcccagttctacccaaccatatctcgagtaaagcataccgtctttcattgctaggaacaatatgctcgtctgcatattctttatatggcacttatgggaaaccaagagcatggaatatgcctgcaattcagtcctggttgcagtctattattgtagctaaggactttgttcacttgatgttctctcttatgatgttcacatctaatgtgcactttaagattgctctacttcctgtgctttgctgggcgcttgatcatgttgctcgattcctaaggcgtaattttacacactcttctttatacaggaagtacttagaggacccttgcctatgggtagagacaaacaacactacactcagcctactttgttcgaatgctgaaatcaccctggggtttctcatgatcatctcgcttttctcgtcgagacgcaatataatccagacatttatgtactttcatcttttgaagttgatgtaccattctcctgtgacatctggttaccaccagagcgtgtgggcaagaataggccgggctgtaaacccgtacatttaccgctatgcgccattcctgaacacacctatttcggcagtccagagatggtggctgaggtaggaaagcatggaccgcagcacagtgaaaatatgcctaaacagctactctgatctcagcgcctcgatcttttagaaggcgtgcttgcacggcgtgttcttttcttgtaaaggttgtattctcagttcatgtcttactgagctactgaaggcataacactagagaatttcttacgatgagcagtagcgcttgagcaaactgtcgatttgatgggatacagttacaggcataaagtgattgcacagaattttcataaggatgcttgctgcagtcaataggatggaacatgcgagtggcactattgattcttgaagtaataaatgatgttcttgtctattttattttgctactgctaggttatcttggttctgcactgttctgtgtctgttattatggaggaaatgccttagcaactctaacaaactctctatattcttcctaatctatataaatagagttttttttaaaaaaatacctctaacagcttatttaaatggctatctaaatatagccatttttttatttcgggttttctttagctaaatatagaaaaatatgaatggctctttagagtgcaaacaatatatataaaagattgttgaaaattaaaaaaatatagaaattgaattttatataaatgactc

SEQ ID NO: 117428 - DNA, 924 bp, Zea Mays
gtgaggaaaaatctccccatctgctgaaaatccttcactcgtccctctctcggtctgtccctttggagcgaaggcgaaccgcgtcgcgaacccaggatcccatcgagggcaggcgggcagatcccggcgtccgacggcgatgggcgaggaggacgcgagcgccgggggagatccgcagcggctgaagcggatcgccgctgcggcgtacgactacgagaacgatgcgcggtgggccgggtactggtccaacgtcctcgtgccgccccacctcgcctcccgccccgacgtcgtcgaccacttcaagcgcaagttctaccagcgatacatcgtgagcttcccccacccctacctccctaaacctccgcgtactgtcgctgccagattggatgcgtctctggggtcaattggattggatgcgcctcatgctgcattgagctcgatccgtctgactttattctctgcacttgtgccgggaagaatgatttgttccatgaaagagccggtgcgcttctgttaaaaaacttctttacacaatggaaaggaactaaggaagtgtctcttttaggtagtactagtggattgtcttggcaaaggaacaaaagcactagccgtccaccttgcattactgtactatctagtgtaccttttatctcgtaacatcaaatttggtacgaggggatgtgatattgcacttctccacaatttttcattatttcctatggttttgccgatacttagacttaattattgttttcacatgtgtacatttggtgcgaatatgttttttgtgtgggagttatccatgaggaatttgggaaccagcactaggagtctagcttgcattactgtactatactgtactttttttttgtctcataagatcaattctctacgaggtgctgtgatattgctggtttcttcata

SEQ ID NO: 117429 - DNA, 875 bp, Zea Mays
agcgagagcacaagaaccatcgccgccgggaccgtgacgctggacggcctgaagcggctgcggggaggggtgttaaacgggcctttcctgggctacggtggacagcccagttactaagttaaccctcgctcttcctttcccctcggttctcgttgtctgacaggcaaagcggctatgacgacaacggccgccgggtacggctgctgctgggcggggattccgcccttcgcgttgttgccgcggattctctcgacccgccgggagactcctcctcctcctcctcctcgcgcttcccttgtcgcctcctcctcgaagctcagggcgctggcaccacggctgagagtttcgaaccgtccaaggaggctcattgtctccgcttcctcctccggcgaggccaattcggacgcggcgccgtcgccaacggaagccgctattgatataaagcttcctagaagaagcttgcttgttcaatttacatgcaacgcatgtggcgaaaggaccaagcgcttgataaacagagtagcctatgaaagaggcacagtttttcttcagtgtgcagggtgccaggtgtaccataagtttgttgataatcttgggctagttgttgagtatgatctacgagaagaaaacgagctacaaggagaaaatgcggtggacaccagttctgaagattgatctgctgtgagaagcggtgttggtatgcaaaacgccctgtactctgtaggtttttgacaacattggttatttgtatagcataaaaatggcactttttaaagttgttgcacatactcatctgaaattctgaatacagcagggcctacattgtacttcttacaacgtgatatttatatactactctattaagaacctaatat

SEQ ID NO: 117430 - DNA, 1507 bp, Zea Mays
agcgagagcacaagaaccatcgccgccgggaccgtgacgctggacggcctgaagcggctgcggggaggggtgttaaacgggcctttcctgggctacggtggacagcccagttactaagttaaccctcgctcttcctttcccctcggttctcgttgtctgacaggcaaagcggctatgacgacaacggccgccgggtacggctgctgctgggcggggattccgcccttcgcgttgttgccgcggattctctcgacccgccgggagactcctcctcctcctcctcctcgcgcttcccttgtcgcctcctcctcgaagctcagggcgctggcaccacggctgagagtttcgaaccgtccaaggaggctcattgtctccgcttcctcctccggcgaggccaattcggacgcggcgccgtcgccaacggtcagcgctctctatctttcttctctatgatgtttccagattgtcagggtgaattgatttgggttatggatgtgctccgtgttgcctggaatcattcagtgaatgcgattatatagggaatgatttggattgggtagccaccagcaacggggaaacagtaattgcttgggcttttggaccactgtttattattaaccctgaaattggataactgacgagattcaactttaatgattcatatagtcagaatatttgtggttttctagcaccacacatctgctttgtccattgtatgactggcgtacgttgttcatttgaaattgctagttctttcctgagattgtactttgtgtgcatttcttgtaggtctttcgttgcttgtgtgtcttgcagattatggcattcagagaacatcactttttgtaaatttggcaggttgatcgcatacatatgtgagcatatgaaaaagaaatgatattatataattcagcggtttattgcatgaaagacaacataacagattgcttgctgattgaggaacaaactaggttcagaaatgaataacaagtgctcaactttgctggtagattgattactgaagcggcaaactgcacactagtttataggccggaatctccttaatgtacatgttattcgtgtgatgtttcaggaagccgctattgatataaagcttcctagaagaagcttgcttgttcaatttacatgcaacgcatgtggcgaaaggaccaagcgcttgataaacagagtagcctatgaaagaggcacagtttttcttcagtgtgcagggtgccaggtgtaccataagtttgttgataatcttgggctagttgttgagtatgatctacgagaagaaaacgagctacaaggagaaaatgcggtggacaccagttctgaagattgatctgctgtgagaagcggtgttggtatgcaaaacgccctgtactctgtaggtttttgacaacattggttatttgtatagcataaaaatggcactttttaaagttgttgcacatactcatctgaaattctgaatacagcagggcctacattgtacttcttacaa

SEQ ID NO: 117431 - DNA, 1141 bp, Zea Mays
agcgagagcacaagaaccatcgccgccgggaccgtgacgctggacggcctgaagcggctgcggggaggggtgttaaacgggcctttcctgggctacggtggacagcccagttactaagttaaccctcgctcttcctttcccctcggttctcgttgtctgacaggcaaagcggctatgacgacaacggccgccgggtacggctgctgctgggcggggattccgcccttcgcgttgttgccgcggattctctcgacccgccgggagactcctcctcctcctcctcctcgcgcttcccttgtcgcctcctcctcgaagctcagggcgctggcaccacggctgagagtttcgaaccgtccaaggaggctcattgtctccgcttcctcctccggcgaggccaattcggacgcggcgccgtcgccaacggtctttcgttgcttgtgtgtcttgcagattatggcattcagagaacatcactttttgtaaatttggcaggttgatcgcatacatatgtgagcatatgaaaaagaaatgatattatataattcagcggtttattgcatgaaagacaacataacagattgcttgctgattgaggaacaaactaggttcagaaatgaataacaagtgctcaactttgctggtagattgattactgaagcggcaaactgcacactagtttataggccggaatctccttaatgtacatgttattcgtgtgatgtttcaggaagccgctattgatataaagcttcctagaagaagcttgcttgttcaatttacatgcaacgcatgtggcgaaaggaccaagcgcttgataaacagagtagcctatgaaagaggcacagtttttcttcagtgtgcagggtgccaggtgtaccataagtttgttgataatcttgggctagttgttgagtatgatctacgagaagaaaacgagctacaaggagaaaatgcggtggacaccagttctgaagattgatctgctgtgagaagcggtgttggtatgcaaaacgccctgtactctgtaggtttttgacaacattggttatttgtatagcataaaaatggcactttttaaagttgttgcacatactcatctgaaattctgaatacagcagggcctacattgtacttcttacaa

SEQ ID NO: 117432 - DNA, 1152 bp, Zea Mays
ggagtacagtaggcatcttcccttctctgggccgcacccgcagtcccgcaccgccacgcgccagagaccatgtggcgccgcgccggagccgggccgctcctccaccacctcgctgcagccgcctccgccgccgccgccggccgctgcattaatggacggccgctacctcctatgcccaccgcctcttggtcccccctgttccagcacaatcttggaatctcgtggggttccgcttctgtcggggctcccttccggagcctgtcgaaccagtcaagcggcggcggcgcgtgctggagctgcggtgcgacgggcgcgttcctctcctgcgggtcctgcgggagcgtgcagcctgtcgaccccgccgtcgactacttccaaatatttggcctaaaaagagagtataatataacggataataacttggaagggaagtacaaggactggcagaagaagttacatcctgacctagttcactcgaaatctgagaaagagaggggctatgctgcggagcagtcagcacttgtgatcgatgcataccgcacactcagcaaacctttatcaagggcattgtacttgttgaaactcgagggtatacatgtggatgaagaaaagactatcaatgatccagaacttcttatggagatgatggagatacgggaagctgtcagtgatgccagtgattctcaaaccctggagaagatccaatctcagattaaggcaaagctcgaaacctggtccgattccttccaggaggcatttgacaggaaggattttgaccgtgcggtggaagccacacagagaatgaggtactatgaacgtgcagtggaagaaacagtgaagaagctctgagcctctgatcttctgttacagctgccaaaggtggtgaggcttgtgtcttttcgtacggttccttgcagatccccctgtgctcacgcagctacattgcaacagtaacatagtacagagtaggtcattttttttacttatacgttgcaatgtattatatgactacattggaatatgttactgtagctacattgcaacagtaatatatatgactacacaagaccatacgttgtaatgctaaattccaaatgtatccatggctggtgcaccgcaggtaataataaaacaaaactaaaagagtagata

SEQ ID NO: 117433 - DNA, 1005 bp, Zea Mays
ggagtacagtaggcatcttcccttctctgggccgcacccgcagtcccgcaccgccacgcgccagagaccatgtggcgccgcgccggagccgggccgctcctccaccacctcgctgcagccgcctccgccgccgccgccggccgctgcattaatggacggccgctacctcctatgcccaccgcctcttggtcccccctgttccagcacaatcttggaatctcgtggggttccgcttctgtcggggctcccttccggagcctgtcgaaccagtcaagcggcggcggcgcgtgctggagctgcggtgcgacgggcgcgttcctctcctgcgggtcctgcgggagcgtgcagcctgtcgaccccgccgtcgactacttccaaatatttggcctttgaaactcgagggtatacatgtggatgaagaaaagactatcaatgatccagaacttcttatggagatgatggagatacgggaagctgtcagtgatgccagtgattctcaaaccctggagaagatccaatctcagattaaggcaaagctcgaaacctggtccgattccttccaggaggcatttgacaggaaggattttgaccgtgcggtggaagccacacagagaatgaggtactatgaacgtgcagtggaagaaacagtgaagaagctctgagcctctgatcttctgttacagctgccaaaggtggtgaggcttgtgtcttttcgtacggttccttgcagatccccctgtgctcacgcagctacattgcaacagtaacatagtacagagtaggtcattttttttacttatacgttgcaatgtattatatgactacattggaatatgttactgtagctacattgcaacagtaatatatatgactacacaagaccatacgttgtaatgctaaattccaaatgtatccatggctggtgcaccgcaggtaatttttttttacttatacttcccacaattccaaatgcatccttggctttccaataaaacaaaactaaaa

SEQ ID NO: 117434 - DNA, 4369 bp, Zea Mays
atggcgctcggcggaccgggacaaatcccatcgacgacgggcaactccggtagcacaggcagtgatctctcgagcacccagggaatagacaagggagacacagagaggacccgaggaaattggcacgccgacgagctcgcgcggattccgcgacgcgcccttcgcggatttgtttcagtgtattcacaaggtggtttcgaggtgggggagaaccctgacaacgtgacccctccagtcggtgtctgggcgcgtgacgagggaagagtccgactccatgccccattcgtccgagtttcggttaaaggagagctaactgtgatggacactgatgacaagtcacaaatcaaatcgctatcattttcaaatcacacgtcaatgatcaaattacctgctgctaatcctccgcgccatcttgaaattattaagaccgacattacaagtctatctgtacatgagcacacctgggccccccttgccagggggcgcttgtcgaccgttgcagcctgggcaggagcaggaccaggtctacgggcaggcgagaactacgcagccgaccgttggagcccgatccctccctgggatttcaaactcgccgtccgtcctcgcccgagtaccgatccgacggtcctggagacctcctctcgctacccagctacccgattatcaccagtcactctacctacaaccgacgaaagtctccccagaacccagatcaagaaccccgaaatcccagcgagcgagtcttttttgctcctcagcgttgaggaactcgtcgacgtttcggcgcgctggttcgagcatcttgtttgggatcccaggaagttcgttacttggaacttctgtcccgaggaagggcgcgcggttcgatgctggggcggagcagcggcttgcgacactcagatctggtgtgaggaggagatgccggtggtgacacggtcgcggctctccgccgcccgcggcgacggcgcgggcgcgctgccgtggggctcggcgtcggcggcgccggctctgaggcacgacgccggggcgccgcgggaaggcgtcgcgagcaagaaccaccaccaccaccacgggctcaaggagaagctgcgcgcactcacccaggactacgagcagcaaaagcagaagctcgccgcgtcgcagctccgccgcagcatccggtgcctcaacgcgtgggaggcgatcaacgacgagaacgccgaggaggaggaggacggcggcagggtggccaagttccgctacgacgccttcgctcaggtccccgagtccgcggtgctgagggagaacgtggcgccaccgcaggcgcgagcaccgtccaacgacggcgccgtgctcgcgcggacgactgaaccgcaggcgaaggagaacgcggtgggccgcggcgccaacgccatgtcctgccccatcaagaaggcggtaccggcgctcccggtgcttccggtgccaccggcgaggaaactctctttgggaggggctgtgggcggcaagctgaaggccgccggggaggtcggggccggcactgccgaggcggcggagagccggatcctcgtgttcgtgaggctgcgccccatgtcgaggaaggagaaggaggccgggtcgaggagttgcgtcaagatcgtcaacaggaaggaggtgttcctcacggagtccgcctcagagaacgactacctccggctgaagcgtggccgcgattcccatttctgcttcgactcggttttccctgattctacgacacaggcagaagtctacagcacctcaacagcagaccttgtggagggtgttctgcaaggtaggaatgggacagtgttctgctatggagctacaggggctggcaagacctacaccatgcttgggacaatggaaaaccccggggtaatggtgcttgcaataaatgatttgttctccaaggtgacgcagaagtaccactcaattaagctgtcatacctcgagatatacaatgagacggtgagggatttgctgtctcctggtagcccccttaacctgagagaagataagcagggaattgttgctgctggtcttacccaaagaagtgtatactccacggatgaggtcatggagttacttcagaaaggcaacaagaatcgaacaactgaaccgactcgagtaaacgagacctcatcgcgttctcatgcggtactgcaggttgtcgtagaatacagatccttggatggagttaacgtaaaacgagccgggaaactatctctcatcgatcttgctggatccgaaagagctctggcaacagatcaacgcacacagaggtcgatcgaaggagcaaacattaaccgctctcttcttgcactcagcagctgcattaacgcccttgtggagggcaagaagcacataccgtatcgcaattccaagctgacccaactcctcaaggactcgcttggaggagcctgcaacaccgtcatgatcgccaacattagcccctctaacctttccttcggcgagacacagaacacgcttcactgggctgatcgtgccaaggagataaaaacaaagacgcaacaaaccactgtgaatgaggaggttctggaccaaccagactctgaaactatgcttgtactggagcttcagaaggaaaaccgcgtgctgagggagcagttggcgaagcaacaacagaaattactgactgccgaggctcagctactcgcttcaaaaacctcgccacaacgatctcctgctccctcgtctcacgtctcaactccaggatcaactcaaaggaagaccagacgatctatcttggctgctggtggggggaactacttcagcacactggactcaaagaggcatgcagccgacaacgcacaggtcagggagctgcagaggaaagtgagcacgttggagtccgagatcgagaagatgaaaaaggagcacctattgcagctgaagcggaaggacgagttcatccgtgacttgatcaacaggaaggatcctaataacaacagtgaagaaacagcaacagttgatagaagagttgtcacgagggcgagcgtgcgaaaggcacagagagacgcatcagccgcagtcgagctgaaaagccccagccgggtgttcacatcaccggcgccaactgcaaagaagcgtactttctgggacatcggaggcaacagcccttcagttcttgctgccaacggaagaaagactcgaagccatgtggcaacagagacaccgaagaaagcatcctccaagctgcttcagccaggatttgcacggcaaacatcgacccatcaaagattcacatgaaagactgcctacaactcattcattactaattggagtttaatcgaagtacattgtaatgttttttagtttttttatccatattgagttattggaactgtttttttaaaattaacttgaggcagagttttccttttcttcggaacatataagcttttttccccatcttactggtattaatcagaaaggcagcaataattttgtgcagcttagggacttggtgtcttctatgtgtgcagtacccattcttatcatttctgaaggttgtccaagtggagatcataaatgttttccgcaccagcctgtacactaaagtgaccaagataaaaaagaaggaaaagttaaaaagtaatattgtttcaattgttccatgtacaagtactttttcccccctccatgtacaagttgaattttatgttgggatagcagcagacctcagcttatatgttaaaaaagtttatattatgaccaggctttgcatgctgctgctttgcgataaccaccatattatgcaccaacatttgaaactatatgtaactcccaatgtctgctacaagcaatatgttgtccttccagcaacaagggtacgaggtgttgcaatgctggtgctgtttttctagttcatgttggactttcctcctcaacatttgcagtgttggaatgcccagcttcttctgctgacctagaaggccacacatccagttccatttctccagagctcgtaccactgcaactctcgtagtcgctatcatcagaagaacagctactggtaccatcacccgaagtagaagtgtcacttagcacgttgaaaaccgtaatgctctctttctgtgagctgtggaacgaatggctgctgtacttgccatggtacagtggcaaggagccttgctgctgcaagctgggctcgtccctgccaaggctgtatgatccggacagttttctctccacgctttccttggctttcaccatttcacccagcttccccaaagcttcattcgacgagacatcttcagctgccttctgctcgagctccgagatcttctttcctaagattcttctcttgctgtgaagtgagtgctgtgttttcaggagatggaggtgtaag

SEQ ID NO: 117435 - DNA, 3713 bp, Zea Mays
atggcgctcggcggaccgggacaaatcccatcgacgacgggcaactccggtagcacaggcagtgatctctcgagcacccagggaatagacaagggagacacagagaggacccgaggaaattggcacgccgacgagctcgcgcggattccgcgacgcgcccttcgcggatttgtttcagtgtattcacaaggtggtttcgaggtgggggagaaccctgacaacgtgacccctccagtcggtgtctgggcgcgtgacgagggaagagtccgactccatgccccattcgtccgagtttcggttaaaggagagctaactgtgatggacactgatgacaagtcacaaatcaaatcgctatcattttcaaatcacacgtcaatgatcaaattacctgctgctaatcctccgcgccatcttgaaattattaagaccgacattacaagtctatctgtacatgagcacacctgggccccccttgccagggggcgcttgtcgaccgttgcagcctgggcaggagcaggaccaggtctacgggcaggcgagaactacgcagccgaccgttggagcccgatccctccctgggatttcaaactcgccgtccgtcctcgcccgagtaccgatccgacggtcctggagacctcctctcgctacccagctacccgattatcaccagtcactctacctacaaccgacgaaagtctccccagaacccagatcaagaaccccgaaatcccagcgagcgagtcttttttgctcctcagcgttgaggaactcgtcgacgtttcggcgcgctggttcgagcatcttgtttgggatcccaggaagttcgttacttggaacttctgtcccgaggaagggcgcgcggttcgatgctggggcggagcagcggcttgcgacactcagatctggtgtgaggaggagatgccggtggtgacacggtcgcggctctccgccgcccgcggcgacggcgcgggcgcgctgccgtggggctcggcgtcggcggcgccggctctgaggcacgacgccggggcgccgcgggaaggcgtcgcgagcaagaaccaccaccaccaccacgggctcaaggagaagctgcgcgcactcacccaggactacgagcagcaaaagcagaagctcgccgcgtcgcagctccgccgcagcatccggtgcctcaacgcgtgggaggcgatcaacgacgagaacgccgaggaggaggaggacggcggcagggtggccaagttccgctacgacgccttcgctcaggtccccgagtccgcggtgctgagggagaacgtggcgccaccgcaggcgcgagcaccgtccaacgacggcgccgtgctcgcgcggacgactgaaccgcaggcgaaggagaacgcggtgggccgcggcgccaacgccatgtcctgccccatcaagaaggcggtaccggcgctcccggtgcttccggtgccaccggcgaggaaactctctttgggaggggctgtgggcggcaagctgaaggccgccggggaggtcggggccggcactgccgaggcggcggagagccggatcctcgtgttcgtgaggctgcgccccatgtcgaggaaggagaaggaggccgggtcgaggagttgcgtcaagatcgtcaacaggaaggaggtgttcctcacggagtccgcctcagagaacgactacctccggctgaagcgtggccgcgattcccatttctgcttcgactcggttttccctgattctacgacacaggcagaagtctacagcacctcaacagcagaccttgtggagggtgttctgcaaggtaggaatgggacagtgttctgctatggagctacaggggctggcaagacctacaccatgcttgggacaatggaaaaccccggggtaatggtgcttgcaataaatgatttgttctccaaggtgacgcagaagtaccactcaattaagctgtcatacctcgagatatacaatgagacggtgagggatttgctgtctcctggtagcccccttaacctgagagaagataagcagggaattgttgctgctggtcttacccaaagaagtgtatactccacggatgaggtcatggagttacttcagaaaggcaacaagaatcgaacaactgaaccgactcgagtaaacgagacctcatcgcgttctcatgcggtactgcaggttgtcgtagaatacagatccttggatggagttaacgtaaaacgagccgggaaactatctctcatcgatcttgctggatccgaaagagctctggcaacagatcaacgcacacagaggtcgatcgaaggagcaaacattaaccgctctcttcttgcactcagcagctgcattaacgcccttgtggagggcaagaagcacataccgtatcgcaattccaagctgacccaactcctcaaggactcgcttggaggagcctgcaacaccgtcatgatcgccaacattagcccctctaacctttccttcggcgagacacagaacacgcttcactgggctgatcgtgccaaggagataaaaacaaagacgcaacaaaccactgtgaatgaggaggttctggaccaaccagactctgaaactatgcttgtactggagcttcagaaggaaaaccgcgtgctgagggagcagttggcgaagcaacaacagaaattactgactgccgaggctcagctactcgcttcaaaaacctcgccacaacgatctcctgctccctcgtctcacgtctcaactccaggatcaactcaaaggaagaccagacgatctatcttggctgctggtggggggaactacttcagcacactggactcaaagaggcatgcagccgacaacgcacaggtcagggagctgcagaggaaagtgagcacgttggagtccgagatcgagaagatgaaaaaggagcacctattgcagctgaagcggaaggacgagttcatccgtgacttgatcaacaggaaggatcctaataacaacagtgaagaaacagcaacagttgatagaagagttgtcacgagggcgagcgtgcgaaaggcacagagagacgcatcagccgcagtcgagctgaaaagccccagccgggtgttcacatcaccggcgccaactgcaaagaagcgtactttctgggacatcggaggcaacagcccttcagttcttgctgccaacggaagaaagactcgaagccatgtggcaacagagacaccgaagaaagcatcctccaagctgcttcagccaggatttgcacggcaaacatcgacccatcaaagattcacatgaaagactgcctacaactcattcattactaattggagtttaatcgaagtacattgtaatgttttttagtttttttatccatattgagttattggaactgtttttttaaaattaacttgaggcagagttttccttttcttcggaacatataagcttttttccccatcttactggtattaatcagaaaggcagcaataattttgtgcagcttagggacttggtgtcttctatgtgtgcagtacccattcttatcatttctgaaggttgtccaagtggagatcataaatgttttccgcaccagcctgtacactaaagtgaccaagataaaaaagaaggaaaagttaaaaagtaatattgtttcaattgttccatgtacaagtactttttcccccctccatgtacaagttgaattttatgttgggatagcagcagacctcagcttatatgtt

SEQ ID NO: 117436 - DNA, 339 bp, Zea Mays
atggggagaataccaagatccccaaaagccgacttgaagaaggtgtccaaggtgaaggtgttatccaaggtgaagctgttgtctaagatcatggtgttgtccaaattgaagctgttgttcaagttggtccaagtggaagtttctcttccagtgcaaagcccaattatacgaacaagggagtctattttacaggacaacttgataaggttccaaatgttcagtatatgtggcccttctgtttgtgctgcagttcagctagagctgaaccaatgtcccaggctcccagctggacctcgcctcacggatggccccctggagctggacctcgcctggagctga

SEQ ID NO: 117437 - DNA, 478 bp, Zea Mays
cgactcatcttgtactgcggcggtggcgcccggcttccctcgacgaactccaccgacggcgaccggctccctcgtcctccaccggtcgcgcccggccctctacctccatcgatcgcgcccgaccctctgcctccaccgtcgtcgctcgctcaggttttgcacttggattacttgaacaaatcagacaagaagtggctagatagaatacaactggaatgattctatgtacggctttgacgatgatctttcattgcttgctatctgtacagatgcatgcaaagggttagaaaatgcaataaagcttgttttccctcaggttgaccaaagagaatgatttaggcatctcatgcataattttgtgaaaaggtttggaggtgacatatcctctaagatgtaccctacacctagggcatataggccagaagtttcatagtactttttcaatcaagttgtagaagcctcccaagatgtaaagaaa

SEQ ID NO: 117438 - DNA, 2034 bp, Zea Mays
tttgtaatcctttttttcgatgcaaatattttgagtggcattattgtgaagcacaatgtttagagttctaaatatacaattatctcttatttgtcagagtatatctaaatatacaattatcttttatttatcagagtatattagacaatttttgatatggttgatttagaatggattggatgaccttccttatctccaaaccatattcctaatatattaatcccaaaaactcaatacaatacatcccaccctgcacgtattaaacacaatatatctcctttctacactattttcgttttgccctcgccgcgggttgtatactataggctcgagatctctatacgctctagacgaaatcgtcttcgtcttcctccaattgcagacgaacagtgggatatccccttaccaatggccttccaccccgccacgctgttcctcctccttgtcctcgccgccgtcgcgccgatcccctccaacgcgcgccacatcattactttcgccccctcacgcgcggtcaatcccgcgtccctcgcttgggaccctacggcgcagcactttgtcgtcgccggcggcggcgatgccgtcctttccgtctcagacgctggggtaaccgaatcgatcgtctcctctggcgcctcttgcgtcgccgtcgacgaccggcgacgccgcctcctcgtcgcttccccgggatccgtctccgcgttcgatctccgctccccgcggccgcaccgcctcatcctctcgacgcctgttgcggaccccgcccctccgggcggcatcgctgtggacccgcacaccgggaacgccttcctcactgtgggcgctcgaatctacaagctatccgtagagggcgagctcgccacgctcgcatccgcgccggcgctcggctccgtgcccctagcctcgctcaccgcacacgtgagccgaggcttcctgctcgtgggccagcccagctcgggcagcgtcctccgcgtggacatggaggacggcgccacgaggaccgtgtcctgcgccctcacgccgaccgccgtggcggtccggaccgatggggcggtggcggtgggcggggccgcggggctgcgcctcgtcgtgagcaacgacgggtgggcttcgtgcggggtgcgggacgaggccgcgcccgcgcccgacggccccgtggccgcggtggcggtgcgggagcggcgacgggtgtacgcgctggttggggcggcggcgatggacgggggcaacaagtggcggatcgaggaggcctcgtggaaatcggagtcggaaggggagatggtggtggtgctcgtcttcgttggcgttgccctcaccatcttcatgttctggaggttccagatgcggcagctcgccggcaacatgaacaagaagatcagatagtagtaccaaatgcataacttgccttgtagtcaattgcttttctcatgccgtagttggtgtagcctcctgtggattagacacgttacttatattctatgtatgatatgaattatgagtcgtttgtaatatccgctgaaaatttgtgtatttctgcttgagccaaatttgtgtatttctgcttgagccgtacgagatgaaattttcatatacggtttgaagaacgtcttgcaattcaggcaattgcggatgatataactagtaaatatattcctcctcatgtcaacatattttattgtttagggagaattacacttacaagtcgttaccggttttgctatgactttttacgaccgaccgttacagaggttttttcctccgttcaatattataatgatggaggccaactttggttggttaatctgatcggttcatcgatggtcagcaagtatgatgattctaatgatgatcttgcacgtatttcgtgtgtatctcacaggtaaaccccgtgaattaacttgggtcacgagcgtggttttagttgtattgactgcatcatttggtgtaactggttattctttgccttgggatcaaattggttattgggcagtcaaaattgttacatgtgtatccgaagctattccggtaataggg

SEQ ID NO: 117439 - DNA, 2181 bp, Zea Mays
atgcggaaggttgatcgacccccaaccaatccgaagcgtttaatcattgagtcaagtcaagaatgtttcagtgttgacattccatgctcgactgacatggcagaccctacaaatacgtcgtctgatggtgatcctccacagcatagaaagacgggcgttgcagctgctgctgaaaacattactatgcctaatgtggatgatgatgatgactttgagccacccaaaaagaagtgcaatatctcaatggatgccccaaataagacgcagaagctcaacatcagatgcaacccaggagatgttcttgcgtccattcagatattgaatgaaaggcaacgtcaagctatagtcagaaaaggattttctagtattcttgacatgacaattgatgcaattggatgtcgaacacttctctgttggctcatgcagaagctagaccccagggacatgactcttcgtattggtccagacaaagaactcaaaaacaccaagcagactgtccatcagatattgggtcttccaaatttgggtggtggaaagccccttaatattaatgaagcgaacgctgcggcaacacttcgggcctcattgaatattagcaaggatgagtttgttatttcaaagctccaagacagattgaggctaggccaggatgatgatatttctatcagatgtttttttctcattctcttcaaccggctgctattcccaacagctagctggtctatttctttcaatgaggttgtacttacagaagaaatggagcgattccctcaaattgattggtgccatctaatttttagtgacttatgtgaggctgcccagagatggcacaacaggagcattaacaatgtgtcagcgacgatatatggctgttccatcattgttcttctgtattatttggatcatttgcatcatgctgctgctccaaacaacaaaaatggcactccacgcataaagtattttaataagaatattataagggcattgtcaatggccgataagcggaagcctcgccagggtggtgaaccatttggtgtttgcccttttcctatgaggccagaaacttttgatgaagacccaaatcaacatgatcgacttcccaatataatcatccaactccctcttatgcaagacttgatggcaaataagattcagatgcttcctgtacatcaacgccagaagttccaagctacgttgattgattatgacttagaggttggcaaaatatttgcctctatcaagcaatgtttgaatactattggtacaaagcagtccaatctagctgctacatttggagaattgattgatgaggttcttcgggccgatgaatctgttacaccaaatactcaaggtcagacagtggtaggtggcacagttgaaaatgattctggaccagtatttgacaagactcctattgggagtgtttctgcaccaggtctcttcttatctgaattagaatgtgctcgcgctcttcgggcatacttgtgttctaggttcattgaattggacagaaatataattgactttggtgaacatcgcgccaattgttgtgacatacaacaatcttttgctgatggcgcatgtctcgacaacgtgtttatgcaatgtttcattgagtgtgtccgtgatgactggtctaaacatattcctccactcaatgctcaccagctcattctagatgttaatgttgggataatggtacccatgctacgatctggacattggacattgtatgttgttaatcttcagattggacgcatacatgtgttagattccaacccttatggaccagagatgggtgggactatctggaaaaattaccattgtatacctatggatttgggtgataggaaggtttcatgggccaggttaatgatgagtaggctcaatctagctattcaaaatgctcgaccaagatcagctctccctgcttttttgaagtaccctattgaactcatgaataactgcccaacaatgaaattggggtctaatgattgtggattctttgtcatgagatatatgcagaactacgactacatggttggagctatgaatgcagtcattgatccggattattcagaggacattcgctctcttgtactgcattacctaatattccatcgactaaatagaaacagcttcgtggtctcccacctggacagattcaagttctctcagtag

SEQ ID NO: 117440 - DNA, 383 bp, Zea Mays
gctcttatttatgtacaaattgtattgacgtaacttattcttgatggcaatggcatacccttgtatacaaatgctctggcataactcatctctaccatgccaggcaagagacgaaaaccaaaccaaaccaaacagtacaaacaaacaaacaccccttgtgggtggagattctaggcgactacgtgccccttgtggtctatcttcccacctcaccttctttcatccctgcagccgcagtccaaagcaattgcaactgccaatcagagtctgaccctggcggacgatggctttcacgggttcttactctccctccacctccacgagcgagaaaacccccattgctgccagaaggataaaagctcgatccatgtataaatttattt

SEQ ID NO: 117441 - DNA, 3120 bp, Zea Mays
attttcaatacaactctacacatgacttccatgttttcaaactaaataacttttaaaagttattgatgtttcatgtttgtagttttaaagtttgattataaaacttgtcctaaatggtatgtttttatgaaaggagggtgtggcttttgctagtcaactgtttggtctgtgtctcagtttctttgttgtccatcctggctattctattgttcatggcatatgtttatatctattttcttatgttatacgtgttttgttttgcacctttctctctcctaggggcatattgttactgaaagattgaaatttataaatcttgatctgtcgttgctgcatcaatagacataagtgttggcagggtttgctgtcctagcaatactaacccaggtacaaaaaactgcattattccagactcagctcatgaaggccagggagcaacagcagccacaaacacctcaacagaggcagcagcaaccacagcatatacaaatgcaacaaatgctgttacaaagagctgtgcatcagcagcaacagcagcaacagcagcagcagcaacaacaacaacaacaacaacaacaacctcagcagcagcagcagctgcaacagcagcgcagagatggttctcatcttctcaatggttctgcgaatggaatttctggaaacaatcctttaatgcgacaaaaccaaagtactgcaaatgttatggcaacaaaaatgtatgaggaaaggttaaaggtaccttcccagagagactctttcgaagaggcatcattgaagcaaagatacggagagaacgctgggcaactacttgattcaaatgaagcatcattgttgaaagcagcttcaagtgcacaatcctcagggcaaattttgcatggaactgttggtggcttatcaggcactctgcaacaagttcaggccaggagcccccaacttcctgggcctgctcagggtatcaagacagagattaatcacgttctgactcccagaggtgcaggcccagaagggtcatttataggtgtccaaggatctaatcaagctgggaacaatttgactctgaaaggatggccactcacgggacttgagcaacttaggtcaggaattcttcagcagaagtcatttatacagaatcaacagcaattgcaccagcaaatccagatgctgactccacagcagcagcagcagcttatgctgcaggctcagcaaaatatgtcttcaccaacatctagtgacgtcgacaacagaagattgaggatgatgctaaatagaaatgctgttcttggccgggatggacagacaaatagtggtagtgatattattccaaatattggctctcctagtcaaagtggcggagatatagatatgcttataaagtagaagaaacttgctcagcagcagcaactattacaacagcaaagcaatagccaacagctcccacagcaacatcagcttcagcaacctgctgtctctagccagcaatctcaaagttcaaatcaacatcttcaacaagaaaaactaggaattggaagtatgcctgttgatgggggcataccaaactcatttgggggagctgaacagacagcgaaaaagagaaagaagccaggctcatcctctggtagagccaatagttcaggcacagccaatactgctggtccctctccaagttctgcaccctcgacaccttccactcatacaccaggagatgcaatgtctgtgccacagctgcagcagaatggcggttcagctaaacccatggtaatgtttggctctgatggaactgggagcttgacatctccagcaaacccattggatgatgtggaccgtttgctggaagatggctcattggatgataatgttgaatcttttctatcacaggatgacatggatcctagggacaacttggggcgatgcatggatgctagcaaaggttttggtttttctgaggttgccaaagcacgtgcaagtgcagccaaagttgtctgttgccacttctcagctgatggtaagctgcttgctactggtggtcatgataaaaaggttactttgtggtgtacagattctctgaagcctaaatccttcctggaagagcactcgtttcttatcactgatgttagatttagcccaagcatgtcgcgccttgcaacatcctccttcgacaaaactgtgcgggtttgggatgcagataacactgactattcactccgaactttcacgggccattcagcatctgtcatgtcacttgattttcatccaaacaaagaggatatgatatgctcctgtgatggtgatggggaagtgcgcagctggagcataaataatggtagctgtttgacatgtgttaaggtgtttaaggcaggtgctactcagatgagatttcaacctcgtaagggaaagtatctagcagctgcctcagagaaagcaatctacatacttgatggggagacacaacatgcttgtagaagccccttgcaggggcacaataagaatattcaatcgctttgttgggactctgctggtgaatatctggcttctgtcagtgaagactcagtcagaatatggtcattcagttctggacgtgatggtgaatttgtgcacgaattgaatcgcagtggaaatcagttccactcatgtgttttccacccaacttatcaatccttgttagtgattggttgttacgagtccttggaactttgggacataagggagaagaacaccatgaccttcaacaatgcgcatgacggtttggttgcagccctggcagcatccagtgcaacagggaaggttgcctcagtaagccatgataggactctcaagctctggaaatgacttgtatgaaacccatgttggacttctgtattctggctgttagatgatagacaaacaagactttgccaaaaatgaccacatgacgaaaaggttgctgacaagatactctggagccgcgtgggctcaagaactaacagtgttttgttttgtggtcgttgtatgctgttcagtatgccactgaagcttgtaacttgtaactcgtaatagaaactttggttgaagaaagattgtacctcggacaagtggcaaatatttattctctaaaatattctgcattttgttttttgaccttgt

SEQ ID NO: 117442 - DNA, 2977 bp, Zea Mays
cgcctcccgccgttacagcttgcagctccagccccaacccccgtccctctctccctgagccgtcgccttcgccttcgctgcgaaatctagggtttacgccgcgcatcgggtaccgcgcacgcaccgaccgaccacccggcggtcggcgccgctacacgcgggctcgctctcaggtggttgagcgtggccggagaaggggaggggcgacactgctcgtgggtgggtcagccagtgtgccccacgaggaacggcaatcatgtcgcagacgaactgggaggcggataagatgctggatgtgtacatatatgactattttgtcaagagaaacctgcaggcaaccgcaaaggccttccaagcagaaggcaaggtctcatcagatccagttgctattgatgctcctggtggctttctctttgagtggtggtctgtattttgggatatattcatagcaagaacaaatgagaagcattcagatgttgcagcatcatatatcgagactcagctaattaaagcaagggaacaacaacaccagcagccacctcaacaacagcaacagcagcagcaaatacaaatgcaacaaatgctgttacatagagctgcacagcagcagcaacagcagcagcgtagagatggttctcttctcaatgcaaaaatgtatgaagagaggttaaagctccctccccagcgggattctctggatgaggcgtcaataaagttgcagcaaagatatggagaaaatgtgggacaagtaattgatccgaaccaagcactattgaaagcagctgcagctggacaatcctctgggcaaattttgcatgggactgctagtggtttgtcaggtactccgcaacaagttcaggcaagaagcccacaacaaccacctacagcagaacagaatatcaggaccgagatcaatccagtgttgacaccaagagcagcaggcactgagggttcattgattggtatccaaggatctaatcaggctggaaacaatttaactctgaaaggctggccgctcacgcagaagccatttatgcaatctccacagcaatttcagcagctccagtttctgaccccacagcagcagcagcagcttttgctgcacgctcagcaaaatctgtcgtcctcgatgtcaagcgatgttgataccaggagattaaggatgcttcttaacaacaggaatgtggtccttggacaggatgggcagacaaatagcggcggtgatgttatcccaaatattggttcgccagggcaaagtggtggatcgcgtaatgatatagatatactaataaagaagaaatttgctcttctacagcagcagcagcagcagcaaagtcatagccagcagcagcagcttcagcaacctgcgctctctggacagcaatctcaaagttcaaaccagcttctccatcagcatggaaaaccaggagttgggagcttgcctattgatggaaacttgccaaactcttttggatttcctgaacaaggatcaaagaagagaaagaaacctgtctcatcctctggtagagctaatagttcaggaacagcgaacactgctgggccatctcctagctctgcaccctcaacaccatctactcacacgccaggagatgcaatgtccattccacagctgcagtataatggtggcccttcaaaaccattgatgatgtttggctctgatggcactggaagcttgacttctccagcaaacccgctgggtgatgttgaacgtctgttggaagatggttccttggatgaaaatgtagaatcttttttatcgcaagatgacatggatcctcgagaaacaatgggacgctgcatggattctagtaaagggttgggttttactgaggttgcaaaagcccgtgcgagtacaaacaaagttgtttgttgccatttctcattggatgggaaacttcttgccaccggagggcatgataaaaaggtcgttttatggtttacagatgtgctaaaacgtaaatccgcattagaagagcactcttccctaattacagatgtccgattcagccctggcatgacccgccttgccacatcttcctttgacaaaaccgtgcgggtttgggacgctgacaatccagattattcgctacgcacttttacaggtcattcagcatctgtcatgtcacttgattttcatccgaacaaagaagacatcgtttgttcgtgtgatagtgatggtgaagtgcggtgttggagcataaataatggtagttgtgtgacctgcgttagggttttcaatggaggagctactcggttaagatttcaacctcgccagggtaaatatctggcagctgcctcagaaaagggaatatccatactggatgcggagacattacaagtttgtagaactcctttgcagggccacgtacagattattcagtcagtatgttgggatgccgcgggcaactatctggcgtctgtcagtgaagattctgtcagggtgtggtcatttacctcagggaactacatcgaatgcatacatgagctgatctgcagcgggaacaagttccattcgtgtgtttttcacccaaattacccgaatttgcttataatcggttgttatgagtccctagagctttgggacataagggagaagaacacggtgacaatcagcaacgctcatgacggcatggttgctgccctagccgcgtcaagtgcatcggggctggttgcatcagtgagtcatgatcagctcgttaagctctggaggtgacactgaacacagcaacgctcgtctgtgtcattctcatttccagtgtcgtggcaaaagcgaaagggcagctgatctgatctcctaggttgatttgcgactgtggcatgcgcaaactattcaaatagttgtcagtaatgtgcttcccttatttctttgtttgtttatccatgccgggtgatactatgttacaattttatctatttagagaactgctattataatttgacctcccacttaggccta

SEQ ID NO: 117443 - DNA, 3010 bp, Zea Mays
cgcctcccgccgttacagcttgcagctccagccccaacccccgtccctctctccctgagccgtcgccttcgccttcgctgcgaaatctagggtttacgccgcgcatcgggtaccgcgcacgcaccgaccgaccacccggcggtcggcgccgctacacgcgggctcgctctcaggtggttgagcgtggccggagaaggggaggggcgacactgctcgtgggtgggtcagccagtgtgccccacgaggaacggcaatcatgtcgcagacgaactgggaggcggataagatgctggatgtgtacatatatgactattttgtcaagagaaacctgcaggcaaccgcaaaggccttccaagcagaaggcaaggtctcatcagatccagttgctattgatgctcctggtggctttctctttgagtggtggtctgtattttgggatatattcatagcaagaacaaatgagaagcattcagatgttgcagcatcatatatcgagactcagctaattaaagcaagggaacaacaacaccagcagccacctcaacaacagcaacagcagcagcaaatacaaatgcaacaaatgctgttacatagagctgcacagcagcagcaacagcagcagcgtagagatggttctcttctcaatgcaaaaatgtatgaagagaggttaaagctccctccccagcgggattctctggatgaggcgtcaataaagttgcagcaaagatatggagaaaatgtgggacaagtaattgatccgaaccaagcactattgaaagcagctgcagctggacaatcctctgggcaaattttgcatgggactgctagtggtttgtcaggtactccgcaacaagttcaggcaagaagcccacaacaaccacctacagcagaacagaatatcaggaccgagatcaatccagtgttgacaccaagagcagcaggcactgagggttcattgattggtatccaaggatctaatcaggctggaaacaatttaactctgaaaggctggccgctcacgggacttgatcattttcgctctggaattctgcagcagaagccatttatgcaatctccacagcaatttcagcagctccagtttctgaccccacagcagcagcagcagcttttgctgcacgctcagcaaaatctgtcgtcctcgatgtcaagcgatgttgataccaggagattaaggatgcttcttaacaacaggaatgtggtccttggacaggatgggcagacaaatagcggcggtgatgttatcccaaatattggttcgccagggcaaagtggtggatcgcgtaatgatatagatatactaataaagaagaaatttgctcttctacagcagcagcagcagcagcaaagtcatagccagcagcagcagcttcagcaacctgcgctctctggacagcaatctcaaagttcaaaccagcttctccatcagcatggaaaaccaggagttgggagcttgcctattgatggaaacttgccaaactcttttggatttcctgaacaaggatcaaagaagagaaagaaacctgtctcatcctctggtagagctaatagttcaggaacagcgaacactgctgggccatctcctagctctgcaccctcaacaccatctactcacacgccaggagatgcaatgtccattccacagctgcagtataatggtggcccttcaaaaccattgatgatgtttggctctgatggcactggaagcttgacttctccagcaaacccgctgggtgatgttgaacgtctgttggaagatggttccttggatgaaaatgtagaatcttttttatcgcaagatgacatggatcctcgagaaacaatgggacgctgcatggattctagtaaagggttgggttttactgaggttgcaaaagcccgtgcgagtacaaacaaagttgtttgttgccatttctcattggatgggaaacttcttgccaccggagggcatgataaaaaggtcgttttatggtttacagatgtgctaaaacgtaaatccgcattagaagagcactcttccctaattacagatgtccgattcagccctggcatgacccgccttgccacatcttcctttgacaaaaccgtgcgggtttgggacgctgacaatccagattattcgctacgcacttttacaggtcattcagcatctgtcatgtcacttgattttcatccgaacaaagaagacatcgtttgttcgtgtgatagtgatggtgaagtgcggtgttggagcataaataatggtagttgtgtgacctgcgttagggttttcaatggaggagctactcggttaagatttcaacctcgccagggtaaatatctggcagctgcctcagaaaagggaatatccatactggatgcggagacattacaagtttgtagaactcctttgcagggccacgtacagattattcagtcagtatgttgggatgccgcgggcaactatctggcgtctgtcagtgaagattctgtcagggtgtggtcatttacctcagggaactacatcgaatgcatacatgagctgatctgcagcgggaacaagttccattcgtgtgtttttcacccaaattacccgaatttgcttataatcggttgttatgagtccctagagctttgggacataagggagaagaacacggtgacaatcagcaacgctcatgacggcatggttgctgccctagccgcgtcaagtgcatcggggctggttgcatcagtgagtcatgatcagctcgttaagctctggaggtgacactgaacacagcaacgctcgtctgtgtcattctcatttccagtgtcgtggcaaaagcgaaagggcagctgatctgatctcctaggttgatttgcgactgtggcatgcgcaaactattcaaatagttgtcagtaatgtgcttcccttatttctttgtttgtttatccatgccgggtgatactatgttacaattttatctatttagagaactgctattataatttgacctcccacttaggccta

SEQ ID NO: 117444 - DNA, 1368 bp, Zea Mays
cttagatcggtttctcagtagacctaatcaacctaccacggccatgattttttttttgttttgtttatcccttgttgtgtgcttgatgccgctgtccaaccctacttttctacttgaccagttagttgctcatgtcttgtcctctccacgctggatgcactagctagctagttctctgcattccagtctgcacaacgtttgtttatgtgtgtgaccgtcacaaattccctgacgtgccagccagccgcatggattttgtgaacttgaacttctgttgctacgtgtaataaaaaacttggttgtgttgctcagttgtcatttggatggtgtcgctaagtcattgcgaagggagccggggctcgggccggacgccgctggactgggaggcgcgcatgcgggcggcgctgtccgccgcgcgcgggctggcgcacctgcacacggcgcacaacctggtgcacggcaacgtgaaggcgtcgaacgtgctgctccgcccggacgcggacgcggcggcgctctccgacttcgggctgcaccagctgttcgcggcgtcgacggcggcgcggggcggcgggtaccgcgccccggaggcggtggacgcgcggcggctgacgtacaagtcggacgtgtactccctgggcgtgctgctgctggagctcctgacgggcaagtccccctcgcacgcgtcgctggagggcgacggcacgctggacctgccccgctgggtgcagtccgtggtgcgggaggagtggaccgccgaggtgttcgacgtcgagctggtgcgcctgggcgccagcgccgaggaggagatggtggccctgctgcaggtggccatggcgtgcgtggccacggtccccgacgcgcgccccgacgcccccgacgtggtaaggatggtcgaggagatcggcgccggccacggcggccggaccacgacggaggagagcgagggcgtgcgcgccacgtcggaggaggagcggtcggggggcacgcctcccgccgccccgacgccgtgacgacgcagctagcggggtaaatgtccttggccggattcaattgcataggttcctggtgcctgcatgtcgatggacactggtattctgtttcttctttgtttattttttttttattttcgctcttttttttggtcttttcagggcattgttttgttggatcaaattttcgtttttccccccgtcatctccctctctctttcaggcttcattcatccaagcaaagaagtgtaatttttcttcagcttctctttagatccctatttgtgatgcacttatgccgtgatagtcttcaccgttgtgtccatgttgagttcacctgggagcaaagcaaagcaaccggctccaaactattatcacc

SEQ ID NO: 117445 - DNA, 1611 bp, Zea Mays
tttttttttgtgtgtctgtttggccgtgcaattatgcgacctactagttcggcgttgtagctggcctgtcacgtcctaccagtccatctagcagatgcgcttatgaatgccctgtgtgctgcgctattctaattagaccgtttagtttcttagatcggtttctcagtagacctaatcaacctaccacggccatgattttttttttgttttgtttatcccttgttgtgtgcttgatgccgctgtccaaccctacttttctacttgaccagttagttgctcatgtcttgtcctctccacgctggatgcactagctagctagttctctgcattccagtctgcacaacgtttgtttatgtgtgtgaccgtcacaaattccctgacggtgagcagtgacaaacccctgtggttttcatacctgtccaacatgattgtcgactcaccggcagaataaacaaatcttcattttttgctttttagtgccagccagccgcatggattttgtgaacttgaacttctgttgctacgtgtaataaaaaacttggttgtgttgctcagttgtcatttggatggtgtcgctaagtcattgcgaagggagccggggctcgggccggacgccgctggactgggaggcgcgcatgcgggcggcgctgtccgccgcgcgcgggctggcgcacctgcacacggcgcacaacctggtgcacggcaacgtgaaggcgtcgaacgtgctgctccgcccggacgcggacgcggcggcgctctccgacttcgggctgcaccagctgttcgcggcgtcgacggcggcgcggggcggcgggtaccgcgccccggaggcggtggacgcgcggcggctgacgtacaagtcggacgtgtactccctgggcgtgctgctgctggagctcctgacgggcaagtccccctcgcacgcgtcgctggagggcgacggcacgctggacctgccccgctgggtgcagtccgtggtgcgggaggagtggaccgccgaggtgttcgacgtcgagctggtgcgcctgggcgccagcgccgaggaggagatggtggccctgctgcaggtggccatggcgtgcgtggccacggtccccgacgcgcgccccgacgcccccgacgtggtaaggatggtcgaggagatcggcgccggccacggcggccggaccacgacggaggagagcgagggcgtgcgcgccacgtcggaggaggagcggtcggggggcacgcctcccgccgccccgacgccgtgacgacgcagctagcggggtaaatgtccttggccggattcaattgcataggttcctggtgcctgcatgtcgatggacactggtattctgtttcttctttgtttattttttttttattttcgctcttttttttggtcttttcagggcattgttttgttggatcaaattttcgtttttccccccgtcatctccctctctctttcaggcttcattcatccaagcaaagaagtgtaatttttcttcagcttctctttagatccctatttgtgatgcacttatgccgtgatagtcttcaccgttgtgtccatgttgagttcacctgggagcaaagcaaagcaaccggctccaaactattatcacc

SEQ ID NO: 117446 - DNA, 2432 bp, Zea Mays
ttccctctcttcctcccgaaatttcccacctcagactccgagagaagcaaacacaagaagaagaagaaaaaaaaccgtccgcacaaaaaagaaaacggcagcgccagccagtgaggagaaaagcttcagatccagctccagctccaggtccccctcctccccaatgcctcgcccgtagccgcgtccgccgcacgtcgcaatggccggccccagcgtgcccgcagcggcgctggcggccctgctcgcggtcgccgccctcacgtgctgcgccatcccgccgggcacgctcggccggctcaccaacctccgcgtgctctcgctccgctccaaccgcgtcctcgggaccgtccccgacgacgtgctccagcttgccagcctcaaggcgctgtttctgcaacagaacctgctctccggccccatcccgacgggaatccagaagctcggcggcctcgagcgcctcgtgctctcccacaacaacctctcgggctccatccccttcgcgctcaacaagctcaccgcgctgcgagtgctcaagctcgacggcaaccacctctccgggagcattcccagcatcagcatcgcggggctcggcgccttgaacgtctccgacaacaacctcaacggctccatccccaaatcgctctcgcacttcccgcgggaatccttcgccggaaacctccagctctgcggggacccgctgccgccctgcagcagctcgttctttcccccagcaccatcgcccgggcttagccctggccccgcgacgggctcctccaagaggcggaagctctccggcgccgcaatcgcgggcatcgtcgtgggcggcgtggtggtggggctcctcctcctcatcgccgtcgtgctctgcgcggtgtccaaacgtcggagcgccggcgcccgtgaggggcccaaggccgcgacgtcgtccgcggcggcggcggcgggttcgggagcgaccaggggccagcccccgccggcgtccggcgagggcggcggcatgacgtcttcgtccaaggaggacctcggaggcggcgcgtccgggtctgccgcggccgtcgcagccgcggcggcgggcggcgccgcgggggagcagagccggctggtgttcgtggggaagggcgccgggtacagcttcgacctggaggacctgctgcgcgcgtcggcggaggtgctgggcaaaggcagcgtggggacgtcgtacaaggcggtgctggaggaaggcacgacggtggtggtgaagcggctcaaggacgtggcggtgcagcggcgcgagttcgacgcgcacatggaggcggtcggcagggtggagcaccggaacgtgctccccgtccgcgcctactacttctccaaggacgagaagctgctcgtctacgactacctccccaacggcagcctctccgccatgctccacgggagccggggctcgggccggacgccgctggactgggaggcgcgcatgcgggcggcgctgtccgccgcgcgcgggctggcgcacctgcacacggcgcacaacctggtgcacggcaacgtgaaggcgtcgaacgtgctgctccgcccggacgcggacgcggcggcgctctccgacttcgggctgcaccagctgttcgcggcgtcgacggcggcgcggggcggcgggtaccgcgccccggaggcggtggacgcgcggcggctgacgtacaagtcggacgtgtactccctgggcgtgctgctgctggagctcctgacgggcaagtccccctcgcacgcgtcgctggagggcgacggcacgctggacctgccccgctgggtgcagtccgtggtgcgggaggagtggaccgccgaggtgttcgacgtcgagctggtgcgcctgggcgccagcgccgaggaggagatggtggccctgctgcaggtggccatggcgtgcgtggccacggtccccgacgcgcgccccgacgcccccgacgtggtaaggatggtcgaggagatcggcgccggccacggcggccggaccacgacggaggagagcgagggcgtgcgcgccacgtcggaggaggagcggtcggggggcacgcctcccgccgccccgacgccgtgacgacgcagctagcggggtaaatgtccttggccggattcaattgcataggttcctggtgcctgcatgtcgatggacactggtattctgtttcttctttgtttattttttttttattttcgctcttttttttggtcttttcagggcattgttttgttggatcaaattttcgtttttccccccgtcatctccctctctctttcaggcttcattcatccaagcaaagaagtgtaatttttcttcagcttctctttagatccctatttgtgatgcacttatgccgtgatagtcttcaccgttgtgtccatgttgagttcacctgggagcaaagcaaagcaaccggctccaaactattatcacc

SEQ ID NO: 117447 - DNA, 2616 bp, Zea Mays
attccctctcttcctcccgaaatttcccacctcagactccgagagaagcaaacacaagaagaagaagaaaaaaaaccgtccgcacaaaaaagaaaacggcagcgccagccagtgaggagaaaagcttcagatccagctccagctccaggtccccctcctccccaatgcctcgcccgtagccgcgtccgccgcacgtcgcaatggccggccccagcgtgcccgcagcggcgctggcggccctgctcgcggtcgccgccctcacgtgctgcgccgtcgcggagccgccgccgagcgagcggtccgctctgctggcgttcctcaccgcgaccccgcacgagcgccgcctcgggtggaacgcctccaccccggcgtgcggctgggtcggggtcacgtgcgacaacgccaactccaccgtcgtcgaggtgcgcctcccgggcgtgggcctcgtcggcgccatcccgccgggcacgctcggccggctcaccaacctccgcgtgctctcgctccgctccaaccgcgtcctcgggaccgtccccgacgacgtgctccagcttgccagcctcaaggcgctgtttctgcaacagaacctgctctccggccccatcccgacgggaatccagaagctcggcggcctcgagcgcctcgtgctctcccacaacaacctctcgggctccatccccttcgcgctcaacaagctcaccgcgctgcgagtgctcaagctcgacggcaaccacctctccgggagcattcccagcatcagcatcgcggggctcggcgccttgaacgtctccgacaacaacctcaacggctccatccccaaatcgctctcgcacttcccgcgggaatccttcgccggaaacctccagctctgcggggacccgctgccgccctgcagcagctcgttctttcccccagcaccatcgcccgggcttagccctggccccgcgacgggctcctccaagaggcggaagctctccggcgccgcaatcgcgggcatcgtcgtgggcggcgtggtggtggggctcctcctcctcatcgccgtcgtgctctgcgcggtgtccaaacgtcggagcgccggcgcccgtgaggggcccaaggccgcgacgtcgtccgcggcggcggcggcgggttcgggagcgaccaggggccagcccccgccggcgtccggcgagggcggcggcatgacgtcttcgtccaaggaggacctcggaggcggcgcgtccgggtctgccgcggccgtcgcagccgcggcggcgggcggcgccgcgggggagcagagccggctggtgttcgtggggaagggcgccgggtacagcttcgacctggaggacctgctgcgcgcgtcggcggaggtgctgggcaaaggcagcgtggggacgtcgtacaaggcggtgctggaggaaggcacgacggtggtggtgaagcggctcaaggacgtggcggtgcagcggcgcgagttcgacgcgcacatggaggcggtcggcagggtggagcaccggaacgtgctccccgtccgcgcctactacttctccaaggacgagaagctgctcgtctacgactacctccccaacggcagcctctccgccatgctccacgggagccggggctcgggccggacgccgctggactgggaggcgcgcatgcgggcggcgctgtccgccgcgcgcgggctggcgcacctgcacacggcgcacaacctggtgcacggcaacgtgaaggcgtcgaacgtgctgctccgcccggacgcggacgcggcggcgctctccgacttcgggctgcaccagctgttcgcggcgtcgacggcggcgcggggcggcgggtaccgcgccccggaggcggtggacgcgcggcggctgacgtacaagtcggacgtgtactccctgggcgtgctgctgctggagctcctgacgggcaagtccccctcgcacgcgtcgctggagggcgacggcacgctggacctgccccgctgggtgcagtccgtggtgcgggaggagtggaccgccgaggtgttcgacgtcgagctggtgcgcctgggcgccagcgccgaggaggagatggtggccctgctgcaggtggccatggcgtgcgtggccacggtccccgacgcgcgccccgacgcccccgacgtggtaaggatggtcgaggagatcggcgccggccacggcggccggaccacgacggaggagagcgagggcgtgcgcgccacgtcggaggaggagcggtcggggggcacgcctcccgccgccccgacgccgtgacgacgcagctagcggggtaaatgtccttggccggattcaattgcataggttcctggtgcctgcatgtcgatggacactggtattctgtttcttctttgtttattttttttttattttcgctcttttttttggtcttttcagggcattgttttgttggatcaaattttcgtttttccccccgtcatctccctctctctttcaggcttcattcatccaagcaaagaagtgtaatttttcttcagcttctctttagatccctatttgtgatgcacttatgccgtgatagtcttcaccgttgtgtccatgttgagttcacctgggagcaaagcaaagcaaccggctccaaactattatcacc

SEQ ID NO: 117448 - DNA, 1335 bp, Zea Mays
tgtatataatctttttcaggatagttcttgtgcaaaagaattacaaaaagatgggacttcaaatttaaattttgaattggaacttgactccttaagtgagtctgaaaatcttgaaagagagatgtcgtcattgaaaaggcaaagtatgtacaaaagaaaacttgattcttcagtctcccagcacaaaagttgtttgaagataagttcattcaaggatttgaaggaggtgattcttcagtacaagaaatttgtatcctccttttcttgacagaatctatgacataataacatctcaggcatgcatggcaatgaggcacaatcaggattgagaacggatgggctacaaagttctttgaagatgctgctagaggtagagcgcccacacttatgttcatgacttttgttgataatttcccagcttgtcgacagttagaggctctcccattcttggatccactgaagcattttagagatctgaaagaccacatcgatgagttcatccatgcctccatggacgagcacaagacctgctttaagaagacgatccagaagatgtttgggatgtcgaaggctattgcagagagatccgcggcagaagcgaaggaagctggagttgaaagtgctttgccacttcagaccagtgtctcgcagtagaatttcacgttggtagtttcttgctcgatgctggctgaaagggaattaggcttacacctagttcctaaataattttggtggttgaattgcccaacacaaataattggactaactagtttgctctagtgtataagttatacaggtgccaaaggttcacaacaagccaattaaaaagaccaacgttgagttcaaaatggagagctaaaagcataccgaagtgtgccctggtctggcgcaccgaacatgtccggtgcaccaccggacactctacagtacctgtccggtgcaccaggggactccgcgctgaactcctcaccttcgggaatttccagaggcactccgctataattcactggacagtgtccggtgctccaaagggacgcggctctggaacttggcagcctcgggaaaacgcagcggctgctccgctatatttcaccggacatgtccggtgtacaccggactgtccggtgcgactgcggagcaacggctacttcgcgccaacggtcacctgaaggcgcattcaatgcgcgccagaagcgcgcagaagtcaggcacgcccatactggcgcaccggacattgaacagtacatgtccggtgtgcaccggacatccaggcgggtccagaagtcagaactccaacggctttggtgacgtagctggtgcaccggacatgtccgg

SEQ ID NO: 117449 - DNA, 635 bp, Zea Mays
gatagttcttgtgcaaaagaattacaaaaagatgggacttcaaatttaaattttgaattggaacttgactccttaagtgagtctgaaaatcttgaaagagagatgtcgtcattgaaaaggcaaagtatgtacaaaagaaaacttgattcttcagtctcccagcacaaaagttgtttgaagataagttcattcaaggatttgaaggaggtgattcttcagtacaagaaatttgtatcctccttttcttgacagaatctatgacataataacatctcaggcatgcatggcaatgaggcacaatcaggattgagaacggatgggctacaaagttctttgaagatgctgctagaggtagagcgcccacacttatgttcatgacttttgttgataatttcccagcttgtcgacagttagaggctctcccattcttggatccactgaagcattttagagatctgaaagaccacatcgatgagttcatccatgcctccatggacgagcacaagacctgctttaagaagacgatccagaagatgtttgggatgtcgaaggctattgcagagagatccgcggcagaagcgaaggaagctggagttgaaagtgctttgccacttcagaccagtgtctcgcagtag

SEQ ID NO: 117450 - DNA, 1146 bp, Zea Mays
ttcaaaaacactacattcattattcctttatttttaaggaccagacatagaatctgtcggacagcacaacaaatttagtttgtacaaaactgaagcattccatgatgttcacatgactgattcaggtagggcgagtgcaattagcaacgaaaaagacaattgtcgtaaaaagtatttattattcagcattgactataaaatcaagccagctaaatagcatgttccggaaacttgcaacaacacttcaaatcatctgtagcaaggactatgccactatggcaccagagctttattcatcggattctgtgcggacagctgcagagagaaccaagttagcgttgaagaaatatctaaaagctatgcaaactgaacacaattcaggttcatactctacgacaggaaaaagttatacatgctaacaaaaaaaaactcatccagttctacatagtattgaaacaaacagaaaaaacaaagcaaacatatgatggctagttcatgcctttgaatttcatggaagtaccttaaacacaaagcataaaattccatagaatagttgattgtttaatgtctattatacaatggtgcatttttcctcatattgtgcatgattttttttgcaaacatttgtgtgtggtgactggtgagcacgcatgcttgcatatttgagcaatgacaggtttagcagattataaatggttgaatagcaacatattcagggaagaagcatgatcacacaaatcaggaaatacgatcaatcaccgtccttcagcaagatttcaggcacaattaaacaatatatacatattacatgtgcatggattatgtctaagttatcataagtaggttattcgctgtaggatcacaatttcttcaaagaagtgcatcccttttctaaacaaaacataatgctactgaaacatgtcgttgcagtttctgtaagttttaacatcacacttcatccttaattccttatgacgacacactctgcattttatcttcaaatccagatttcacagttgactgtggaaagtctctttgtacttcatattctctaaagtcacatatatatgatgcatcatgagatgcattcaggtttgataaataatccacattttggtgtaacattgttaagtgctagtgtgctac

SEQ ID NO: 117451 - DNA, 2382 bp, Zea Mays
actggattggctttggtgctatggttggtttcaccatactcttcaacgctctcttcactgttgcccttacatatcttaagccatatggcaactcccggccatctgtatccgaagaggagctgaaggagaagcatgcaaacatcaaaggggaggttctggatggcaatcacttggtatcagcaagcagtcatcgatcaacaggagttaaccctgaaactgattcagcaatcatggaagatgattctgccttgactaaaaggggaatgatcctcccatttgtcccgctctcgctcacctttgacaacatcaaatactctgttgacatgccacaggaaatgaaagctcaaggtgtacaagaagatcgtttggagctcctcaaaggtgtcagtggatcttttaggccgggtgtgttgaccgcactgatgggcgttagcggtgcaggaaaaactactttgatggatgtgttggctgggagaaagacaggtggatacattgaaggagacatccgtatttcaggatacccaaagaaacaagacacctttgcacgtgtatcaggatactgtgaacaaaatgatatccactcgccacaggtgacagtctatgagtccctgcttttctcagcatggctccggcttcccaaggacgtcgattcaaacaaaagaaagatcttcattgaggaggtgatggagcttgtggagctgaaaccactgagaaatgctttggttggacttcctggagtgaatggtctgtcaactgagcagaggaaaaggcttaccattgctgtggaacttgttgcaaatccatctatcatctttatggatgagccaacctcagggcttgatgcccgagcagctgcaattgtgatgcggacggtgaggaacactgtcgatactggtagaactgtggtctgcacgatacatcagcctagcattgacatatttgaagcatttgatgagcttttcctcatgaagcgtggtggagaagagatctatgctggtccacttggacatcattcttcagatctaatcaagtattttgagtcacttcatggggtcagcaaaattaaagatggctacaatccagcaacatggatgctggaagtgaccacaacttctcaggaacagattctaggtgttgatttcagtgacatatacaagaaatctgaactctaccagaggaacaaggccttgataaaggaattgagccaaccagcaccaggttcaactgacctgcatttccctagcaagtatgcgcagtcttccattacacaatgcgtggcttgcctatggaagcagaacctgtcatactggaggaaccctccttacaataccgttaggttctttttcactaccatcattgctctcctccttggcaccatcttttgggacctcggcggcaaaacgtatacatcacaagacttgatgaatgccatgggatcaatgtactctgcggtgctgttcattggagtcatgaattgtacctcagttcagccagtggtggccgtggagcgaacagtcttttaccgtgaaagagctgctggcatgtactcagctttcccatacgcgtttggccaggttgtcattgagcttccatacgcactggctcaggatatcctttacggtgtcatagtgtactctatgatagggttcgagtggacggctgctaagttcttctggtacctcttctttgggtacttcacgctgctctacttcacattctacggcatgatggccgtggggctgacacctaactaccacatcgccgcgatcgtctcctcggcattctacgccatctggaacctcttctccgggttcatcatcccccgaccgaaagtgccgatctggtggaggtggtactgctggatatgccccgtggcgtggacgctgtacgggctggttgtgtcacagttcggtgacgtcatgactccgatggacgacggaagggccgtgaaggtgttcgtcgaggactacttcgacttcaagcacagctggcttgggtgggtggccgccgtggtggtggcgttcgccgtgctctttgcgaccctgtttggctttgccatcatgaagcttaacttccagaagagataatgacgataggagttgggaaatcacctcctaggagacaaagggatttttgcattcgttgggtcgtgcaagtagatttgactgtgcatattgggagagtacgccataatatatggattcgttgattagttaaagttatagaagttattgtgtgctcctgttttttttttttgataggatattgtgctcctgtttttttttgataggatatattgtgctccttttctaggagggtgatgccgtagtactttgtaaagaatatttcacacatccagtaaaattccttgtcgccccttgc

SEQ ID NO: 117452 - DNA, 426 bp, Zea Mays
tacccatcacatttatcgaggttggtggttatgtattcttgacatactatgtcattgggttcgacccaaatgtcggcaggttcttcaagcagtatctgcttctgttagtagtcaatcagatggcagcatcactcttccggtttattggtggggtatcgaggaacatgattgttgctaatgtcttcgcatcgttcatgttgctagttgtcatggtgttgggaggatttattctagtaagagataaagtgaagaaatggtggatctggggctactggatctccccaatgatgtatgcacaaaatgccatttcagtgaatgagatgttgggccacagctgggacaaaatattgaatagcactgcatccaacgagaccctaggtgtgcaagtccttaagtcgcgtggagtattcaccgaagcaaagtggt

SEQ ID NO: 117453 - DNA, 341 bp, Zea Mays
ttgacaaagacctcaaggtttcaggcaaagtgacctataatggtcatgagatgacagagtttgttccagagaggacggccgcttacatcagccagcatgacctccacataggagagatgactgtgagggagacgcttgcattctctgcacgctgccagggtgtcggctcccgttttgatatgctgactgagttgtcgaggcgagagaaggcggctaatatcaagcctgatgctgatattgatgcattcatgaaggcgtctgcaatgggtgggcaagatgccaatgtggtcactgactatattctgaagatattaggactagagatatgtgcagacacaatg

SEQ ID NO: 117454 - DNA, 4353 bp, Zea Mays
atggaccgggagatccaccgggtgacgagcctccggcgcgacagctcgctatggcgtcgcggggacgacgtgttctcgcggcagtcgtcgcggttccaggacgacgaggaggacgacgacgaggcgctgcggtgggcggcgctggagcgcctccccacgtacgaccgggtgcggcgcggcatcctggcgctgcacgagggcggcggcggcgagaaagtggaggtggacgtggggcgcctgggcgcccgcgagtcccgcgccctcgtcgagcgcctcgtgcgcgccgccgacgacgaccacgagcgcttcctgctcaagctcagggagcgcatggaccgcgtcggcatcgactaccccaccatcgaggtgcgctacgagagcctccacgtcgaggcgcaggtgcacgtcggcgaccggggcctccccacgctcgtcaactccgtcaccaacaccgtcgagatacaatccatcgggaacgcgctccacatcttgcccagcaggaagcggccgatgaccgtcctgcatgacgtaagcgggatcgtcaagccccggaggatgactctgctgctcggacctcccggctcggggaagaccaccttgctcctggcgctggcggggaagctcgacaaggacctcagggtctcggggaaggttacctacaacgggcacgggatgaacgagttcgtcccggagaggacagcggcctacatcagccagcacgacctccacatcggggagatgactgtgagggagaccttggccttctcggcgcggtgccaaggtgttggcaccagatacgaaatgctcactgagttggcgagaagggagaaggcagccaacatcaagccagatcatgacattgatgtctatatgaaggcctcagctatgggtgggcaagaatccagtattgttacggactacacactgaagatattaggcttggaggtctgtgctgatacgctggtaggaaatgagatgatgaggggtatttctggtggtcaacgaaagcgtgtcacaacaggtgaaatgcttgttggtccggcaagagctctgttcatggatgagatatccactggactggacagctcaaccacataccagattgtgaattcccttaggcagactatccacatccttggtggaactgcagtcatttccttgctccagccagcgcctgaaacatacaacttgttcgatgacattatactcctatctgatgggcatgttgtataccagggcccccgtgaacatgtgctcgagttctttgagttcatgggcttcagatgccctgccagaaagggtgttgctgacttcttgcaggaagtgacatcaaggaaagaccaggggcagtattggtatcggcaggacaggccataccgctttgtgcctgtgaagaaatttgcagatgcattcagtatattccacgtgggccggtccacacaaaatgaactttcagagccatttgataggacccggagccaccctgctgccctagcaacttcaaagttcggtgccagcaggatggagttgctcaaagccactattgatagggagcttctactcatgaagaggaacgcatttatgtacattttcaaagctgttaaccttactgttatgtcgtttatcgtgatgaccacatttttccgtaccaatatgaaacgagacgcatcttatggaaacatctacatgggggcactcttctttgctctcgacacaatcatgttcaatggttttgctgagcttgccatgactgtcatgaagctgccggttttcttcaagcagagggatcttttcttcttccctgcatgggcctacaccataccttcatggattgttcagatccctatcacatttttggaagtcggggtttatgttttcaccacatactatgtcattggatttgatcccaatgtgttcaggttcttgaagcaatatctgctgctccttgcactcaatcagatgtcatctgcccttttccgcttcattgctggaattggaagagacatggttgtgtctcatacctttggccccttagcactgttggcttttcaagcactgggtggctttatacttgcaagacctgatgtgaagaaatggtggatttggggttactggatctctcctctatcgtatgcacagaatgccatttcaacaaatgaatttttggggcacagttggagcaaaattcaaaatggaacaaccgtgggaattggggttcttcaaagtcgtggtgtctttactgaagctaagtggtattggattgggctcggtgtcttggttggatatgctctcctcttcaacctgctctacactgtagctcttgcagttttgagtccattcactgattcccacggatcaatgtctgaagaggaattgaaagaaaagcatgccaatttaactggtgaagtcatagaggtccgcaaggaaaagacatctaggaggcaggaattggagctgtcccacagtgttggccaaaactctgtgcatagcagtgaggattctagtcagaacaggaagggaatggcactcccatttccaccactatcacttacttttaacgacataagatactcggtggacatgccagaggcgatgaaagcgcaaggagtgacagaagatcgtttgcttcttttgaagggcgttagtggttcttttaggccaggagttctaactgcattgatgggtgttagtggtgctggaaagaccacccttatggatgtcttagctggcagaaaaactgggggatatatcgagggagatattaccatctcaggatatccaaagaagcaagagacgtttgcacgcatatcaggatactgtgagcaaaatgatattcattctccacatgtaacagtgtatgagtcactcctattttctgcatggctacgccttccttcaggcatcaacttagaaacaagaaagatgttcattgaggaggtcatggatcttgtagagctcacatcactgaggggtgcacttgttgggcttcctggagtgagtggcctgtcaactgagcaacgcaagaggctaactattgctgttgagcttgttgccaatccttcgatcattttcatggatgagcctacctccggtcttgatgctcgtgcagctgcaattgtgatgaggactgttaggaacactgtcaatactggaaggactgttgtttgcaccattcaccagccaagcattgacatatttgaagcatttgatgagcttttcttaatgaagagaggtggagaagagatatatgttggtccagtgggccagaattcatcaaaattgattgagtactttgagggaattgaaggtattagccagataaaggatgggtataacccagccacgtggatgttggaagtgagctctagttctcaggaagagatccttggggttgatttcagtgaaatctacaggcaatcagaattataccaaaggaacaaggcactcatagaggagctgagcaccccacctcctggctctagtgacctcaatttccctacacagtactccagatcgttctttactcagtgcctagcctgcttctggaagcagaaaaagtcgtattggaggaacccaacctacacagcagtgaggctactgttcactgtagtcattgcgctcatgtttgggaccatgttctgggaccttggacgaaaaactaataaacagcaggatctgttcaatgccatgggatcaatgtatgccgcagttgtatacatcggaatgcagaactctggctctgttcaaccagtggtggtggtggagcgaacagtcttctaccgagaacgagcagcgggcatgtattcagctttcccgtatgcatttggacaggtcgcaattgaaattccttatatctttgtacagactttgctatatggagtgctagtctattcaatgattgggtttgagtggactgttgccaagttcctctggtacctgttcttcatgtacttcacactgctttacttcacgttctacggaatgatggcggttggcttgactcccaacgaaaccatagccgtcattacctcatcggcgttctacaacgtgtggaacctcttctcaggatatctgatcccccgacctaaactgcctgtctggtggaggtggtacagctggatctgcccagtcgcatggacactctacggattggttgcctcccagttcggcgacatcgcgcatccgctggaggactcaccgacaggccagacggtggcgcagttcatcacggattacttcggcttccatcacgacttcctgtgggttgtcgcaggggtgcacgtcgggctgaccgtgctcttcgcgttcctgttcagttttgccatcatgaagttcaacttccagaatagatga

SEQ ID NO: 117455 - DNA, 1203 bp, Zea Mays
gccaggtgggcctggttgggtacaacccaacgacaacgagaagcggaggccggaggccaccgccagatcccgcataaaccatctgctctaccctccttcgcgcggccggcctgattcctcacccctgctcgccgcgaagcacagctctgtcaccgcggtttgccgtggccggcgaagatgatgtccggcggtgggtactccgccctcgacgaccccaaggcctccggatccgtcccggcggccacggggacagatccgccggccatcaggttcgccgactccaacctccagaccttcccgccgtccgaggccaggggcaagatctccggcgcctaccgcccgcccaccgacgccgatgacaccttctcgtccaagggcggaggagccggaagcggtggcagaggcggcagcgccgggttggatgatgccgcgcagggcggctggttccgcatgttctccgtggcagcgtacaagccctacttcgacgttgacacctctgacgttgtcgagagaatctgggagtccgtcttccccttccgcggcacatttaccgagaagacctccgagaaccctgacctgtatgggccattttggacatgcaccaccctgattttcgttgctgcatctattgccacttttgtcacctacctatctcacaaatggcacaagaaggaatggaactatgatatcaacttggttacctggtctgctggcttattctatggctacgtaacctttgttcctcttcttctatatgttattctcaagtacttctcagctcctgctggtctagtgcaattgtggtgcctatacggatactccctgttcatcttcattccagcatcgcttctgtctattgtgccaatagaaatattcagatgggtgattgctggtgttgctggtttcatgtctgctactttcgttgctgtaaatctccgtgcgcacattgtaaactctggcgagcgatggttcctgatcgttgcagggatattcctgttgcagctggggcttgctgttttgctgaaactctatttcttcacgataactgtatagggttatttacatctgtgcttgtactagtcaggaaaacacacaattttccatgtggagtcacctccatgttcattggacatcgatgtaatttcatcgggtatacaacgtgttgagcaccatttgcggtactgagcacggctggatggtacg

SEQ ID NO: 117456 - DNA, 2019 bp, Zea Mays
atttctccggggtgactggttgattcgaatgcagccgtgccgagtccgccgcctccgcctccgccgccgccgccgccgtgaacgagagtgatgcgcctcgcgtcctatgcctttctacgccgcgccgccgccatgtcctccccctcctcctacagccgcacaggctacccccgccctcgccgcggctactcgggaaggccctcgccgccgccgccgccgccgcccccggacgcggcctccgagatcgtcagcagggattaccatctcagtgccgtgcacgccgccaacgaatccctgcgtcgtggcggcggcggcgacatccgctggcctccaccgccatacaggcaggggcctcaccctcaccaaccgcactatggctatggctatggctacggatacggatacggccaaacgtggcagccgggtccatcctatgggtttgtgccgtacaactacggccacccgcagcagcagccgccggggcctcagtacggctacggggctccgaacccgtacgttcacgggcacctgcagccgcagccgcatgtgcgtggggcagcgagtccagggttccgtcctggcgcgccccagctgactccgaggctggcagattacctccgacggtggcgctttgcaaagcagaggccgccacatcaagctgggaggtttattattctatcatacaatatacttgcggactatctggcccaggagcaccgctttctttatgaaaaaatatcaccttttattttggattggaactggcgcaaggataagttactgtttgagttcggtctgtggtctccagacattctatgtcttcaggaggttgacaaatttacagaccttgaacaagaaatggcaagccaaggatataacggtacatggaagatacggactggagatgcagctgatggatgtgctattttttggagaacaacaaggttccagttgcgttatgaagaagacattgagttcaccaagcttggacttcgtgataatgttgcccagctctgtgttttagagtcggtgggccttcagtatgtgcaaactgactctgttagtttatctacaagttctaaccatccacaacaagctaaacaagttataatatgtaacattcacgttctttataatccaaagagaggggacatcaaacttggtcaggtcaggacacttctggataaagctaacgctctatctaagatgtggaatgatgctccagtgatagtttgtggagattttaactctacacccaagagtccattgtataattttatgttggggcaaaagttgaatttgtctggccttgcgagaaatactatatctggacagcaaattggtggtagttcacaggggctatatactggccctaatatatctgggtggacaccagaagaaatcaaagctgccactgggaaggatgaatgcactttcatgaaacacagtttgaaattaaggagtgtatatactgacgtcgaggattttgaaggaacaaaagacgccagcaaggaaccactggtgacaagctacaacagaaaattcatgggaacagtagactacatatgggcctcggagggtctgcatactgttaaagtcttggacacatttcccatagagattttgaaaaaaacaactgggttcccgaccaagaaatggggaagcgatcacattgcccttgcctgtgaattggcttttacaaaatgacgccttttatcaggcggagagggcgcctgcatagttgctagtgaccaaacacacctcaagagaaagaatactgtctacaggacgattaactgaaccaaacctcgctcttttagagctcgttaatttatttcatttttttttcgacacacctttttgaattgtgcgtgagtatggagaaccggagtacatcatttgggtccaattttagagcattgttcctgtttgattggctatggagagtgtattttggtgtgctgccactctacctgcggccctgccatctactggttcaatgacttgtttgagtcagta

SEQ ID NO: 117457 - DNA, 1458 bp, Zea Mays
ggaacagagatatcgtcaacgttttccggccttcaccgagagacacgccgaagtctgcaaatcccctctcagtcaactccaagggccaagaccccaatttcccctagaggttgggattttgtgggttcagtcatgctcgagcggcaccgcgttcatcgcgacgccgacggcgatctccccgccgccgtgaccgccccccttctcgcgcacccaccgtcgccggctgagccttggcctgcgaactttggttcatcggagataaccgacgaggagatcgacgccgcctccgccgcctgctgccgcatctgcctcgaatccgagtccgagcctggtgatgtgctaatatctccatgtatgtgcaaggggacacagcagttcgtgcatcgctcctgccttgaccactggaggtctgttaaggaaggaactgccttttcacactgcacaacatgcaaggcgcgattccatctacgggttgaatttctggaggatgacatttgtcgtagaatgaagtttcggatgttcgttgcaagagatgttatcattatattccttcttatacaagccaccatcgcagctataggtggtatggcatattttttggacaaagacggaaacttcagaaacaaattttctgatgattgggaacggtttctgtcaaagcatccagtgcccttttactactgtgttggtgtggttgtgttctttgtaatggttggatttttcgggctaatactacacctctcctcttacaacaacaacgatccgtgcctggttggctcccgtgattgttgctttgggtgtggtctggtggacttaccggcttcaatggaagcttgtttcgctttcgctgtcatatttgttattatgttggccatccttggagttgcctacgggtttcttgcggcgactgtggccatccagaggatctggcagcggcactatcacatacttaccaagaaggagctcacgaaggaatatgtggtggaggacctccctgggggttacacgccgccgaagatggatccagagcatgagcagcggttgaaggtgttgcagctcatgtagcttgcactttcgcaggtgatggacatgaagtatcgcatcttttttgttgcattgcatgtatgtacttttgcatgctgtgagtgttattagttggggtaaacatgtattctagtgacggaagtccatgtgcttataatgtacaaatatagaaccacggttaccagtcccaggtggggaatcacatacaggctaggaacaatgcaagttaaattgatcgactgtttcgctacacatactgcattactgccgagagacaatggtaatgctcactgtatcgaaacgttagtttccttttttttcactgctttggcgcctcggtgtttcgtccctttgtatctggatatgttgtacttcacctggaccaatcagaatcactctactaccaacataaga

SEQ ID NO: 117458 - DNA, 1862 bp, Zea Mays
ggaacagagatatcgtcaacgttttccggccttcaccgagagacacgccgaagtctgcaaatcccctctcagtcaactccaagggccaagaccccaatttcccctagaggttgggattttgtgggttcagtcatgctcgagcggcaccgcgttcatcgcgacgccgacggcgatctccccgccgccgtgaccgccccccttctcgcgcacccaccgtcgccggctgagccttggcctgcgaactttggttcatcggagataaccgacgaggagatcgacgccgcctccgccgcctgctgccgcatctgcctcgaatccgagtccgagcctggtgatgtgctaatatctccatgtatgtgcaaggggacacagcagttcgtgcatcgctcctgccttgaccactggaggtctgttaaggaaggaactgccttttcacactgcacaacatgcaaggcgcgattccatctacgggttgaatttctggaggatgacatttgtcgtagaatgaagtttcggatgttcgttgcaagagatgttatcattatattccttcttatacaagccaccatcgcagctataggtggtatggcatattttttggacaaagacggaaacttcagaaacaaattttctgatgattgggaacggtttctgtcaaagcatccagtgcccttttactactgtgttggtatttgttttcttctgtaactgcactttcaattattaagaagactcggatagccagatgataaaatgatagctagtgtcggagtggtaaaaaattcatataccatatagactgtatgcatgcattagtttgtttgagtcttttttaaatcagaatcattgagacatctcttgctttcatgaacattgcccgatgaggcctcaagttcttctgcttacacattgaaactaaaactatgtggctattcaaattcagatatgtaatttgacacattttttctgcttcaccctatcttgtacaattataactttccatattgcagtttttacagacctgttcaagtataagatgctaatgtttccgtgtaataagtcagctactgatatccccccgttttggttcaggtgtggttgtgttctttgtaatggttggatttttcgggctaatactacacctctcctcttacaacaacaacgatccgtgcctggttggctcccgtgattgttgctttgggtgtggtctggtggacttaccggcttcaatggaagcttgtttcgctttcgctgtcatatttgttattatgttggccatccttggagttgcctacgggtttcttgcggcgactgtggccatccagaggatctggcagcggcactatcacatacttaccaagaaggagctcacgaaggaatatgtggtggaggacctccctgggggttacacgccgccgaagatggatccagagcatgagcagcggttgaaggtgttgcagctcatgtagcttgcactttcgcaggtgatggacatgaagtatcgcatcttttttgttgcattgcatgtatgtacttttgcatgctgtgagtgttattagttggggtaaacatgtattctagtgacggaagtccatgtgcttataatgtacaaatatagaaccacggttaccagtcccaggtggggaatcacatacaggctaggaacaatgcaagttaaattgatcgactgtttcgctacacatactgcattactgccgagagacaatggtaatgctcactgtatcgaaacgttagtttccttttttttcactgctttggcgcctcggtgtttcgtccctttgtatctggatatgttgtacttcacctggaccaatcagaatcactctactaccaacataaga

SEQ ID NO: 117459 - DNA, 892 bp, Zea Mays
atggcagttggacccgtgggtatggatacccgtgggtttcgtacccaccggatatggatacgggtacaaaaactcacccgtgggtcctatcgggtcggatacccgaaatacatcgggtcggtctacaataacatatccactggatacccaatacccggtggatatccgatgggcatggatacagtcatgctcgagcggcaccgcgttcatcgcgacgccgacggcgatctccccgccgccgtgaccgccccccttctcgcgcacccaccgtcgccggctgagccttggcctgcgaactttggttcatcggagataaccgacgaggagatcgacgccgcctccgccgcctgctgccgcatctgcctcgaatccgagtccgagcctggtgatgtgctaatatctccatgtatgtgcaaggggacacagcagttcgtgcatcgctcctgccttgaccactggaggtctgttaaggaaggaactgccttttcacactgcacaacatgcaaggcgcgattccatctacgggttgaatttctggaggatgacatttgtcgtagaatgaagtttcggatgttcgttgcaagagatgttatcattatattccttcttatacaagccgtgagatcaccttctcctcttattacattatattgttctctattattcatggtcatatcatcactagtaatagaccgcggacagcttgcatatattatttccttgggttaaagcttagtggaccaggtgactagagcaggcatgtagtttgatgtgtgcacctcattgtttttttttcagaccatcgcagctataggtggtatggcatattttttggacaaagacggaaacttcagaaacaaattttctgatgattgggaacggtttctgtcaa

SEQ ID NO: 117460 - DNA, 2263 bp, Zea Mays
gtgcggactgcggagcaatccccgaatcctccattgattaggcccaagcttcctcctcgggtggcggcggcggcggttgcagctgctggagatggccttggcgagggcggctgcgctgccgctgctcttgctccccttcctcgccgtcacgacctgcctcgacgttccttcccatgagtacccgactgctcaaattatgtgacatgaagcatcagcaacaccaatgtccatgtgacggttactcccttcagcagcattgatatgtggccctgaagcaccagcattgcacaatttgcggtgaagggttcagatagtggcatacggcaaaggtttatgattgggttcaactcatgcgtgtcaaacaccagcctgatgaatttgctgtagctgaatgctaaaggacttggatggttactgctgtgtgctgggtctccgactggcaaacacattttactgtagttctgtgtgaagcaactggatccacggacgaaatagagaccatagctaatttctatgaggtatttctttctaccaactagataatttcatcaaacataagtccctgacgcccaacaggttaataacatttatcgaaggaattctgaaactccagtgctgcagcaaactagtcaaatgcacgttccgcaggtgcattgttctcattttatatgcctattaaattttacagcatggattacttgtttatggcaccaaagcacatgaagttttaccatactacctttggctcacggtgaagttggcaataaatcacattcacatttcactaaagcatcacattgaaattgcagggtgctattggactggttgccaaagcaaatggtttggagtctgtgctgctcgccacttcttggattctcagtcagatgattgtgacggtctttgtgtggagtcaaaaagccctccatgccttccactgcacacacatttctattgttgcaaaccaggtctatacattggttttactacattcagacaatgaaaacagtctgctaatttgcttgaatcatgtataaacatggaacttaatagttaatactaatacctagtccttggcataagtactttaaggactacacattctttttaaattgtcactgtaccatttgaataaataactctagtattctgataccggttttgattatgcattctgaaggacaggaaccccaaaggtaacaaataagtgtgggcactgcaagagcaagctggattttggcaaagagtttatatgctgctcagattgctctgatccaaccattatggacaagaatagcaaactgggttactgcaaaagtggcgccgacttaacaatgcaattaaaactacaagaaacttttcgctgggttgctggcccatggatgacatgctcctctccatgtgatggtggtattcgatatcgtgatgttgcttgttatggaaatctggacgatgacacaatcaaacactaccctgtagatgatgctagctgttcagcagacaaaatgcctgcaagacaggaggcctgtaatcagcagagctgtagtgatcctgagatgacacagtcagtgaatcctaaggaaagtggaatgtctggttggttggtagtattggttgttatcctaggtctcagtgcagctgctggcattgcatttaccagctacacttactacgtgaggagaacctctgggacgagtggttttgtttatgtcatgatggaagcttattcttgaggattgagaggaacgatttcctgtaagtctgtgagcgactgtagaaaatctctggagttggagacaaccagcttgttcattctttggactttggtttgctgttttggtcgtcagaaatggttgtcgtctatttccgctgattcatgtgccgacgaggaactatcccgggtatagcctgggagtctagacaaaacaactgagtgtttctatggtacttgttagctgcaacttttcttcgagggcaattgaagttttgtctaggatagattcatgcatttgatagaggtgtctccgatcataccccgttgcttcttgatactaaatctcctgcctttgtcggatgcaataggctattcaaatttgaactatgttggctacaaagggaaggctttcatgaccatgtcaaagagattcggtcatgttcaaataagggcaagaacttggttcaaagatggaataacaaactgagtgccctactgagatttcttcgtggttgggctgtccagtataatggggaatataagaaaaagaaa

SEQ ID NO: 117461 - DNA, 1455 bp, Zea Mays
cggcgtccccgtgcttgctgcctgctgccgcgacagccaccgacgctggctgtctagcagtggctctgctcatgcgcacctacccggctatcccctcacctgagtcgcctcgcgcaattggtgcggactgcggagcaatccccgaatcctccattgattaggcccaagcttcctcctcgggtggcggcggcggcggttgcagctgctggagatggccttggcgagggcggctgcgctgccgctgctcttgctccccttcctcgccgtcacgacctgcctcgacgttccttcccatgggtgctattggactggttgccaaagcaaatggtttggagtctgtgctgctcgccacttcttggattctcagtcagatgattgtgacggtctttgtgtggagtcaaaaagccctccatgccttccactgcacacacatttctattgttgcaaaccaggaaccccaaaggtaacaaataagtgtgggcactgcaagagcaagctggattttggcaaagagtttatatgctgctcagattgctctgatccaaccattatggacaagaatagcaaactgggttactgcaaaagtggcgccgacttaacaatgcaattaaaactacaagaaacttttcgctgggttgctggcccatggatgacatgctcctctccatgtgatggtggtattcgatatcgtgatgttgcttgttatggaaatctggacgatgacacaatcaaacactaccctgtagatgatgctagctgttcagcagacaaaatgcctgcaagacaggaggcctgtaatcagcagagctgtagtgatcctgagatgacacagtcagtgaatcctaaggaaagtggaatgtctggttggttggtagtattggttgttatcctaggtctcagtgcagctgctggcattgcatttaccagctacacttactacgtgaggagaacctctgggacgagtggttttgtttatgtcatgatggaagcttattcttgaggattgagaggaacgatttcctgtaagtctgtgagcgactgtagaaaatctctggagttggagacaaccagcttgttcattctttggactttggtttgctgttttggtcgtcagaaatggttgtcgtctatttccgctgattcatgtgccgacgaggaactatcccgggtatagcctgggagtctagacaaaacaactgagtgtttctatggtacttgttagctgcaacttttcttcgagggcaattgaagttttgtctaggatagattcatgcatttgatagaggtgtctccgatcataccccgttgcttcttgatactaaatctcctgcctttgtcggatgcaataggctattcaaatttgaactatgttggctacaaagggaaggctttcatgaccatgtcaaagagattcggtcatgttcaaataagggcaagaacttggttcaaagatgg

SEQ ID NO: 117462 - DNA, 1590 bp, Zea Mays
gtgcggactgcggagcaatccccgaatcctccattgattaggcccaagcttcctcctcgggtggcggcggcggcggttgcagctgctggagatggccttggcgagggcggctgcgctgccgctgctcttgctccccttcctcgccgtcacgacctgcctcgacgttccttcccatgagtacccgactgctcaaattatgtgacatgaagcatcagcaacaccaatgtccatgtgacggttactcccttcagcagcattgatatgtggccctgaagcaccagcattgcacaatttgcggtgaagggttcagatagtggcatacggcaaaggtttatgattgggttcaactcatgcgtgtcaaacaccagcctgatgaatttgctgtagctgaatgctaaaggacttggatggttactgctgtgtgctgggtctccgactggcaaacacattttactgtagttctgtgtgaagcaactggatccacggacgaaatagagaccatagctaatttctatgagggtgctattggactggttgccaaagcaaatggtttggagtctgtgctgctcgccacttcttggattctcagtcagatgattgtgacggtctttgtgtggagtcaaaaagccctccatgccttccactgcacacacatttctattgttgcaaaccaggacaggaaccccaaaggtaacaaataagtgtgggcactgcaagagcaagctggattttggcaaagagtttatatgctgctcagattgctctgatccaaccattatggacaagaatagcaaactgggttactgcaaaagtggcgccgacttaacaatgcaattaaaactacaagaaacttttcgctgggttgctggcccatggatgacatgctcctctccatgtgatggtggtattcgatatcgtgatgttgcttgttatggaaatctggacgatgacacaatcaaacactaccctgtagatgatgctagctgttcagcagacaaaatgcctgcaagacaggaggcctgtaatcagcagagctgtagtgatcctgagatgacacagtcagtgaatcctaaggaaagtggaatgtctggttggttggtagtattggttgttatcctaggtctcagtgcagctgctggcattgcatttaccagctacacttactacgtgaggagaacctctgggacgagtggttttgtttatgtcatgatggaagcttattcttgaggattgagaggaacgatttcctgtaagtctgtgagcgactgtagaaaatctctggagttggagacaaccagcttgttcattctttggactttggtttgctgttttggtcgtcagaaatggttgtcgtctatttccgctgattcatgtgccgacgaggaactatcccgggtatagcctgggagtctagacaaaacaactgagtgtttctatggtacttgttagctgcaacttttcttcgagggcaattgaagttttgtctaggatagattcatgcatttgatagaggtgtctccgatcataccccgttgcttcttgatactaaatctcctgcctttgtcggatgcaataggctattcaaatttg

SEQ ID NO: 117463 - DNA, 297 bp, Zea Mays
acgatgcaccgttcgtcgagctactacctgcagcagtcgtcgtcatcgtcgtcgtccgtgtcgtcgtcgtcgttagcggcgactggcggggcggcatcgccgggtccgagctcgacggcgggcgtgatggacgtggaccaactgccgacatatgacccacggtcggacgtggccaagaaggaggccctggatgcctcgcgcgccgacctcgctcgcgccctcgtccacctcatccccgtcggcgtgctcctctgcggccttctcctctggtccttctccgacactgacttcccagct

SEQ ID NO: 117464 - DNA, 2685 bp, Zea Mays
acggcgcggagcccatcaagcccctgcggcgccactatgcgcccgacacggctcctcgccgccgcctcctcaacgttccgacggcgccgcctttacactgccgccgcagtctccaccgtggcaccttcttctgcggccccgccaccgcagagcgccgtccagcccctctccacccaattcgctagaccatcccccgcccgtggccacggcgtcgccgatgacctcgcttcctccctccgcgcactcctcgcctcctcgcccaccgtccagcacgccttccatctgctccgttccgctgcgctggatacgcgcctcccgccgaacgagctcgtcgacgccgtcctctccaccgtggacgctggctcgccggccgcggttactctcctcagccacgtcctcacctgcctctcccgcgctgccagcgactgcgcggccgccgcggccgcatactctcgcatggtcacgaggggcgttgtcccggacgccaagtctcgcaccgacctgctagtcaccacggcgcggggcgcgtcggctgcggatgcgctaacgctgttcgacgagatgcggggcaagggatgctacgcggatgcgaagatgtacgacgtcgtgatacgggcctgcgtcaggggagggatgcactgtgatgccgtcaggctgtttgatgaaatggctggtgccggggtcaagcccgacgagcgcgtttatgccatcacaatctcaggtttgtgcaagctacgcgatgcagatcgggcactccaggtgttggggaagatgagggaggcagggttcgagccgtgggagttaacgtacagttctgtggtggatgtgcttgtgaaggtggggaggatggatgaggcattgaggctgaaggatcagatgctgctggctacgggaaagaagatggatgtggttctcgcgacgatgttgatgcacgggtattgcttgcatggagaagttgggaaggcattggatttgtttgatgaggttgtcagtgatggtgtgacaccgaccaatgtgacatatggggtgctaatcaaaggttgtgatgcagaggggatgtcagatgagacatataagctatgccgccagatgatagagcagggattgttactgagcacatatgagttcaatttggtgatcaaaggcctcttgagagacaaacggtggaaggatgccattggcttacttgaacttgtggtagatactggggtaccagatgtcttcacttacggctgtctaattcattggctctgcaagcatcaaaaactccacgaggcagtcaacttatgggataagatgaaggaagcaggagtcaaaccttctattgtgacataccacagcctactgctggggtactgtgagaaagggcgcatggatgaagcactcaagttatactctgagatgcctgataaaggattcccgcctaatgaggtcacttacacaactctgatgaaagggtacatcaagaagaaagcttttgacaatgcctacgcccttcttaatgaaatgcgtcagaatggagtttcttgcggcgattatacgtataatattctcataaatggactttacatggtcaatcgtgtttgtgaagttgatgaaatgttgaaaagatttttgagtgaaggttttgttccgaccacaatgacatacaatagtatcattaatggatttgtgaaagctggtatgatgggctctgcattcggtatgtatcggcagatgcgcaagaaaggtataactcccaatatagtaacatataccagttttatagatggttattgtaggaccaactgctgtgatcttgcagtgaagctgctcatttacgtgaggcgcgatggcattcaacctgacattgctgcatacaacgctttcatagatacgttttgcaaacaggggaatatgtctcgtgcactccattttttggttcttctgttgaaagatggtttaacaccagatgtcactgtctacaatagttttgttacagggtacaagaatttgaaaatgatggcagaagcttcaaagttctattatagcatgatcaaacagagagttgttgctgatacagaaatctatacaaccttaattgatgggttctcaaaagttggcaatgtggcctttgctttggaactgtactcagagatgatggccaatcacgttattcctgatgataaaactttcacagcactaacccacggtctttgccgaagtggagatattgatggtgctaagaggttattggatgatatgagaagattagatgtgtctccaaatattgttacttataacatgctgataaatgcatgcgtccgtgatggtaagctgcaagaggcattccaactgcatgatgagatgctcagcagtggagtcgtgcctgatgatactacatatgacatactccctcggaccaataatagttgattttccacctgccaggattgcttgctgcttgttcaagcctccagtctgacacagtgtattaccaaccagagggaatacgagttagcttgaaacttttggaagcaagtcctgcagatgctgaaaatcatgtttcaattctgccagtaaagtatgaagaaccttaacatgcgattcagcagattgaaatttaggaaacttgcactgtaaatgaagtgaactccttgtcagttataatttttccttttcaatatatctctacccctttaaagc

SEQ ID NO: 117465 - DNA, 2982 bp, Zea Mays
ctacatcatctgttcacagacgcgaacaatcactagccgatcgtatgaccagtgaccacacgaaacacggcaattcatcacttccatcagctgctcctgtacctgctggatgggagcagccaaacagcaggagaaagagaaatccacacctgcagaaaacagttcaattttgtagaaaaactgtagaaaacagttcaattttgtagcaatttctaaataaatgttgggttctgaatgatgaaactgaaccagaatgaagaaatgcagaagccgtgaactgtttagccacaaaactggacggcgcggagcccatcaagcccctgcggcgccaccatgcgcccgacacggctcctcgccgccgcctcctcaacgttccgacggcgccgcctttacactgccgccgcagtctccaccgtggcaccttcttctgcggccccgccaccgcagggcgccgtccagcccctctccacccaattcgctagaccatcccccgcccgtggccacggcgtcgccgatgacctcgcttcctccctccgcgcactcctcgcctcctcgcccaccgtccagcacgccttccatctgctccgttccgctgcgctggatacgcgcctcccgccgaacgagctcgtcgacgccgtcctctccaccgtggaccctggctcgccggccgcggttactctcctcagccacgtcctcacctgcctctcccgtgctgccagcgactgcgcggccgccgcggccgcatactctcgcatggtcacgaggggcgttgtcccggacgccaagtctcgcaccgacctgctcgtcaccacggcgctgggcgcgtcggctgcggatgcgctaacgctgttcgacgagatgcggggcaaggggtgctacgcggatgcgaagatgtacgacgtcgtgatacgggcctgcgtcaggggagggatgcactgtgatgccgtcaggctgtttgatgaaatggctggtgccggggtcaagcccgacgagcgcgtttatgccatcacaatctcaggtttgtgcaagctacgcgatgcagatcgggcactccaggtgttggggaagatgagggaggcagggttcgagccgtgggagttaacgtacagttctgtggtggatgtgcttgtgaaggtgaggaggatggatgaggcattgcggctgaaggatcagatgctgctggctacgggaaagaagatggatgtggttcttgcgacgatgttgatgcacgggtattgcttgaatggagaagttgggaaggcattggatttgtttgatgaggttgtcagtgatggtgtgacaccgaccaatgtgacatatggggtgctaatcaaaggttgtgatgcagaggggatgacagatgagacatataagctatgccgccagatgatagagcagggattgttaccgagcacatatgagttcaatttggtgatcaaaggcctcttgagagacaaacggtggaaggatgccattggcttacttaaacttgtggtagatactggggtaccagatgtcttcacttacggctgtctaattcattggctctgcaagcatcaaaaactccacgaggcagtcaacttatgggataagatgaaggaagcaggagtcaaaccttctattgtgacataccacagcctactgctggggtactgtgagaaagggcgcatggatgaagcactcaagttatactctgagatgcctgataaaggattcccgcctaatgaggtcacttacacaactctgatgaaagggtacatcaagaagaaagcttttgacaatgcctacgcccttcttaatgaaatgcgtcagaatggagtttcttgcggcgattatacgtataatattctcataaatggactttacatggtcaatcgtgtttgtgaagttgatgaaatgttgaaaagatttttgagtgaaggttttgttccgaccacaatgacatacaatagtatcattaatggatttgtgaaagctggtatgatgggctctgcattcggtatgtatcggcagatgcgcaagaaaggtataactcccaatatagtaacatataccagttttatagatggttattgtaggaccaactgctgtgatcttgcagtgaagctgctcatttacgtgaggcgcgatggcattcaacctgacattgctgcatacaacgctttcatagatacgttttgcaaacaggggaatatgtctcgtgcactccattttttggttcttctgttgaaagatggtttaacaccagatgtcactgtctacaatagttttgttacagggtacaagaatttgaaaatgatggcagaagcttcaaagttctattatagcatgatcaaacagagagttgttgctgatacagaaatctatacaaccttaattgatgggttctcaaaagttggcaatgtggcctttgctttggaactgtactcagagatgatggccaatcacgttattcctgatgataaaactttcacagcactaacccacggtctttgccgaagtggagatattgatggtgctaagaggttattggatgatatgagaagattagatgtgtctccaaatattgttacttataacatgctgataaatgcatgcgtccgtgatggtaagctgcaagaggcattccaactgcatgatgagatgctcagcagtggagtcgtgcctgatgatactacatatgacatactccctcggaccaataatagttgattttccacctgccaggattgcttgctgcttgttcaagcctccagtctgacacagtgtattaccaaccagagggaatacgagttagcttgaaacttttggaagcaagtcctgcagatgctgaaaatcatgtttcaattctgccagtaaagtatgaagaaccttaacatgcgattcagcagattgaaatttaggaaacttgcactgtaaatgaagtgaactccttgtcagttataatttttccttttcaatatatctctacccctttaaagc

SEQ ID NO: 117466 - DNA, 1633 bp, Zea Mays
gagcgagccaccacccaacctgaccccttcgccccgtatcgttcccttcctcctctcttttccccaccgccccctttcttggcgtctacccggcgcgaccaggaccgaatcctaaggccgccggccgccgccgccgccgcctgctcccgttggacacgagtttggagtaaagaaaccaaccctgcatctgtattctgtctgtctgtgctgcttcgaataagccttgcatctcgctgacttgggatataactatgccgaaggacaggagctcccgcgtttcctcttatgagagccgccgggctggtgcctccccatacttctcatcgtctcatggacagagcagttcttgtcgccggtccgaggagtcttgtggggcagcagcggcggcagcagcaaagcaagctgcagagtgggaggatgttcggtgcccggtgtgcatggaccacccgcacaacgccgtcctgctggtctgctcctcacacgagaagggctgccgccccttcatgtgcgacaccagctcgcggcactcgaactgctatgaccagtaccggaaggcctccaaggattcaaggacagagtgcagcgagtgccagcagcaggttcagctctcgtgcccactgtgccgtgggccggtcagcgattgcatcaaggactacagcgcgcggaggttcatgaacaccaaggtccggtcgtgcaccacggagtcgtgcgagttcaggggcgcctaccaggagctgaggaagcatgctagggtggagcatccaacaggaaggccaatggaggtagaccctgagcggcagcgggactggcgccggatggagcagcaacgggaccttggagacttgatgagcatgctgcgttcagggttcaacagcaatattgaggacgacagtggcgggcttggagacaccgaagaagggggagaggaagctgaaatgactccggcctccataaccatggtcttcatcatgccatctagaggctcaatcatgcagtacctatcggaacgcagcagaacgatcattctggtcagtcggaggcgagcaagcagcagcagcggtggcgacgctgaagccactgctccagacagcgaggaaggtgatgaccctatgccatcggcagaggcatctgctggttcacagcattcttccgaacaagaggaggctgacggtgaccctgcccaatgacgtaagtcagctggcaagaggtgtgccatggcatcttcttagcctgaagatcccgaccaacatggcaacatggtatgtggcgaagaaaaacatggatgcaggtgccaccaaggcgtagccaggacaatctgtctacgcaggaaaatcgaggggaatcagcatcgcgcgaaggcttcagaaacgtggtggcctctagtaccaattctaatgtttccgcggggttctgtggcaatggagagagagaaacaattgggtggtagctatcttgtctgaatggatttcattttccttgcattgtaattctctaatatatattatcatatgaaatagattcggccgtatttgcactgcgtaatgtaatgtctataagagttagtttgggagccagaaaattaaaggagattaaagggctaaagtcctcttatttaaaaatatccctttcttcc

SEQ ID NO: 117467 - DNA, 2012 bp, Zea Mays
gagcgagccaccacccaacctgaccccttcgccccgtatcgttcccttcctcctctcttttccccaccgccccctttcttggcgtctacccggcgcgaccaggaccgaatcctaaggccgccggccgccgccgccgccgcctgctcccgttggacacggtaaaacctcctccctcctcgtccgtgtcgccggggtccggggtccaagcggctgcgcgcgcggtctcgccgccggcgccgatctgggcgccgccggcgttgaccctgtccgattcgccccgggctgcgagacctctgcctccctgaccggttactcggaacttctactcgcctgtgggatcctccagcggatcagatgagcacatcgacttgagcaccacgctttttggttggaaggcgaatcgtagagctttcctgggtttctctgagggctcttctcagatgtggcgtcctccagagtctaccacatactgtttgaggagtcctggttcttttcggaatccggactaaccaagggctcctactgtgcacgactgcttgacaggatatttcggattattattatgtgcgtgcgagcgcgcgtgtgcgccttctagagagtttggagtaaagaaaccaaccctgcatctgtattctgtctgtctgtgctgcttcgaataagccttgcatctcgctgacttgggatataactatgccgaaggacaggagctcccgcgtttcctcttatgagagccgccgggctggtgcctccccatacttctcatcgtctcatggacagagcagttcttgtcgccggtccgaggagtcttgtggggcagcagcggcggcagcagcaaagcaagctgcagagtgggaggatgttcggtgcccggtgtgcatggaccacccgcacaacgccgtcctgctggtctgctcctcacacgagaagggctgccgccccttcatgtgcgacaccagctcgcggcactcgaactgctatgaccagtaccggaaggcctccaaggattcaaggacagagtgcagcgagtgccagcagcaggttcagctctcgtgcccactgtgccgtgggccggtcagcgattgcatcaaggactacagcgcgcggaggttcatgaacaccaaggtccggtcgtgcaccacggagtcgtgcgagttcaggggcgcctaccaggagctgaggaagcatgctagggtggagcatccaacaggaaggccaatggaggtagaccctgagcggcagcgggactggcgccggatggagcagcaacgggaccttggagacttgatgagcatgctgcgttcagggttcaacagcaatattgaggacgacagtggcgggcttggagacaccgaagaagggggagaggaagctgaaatgactccggcctccataaccatggtcttcatcatgccatctagaggctcaatcatgcagtacctatcggaacgcagcagaacgatcattctggtcagtcggaggcgagcaagcagcagcagcggtggcgacgctgaagccactgctccagacagcgaggaaggtgatgaccctatgccatcggcagaggcatctgctggttcacagcattcttccgaacaagaggaggctgacggtgaccctgcccaatgacgtaagtcagctggcaagaggtgtgccatggcatcttcttagcctgaagatcccgaccaacatggcaacatggtatgtggcgaagaaaaacatggatgcaggtgccaccaaggcgtagccaggacaatctgtctacgcaggaaaatcgaggggaatcagcatcgcgcgaaggcttcagaaacgtggtggcctctagtaccaattctaatgtttccgcggggttctgtggcaatggagagagagaaacaattgggtggtagctatcttgtctgaatggatttcattttccttgcattgtaattctctaatatatattatcatatgaaatagattcggccgtatttgcactgcgtaatgtaatgtctataagagttagtttgggagcc

SEQ ID NO: 117468 - DNA, 2149 bp, Zea Mays
gagcgagccaccacccaacctgaccccttcgccccgtatcgttcccttcctcctctcttttccccaccgccccctttcttggcgtctacccggcgcgaccaggaccgaatcctaaggccgccggccgccgccgccgccgcctgctcccgttggacacggtaaaacctcctccctcctcgtccgtgtcgccggggtccggggtccaagcggctgcgcgcgcggtctcgccgccggcgccgatctgggcgccgccggcgttgaccctgtccgattcgccccgggctgcgagacctctgcctccctgaccggttactcggaacttctactcgcctgtgggatcctccagcggatcagatgagcacatcgacttgagcaccacgctttttggttggaaggcgaatcgtagagctttcctgggtttctctgagggctcttctcagatgtggcgtcctccagagtctaccacatactgtttgaggagtcctggttcttttcggaatccggactaaccaagggctcctactgtgcacgactgcttgacaggatatttcggattattattatgtgcgtgcgagcgcgcgtgtgcgccttctagaggcatgattcttaaatcagagccttcgtgtttaaatccgagtttgccttcgtgttgaactatgagtgaatttcattttctgcgggagttgaagtcgatttagatcaggacagtgtttcttgcgatctgattaagcctttttttttcttgctattgtgatttcttttttcagagtttggagtaaagaaaccaaccctgcatctgtattctgtctgtctgtgctgcttcgaataagccttgcatctcgctgacttgggatataactatgccgaaggacaggagctcccgcgtttcctcttatgagagccgccgggctggtgcctccccatacttctcatcgtctcatggacagagcagttcttgtcgccggtccgaggagtcttgtggggcagcagcggcggcagcagcaaagcaagctgcagagtgggaggatgttcggtgcccggtgtgcatggaccacccgcacaacgccgtcctgctggtctgctcctcacacgagaagggctgccgccccttcatgtgcgacaccagctcgcggcactcgaactgctatgaccagtaccggaaggcctccaaggattcaaggacagagtgcagcgagtgccagcagcaggttcagctctcgtgcccactgtgccgtgggccggtcagcgattgcatcaaggactacagcgcgcggaggttcatgaacaccaaggtccggtcgtgcaccacggagtcgtgcgagttcaggggcgcctaccaggagctgaggaagcatgctagggtggagcatccaacaggaaggccaatggaggtagaccctgagcggcagcgggactggcgccggatggagcagcaacgggaccttggagacttgatgagcatgctgcgttcagggttcaacagcaatattgaggacgacagtggcgggcttggagacaccgaagaagggggagaggaagctgaaatgactccggcctccataaccatggtcttcatcatgccatctagaggctcaatcatgcagtacctatcggaacgcagcagaacgatcattctggtcagtcggaggcgagcaagcagcagcagcggtggcgacgctgaagccactgctccagacagcgaggaaggtgatgaccctatgccatcggcagaggcatctgctggttcacagcattcttccgaacaagaggaggctgacggtgaccctgcccaatgacgtaagtcagctggcaagaggtgtgccatggcatcttcttagcctgaagatcccgaccaacatggcaacatggtatgtggcgaagaaaaacatggatgcaggtgccaccaaggcgtagccaggacaatctgtctacgcaggaaaatcgaggggaatcagcatcgcgcgaaggcttcagaaacgtggtggcctctagtaccaattctaatgtttccgcggggttctgtggcaatggagagagagaaacaattgggtggtagctatcttgtctgaatggatttcattttccttgcattgtaattctctaatatatattatcatatgaaatagattcggccgtatttgcactgcgt

SEQ ID NO: 117469 - DNA, 703 bp, Zea Mays
actacctcacacggagctagctattttctgaagtcttgttttgtctgggatggtaactcttgaaattcctgttcctattcgggcctcattatgcaatcaaatggtattctatttttttcatcagatcattgcttgcctggataataatatttgacgctgaatcaaaaaaggcacacactgagattgccttgaagtttcagaaaatctagtcggaagcttagttttaaaattttggtttacagataaacaacattaatgttgtacgtaaaaggtattacagaatcttgtgtaagacactattagtcttgtctagtgcttccacactatagcttttgctgaaccgattgttttcgtatgccaatctgtattgcaggtaaccgtgaagtctattcatgaccctaaagttggcgtcatatttgatgcacggtcattgatccaagccctaaccattctcatatctgaacatatggatatgtgtgtatcaaaagttcagaacgtggtcatgtaactgaaaatgtaaaagttgtaagctgatctttcaagtacaaaaatgaatgtaaagtccctcttaacaatttattgttttactaatcgatccatagtgcgaatactcatgtttttatttcagctagcactagtgttgcaattctgcctgacttgacatgattaatgaaaaatgagacatgtatttttcaatttctgt

SEQ ID NO: 117470 - DNA, 781 bp, Zea Mays
aaatgtactctctatgttaaatgatttattgaccttttcactatgcaatggttatttcacaagcaagtattctaagcttgcagagctcattgcgttgcttgtatttttctgcagtttgtattagttacatcacttggcgctttcactaaaaatatgtttgtgtctgcatcctgctgaatctagatacttcttctgaatgggtcacatgacagagagactgctgggctgtctgcctctggttttgtcactgcaattaccgattctctaaatcggacttatggcgaccctcacaaaagcttaaagaatcatgtaagtttgttatatgttccgctaacaatttactggtagaatctgaagctatggaggagtcagacattgcgatttcgagaatgcaggaggccaagttcctttagatattgaaaatttggcagctcagggaatttttcatgtggtaaccgtgaagtctattcatgaccctaaagttggcgtcatatttgatgcacggtcattgatccaagccctaaccattctcatatctgaacatatggatatgtgtgtatcaaaagttcagaacgtggtcatgtaactgaaaatgtaaaagttgtaagctgatctttcaagtacaaaaatgaatgtaaagtccctcttaacaatttattgttttactaatcgatccatagtgcgaatactcatgtttttatttcagctagcactagtgttgcaattctgcctgacttgacatgattaatgaaaaatgagacatgtatttttcaatttctgt

SEQ ID NO: 117471 - DNA, 1790 bp, Zea Mays
cgacacagtactccggtccgaccggtcggactggaagattaccgccgcggacgcgcgccggtcgtttccttggcgcgggccgccgcgctgcttcttccgcagtccgcccgcccgccccccttctacttccaccctacccgagagaggtcggaatggcactcgtcgcgtgcccgcgctgcaacataaccccgccccaagcctccgcttgcggaatccgctgcctactccgcgcgccgagatctgcagcgtccaggcccccgccgtggcgtctccgccgcagccgcgccatggccgtctacgaaggctggcactctgctgccgcaggcgcagacaccgatggaggcgctccagctcctcacgtgcccccgtcgctgctcgttttctcaggcgggacagcatttaacggtgttgttgaagaattgaagaaagtcactactcgagtcgcgcacgtgctccctgtttctgatgatggtggaagcactgctgagattgtgcgtgtgcttggcgggcctgctgtgggagacataagatcaagatgtttgaggttgtctgatgaaagtactgcagaagctctttctgttcgaaaattgcttgggcatcgtttgcctattgatccttcagaggcaaagctggaatggtaccagattgtagaaggagaccacactttatgggagggagtctctcgtccatacagggaaacaattcgtgcctttttggtctactttcacagtgagatacttcgacggtcagctgaaatgttttgcttcaccaatggcagcattggaaatttcttttttgctggggcacgcatattcttccagtcgttggatgctgcaatttttttgttttcacgcgtatcacagatcccagcagaaagtcttgtgcttcctgttatatccacaaatgacagacttactctgggatgtgaactatgggatgggactatcattcgtggccaaaatgaaatatcacatccaagcaatggacgccgagaaattgtcaacaaggattgtaattcatgtagcacacttccttcaaggatcaagcgtgtgttttacatgtcaagtgaaggcagcaacctattgcatgaggttttccctgaagttaaccatacagttttggagcagctaagtaaggtggactgcattgtctatgctatgggatcactctttacatcagtctgtccatcactggtattacgtggcattggtgagactatagcatcaagatccatccccaagatacttcttctgaatgggtcacatgacagagagactgctgggctgtctgcctctggttttgtcactgcaattaccgattctctaaatcggacttatggcgaccctcacaaaagcttaaagaatcataccaatgactatgtaaatgctatattggttccagaaggaggccaagttcctttagatattgaaaatttggcagctcagggaatttttcatgtggtaaccgtgaagtctattcatgaccctaaagttggcgtcatatttgatgcacggtcattgatccaagccctaaccattctcatatctgaacatatggatatgtgtgtatcaaaagttcagaacgtggtcatgtaactgaaaatgtaaaagttgtaagctgatctttcaagtacaaaaatgaatgtaaagtccctcttaacaatttattgttttactaatcgatccatagtgcgaatactcatgtttttatttcagctagcactagtgttgcaattctgcctgacttgacatgattaatgaaaaatgagacatgtatttttcaatttctgt

SEQ ID NO: 117472 - DNA, 791 bp, Zea Mays
cctttgctgagtaactcggtaaattgatgggtgtgcattaattcgtagcttgtagagatgatgttcatatgtatggtagtcgtttctgtcctctcgatgtttttctcgataatgattaccaaacttattggaaatgatggagcgatggttctcttagatggaaacaatttggttgtagcaccaatttgcgctgcataatactactagaagggacgtggtaagtgataatttagttggatgtgtcttttcaattattattgttcgaaatgtgcacttgttcaggtgagacacttggttctatattgtagtcgactgtcgatccacctagcccaggacatcaatgctccatcgaaagttttctcacctgccgtctgcgccacctttccgtcccactcgagatgaccccaactgcctacagatgagtaggctgtggcaagtgaaacttgacattttggagcttgtgtacatacggcctgagtttggcggtgagcccagtgcccggtgttgaagatgaggtcgtcaagtccactgcaacataggccctgagtttgatgcgttcgtcttttgtttccaacttcacgaggaaggggcaccagaagaacactgcggattctgtgttttttttaattgggtgtgtcagaacgaaatgtgttaattgattttaggtgcaagattgtagtcaattaaaagataaatagagagcgttgggactctaggatatgattattggtaattaatttgttgccatgctcaagaaggcatgaaatttgaaaacgcacccgggaattaat

SEQ ID NO: 117473 - DNA, 538 bp, Zea Mays
aagtttagaaaaattatctcacgtttgtttgaagctaggtttgacatttgctgctatgaaaattttagtttgtgttgtggaggtgttagttttgcttaaaaggttacagtgattggattgtgttattgagggtaaatgatgcagttatctgccttggtcaatgtggtgatagttgtaatattcctaatttctgattgtgatttgttcttttctaggttcatgatttttgatatgcgtctagatatagattatgtctagatacatgagtatctcgaaaaagctagctacggagccttacaatttggaaagaagcaagttgtgtttttgtgtacattatcttatgtttaggtgaacaagaatggcctagaatttggaattgagcattttgcagtcttggttcttattgattgtttattagtagccaatttaaaagccactgaggtgtttttttcctgctatgagaattgtgccactatttatatatatagtggtacatgttcgatgtaaatttgtacctacgttgcaatgcctacatatt

SEQ ID NO: 117474 - DNA, 1872 bp, Zea Mays
aagcacgccgatccctctttctttccgtcgtcctcctcgtcccaagttctaacccggccgccgcacatcgccaaaccctaactagggttttgccaagccctctccttccctatcctcacccccatggaccccttttccaagaagcgcaagcccgacgagaacggtgccgtcaccgcctctcccgccggtggggctgccacgctgggcctcacccgcgacgacgtcatccgccttctcgagccgctctcccgggaccagcttgcggacatagcggccgccgccgcgctcgtctcctcgcaagcgctcgacgccgtgcgcgcagccgccgaccgtgacccggccctccgcaagctcttcgttcgggggcttggttgggagaccacatccgactcgctccgcgccatcttctccgcttacggggacctggaggaggccgtcgtcatcactgacaaacccacggggcggtccaagggctacgggttcgtcaccttccgccacgccgattccgccgtcctcgcgctcaaggagccatccaagaagatcgacggtcgcatgactgtcacgcagctcgccgccgccggctcggctggtgggcccgccggtgggcccgccggcagtggcggtgctcctgtgtctgatgtgtcgctccggaagatcttcgttggtaacgttccggcagacatggcatcagagcgtctccttgcgcattttgcctcctatggcgagattgaggaggggccgctgggttttgacaagcagacgggcaagttccggggttttgcactcttcgtatacaagacaccagaaggtgcgcaggcctccctagtggacacggtgaaggtaattgacggccaccagcttgtatgcaagcttgccttagacgggaagaaggagaagcaggggcaatcacagcaacctggacctggcaatcaccagcagcagcagatactgccgggtggtccgcaggacattcagggagggcttgggcttgggtcacaaatgggagcacagtatggtgtccctggtactggtatgccttcatttggttttggtggtgttggcggcgggtttgggggtccaaatccttatggtaacatgccatcttccatgggtggaggtggcgcaggtggtttagggtcgatgggaggccaggtgcccagtggtttggctagtgctggggctggtgcatttgggcctggcggattgggtggtggttcatttggtgtatcatctcagttcggtgctgctgggatgggggcatatggtggccttggaattggtggaggctctatgtaccgcatacaacagggagcaggtgggctgcctgcaggcacatttggtgatggagggagctacccacctccaggttctggtttccggggccaggaccctcaaggtggaatgtctcctcctggtccaggtggcagggctcctcctatgtatcccaacgtgccaccttatttctaaggtgtttgcctcttgggagcatatccgtttcttgtgctgaattcagaagtgttgttacatggatgtcttgcatattctggctacttctgatctgaaatgtggaatgagtttgcactcctaaattttgctgctaagggatacatgaagctagtttgttgtgatagttgtgataatgcttatctgtgataatgcttcacatgtacttatgactgctttgcagtttcattttctatatagataaaagaccttgcatgaagtgtatgttgtgttgattatcattgtattatcatatgaaatccctttattttcatggtctgatgatgtgtttaatcttatggctttctatttgtgtatatttttggtggaccaagggcaatctatatgtatgattggtgattgtaatgc

SEQ ID NO: 117475 - DNA, 1576 bp, Zea Mays
aagcacgccgatccctctttctttccgtcgtcctcctcgtcccaagttctaacccggccgccgcacatcgccaaaccctaactagggttttgccaagccctctccttccctatcctcacccccatggaccccttttccaagaagcgcaagcccgacgagaacggtgccgtcaccgcctctcccgccggtggggctgccacgctgggcctcacccgcgacgacgtcatccgccttctcgagccgctctcccgggaccagcttgcggacatagcggccgccgccgcgctcgtctcctcgcaagcgctcgacgccgtgcgcgcagccgccgaccgtgacccggccctccgcaagctcttcgttcgggggcttggttgggagaccacatccgactcgctccgcgccatcttctccgcttacggggacctggaggaggccgtcgtcatcactgacaaacccacggggcggtccaagggctacgggttcgtcaccttccgccacgccgattccgccgtcctcgcgctcaaggagccatccaagaagatcgacggtcgcatgactgtcacgcagctcgccgccgccggctcggctggtgggcccgccggtgggcccgccggcagtggcggtgctcctgtgtctgatgtgtcgctccggaagatcttcgttggtaacgttccggcagacatggcatcagagcgtctccttgcgcattttgcctcctatggcgagattgaggaggggccgctgggttttgacaagcagacgggcaagttccggggttttgcactcttcgtatacaagacaccagaaggtgcgcaggcctccctagtggacacggtgaaggtaattgacggccaccagcttgtatgcaagcttgccttagacgggaagaaggagaagcaggggcaatcacagcaacctggacctggcaatcaccagcagcagcagatactgccgggtggtccgcaggacattcagggagggcttgggcttgggtcacaaatgggagcacagtatggtgtccctggtactggtatgccttcatttggttttggtggtgttggcggcgggtttgggggtccaaatccttatggtaacatgccatcttccatgggtggaggtggcgcaggtggtttagggtcgatgggaggccaggtgcccagtggtttggctagtgctggggctggtgcatttgggcctggcggattgggtggtggttcatttggtgtatcatctcagttcggtgctgctgggatgggggcatatggtggccttggaattggtggaggctctatgtaccgcatacaacagggagcaggtgggctgcctgcaggcacatttggtgatggagggagctacccacctccaggttctggtttccggggccaggaccctcaaggtggaatgtctcctcctggtccaggtggcagggctcctcctatgtatcccaacgtgccaccttatttctaaggtattcatttacactgcttccatatgttattagttatatctataggttagttactgttccagtatgatgtttttgaaacctggatgtatagtgaaatccatggttttt

SEQ ID NO: 117476 - DNA, 1100 bp, Zea Mays
tgagcacaatattatggaataagtaatatcatagagcccacgaaagagacaaggaagctgagcctagctggttgagggtgtgaacgcccacaacacttaggttcaagtcctagaggtgaatttgagtgcttattttcttcttaatactgatataataaagccacctattccttttaggattggtctagttttatcaatggagtgtttcctaaactaaacaaggttttacaagctgcagggaatgaaggatccatatggtgtgcagctgaagcaatgaatctcttgagtattgttgttatgaccggcgtcacctataggcactggagccgcgtcaatggctaggccacgcgtgcagttaggggcgaaatactcaagattttccttagatattttgcattgttttcataaaaaatagaatcatgattgattcttgttaggaggtttccattaaattaaagattgcttgcttagggatcaagtaagcctctctctataaggagagaaggtgtatcaatctaatcaaaacaattatcttgcctgacctaaagggtaatctcccacgtctatctcccccgctcgcttgctccctgtgcgcgaccacagctcctatccactgctaggggtacacatgaacacgtcccgaccatcaatctcctacccgtacaacctacagtcacggtataatcctagatcctatcaatctggtattagaaatgtcgggtgacgatggctccaagaagtagccaccgaccccaccatcgtcggtcgtcgacgccacgatgaaagtcttggaggacatcgccacgtagctagccaatttcaccacccgcatgtcatcccaagagcaccagcaggcgtttgcacaagggtttcccctatgggatgccaaagtacggggcgacgacgttcctgtccttcaccaccactgctatgccaccctccaccctgcatgtcgtgctgcctgtcactctcctgcacaccacaaaaaccactgttgccccatccgccctcttcccatccaccaaatcagcttccctccctcaccatcctcgttgccaaagttttcagagggggcacctttctcatctgcgcgggcgccc

SEQ ID NO: 117477 - DNA, 1747 bp, Zea Mays
gtcagctaagcgaacgtctcgattcgtcaaagtctgaaattaagctggacaccgctcccgcaccaaaccaaactaattacctcttcccgcgacctcctcccccggcgtacctccggagatccaccccgacccaccaccgcgtgcctcggcaatggccgccgctccgaccaccgtaaccaagtccccgccgtccctggtcccgccggcggggcccacgccaggcggttccctcccgctctcctccatcgacaagactgccgccgtccgcgtctccgtcgacttcatccaggtcttccccgcccctacgtcggggaaggaggaccggagcccctcctccacgatcgcggctatgcgcgagggctttgccaaggcgctcgtgccgtactaccccgtcgccggccgcatcgccgagcccgttccgggggagcctgagattgagtgcacaggggaaggggtgtggttcgtggaggccgaggccagctgctccctcgaggaggcgcggaacctcgagcgcccgctgtgcatccccaaggaggagctgcttcctcgtccgccggccggggtgcgcgtggaggacaccctgctgctcgctcaggttacaaagttcacatgtggtggatttgctgtgggcatttgcttcagtcacttggtgttcgatgggcagggtgctgcacaatttctgaaagcggtgggtgagatggctaggggcctccctgagccatcgatcaagccaatctgggctcgtgatgccatccccaacccacctaagccacccctaggtccgccgccgtcattcaccgcattcaactttgagaaatcggttcttgagatctctccggacagcatcaagaacgtgaaggatcaggttgcaagtgaaaccaaccagaagtgttccactttcgacgtggtcactgccataatcttcaaatgccgcgccttggcagtcgacttcgcgcccgacgctgaggtccgcttgggcttcgcagccagcactcgccacctgctgagcaatgtgctgccctcggtcgaaggctactacgggaactgtgtgtacccaggtggtctcaccaagaccagccaggaggtgaaggaagcttcgcttgtggagatcgtgaccgtgatcagggaagccaaggaagctctgtcatcgaggttccttgactggttgagcggcggcgccaaggagaaccactacaacgtgtcgctagactatggcaccctcgtcgtgactgactggagccatgtgggcttcaacgaggtggactacgggttcggtgagccgagctacgtgttcaccctgaacgacgacgtgaacatcgtcccctccgttgtgtacctgaagccgcccaagccgaagcagggcatcaggctggtcctgcagtgcgtggaaggccatcactctgccgtgttcggcgaggagttgcagaagcatgcatagagtgagtgtattctacagtgggaatctgttgtattttatttgttgtgtcaaattgctgctcccggaatttgcttgcaataaggcagattggtcgtgtttatactttgtaccattatcagcacgttacattatacatgtgatgaatattgacagtgacgaaagaataataatgttcccatttggaacaaattatttcagattcgttggcctgctgtaggttcctggtgtctcgagttttaacgtgtgtaactgtgttatgtataagtataactctgacagtgtttgatgattgatcaacggcagaaagaa

SEQ ID NO: 117478 - DNA, 2109 bp, Zea Mays
tcgccgtctccgacgatggaggaggcgacggtgatgtcgcagctgggccgcagcaaggacagcggcggcggccgccggaggcagcggtaccgcatcgagaccagggcgctgtcctacgtgctcccgccgcgcgcgcttctcgtcccgtggtcgtccgccaccaaggggaaggaggagaggctgctgctgcgcggcgtcacctgcgaggcgccgccgggggagctgctggcggtcgtggggcccagcggggcgggcaagaccacgctgctctcggtgctggccggctcggcggacccggcgcgggtggtggccggggaggtgctggtgaacggggtgcccatggacgccgccgggttccgccgcgtgtccggctacgtgccgcaggacgacgcgctgttcccggcgctcaccgtcgaggagtcgctcgtgtacagcgcgcgcctgcgcctgcgcctgcgcggcgggggcgggggcgggacgccgtccggcgcggagcaccgggcgcgggagctcatggcggagctcggcctcgcccacgtcgccgcgtccagggtcgccgacgtgtccggcggcgagcggaggcgggtgtccatcgggatggacctcgtgcacgacccggccgtgctgctgctggacgagcccacgtcggggctcgactccggctccgcgctccacatcgtcaagatgctcagggacatggccgccgcgcacgccaagaccgtcgtgctcaccatccaccagccggggttccgcatcctcgagctcatcgaccgcgtcgtgctcctcgccgacggagccgtccgccaccacggctccctcgacttcctccagtcgcgcctcatcgccaccggccacgccatccccgcccacgtcaacgtgctcgagtacgccatggagaccatcgactccctcaagcccgacgtcgccgtagccacggcggtcaccacgatcaccgccgccactccagcgaaccgacaagacgggccgcgcgcggggtacgccaactcgccggcggcggaggtgcgcatcctggcggggcggttcgtgaagacggtgctgcggacgccgcagctgttcgcggcgcggatggcgcagtcggtgctggtcggcgcgttcctcggcagcatcttcctgggcaccaccgacctgcagtcccgcctcggcttcttcgccttcaacctcacctacctgctcacctccaccaccgaggccctgcccgtgttcctccacgagcgccgcatcctggagcgggagacctcccgcggcgcctaccgcgtgtcctcgtacgtcgcctccaacgccgccgtcttcctgccgttcctcctcgccgcggcggtgctgtacgcggcgcccgtgtactggctcgtgggcctggcgcgcgagcccgccgccttcgcctacttcgcgctcgtcgtctggctcgtcatgctcaccgccaactccttcgtcgcctgcctcagcgcgctggcgcccaactacatcgtggggaactccatcgtcgcggggctcatcggctgcttcttcctcttctccggatacttcgtggcgagcaagaacatcccgcgctactgggtgttcatgcactacgccagcctgttcaagtacccgttcgaggccctggtggtgaacgagtacggcggcgcgcgcggagccagggagtgcctcgcctcggccggcggcgcggggggactgtgcgtgctcgacggcgcggggctgctgcggcagcaggggatgagggagggcatgcggtggagcaacctgggcgtcatgctcggcttcgtggtcgggtacagggtgctctgcttcgtcatcctctccttcaggtgccaccgcacggggaggtgagtacgggagaaaggcgggaaaccatgccagtggcggccattggcatgcaagcaaactgcaaatagtactccgctcgtttgaatttcacctcattctcctccttccttttcgtgattttctccacgaaacatcgattcgaattaggttggatacgaatatatatatgtatatgtttgggagatactactgattgtagtggtcagtggatgatgttcctgtgtatcaatagtggggttcatggcatgatgctaatgggagaataaa

SEQ ID NO: 117479 - DNA, 1261 bp, Zea Mays
atgcgtacatctacttgcctcagttttttcaccctcaccgtcctgccacagacattttggctcaacatcattagcatgccatccattgccattttgccacctttggtcctgaatgatgaggattattatcctgagcgaccaggggaaccagatttatttattgagtagtagatgtaagtttaaatctaaatgcaagttcaaccatccaaaggaaatggtgaacgcattaggaacaagaacagacaatgaatcactaatcgctgataccactatcttaccagtgaggccttctgaacccgtttgttcgttctatgcaaaaacaggcaaatgtaaatttggtgccgtttgcaagttcaatcacccaaagctagaagatattaagacaccatctttgattgcaaaggaaaccatatatagagcaacaactgatgcagcagcgcacattggtgggacagatgattctgttccagcaaagacacatgcaccaattgccccagccgaggcacataatgcaaaggggcttccaataagaccaggtgaagtggattgctcgttttatatgaagacaggcagctgcaaatatggttctatttgtcgcttcaatcatcctgatcggttgagcctatgccaatgatctatcctcaaagacctggagaaattgtttgtgatttttacatgaagacaggatcttgcaagtatgctcagaattgcaagtttcaccacccttttgaccggtctgcacctcattccaaagaaaacgaggatacacagcagcctgtggcacttactcttgctggccttccaaggagagaggatgctgaggcctgtgccttctacatgaggtctggcacgtgcgggttcggtgcgcgctgcaagttcgaccaccctcctcgccaggacgatgtctaatacggtgtactccctccgtttcgttttagttgtcgctggatagtacaaaattgaactatccagcgacaactaaaaaaacggaggaagtatcctgtatcaggatgtggtaccatgcgaatcgcactgttaatgcttgatgctgtcactgccatggtgggagcctgacttgtaaagttcagtatcaccggaagtgtttgtcggcgcgtgctggtactaacggtgtaccttcggcggttggatggtgtcaagagtaaaaatacaccgcctgttctcaaactttgactggatgctaatctccaaaatgtgagaaccaagttaccgtaacttgagttaatccgcttgcatggttatg

SEQ ID NO: 117480 - DNA, 1382 bp, Zea Mays
atgcgtacatctacttgcctcagttttttcaccctcaccgtcctgccacagacattttggctcaacatcattagcatgccatccattgccattttgccacctttggtcctgaatgatgaggattattatcctgagcgaccaggggaaccagatttatttattgagtagtagatgtaagtttaaatctaaatgcaagttcaaccatccaaaggaaatggtgaacgcattaggaacaagaacagacaatgaatcactaatcgctgataccactatcttaccagtgaggccttctgaacccgtttgttcgttctatgcaaaaacaggcaaatgtaaatttggtgccgtttgcaagttcaatcacccaaagctagaagatattaagacaccatctttgattgcaaaggaaaccatatatagagcaacaactgatgcagcagcgcacattggtgggacagatgattctgttccagcaaagacacatgcaccaattgccccagccgaggcacataatgcaaaggggcttccaataagaccaggtgaagtggattgctcgttttatatgaagacaggcagctgcaaatatggttctatttgtcgcttcaatcatcctgatcggtcagttgtggatatagcttttatggctccagttcaagctactcttccttttccagcacccattgtccctgcagtggcgttaaatccggctgcaaattttctgcaaagctttgatttccatgcaactcacgtgccggttgagcctatgccaatgatctatcctcaaagacctggagaaattgtttgtgatttttacatgaagacaggatcttgcaagtatgctcagaattgcaagtttcaccacccttttgaccggtctgcacctcattccaaagaaaacgaggatacacagcagcctgtggcacttactcttgctggccttccaaggagagaggatgctgaggcctgtgccttctacatgaggtctggcacgtgcgggttcggtgcgcgctgcaagttcgaccaccctcctcgccaggacgatgtctaatacggtgtactccctccgtttcgttttagttgtcgctggatagtacaaaattgaactatccagcgacaactaaaaaaacggaggaagtatcctgtatcaggatgtggtaccatgcgaatcgcactgttaatgcttgatgctgtcactgccatggtgggagcctgacttgtaaagttcagtatcaccggaagtgtttgtcggcgcgtgctggtactaacggtgtaccttcggcggttggatggtgtcaagagtaaaaatacaccgcctgttctcaaactttgactggatgctaatctccaaaatgtgagaaccaagttaccgtaacttgagttaatcc

SEQ ID NO: 117481 - DNA, 1233 bp, Zea Mays
caagcaagatcattatcataccaatctctctctcttgcaatgaccctctcaagcgcctagggctgctaccctagaaccaagcctgcggcagaggggtataacctcgccggagaagacagctatccccatggaccaaaggtccatgacacttggtatcagaaccaggttatcctcaccaccaccagccgcccatccctcaccaccatcagccgccgcgccatcagccgccgcaacgccctcccacccgccctctccaactccagatgcattcactcggctcgaagagagttttggccgtctcgcagagaagtgggatcagttcgttgtgatgttccaccgctacaaggagaagacagagaaggaactccaagcagcggtgcggcttcaggcggcagcgcgagggttcctggcacgccgccaggtacagtcccttcgtggggagaagcaccttgctgtggcctccagggccaccccatggccgtcatcacatgagcaggccgtggtgcgcctgcaagccgcagtgcgcggcttccttgttaggcgggcggtgcggaagctgcacttgctgatcagctcatcgctgcaccaactcgcagcctgcacgcccaaccaccaggtctcgtctacactttttgaaccccctgcagaagtcgagatctgggtatgcagctcccctgcacgaccaaagagggtcgtctccttcattcgggcaactaccttggtgctggacagacccaacataagaacgggctggttcctccttcacctttcattcaacgtgaagtccgcagttcaactctttccttgggatccaggaggacatagctgcagttcaaatttatattttagttccacattttttttggtattttcgtcttaaataataaaggtaagccgagatgtaaaaggcttaaccttaagtcgtgtcaggtaagtctatggcagctcgaggacgagctggtcctcaagggagggggagatgtcatgtgcatcatagggagcgagaggcaacaaccaggctgggataaggctagagaataagattgagatgagctgggataaggctagagattaagattgagatgagagaattgtggagagttggttagcagcagataagtccaagaaagtaggagttagttgagagtttgtaggagaagttggttagccataggactatttataagccgcatggcagcagggaataaagcaagcaagatcattatcatacca

SEQ ID NO: 117482 - DNA, 467 bp, Zea Mays
gaggtcgagaccgagcagagagagcagcctgacagcgcggcagcccacgtctgcggcaagcggggctgggcgccgagcaggaactgagcgcgcacagaggagaaacgatgacgagcagagagcttcgcgcgcgcaggaagctgggagcttgtgcaaggctgagcagagggcacatctacacgcgcaagcagggagaaagggcaccgcggcaagcgcaggggagcagcgcggtcaaccatggaagtcggggcaagccaggagctaggagggagatggggctgggcgcgcacggccaccagagcacggtgcaaggaggctgagcggcacatcatcacggccgggacaacgacgccatgaattgagtctgcaggggcaccatggccagcagggagatgggcgctgagcaccggagatggaggaacgggtggggaaggggctcggctgggagatccggtcaggtgctgctg

SEQ ID NO: 117483 - DNA, 1747 bp, Zea Mays
aaagaacggttaccgattcaactagaattccaagccaacgttgacgattcttgttcaggccttctgtcgagctcctggcaagcgccctgtgagttccacttcttcactcaaacttctaaaattgcagcggtgatcgaagacgagcacgtagaggcagagttggagcgaacacgatgacagcaaggttgctgctatccgaaacacggatccggcgacgaagaaccaaagttgtcgacgatggggtccctgacgagcgttgctttcgaacttcatttttatcttgaaccatagctctattctcactcccacacacacgcaggcgaggcaaccacaaaaggaacttgacgacgatggcagacacaaatatagacatgatgccagggcgtcgagtaatgcccagcaatcacgacaaagctgactgcgagtaggataacgatgcggtactgagtggcgcgcgagcagagaggcacaagagctagcgagttcggacggctggagcagagtaaatttgagggccaggcgagacgggcagcgtgacgatgccgaccacaacgagcacgacgtccggggcacagcaggggacgacggaagggagagcgacacaggggcgagctggatatcgacggtgttggggttctgcgacaaggcaaggtcgagcacatagagcgactagctacggatctagagcaggccgagcgaagctcgtggctgcgcgcagggaaaaccaggagagcgcgcggcggggcgagcgcagggaataggaggagcggccgagccgggcagctgtggccagggtgagcaggaacacatgcgagaggtcgagaccgagcagagagagcagcctggcagcgtggcggcccgcgtccgcaacaagcgggctgggcaccaagcaggaactgagcggtcgcagaggagaaacgacggtgagcagagagcttcgcgtgtgcaggaagctgggagcttgggcaagaccgagcagagggcacatctacacgcgcaagcagggagaagggcaccgtggcaagcgcaggggagcagcgcggtcagccatggaagcaggggcaagccaggagctgggagggagatggggctgggcgcgcacgaccaccaaagcgcggtgcagggaggccgagcggcacatcatcacggccgggacaatggtgccatgtatggagtctacaggggcaccatggccagcagggagatgggcaccaagcaccggagatggaggaatgggtggggaaggggctcggctgggagatccggccaggtgcggctgtgagaagctcgaggcacgccatgggagccgcgcggtctgccgagtagggagccggcgcgcagggagctccgagcagagggacgcagtcatggtggacggatcggcgccatgggcaagagagcacagagcagaaggagctccggcaaggagagagtcgaggggaagacgaggagctgggacggtcagtttcgtcacgcgcgcctccgcagcctgcacgcgctagtctccgcggccgactgcgcccgcgcggccaacccgacggcaaaagcgagctagagcagaaggggcgcgacgaaggaggctcggtacgaaagaactccgaggaggggcaagctcgcgcggcagggaggagctggggggtcgcgacgagcagagagggtgagagcgaaggggcggctgggcagcttgaggaggagaagagggtctgggcgcgtagaagacgagcacggctgggaaaaatcaggcgag

SEQ ID NO: 117484 - DNA, 696 bp, Zea Mays
atgctgccccgcttgcccatccgcctcgcgccgccgctcgccggcgtccttcgcggcatctgcgctaccgcgctgccgcaatccaagcccccacctcaacccctctccccgtccgacctggacgcgatctccgcgctcctcccgcgcctcctctacgcgggccacgtccccgccgccggccgcctcctctccgcggcgctcctcctcccgggctcccaggacggcctccccctcgattccctcgccgcgcaccttgcctcgcttccgacactctccgctgccttcgcgctcctcaccgcgctgcgccatcacccggcccggccctcgccgctcctgctggcgtcgccgctgctcggcagcctcctctccctgcgccgcgcgcgcgacgcctcctccgtgctgcgctggctctgccgcccggactccccgcgccggcccgacgccgccacctacgctgacgccgtcgaggggctctgccgccttgaggaccccaggggcgcgctggctgcgctcagggagatggcaacggacgggttgcaggccacgcgggagctgcgggaggcggtgcgggacgcgatgctgcaggacgccaggatcgaggaagcgtgggcgctggagcaggcgatgcgccagccggaggagacagggaagctggtggagctgattgacaagcttctctcagagtgggaaccctga

SEQ ID NO: 117485 - DNA, 2343 bp, Zea Mays
gaatctatttcaatcaaatattgagtaatcaaatccttcaatttattgtttacgagatcttttaatttttaaaagtggattaatcggacgaggttaataggaaacgcagacataaaattgggactaaaaatgtatggacaggaagggcacgcagagaattttgctgaacgggctgttttacccagctccacattctcaaggcctgcctgaccgaacccgcgaaagaagtctgatcactattgcagtcggcttctcgaaaccctaatacagggccactggtttcgctccgcacttccgccgctatggccgccgcaaccttctccgccgccggccgccggctcctctccaccgccgcggcagcggcagagaaaaccgagctccccgtccctatcgcccgtcttcgccagctcgcccgcgctggccgcctcgacgacatcgacgcgactctcgcgcccctgttcccttcccaccccgtcgccgcgctctcggccctctccacgctgggcctccccgaccgcgcctccgctctgctcggcaccatgacgtcgcccaataccgcgcacctgaacgcggtcctcggtccactcctccgccgccgccgcctggccgggctcgtgccctcaatcctcgccgcgcatgcctctgtcccgcgggacgccgtcacggacagcatcctcgccaagtcgctctgcctcacctccggcgccgactccgcgctccacctcctccggaagccttcgtcgggagcgccgccgtcgctccagctcttcacaaccatcatcgactccttctacaagcaacgcctcccgcaccgcgccgaggagatgtggcgcgccatggtccaggaccacggcatcgcccccgacaccgctgcctacaacgccctgctcacctacaagtccaccaacggcaccgtggatgaggtcaaggaggtgatccgcgtcatgcgcgaggaggccagcctacggccggatgtcgggtcctacaacgcgctgatgcgggcgatggcgcggcacaaaagattggatgaggcggtggaggtgtaccgcagcctggaggccgggaagaaggcggacgtggtgccggactgcgcgacatatagttgcgtggtgggcgcactttgtggcgcagggcggtggtcggaggcggaggacgtgttctacgcgggagtgaagcgccggaaggtggccgaccttggaacggtgcgtgtgctggtgcgcggtcttaaggacgctggcaaggggcgagcggcaaggcgggtggttgtcggtttgtgcaagaagttccccgagatgttcgacgggccgtggagggagcttgaggtggcggccgggctgaactcctccgggaaggaggatggtgatgttgaagacggagccgacgagaagcttgcgatgacaagggccaccgtggcgtgagcgttcgtggcaactggcgaaatcggttttgaatggcagcgttgcatcatcattcaaataagcaaattcacagtaccacaataacatttgagtattagctacttgttcatcctatttggtgttctttggaaatttactcgtttaatctggtattaatcttctagcgtcgtatctcactgtaacacatggcttgtttctggtctggtgtcccatggcccacaactcggagatgggtacaagagcagcatcagagagatggggaggggagaagaaaagaatcgggtcttatccccttccgtcgccggcttccgtccgaaggcggattcagcttgcggtgcgctcacgtcccggtggaaccatcacaaatgacaccgacaacctcagcgccgaacccgtttttgacgatgtggtgttcgaggacattgagaccaacttcgacgacctcgccgagctcgacaagggaccggtgttcgacactgattcgatcaccgaccatatcaccgtctccgtgacatggtcggtgattctgagttcaccgtcttcgacaccgactcggacaggtcgttgtcggtatttgacaccgagccggtccatgatgtcgtgcttgccgtgttcaaccaaggaaacgatggctcctcgactgcacacaccggcgtcctcaacgggcaccctgcctttgacgtggagctcgtatttgatagtatctttaacactagtgcgcccttcatgtgtttgacaaattgtctgagctacatcgatgacatggtgtctgctacttttaaggaggggcctatctttgataaatggtgtctgctacttttaaggaggggcctatctttgataaggaggctgtagtagaagcaatacaggaggaaagtggcagagattactatactgctcacggtgagaatgccatgtttattgc

SEQ ID NO: 117486 - DNA, 862 bp, Zea Mays
taagatataatattgacaaccaagattttcttctatctttatttttttgttgtttgtgaaattccacagataagacctgtatgctatgtcgtgagttatttttcttaatcaacaggaagaagtgaagtgagagatttcattagttcttgaaccaaccaaacatttttgaactgtaaatacagtatagcactataataaaagtttgttagaactaaagaaacaattgcacaaacaaaacaaaaaaggagagcaaacaaaaaagactgtacaaagcctgagcagggtgagaaacaaaactttttgaatggaagctggtctttttgaatcacaaaacactatatattttgctgtgtaaaatataggtgattaagaccacattaaatataggtcacatccatgcaattctgtttgttcagtacgatcattactaacccattttaagatcatacatttggtatatggggtataatataaatggtaattgttgtcgtgactattcatttttgcataaagttattttttcctaaaggtgttagggttattcgttggagttttgctggagaagcaaattgttgtaatatgcccaagtctgggtgtcctgtctgcaattgttttgttagttatattgatgacaaggtcgttccagtggcaaagtctattgcttctgaagacgatactaagatggatgttgatgttgtggctttgatttcaatcaaacatggtatccttgagattgaaatatattgctacctgcttgtactgatttttcttattgattagaagaaatacgatgaggtacatctaaaacgctgattttccttatgtttgatgtgtaaaataatattttgactgcttttgtatt

SEQ ID NO: 117487 - DNA, 924 bp, Zea Mays
accaccaggcaccagcatagatctcgtgctcgccactattattctgcacagcaacgcatcagccttctggaaccatctcgccgccgccacaccacaatccacaacccgtcgaagcgaagcaagcaatggccggagtcggatcgaaggccctcgccgttgccgccgttctggcggccgtctccttctcggtggccgccgcggccgaggcgcccgcgcccagccccgtctccgccgccgtcgcggcgtcgtcgcccttcgccgcggctctcgtcgcctccgccgccgccttcctcttcgccgccgtccgccactgagccgatggggcctcgtgcctgcaggctacctagcagtacttcccccgccgccgccgccgccgcctagatctatttattggagtgctatccagtagtactagtagtagtgagatttgttcggtgctgtcgtgtcgtcgtcgcattttggtcggatctggtttccttggtgcagggagggtttctataccatgtcgcggtgtcggttgtgtgatctcatcccccccttgtagatagtactctgctatctcgtcgtgatcgtgagtggtgattctgtctggttgatatttgctactgatattggtcccatttgagatatgcgttgctgctagtctcgtctttctctgcgcttgatttatcgttatacatcgctccatcgctcgctgcgaatttcgcgtcgctgtctgtgacgcgttagatttgattctactagggatccgcgtcgcgttgcatcgacgcaggtccgtttccgttcttctgtggatgtagccaggatttaaaaaatcaaataaatcattgaccatctgaaaagagtgactggttaaaataggagtatatctccttcaggtgtgttttctcgatctgctctcaggcaggagaatgaaccttgggg

SEQ ID NO: 117488 - DNA, 1980 bp, Zea Mays
cgttggagaggctttgctcccagtcgtcccccccggccccgacccccctccgtttgccaacgactccgggctccactgtcgctcgctctcgctcccttccctcccacgcaatggtggccgatcgcctccgcctcgcgctgctgctctccgcgtgcctctgctccgcgtgggcgcgcccacgcctcgagccgaccatccgcctgccgtccgagcgcgcggcggccgacgacgccgtcgggacccggtgggccgtgctcatcgccggctccaacggctactacaactaccgccaccaggcggacatctgccatgcataccagatcatgaagaagggcggacttaaggacgagaacatcgttgtcttcatgtacgatgacatcgcgcatagcccggaaaatccgaggcctggtgtcatcataaatcatccccagggtggcgacgtctatgctggggtgccaaaggattacactgggcgagaggtcaacgtcgacaatttcttcgctgttctgcttggcaacaaaactgctctcaggggtgggagcggcaaggttgtggacagtggccccaatgaccatatatttgttttctacagtgaccatgggggtcctggcgtccttggaatgcctacgtatccatatctctatggtgatgacctcgtagatgtcctgaagaagaagcatgctgccgggacctacaaaagcctggtcttttatcttgaagcatgcgaatctgggagcatctttgagggcctcctgccgaatgacataaatgtgtatgcgaccaccgcgtcaaatgcagaggagagtagctgggggacgtactgccctggcgagttcccgagccctccaccggagtatgacacttgcttgggagacctgtatagtgttgcttggatggaagacagtgatttccacaatctgcgaactgaatctctcaagcagcaatacaacttggtcaaggataggacagcggttcaggatacattcagctatggctcccatgtgatgcaatatggttcattggagttgaatgttaagcatctgttttcgtacattggcacaaaccctgctaacgatgacaacacgtttatagaagacaactcgttgccatcgttctcaaaggctgttaatcagcgcgacgctgaccttgtctacttctggcagaagtaccggaaattggcagacagctcacctgagaaaaatgaagctcggaaggagttgcttgaagtgatggcccacaggtctcatgttgacagcagtgttgagctcattggaagccttctctttggctctgaggacggtccaagggttctgaaagccgtccgtgcagctggtgagcctctggtcgatgattggagctgtctcaagtccacggttcgtacttttgaggcgcaatgtgggtcgttggcgcagtatgggatgaagcacatgcggtccttcgcaaacatctgcaacgctggcatccttcctgaagcagtgtcgaaggtcgctgctcaggcttgcaccagcattccttccaacccctggagttctatccacaagggttttagcgcctaagaatcataaggtgaggcgaaatatttcagccgctccaccgcaacgaactggtttacattaccagtcctcaggggggtcctagttcttgaaccataggtgaagcagacttataccactattatagctgttccaccgtcgttccagattacatagctatgcccaatttccggtgtacatatatagtcggaaagttatttggcaattgtattggtcgttgctgtatatattccctatagtttgttagcagatgtgtagtttgtaattccataaaaatgaaggacgcgttactgctatttctatgtagccgactggtgctcatgtgaaactttaccccattcttgttgggaaatgtactatccgtggtggaattcttgcatcgaaaacaattcccgggtgatcctttattcaaggtgaaccgtctgtc

SEQ ID NO: 117489 - DNA, 204 bp, Zea Mays
caaattgtcttcttcctcttcattcatgcctccggttctcatctttgcaaggaacttggccctgctacatctaattattattattagcaaaatcttctgctactcagattttgcgtctcaggtttaatttcagtctggcctagatcgggcccgtagcccaaattaaactgtgcaaccagttaatataacttaataataaaaacg

SEQ ID NO: 117490 - DNA, 2211 bp, Zea Mays
ggctccaatgcgagtcgtgaacgcaaacagatagcatcccgcgtcgccgcgatggaactctcgcccttgccgatgctcgctgcctcccgcttcctgtccctgtcgccgctgctggcgccaacatgcccccagcggaccgctccttcagtccgcgtggccacgcagacgctggaagcgccggaggcgcccaaaccgccgcggccgtcccccaggcgcagcgccgtcgctgaggtcaagggggcccttgaccccatcgccgccctcaacaggtttgaggaggtactgcagacacaagactgcaacataattctgcgccactgcggggacattaggcgttgggatgacctctctaaggtctttgagtggatgcaggagcgcgagatgaccaacgctgcatcttatagcagctacttcaagtaccttggactgagccgtgaccctgcgagggtgcttcgagtgtacggtgccatcaaagaccgaacattgagggtccatgtctccgtctgtaattcagttcttgggtgcttggtgaagaatgggaggttggacagcagcttcaagctctatgacgagatgatacgggaaggtctatctcctgatccattcacctacagcaccctgttagcagggtgtatgaagttgaagcaaggttataccaaggcaatgggattgatcaatgagatgaaatctcgtggtcttcagatggatattgtaatatatggcactcttctggcaatatgtgcatctcataactactgtgaggaggctgaagtatactttcagaaaatgaaagatgaaggccatagtcctaatctgttccattacagctccctgttgaatgcatattcagaaaattctgattatggaaaagctgagctattgatgaaagatctgaggtcctctggattaacaccaaataaggttatgttgaccactttgttaaaggtgtattctaaaggtggtctctttgagaaggctaagggactgctaactgaactggaagcctcaggttttgcacaggatgagatgccatactgcatattgattgatggccttgtcaaaggtggaaagatacaggaagcaaatattctatttaacgaaatgaaagaaaaaggagtcaaatctgatggttatgcatttagcatcatgatttcagcattgcacagaggtggtcatcaccaagaatcgaaacagcttgccaaagaattcgagtctgagaatgcatcatatgatctggttatgcttaatacatcactgcgcacttactgcagcacaaatgacatggagagcgtaatgaggatgctaaagaaaatggatgaatcaaacatatcacctgataacattacatttaataccttgataaggtacttctgcaatgcaaaggtttgtcacctagcatacaaaacagttgaagatatgcatgcaaagggtcatcaattaaatgaggagctttgttctcatgtaatggtacagctaggaaaggcaggtttcccttctgaagcattttctgtgtataatatgttgagatatagtaaaagaacagttcacaaatctcttcatgagaaggtcttaggcatcttagttccagcagaacttctcaaagctgcttatatagttgttaaggacaatgctgatctgatatctccttcttctttggagaagtttgctaaatcgttcatggtctcaggcaatataaatctaattaatgatgttatgaaagccctaaaccgctccgggtggcgtatcagccaggacatctttgggagagcaattaagagatacatccaaaagcctgataagaaacagttgctgctgtgcctcttggactggatgattggacaaggctattctgtagactcgtcatcaaggaacttacttttgaagaatgcacaactttttggcgaaaaacaagttatagcagaaatcctttctaagcagcagatagcatcaaggactattggcctaagacacaaaaaatgataaaggaaagattttgtatatgtaaattgttcatatacatccaggatatgcctaggctgattgtttgaggatcaatttattgtgctctgaggggaattttccaatgaggcatgcttgttccagtagcggtacagctgggagtggagtatgaccatgcttgctatgatatgtgtgttagattgtgttgtctgaaggcttacagtaagtttttgatacatatggacataccca

SEQ ID NO: 117491 - DNA, 1246 bp, Zea Mays
acaggctgatctattctttgttggctctggtacgaatcagagacaattaccacggcaggcgtccccacgccacggctgagtacggagaaagaatccctctagacttctctgcaacctgcgcgaggccgaaagagcagcaacggtgcggaggcagggaagcaaagcaatcccccacctatatacgcgccccgcccagtaggagagtaggagctgcaaggagtccggtctccgaaaaccgacaagacgatagcaaatcgaaggaggacacggctgctggtggccgcattcggtcgggggaggagcacgaggagccatggcctgcctgcacgaccacagctgcgaggatcacaactgcgccgccgactggtcgctctacaaccacatcgacgtccccaaggtggtggctctcaacgaatcggtgcccgggagcgtcaagtccgtcttcaagccctgggagcagcgccttgacacctcggggggttttctggagagtaatgagggtgaccctgagctacttattttcatcccgttcacatcagatgttaagatcaagagcatttctgttgttggtggtgctgatggaacaagcccgtcaagaatgagagcgtttatcaatagagaaggtattgacttttctgatgctcaaaacatgcagccagtgcaggaatgggaattagcagagaacctgcaaggagctcttgagtaccaaacaagatattcaaggttccaaggtgtggctaacctaactctgcatttctctgacaactttggtggtgatacaactaaaatttattacattggactacgtggtgaagccactcagaacaaaagggatgtagttgcaacaattgtatatgaagtcatgcccaatccttctgatcacaaaacaaaatctgagactggaggaggtttctcgcatgtggagtagacatcatacaagagctagagaagcggaagctgggtactgcgttgcctgaaagcaaatttgaacctcgcttcgtcgatcaataagataaatagataattcccagctgctagacttttagcttgacttttgagcacataactctgtacccgtggacgctgtgactggtttgctaatgctctatcatcagagttggtctcttgtgttatcttgtgtctgtcagctttattccattttcctgaagcgctcatcgtagatatttctccagtgtgatcatgcaaactcttgcggacgccagaaggtactgaaatccaattcaag

SEQ ID NO: 117492 - DNA, 1178 bp, Zea Mays
gagtacggagaaagaatccctctagacttctctgcaacctgcgcgaggccgaaagagcagcaacggtgcggaggcagggaagcaaagcaatcccccacctatatacgcgccccgcccagtaggagagtaggagctgcaaggagtccggtctccgaaaaccgacaagacgatagcaaatcgaaggaggacacggctgctggtggccgcattcggtcgggggaggagcacgaggagccatggcctgcctgcacgaccacagctgcgaggatcacaactgcgccgccgactggtcgctctacaaccacatcgacgtccccaaggtggtggctctcaacgaatcggtgcccgggagcgtcaagtccgtcttcaagccctgggagcagcgccttgacacctcggggggttttctggagagtaatgagggtgaccctgagctacttattttcatcccgttcacatcagatgttaagatcaagagcatttctgttgttggtggtgctgatggaacaagcccgtcaagaatgagagcgtttatcaatagagaaggtattgacttttctgatgctcaaaacatgcagccagtgcaggaatgggaattagcagagaacctgcaaggagctcttgagtaccaaacaagatattcaaggttccaaggtgtggctaacctaactctgcatttctctgacaactttggtggtgatacaactaaaatttattacattggactacgtggtgaagccactcagaacaaaagggatgtagttgcaacaattgtatatgaagtcatgcccaatccttctgatcacaaaacaaaatctgagactggaggaggtttctcgcatgtggagtagacatcatacaaggtgaggcatatctgccgttccaaagcatacaggctgaatttctcggctgattattctagcttgccttccttctctcattttttaacgtttattttctaatagttgggtatggatccacagcagagctagagaagcggaagctgggtactgcgttgcctgaaagcaaatttgaacctcgcttcgtcgatcaataagataaatagataattcccagctgctagacttttagcttgacttttgagcacataactctgtacccgtggacgctgtgactggtttgctaatgctctatcatcagagttggtctcttgtgtt

SEQ ID NO: 117493 - DNA, 1153 bp, Zea Mays
acaggctgatctattctttgttggctctggtacgaatcagagacaattaccacggcaggcgtccccacgccacggctgagtacggagaaagaatccctctagacttctctgcaacctgcgcgaggccgaaagagcagcaacggtgcggaggcagggaagcaaagcaatcccccacctatatacgcgccccgcccagtaggagagtaggagctgcaaggagtccggtctccgaaaaccgacaagacgatagcaaatcgaaggaggacacggctgctggtggccgcattcggtcgggggaggagcacgaggagccatggcctgcctgcacgaccacagctgcgaggatcacaactgcgccgccgactggtcgctctacaaccacatcgacgtccccaaggtggtggctctcaacgaatcggtgcccgggagcgtcaagtccgtcttcaagccctgggagcagcgccttgacacctcggggggttttctggagagtaatgagggtgaccctgagctacttattttcatcccgttcacatcagatgttaagatcaagagcatttctgttgttggtggtgctgatggaacaagcccgtcaagaatgagagcgtttatcaatagagaaggtattgacttttctgatgctcaaaacatgcagccagtgcaggaatgggaattagcagagaacctgcaaggagctcttgagtaccaaacaagatattcaaggttccaaggtgtggctaacctaactctgcatttctctgacaactttggtggtgatacaactaaaatttattacattggactacgtggtgaagccactcagaacaaaagggatgtagttgcaacaattgtatatgaagtcatgcccaatccttctgatcacaaaacaaaatctgagactggaggaggtttctcgcatgtggagtagacatcatacaagttgggtatggatccacagcagagctagagaagcggaagctgggtactgcgttgcctgaaagcaaatttgaacctcgcttcgtcgatcaataagataaatagataattcccagctgctagacttttagcttgacttttgagcacataactctgtacccgtggacgctgtgactggtttgctaatgctctatcatcagagttggtctcttgtgtt

SEQ ID NO: 117494 - DNA, 1135 bp, Zea Mays
acaggctgatctattctttgttggctctggtacgaatcagagacaattaccacggcaggcgtccccacgccacggctgagtacggagaaagaatccctctagacttctctgcaacctgcgcgaggccgaaagagcagcaacggtgcggaggcagggaagcaaagcaatcccccacctatatacgcgccccgcccagtaggagagtaggagctgcaaggagtccggtctccgaaaaccgacaagacgatagcaaatcgaaggaggacacggctgctggtggccgcattcggtcgggggaggagcacgaggagccatggcctgcctgcacgaccacagctgcgaggatcacaactgcgccgccgactggtcgctctacaaccacatcgacgtccccaaggtggtggctctcaacgaatcggtgcccgggagcgtcaagtccgtcttcaagccctgggagcagcgccttgacacctcggggggttttctggagagtaatgagggtgaccctgagctacttattttcatcccgttcacatcagatgttaagatcaagagcatttctgttgttggtggtgctgatggaacaagcccgtcaagaatgagagcgtttatcaatagagaaggtattgacttttctgatgctcaaaacatgcagccagtgcaggaatgggaattagcagagaacctgcaaggagctcttgagtaccaaacaagatattcaaggttccaaggtgtggctaacctaactctgcatttctctgacaactttggtggtgatacaactaaaatttattacattggactacgtggtgaagccactcagaacaaaagggatgtagttgcaacaattgtatatgaagtcatgcccaatccttctgatcacaaaacaaaatctgagactggaggaggtttctcgcatgtggagtagacatcatacaagcagagctagagaagcggaagctgggtactgcgttgcctgaaagcaaatttgaacctcgcttcgtcgatcaataagataaatagataattcccagctgctagacttttagcttgacttttgagcacataactctgtacccgtggacgctgtgactggtttgctaatgctctatcatcagagttggtctcttgtgtt

SEQ ID NO: 117495 - DNA, 1931 bp, Zea Mays
acaggctgatctattctttgttggctctggtacgaatcagagacaattaccacggcaggcgtccccacgccacggctgagtacggagaaagaatccctctagacttctctgcaacctgcgcgaggccgaaagagcagcaacggtgcggaggcagggaagcaaagcaatcccccacctatatacgcgccccgcccagtaggagagtaggagctgcaaggagtccggtctccgaaaaccgacaagacgatagcaaatcgaaggaggacacggctgctggtggccgcattcggtcgggggaggagcacgaggagccatggcctgcctgcacgaccacagctgcgaggatcacaactgcgccgccgactggtcgctctacaaccacatcgacgtccccaaggtggtggctctcaacgaatcggtgcccgggagcgtcaagtccgtcttcaagccctgggagcagcgccttgacacctcggggggttttctggagagtaatgagggtgaccctgagctacttattttcatcccgtaagtagctgaagtcacttgctcgtttaatgtatattcatgtgctcccccaattgttacttgttttcctttattttattttgaaagattaattctaatttgcttcatgacttatagttgaagtatagcaacgtgatgaagtgttctttaactaatttcctcaaacataagattgcctgaggtattcagtttatgaactatgtggtgtttcaggagaagtatatttattatatggaatagttcatcgtttttttcctttttgtattgtgattgttctcaacagacaacagttcactccagggcagtgctcgaacaggttgtagttattgatatttattcttctttctcctttattttagtcttttggtgatttggtactcagcattaacactagtaaagtaatacttctttcagaggtttaaaacccacatacccagaaataattcgttgaaatgatgtctgcagaacatatgccatgccctttttgcacatccttccatcaattttgtgaaatatcctaattcctaaggaaatgagaatgcttctttttagtgtgtatccggcactatgttgagttgatattgcatgcccttgcagaagttacttcttcagtctgtacgtatacttgcattgaattcatgacctccatgaatttctgtatgttgatatttcacttttggtggaatattatctttatttggtttcagagctaagaaataccttcccctatttttgtctatagttctcatccaaaaaatgttaaatatgtgtaatcctgtcttcctgttggttgtaggttcacatcagatgttaagatcaagagcatttctgttgttggtggtgctgatggaacaagcccgtcaagaatgagagcgtttatcaatagagaaggtattgacttttctgatgctcaaaacatgcagccagtgcaggaatgggaattagcagagaacctgcaaggagctcttgagtaccaaacaagatattcaaggttccaaggtgtggctaacctaactctgcatttctctgacaactttggtggtgatacaactaaaatttattacattggactacgtggtgaagccactcagaacaaaagggatgtagttgcaacaattgtatatgaagtcatgcccaatccttctgatcacaaaacaaaatctgagactggaggaggtttctcgcatgtggagtagacatcatacaagcagagctagagaagcggaagctgggtactgcgttgcctgaaagcaaatttgaacctcgcttcgtcgatcaataagataaatagataattcccagctgctagacttttagcttgacttttgagcacataactctgtacccgtggacgctgtgactggtttgctaatgctctatcatcagagttggtctcttgtgtt

SEQ ID NO: 117496 - DNA, 2882 bp, Zea Mays
actgttacacatgagaccgtgaagcggttttatcagaagtggtaccatctaagcaatatggcggtatttgcagtgggtgatttcccagatacacaggctgtcgtggagttgataaatgagcattttgggcacaaagctccagctccccaccctcctccagttataccagaattttcagttccatcgcatgaggaaccacgcttttcatgttttgtggaatctgaagctgcagggtcggctgttgttatcagctgcaagatgcctgctggtggaattaaaacagtaaaggactacaaagattcactggcagagtccatgtttcattgtgcgctaaaccagaggctcttcaaaatatctcgtagaaaggatcctccttatttttcttgctcctcagctgcagatgctctcgtctgtccagttaaggcttacattatgacatctagttgtcgggaaaggggaacagttgaagctctcgagtccatgcttcttgaggttgctagggtacggcttcatggattttctgaccgtgagatatccattgtacgcgccctaatgatgtcagagatggaatctgcatatttggagcgtgatcaaatgcaatctaccagcttacgggatgagtttttgcagcattttcttcgtgaggaacctgttgttgggattgaatatgaagcacagttacaaaagactcttcttccccatatttcttctgcggaagtggcaaaatttgcagaaaacttttcaacggccagcagctgtgttatcaagatagttgaacctcgagctcatgcttctttggaggatctgaaagcagttgtgctgaaagtcaacagtatggaagaagataaatctatttttccatgggatgaagaacaaattccagaagaaattgttgcccaagctccagagccagggactataattgctaaagtggagcacccaggcataggtgctactgagatgatactttcaaatggcatgcggatttgttacaagtatactgattttcttgatgaccaggttgtttttactggctttgcctatggtggtctgtcagaattatctgaagctgagtatacttcatgctcaatgggttcgaccatagcaggagaaattggcacttttggctacagaccttctgtcttgatggacatgcttgctggcaagagagccgaagttggtacaaaagtgggggcctacatgagaacattttctggcgattgctcaccttcagatcttgagacagctttgcagcttgtttatcaactatttacaacaaatgtggagccaagggaggaagaagtaaaaatagtgatgcaaatggcagaggaagcaatctatgctcaagagcgcgatccatacacagcatttgcgaatcgtgttcgtgaaataaattatgggaactcatacttttttaagccaattagaataagtgacttgaagaaagtggatccaatcagagcgtgtgaatatttcaacaattgtttcaaggatccatcagcttttacggtggtaatagttggaaaaatagacccagccatctcacttccactggttctgcagtacttgggtggaatacctagggtacaggatgctactcaaccacttagtcgtgatgatctaagaggattgccatttaagtttcctgcaaccatcattagagaagttgtccgcagccctatggttgaagcacagtgctttgtacaactagcatttcctgttgttcttaagaacacaatgatgactgaagatattcactatgttgggtttcttagtaaacttctggaaacaaaaatcatgcaagtacttcgcttcaaatatgggcagatctattcagttaatgtagctgtcttcttggggggcaacaaaccctcaagaactggagatgttcgtggagatataagcgtgaatttctcatgtgatccagacatatcatctaaactggttgattttgttctggaggagatatcatgcctacaaacagaaggtccttctgaagaagatgtattgtccatcctcgaaattgaacaaagagctcatgaaaatggattacaggagaattacttctggttggatcgtattctacggagctatcaatcaaggcttttttctggagatattggatccacctttgcgttccaagaggaggggcgtataaaggttagggatgctttgacaccacagagcatgcaatcagccttgcaacgagttatacctttcccttgcagaaagcagtacactgtggttattcttatgccaaagtcatcctgttgggcgtcagtgaagtcaatgcttagctggagttctaatggggtcagcagagatgctaagatcctcgctggcatggctggtgcactggtgttggcagtgagtttgtggaggtactctcgtagttcgttaaaatcttagtgtttgatacaactgaccgctttttggggacttccagtcagatctgaaaatggatcaggttaggaactgatacgagctgtcggtagatagatatttgttctacctgagcaccgacccggtgttcggagatctggtaacaaaagaggccatactatgacaaatttggtagctaacagattcgttgccgcatgtgtgcgtgcagtcctgtaatctcattcgttgtaccgcggcacatgtgcattagtcgtcggtgtatagtaatgactatcctcccatttgatttcataggcaggactgaagtagtggtcactgaccaccgtggcgggacggtcgaaactggaaacccaacattgtgatagctttactggtccaatttctgtggacggctttgtacctgtacgtttttccgtttcctatgacccagaacgaggaaaaatctataatgagcaggaaatgtgatattcctttatgct

SEQ ID NO: 117497 - DNA, 1002 bp, Zea Mays
atggatctgctcccgccgccgacggacgcgccggatgccggcggccccagcgccggcgggtcaggccgggggctgcgccgcgggatcgggttccggtcgctgaagctggtcagcgttgccatggacgagaccctgcccgtcgaccccgtcggcgccacctacggccgcctcgccaacggcctcacctactacgtccgctcaaacccaaagccacgcatgcgcgccgcgctctcgcttgccgtcaaggtcgggtcagtactgctactctcgccgcgcctgttgtttttgccgccgctgtttatcccccttcgcgcgtttgctgacttccatgtcgtgctcatcgctcggttcgctcttaggtcggtggtagaggaggaggacgagcgcggtgtggcgcacatcgttgagcacctcgccttcagcgccaccgcgcgatataccaaccacgacatcgtcaagttcctcgagagcataggggccgagttcggtgcctgccagaacgcgctcacctcatcggatgagactatttacgagctgctcgtacccgtcgacaagccaggcctgctctcccaggctatatctgtcctcgcagagttcagctcagaggttagggtgtcagcagaggatctggagaaagagaggggtgctgtgctggaggagtacaggggtggacgcaatgcagcaggccggatgcaggactcccactgggcactgttgtttgatggttctaagtgctctagtccgggatctggagcaaatgagcaatggcgctgccgggttggcgtcgcgcctgtacgtggagggaagagggaagagggaggagggaggaggggggctgaccggcggcgtacctggagggcggccaacggcgtctggcggccgacgacgtctgctcagtctgggcgcgatttcgtctggcgcgatggagtttgctcagtctggcggccgacggctttgcgcgatggcggctgggaactggcgtctgaggagcgcgatggataa

SEQ ID NO: 117498 - DNA, 2619 bp, Zea Mays
atggtggcagcatcaactgaacgcatctctcacccccctgttgctgaacccagagagtgtgactggtataatcttgagaaatctaaacgtgtgaagtcatttcggtgtggagaatatgatgaatgtatagaaaaagccaaggctctagctcgccagcaaaagaggacacatgctgaagggagatatgttcgcagagaggatgccattttgcatgcccttgaaattgaaaggtcccatttttcaaataactgtgatgattttgaagaggagaccggcaatgatttgtgtgcatcccagaatatgtgttctgcaaaatctataaatataaatgggctcagcaaaaaatctcgtggtgcaaggagtttgtatgatacagaagaaaattcagctcaagagtcatgtcaaacattgacactttataaaaagccacaaaatttatcctcttcgagcactaggtatgcatcgtcaaaaaggaagaagcggaagggacataaaaatcatgaggatgatacagttcaaggattccagcgtatgagagatcttagggagattggaacaaacaatgttcccaagcagaagtctggtgcaggaattgtttcagatgtacctcttcttgaaagtggaccaagctttgactatgatttgtccagtgccaatgggataaaaaagggtaagcagtctcagacatccataaaaaagaaacggtccaatatcgggcaatcctgtgatagtttgagtaagaaagataggcatcaccctctatcaatgttatgtgaagattcagaagtgtctggaacttattatcattgggaccgttcaggccagtcttctagtgagtacctaggaggacagatacccaatttgtttgaatcaagtagggcaaaaactagtctttcaactgatgtaaataattgttcgtatagctcaggcacttcaagtttggagatattattagatacatcacacatcaaacataaaggttcggtaaatgctgttactctcaaggttgctgacccatgcacgactagaattctcaatgatgactgccctgattgtgatgagtttcttgctgccgatactttggagggtgatgttctggaggaaggccatttggatacttatggatcttgtgcatccataaaggatcaaatttcaaaactgggtaatcaaagtactggctgtgccataggtggcacaccctcaacttggcataatagaaattccgagaagaaaagcataacgtctgtcaacttgattcctaaagagagccacaagagggataaaaattcactgttgcaatgtgaagggattataaaatcggaaggtactatccttcggcctgctgaacttgaggataatacaaaacataccactcctgagcatgacgagtcctctgaaactataagcaaccattcaaactctgagaagggcacaaaatcattacccaattactttccacttcaagtactaccaccacctggacagcaacctgatctgaaacttccaagatgccctgtaacgagtccaaccaagagaacgagtccgaccaagagagcacacgcaggttatagattatatgatgttgagctgactgtccaaagaagctacaagggtcatcatgtgccccttgtttccctcatcagtaaatggacaggtaaaccaattgtggggtatcctgtcactgtggaggttttggaggatagtcgtcccacaacaagtagaaatgagcatcgcccgccgatgggtagtctcggctccttaccaaagagcagagttgcagaaccaaggcaagcaagatcttcacccgcatcacgatcaaaatcaaaacccagtggacgtaaaaaggcctcagaacatgatttggacaagtcttggcggccccatatcaagaaaccagcatcttcgccgaggaaaatgcggaggctgtcatctttcgccggcagccggagagagagtgcagaccagaagcctgtagttgtgaaggctggcggaccagcagtcgcgtgtgtcccgcttcgacttgttttgagtaggatcaatgaagcactaagcttcccgttgagacaagaaaaccccacctgaggctgtggcagttttgcattgctgagatagaatgtgggcaggcatatacatttgctaggttttctttgtacattagttaccatattatctgaaagcgtattgcctggcatatttatatcagtatattatgatgtaatctgtagccacactaggcaattacgacttacccaccgtgagatatgggccgaacatccaatggtgggaggaaataaaggggcatcagttgctgtgggctgtggcttcatctgacagtggaagcaaaaatggcagcagacctgttcaccataccatacatcatacaaaattttccccgtatttgctggcaacttttagttgatccaggcaagttgctgtatgtaatcagtgattgcaaggattgcagggcttcgtgcaactacttgcagctttgagtgagttgtagattcttttatgtgccaattctctagtgttgatgctggtcactaccaggcatctctagtgttgatgctggtctctacggtgtagatgcttatatatatatgctaattctgtgacatc

SEQ ID NO: 117499 - DNA, 1818 bp, Zea Mays
attggtttgtatcccgtatccgtccttcgctcctagtgaatgtggtgcacgacggtggaaactgagtcacgtaatccctactgttgtttctccgattctccttacgacccgccggcgttgggcaaaagcggccggtgctggtcctctcctcttgcagaaggcaaccggcggcgatccccatctacagcaaaaaaacgaccggcggggagcctcttccccggaaaataatttgacgagtgtatagaaaatgtcaaggttggagctagtgttcaaaagaccacatatacaatgaagagagacatgctcaccgctcacggagagaaggtcattcttcgtgcccttgaaattgagaaatcccggctgccacactcaaagggtatttgagtacctgtggatcttctgtatccataaaggatcagatcccaaaacccattggtcaaactactgaatgcagtaaacagggcatatcttatatctgagattatagatccaagatgcagatcagcggctttgtcacccctattggtcctttatctgaagaaaatcacacgatcgacaagaatttgttgccgctggagtgtgaagggacaatggaatgccacacacgagacaacgatgctgttgggttggatgcaagagcggaaggtgttgtctgtgagctcacagaccttcagaataacatacaagtttatgatatcgagttgactgttctaggaaactacacaggtcacggcttgccccttgatttccttgagagtaaaacgactggtggacccatcaagggctaccctgttgttgtggatgttttagaggattgttcttcagtgagtattcatgatcacctcccagtggctaggagagttgggaagaagaggcagagacgcagacatgatggaaggtggacgaagaggaccccgctacgttttccggctgcgtccacggctgtgcgtgccatttccaccaccgtgcagacaaaaaagaactcaaacaaggacccggtactcgaggaatgctccctgctattggctctagctgcgaaagcctccctgctgcatacatgaagacccctaggtgacgcagttgactccagcggcatagaagtgtatcatgtttcatgtgagaacgactgctgatttctttctggttcgtgtggctcacctttgccccttacacctgacgcgaggtcgaccaggagcagcaaggactgcaatgctgcacttctttgtaatttatgttctgcctcccctctgtgtgctcctgtgcgcttggtttagtgcagtcgtgaggataagttggggctagttatggttggaagaacatgaaagatcgaattttatttaaaacccagctgttttgcaggatatacagctgttaatggctagtttggtaactctattttttcaagatttttcttggaaaaatagaaatctcttgaaaaaaatgaggttgctaaattagcactaagatcttttctgttggaaattagggttgtacagtgttgttgactttgttaaaaacccagccttagagccgacttaagagattacacatatgatatgttattcagtgcccttttggttcatgcctcaattttaaaatctcattctacaatcccattagccaaatagtttcttatttttactagattttgtgccagaatcataccaagctgacaatatagttttgtcgacaggccccaaatttattgtgaagataaaataatgttctcatacaatacgacttcatatgacccatgaaacatcaatagccacttggccatgatcactggatcattttcgttacactaccaaaaaaaaa

SEQ ID NO: 117500 - DNA, 1670 bp, Zea Mays
gtccttcgctcctagtgaatgtggtgcacgacggtggaaactgagtcacgtaatccctactgttgtttctccgattctccttacgacccgccggcgttgggcaaaagcggccggtgctggtcctctcctcttgcagaaggcaaccggcggcgatccccatctacagcaaaaaaacgaccggcggggagcctcttccccggaaatttttattgtgcagatacaatttgttctggtgaccatggcagatgctatattttctggatgcttgcatccacatccttagtaaccaggttcccggatcgatgggatcgaggaacgggaacgtggtacgcgataatttgacgagtgtatagaaaatgtcaaggttggagctagtgttcaaaagaccacatatacaatgaagagagacatgctcaccgctcacggagagaaggtcattcttcgtgcccttgaaattgagaaatcccggctgccacactcaaagggtatttgagtacctgtggatcttctgtatccataaaggatcagatcccaaaacccattggtcaaactactgaatgcagtaaacagggcatatcttatatctgagattatagatccaagatgcagatcagcggctttgtcacccctattggtcctttatctgaagaaaatcacacgatcgacaagaatttgttgccgctggagtgtgaagggacaatggaatgccacacacgagacaacgatgctgttgggttggatgcaagagcggaaggtgttgtctgtgagctcacagaccttcagaataacatacaagtttatgatatcgagttgactgttctaggaaactacacaggtcacggcttgccccttgatttccttgagagtaaaacgactggtggacccatcaagggctaccctgttgttgtggatgttttagaggattgttcttcagtgagtattcatgatcacctcccagtggctaggagagttgggaagaagaggcagagacgcagacatgatggaaggtggacgaagaggaccccgctacgttttccggctgcgtccacggctgtgcgtgccatttccaccaccgtgcagacaaaaaagaactcaaacaaggacccggtactcgaggaatgctccctgctattggctctagctgcgaaagcctccctgctgcatacatgaagacccctaggtgacgcagttgactccagcggcatagaagtgtatcatgtttcatgtgagaacgactgctgatttctttctggttcgtgtggctcacctttgccccttacacctgacgcgaggtcgaccaggagcagcaaggactgcaatgctgcacttctttgtaatttatgttctgcctcccctctgtgtgctcctgtgcgcttggtttagtgcagtcgtgaggataagttggggctagttatggttggaagaacatgaaagatcgaattttatttaaaacccagctgttttgcaggatatacagctgttaatggctagtttggtaactctattttttcaagatttttcttggaaaaatagaaatctcttgaaaaaaatgaggttgctaaattagcactaagatcttttctgttggaaattagggttgtacagtgttgttgactttgttaaaaacccagccttagagccgacttaagagattacacatatgatatgtt

SEQ ID NO: 117501 - DNA, 1432 bp, Zea Mays
attggtttgtatcccgtatccgtccttcgctcctagtgaatgtggtgcacgacggtggaaactgagtcacgtaatccctactgttgtttctccgattctccttacgacccgccggcgttgggcaaaagcggccggtgctggtcctctcctcttgcagaaggcaaccggcggcgatccccatctacagcaaaaaaacgaccggcggggagcctcttccccggaaaataatttgacgagtgtatagaaaatgtcaaggttggagctagtgttcaaaagaccacatatacaatgaagagagacatgctcaccgctcacggagagaaggtcattcttcgtgcccttgaaattgagaaatcccggctgccacactcaaagtaaacagggcatatcttatatctgagattatagatccaagatgcagatcagcggctttgtcacccctattggtcctttatctgaagaaaatcacacgatcgacaagaatttgttgccgctggagtgtgaagggacaatggaatgccacacacgagacaacgatgctgttgggttggatgcaagagcggaaggtgttgtctgtgagctcacagaccttcagaataacatacaagtttatgatatcgagttgactgttctaggaaactacacaggtcacggcttgccccttgatttccttgagagtaaaacgactggtggacccatcaagggctaccctgttgttgtggatgttttagaggattgttcttcagtgagtattcatgatcacctcccagtggctaggagagttgggaagaagaggcagagacgcagacatgatggaaggtggacgaagaggaccccgctacgttttccggctgcgtccacggctgtgcgtgccatttccaccaccgtgcagacaaaaaagaactcaaacaaggacccggtactcgaggaatgctccctgctattggctctagctgcgaaagcctccctgctgcatacatgaagacccctaggtgacgcagttgactccagcggcatagaagtgtatcatgtttcatgtgagaacgactgctgatttctttctggttcgtgtggctcacctttgccccttacacctgacgcgaggtcgaccaggagcagcaaggactgcaatgctgcacttctttgtaatttatgttctgcctcccctctgtgtgctcctgtgcgcttggtttagtgcagtcgtgaggataagttggggctagttatggttggaagaacatgaaagatcgaattttatttaaaacccagctgttttgcaggatatacagctgttaatggctagtttggtaactctattttttcaagatttttcttggaaaaatagaaatctcttgaaaaaaatgaggttgctaaattagcactaagatcttttctgttggaaattagggttgtacagtgttgttgactttgt

SEQ ID NO: 117502 - DNA, 2362 bp, Zea Mays
atgaactcgatggatgaaatcaacctgctgcggcaggcgcagcggcagcatcagcatcatctcatggtgcgcggcatcggcgaggagatcgacctcgagatcggccctgtcgacgatccctctttttccggagcttccttagtggccgttacgtccacgcacgacactgtcgttcacgccgacgaccacaagagcctcctcatcccgtgttcgcagcccggcgcggcggacgggctggcgccgcagcagcacctgtcgcagggggaagagcatgacgggatgctcaggtcgccgtcggggcacaccaagaagaagaagaaggtggtcaagaaatggcgggaggagtgggcggacacctacaagtgggcctacgtcgccgtgcacgacaccaccaccaggatcttctgctcggtgtgcaaggagtacggccggaagcaccgccggaatccatatggtaacgagggaagcaggaatatgcagatgagtgcgcttgaggagcacaacaatagcttgttgcataaggaggcgctccggttacagatggcctccaaggagaagttgcagcctcccgagattgaggggccggtctatgtcaaagctttatcgaaaacagcagcatcaatacttgaatgtgtcctaaggagggatccccatgaagctgaatatatacagtcgatccaggaggtggttcattccttagaacctgttttggtgaagaatgcccaatatattcaaattttggagcgtttgttggaacctgagagatgctttatcttcagagtgccatggattgatgacagaggtgaagcacacgtcaatagaggtttccgtgtgcaattcagtcaggcgttaggtccatgcaggggtggtcttcggtttcacccatccatgagcttaagtgtggcaaagtttctggcctttgaacatactttaaagaatgctttgtcactatataaacttggaggtgctgctggaggaagtgattttgatccaaagggaaaaagtgataatgagataatgcgcttttgccaaagtttcatggatgagctgtatagatatttgggccctgatcaggattttcccgctgaagatattggtgttggtccaagggaaatgggttacctttttgggcagtatagacgtctttctggtcattttcagggaaattttacaggacctaaaattttctggtcagggtcaagttttcgaacagaagctactggatatggtctggtgttttttgcacgtcttttacttgctgaaatgaataaagagcttaaaggattaaggtttcttacattgatccactaaatgtttctttgttataatttagccttttgttactttaatactatgcaaagttttctgcagatgtgtgatcagcggttctgggaagatagcaatgcatgttttggaaaagcttttgccttgtggagccattcctattactgtctcagattcaaagggatatttgttagatgaagatgggtttgattatatgaaatattcacttctaagggatattaaggctcagcaaaagagcctcaaggagtacttgaaatcatatccacatgctaagtatattgatgatgcaaaaccatggagccagcggtgtgatgttgcatttccttgtgcatcacataatgagattgaccaaggggaggctgttgcaatcagcaactctggttgtcgtgttcttgtcgaatgttcaaatatgtcgtgcactgttcaagctgttgatatcctaagaaaggcaaaagttattgttgctccagcaaaggcaactgctgctggtggggtagcacttggggagattgaattgaatccagagtttaatttgatgcaattgtcagtggaggattttgagaatagaattcaagatgcaataaagcaaacatatgaaaggtcggtcaaagctgctcaagattacgggatcatgaaagaaagccccgagtttttggtccatggcgcgaacatttgtgctttccttaatatcgcgcaagccatgactgaccagggatgtgtttagttaggcctggattctgtcaagaagcttcaactggagctttctgcaaccgcgagggaaaaaactttctgacaactagaggtgctttgatgcttaaactttgagtagttctgcacaaatcttgaagccctacaaaacagggagtaactaggatccatttacccctgtttatgctagaaatgtgtacagctaaggtgtaggaaaggcaactaggatccatttatgctagaaatgtgtacagctaaatgtaaatggaaagttctacattgtatgcaaagcctatatccgcaccatctgttacaccaatttgatttcattgttatgaacgacatatta

SEQ ID NO: 117503 - DNA, 2280 bp, Zea Mays
atgaactcgatggatgaaatcaacctgctgcggcaggcgcagcggcagcatcagcatcatctcatggtgcgcggcatcggcgaggagatcgacctcgagatcggccctgtcgacgatccctctttttccggagcttccttagtggccgttacgtccacgcacgacactgtcgttcacgccgacgaccacaagagcctcctcatcccgtgttcgcagcccggcgcggcggacgggctggcgccgcagcagcacctgtcgcagggggaagagcatgacgggatgctcaggtcgccgtcggggcacaccaagaagaagaagaaggtggtcaagaaatggcgggaggagtgggcggacacctacaagtgggcctacgtcgccgtgcacgacaccaccaccaggatcttctgctcggtgtgcaaggagtacggccggaagcaccgccggaatccatatggtaacgagggaagcaggaatatgcagatgagtgcgcttgaggagcacaacaatagcttgttgcataaggaggcgctccggttacagatggcctccaaggagaagttgcagcctcccgagattgaggggccggtctatgtcaaagctttatcgaaaacagcagcatcaatacttgaatgtgtcctaaggagggatccccatgaagctgaatatatacagtcgatccaggaggtggttcattccttagaacctgttttggtgaagaatgcccaatatattcaaattttggagcgtttgttggaacctgagagatgctttatcttcagagtgccatggattgatgacagaggtgaagcacacgtcaatagaggtttccgtgtgcaattcagtcaggcgttaggtccatgcaggggtggtcttcggtttcacccatccatgagcttaagtgtggcaaagtttctggcctttgaacatactttaaagaatgctttgtcactatataaacttggaggtgctgctggaggaagtgattttgatccaaagggaaaaagtgataatgagataatgcgcttttgccaaagtttcatggatgagctgtatagatatttgggccctgatcaggattttcccgctgaagatattggtgttggtccaagggaaatgggttacctttttgggcagtatagacgtctttctggtcattttcagggaaattttacaggacctaaaattttctggtcagggtcaagttttcgaacagaagctactggatatggtctggtgttttttgcacgtcttttacttgctgaaatgaataaagagcttaaaggattaagatgtgtgatcagcggttctgggaagatagcaatgcatgttttggaaaagcttttgccttgtggagccattcctattactgtctcagattcaaagggatatttgttagatgaagatgggtttgattatatgaaatattcacttctaagggatattaaggctcagcaaaagagcctcaaggagtacttgaaatcatatccacatgctaagtatattgatgatgcaaaaccatggagccagcggtgtgatgttgcatttccttgtgcatcacataatgagattgaccaaggggaggctgttgcaatcagcaactctggttgtcgtgttcttgtcgaatgttcaaatatgtcgtgcactgttcaagctgttgatatcctaagaaaggcaaaagttattgttgctccagcaaaggcaactgctgctggtggggtagcacttggggagattgaattgaatccagagtttaatttgatgcaattgtcagtggaggattttgagaatagaattcaagatgcaataaagcaaacatatgaaaggtcggtcaaagctgctcaagattacgggatcatgaaagaaagccccgagtttttggtccatggcgcgaacatttgtgctttccttaatatcgcgcaagccatgactgaccagggatgtgtttagttaggcctggattctgtcaagaagcttcaactggagctttctgcaaccgcgagggaaaaaactttctgacaactagaggtgctttgatgcttaaactttgagtagttctgcacaaatcttgaagccctacaaaacagggagtaactaggatccatttacccctgtttatgctagaaatgtgtacagctaaggtgtaggaaaggcaactaggatccatttatgctagaaatgtgtacagctaaatgtaaatggaaagttctacattgtatgcaaagcctatatccgcaccatctgttacaccaatttgatttcattgttatgaacgacatatta

SEQ ID NO: 117504 - DNA, 1668 bp, Zea Mays
ggacaggcggcggaggaggaggagggccaagcagccatctcgctccatccctctccccagatcttgctctgcactgccacgcgtagatccaatctacccacattgcatcgcgtgttgctgcgatcgcgcatctgttgatcatcagatttggtcggtggttctcgttatccagacgggatggtggcagtgaagggccccgcggcgacggaggaccagaaagcgtctgaaaagacgacgaagcgcgtgacgtcggcggagatggcgcggcactgcggcgagggagacgtgtgggtggccgtgcaggggaaggtctacgacgttacggcctggctgccgcaccacccgggcggggacctcccgctgctcagcctggccgggcaggacgtcaccgacgccttcgttgcctaccacccggcctcagcgtggcgggtgctcgaccgctaccgcgtcgccacgctctccgactacgccgtgtctgaggtctcccgcgactaccgccgcctcgtcgccgagttcgccaaggcgggcctctttgaccgcaagggccacggctgcgccgcctcgctctgcgccatggcagcactgctggctggtgccatttggctcgtactcgccaccacgaacgtggctgcgcacatggcggccgccatcatgctgggcttcctgtggatgcagtcaggcttcctcggccacgactcgggccactacgggtctgtttggttgtctggttggagcctggctctggagaaacggccaatttctacgtatctcgggagccaggcccaagaggaatttttgcatcccgcgagccagactgaagaggctaatcaggcaaccaaacagaagaaagttgtgtctcgtgagcctggccagaccatatacagacaaccaaacgcaccctacatggtgatgcggagcgggctcctgaaccgcgtcgtgcagctagtggcgggcaactgcgtcgctggcatcagcatcgggtggtggaaacgcaaccataacgcgcaccacatcgcgtgcaacagcctcgaccacgacccggacgtgcagcacatgccgctcttcgccgtgtcgccgcgcctcttcgcctccatcacctctgccttctaccgccgggccatgcgcttcgacgccgcggcgcgcttcctcgtcagctaccagcactggaccttctacccggtcatgtgcgtggcgcgcgtcaacctcttcgcgcagtcgctgttgctgctcctcgccgccgacacccggacgcgcgtgcctgggcggctcgcggagctcgcgggcgtcgccgtgttctgggtgtggtacccgtggctggtgtcccggctgcccggcggcgtccacgagcacgccgccttcgtgctgctcagcttcgccgtcacggggatccagcacgtgcagttctgcctcaaccacttctcggcggggacgtacacgtacgtggggcggccccgcggcgacgactggttccagaaacagacacggggcacgctggatgtggcgtgcccgccgtggatggactggttccacggcgggctgcagttccaggtggagcaccacctgttcccacggctgccgcggtgccacctccggcgcgtggcgcccctggtgcgcgacctctgccgcaagcacggactgccctacgagcgctgcggcttctggtgttag

SEQ ID NO: 117505 - DNA, 2320 bp, Zea Mays
tagcaggagacacagctccggcttgcggcctgggatccggtccagtatggagccaccccggcgatccttgtgcgtcgttgcctctgaagtctcctcagcggccggatcggacgccgaggacgacaggtactgcagcgccaactctgccctcggcacgcccagctcgatcgctacccttctcccctcctccgacttctgggaccaccagatggacctcctcgacgaccatcccgccaccgccggcttccccaagaaacaccagctcaggtgcctccaaacgctggcatcggcgcagtcgtggccggaaacggtttctcctccggcgactgccggagtcgacgacctcgcgccgcaggggtcgagtcctgcttcaccatatattcctccgctccctcgtcacaaccaggtgcatggatttggtggcaatgatttatttgatgatatggtccaagagatggaacatattctgctcaattcaggggagccacatggaaatggatcttttatgaatgatcgtagaaataatgctctccaggctcaccatttcagagatggcagcactactgcctctacttctggtacagatgatgcctttgtatctcctgttccacagtattcttcaagaatcgattgggtggaggttgtgggggcaaagcaaagatctggtgatgtttcttttggtgaacgaattgttggtgtcaaaaaatacactgtttatttgtttaaagtaaggagtggtgaagacgaatgggaaattgagcggcgataccgtgaattttacgcgctttatcggctacttaagggcttcttttatgagagaggtttaagtcttcccgctgcatgggaaaatgttgaaagagagtcaagtaaaatatttgggaatgcgtcaccagatgttgtcaatgacagaagtgccctcattcaagactgtttgcgttctttactggtctcaagttatccatttggaattcccacccctctggttaattttttgtcaccagggaggcctggatacgaatatagttttttgaaaactctcattccacgatctttgcaaagacgtagcaatgatttaaattcaaaagattcagattgcaatggaggtcaacatgatgattctacctcaatgggcaagacaatatcacttattgtagaggataggcctcagaagtcgaccagacagttgttggaattacaacattacaactgtgcggggtgccataggcatttggatgctggtcgaacattgctgcaagaacttgcacagactattggatggaacaaacctcggttttgttcttacactggacaattgttttgtgcttcttgtcacacaaatgatactgcagttcttccagcaagagttctacaccactgggatttttcactgtatccaatttcccagttagcaaaagcatatttagactccatatatgaccagcctatgctctgtgtaagtgcagtcaatcctttcctattctcgaaagtaccagctctgcttaacatcatgagtgtccggaagaaaatagcagctatgcttccttgtgtccaatgtcctttccggaattccatacttaaaggactaggagttcgaagataccttctagatgggaatgacttctttgcgcttcgtgacctcgttgatctctcaaaaggagcttttgcagcacttccagttaaggtgctgaccatatcaaacaggatacttgagcacattactgagcaatgccttgtgtgctacgatggtggcgtaccttgtgctgctcgacaagcttgtgatgacccgctgtcccttatattcccatttcaggaggatgaagctacaaagtgtagcttgtgtgggtcaatcttccacaagcaatgctttagaaagatcagtgtttgtccttgtggtaaggcttctaatggcaggaagatcgcggcgcttgagcaagctgtacatgatggcacgggcatgccatcaacggaatctattcagcctccacctctctcttcatcttatgggtttttctctgatattctctccaaagcaaggccggacaagcttctgaggccgagaaatagcagtcctgtgatccttatgggttctttgccagatatgtctatatgagctgagttgtatttttgtgttccattgattgtgtatttttgtacacggtaggaaagacgctcctagttttgaatgaatgtaatcctgcagtgttattacttgaggtgtgcgtgtagatttatttttcgtggacaacgaagaattgtgtcatttgacatttcatctgtgaggaaataatgaaacgagagactaagggactgtttggtagaa

SEQ ID NO: 117506 - DNA, 1906 bp, Zea Mays
atcaaagatcggctgcccgtccgctgttggctctttaattgcctgtgcctgtgcctgtgcctgtgcctgtgctgcccccattcctttctcctccagcaagtaaaccccgtttccacaacgtcaccgcaccgccgtcatgccgaccgtaagcgtgaaatggcagaaggagctctttccaggcatagagattgacactagccagcctccgattgttttcaagactcagttgtacacactaactggtgtgccacctgaacgccaaaaaattatggtgaagggaggaatattgaaggacgatgcagattggtctactttgggagtgaaagatggccaaaagttgatgatgataggcacggctgatgagattgtgaaagctccggagaaaggtccagtgtttgttgaggatctaccagaagaagagcaagtgattgcactgggtcacagtgctggtctttataaccttgggaatacatgctatatgaattccacattgcaatgtctgcattctgttccagagctgaagtcagcgctgctaagctattcagatactgtaagaggtaatggcattgaccaagcttctcataatttgactgttgctactcgtaatacctttggtgatcttgatcaaagtgttcgccctgttgcacctctacaattcttgcagacactgcgtaaaaaatacccgcaatttgcacagcagcataataatgtctacatgcaacaggatgcagaagaatgctggacacagttggtgtatacgctttctcaaactcttacctcagattcaagtgaatctgcagctcttccgatgaagcaactatttgggatagatctcgtgagcagggtccactgtgcagaaagtggtgaggagagcatggagacagaatcagtatattcccttaagtgtcatatatctcaagatgtgaaccatcttcatgagggaattaagcatggcttgaagacagaacttgagaaagcttcacctacactgggtcgaactgcagtttatactagagaatcaagaataaatgagctgcctaggtacttgactgtgcagttcgttcgcttcttttggaaaagggaatcaaaccaaaaggcaaagattttacgaaaagttgattacccactggaattggatgtttatgaattttgctctgatgaactgaaacagaaactccaagcacctcggcagatgctgagagatgcagaaaatgcaaagtttggattgaaagcacaagggaaagctagcggctttaaagaaaatgagggatcatccagtagcgctggggaatcatccagtatggacattgacaaagctgagtcttctctaccaaagaaacaattaactggcgtctatgatttggttgctgtcttgacacacaagggaagaagtgcagactctggccactatgttggctgggtaaagcaagatgacggaaaatggatcgagtttgatgatgacaacccaaacatccgcaaggaggaagacattttgaaactatctggtggaggtgactggcacatggcttatatctgcctatacaaagcccgcatggcggagttgaagagttaggccggagtggttctacatttctgtgccgcgaacgcaacattagtttttctgcccatgagtgatcatggtaattattttttccagttcgtaaagtggttactgtcgaatttgcttcaatgcggttggccattattcactgggatatgtatttttaggatttcaaatctagtacattttgtgttgtcaaaatatagaacaaagaaattcagaggaaagcttctgccttgacagtgaatctgattgatttgcgccaagtggtttcatccgtgtcttcctaataatagtgtatttaaaaaaaaaaaatcaaaactagagcctatgtaacaaacaaaa

SEQ ID NO: 117507 - DNA, 1897 bp, Zea Mays
atcaaagatcggctgcccgtccgctgttggctctttaattgcctgtgcctgtgcctgtgcctgtgcctgtgctgcccccattcctttctcctccagcaagtaaaccccgtttccacaacgtcaccgcaccgccgtcatgccgaccgtaagcgtgaaatggcagaaggagctctttccaggcatagagattgacactagccagcctccgattgttttcaagactcagttgtacacactaactggtgtgccacctgaacgccaaaaaattatggtgaagggaggaatattgaaggacgatgcagattggtctactttgggagtgaaagatggccaaaagttgatgatgataggcacggctgatgagattgtgaaagctccggagaaaggtccagtgtttgttgaggatctaccagaagaagagcaagtgattgcactgggtcacagtgctggtctttataaccttgggaatacatgctatatgaattccacattgcaatgtctgcattctgttccagagctgaagtcagcgctgctaagctattcagatactgtaagaggtaatggcattgaccaagcttctcataatttgactgttgctactcgtaatacctttggtgatcttgatcaaagtgttcgccctgttgcacctctacaattcttgcagacactgcgtaaaaaatacccgcaatttgcacagcagcataataatgtctacatgcaacaggatgcagaagaatgctggacacagttggtgtatacgctttctcaaactcttacctcagattcaagtgaatctgcagctcttccgatgaagcaactatttgggatagatctcgtgagcagggtccactgtgcagaaagtggtgaggagagcatggagacagaatcagtatattcccttaagtgtcatatatctcaagatgtgaaccatcttcatgagggaattaagcatggcttgaagacagaacttgagaaagcttcacctacactgggtcgaactgcagtttatactagagaatcaagaataaatgagctgcctaggtacttgactgtgcagttcgttcgcttcttttggaaaagggaatcaaaccaaaaggcaaagattttacgaaaagttgattacccactggaattggatgtttatgaattttgctctgatgaactgaaacagaaactccaagcacctcggcagatgctgagagatgcagaaaatgcaaagtttggattgaaagcacaagggaaagctagcggctttaaagaaaatgagggatcatccagtagcgctggggaatcatccagtatggacattgacaaagctgagtcttctctaccaaagaaacaattaactggcgtctatgatttggttgctgtcttgacacacaagggaagaagtgcagactctggccactatgttggctgggtaaagcaagatgacggaaaatggatcgagtttgatgatgacaacccaaacatccgcaaggaggaagacattttgaaactatctggtggagtgtttgtctatacaggtgactggcacatggcttatatctgcctatacaaagcccgcatggcggagttgaagagttaggccggagtggttctacatttctgtgccgcgaacgcaacattagtttttctgcccatgagtgatcatggtaattattttttccagttcgtaaagtggttactgtcgaatttgcttcaatgcggttggccattattcactgggatatgtatttttaggatttcaaatctagtacattttgtgttgtcaaaatatagaacaaagaaattcagaggaaagcttctgccttgacagtgaatctgattgatttgcgccaagtggtttcatccgtgtcttcctaataatagtgtatttaaaaaaaaaaaatcaaaa

SEQ ID NO: 117508 - DNA, 1833 bp, Zea Mays
atcaaagatcggctgcccgtccgctgttggctctttaattgcctgtgcctgtgcctgtgcctgtgcctgtgctgcccccattcctttctcctccagcaagtaaaccccgtttccacaacgtcaccgcaccgccgtcatgccgaccgtaagcgtgaaatggcagaaggagctctttccaggcatagagattgacactagccagcctccgattgttttcaagactcagttgtacacactaactggtgtgccacctgaacgccaaaaaattatggtgaagggaggaatattgaaggacgatgcagattggtctactttgggagtgaaagatggccaaaagttgatgatgataggcacggctgatgagattgtgaaagctccggagaaaggtccagtgtttgttgaggatctaccagaagaagagcaagtgattgcactgggtcacagtgctggtctttataaccttgggaatacatgctatatgaattccacattgcaatgtctgcattctgttccagagctgaagtcagcgctgctaagctattcagatactgtaagaggtaatggcattgaccaagcttctcataatttgactgttgctactcgtaatacctttggtgatcttgatcaaagtgttcgccctgttgcacctctacaattcttgcagacactgcgtaaaaaatacccgcaatttgcacagcagcataataatgtctacatgcaacaggatgcagaagaatgctggacacagttggtgtatacgctttctcaaactcttacctcagattcaagtgaatctgcagctcttccgatgaagcaactatttgggatagatctcgtgagcagggtccactgtgcagaaagtggtgaggagagcatggagacagaatcagtatattcccttaagtgtcatatatctcaagatgtgaaccatcttcatgagggaattaagcatggcttgaagacagaacttgagaaagcttcacctacactgggtcgaactgcagtttatactagagaatcaagaataaatgagctgcctaggtacttgactgtgcagttcgttcgcttcttttggaaaagggaatcaaaccaaaaggcaaagattttacgaaactgaaacagaaactccaagcacctcggcagatgctgagagatgcagaaaatgcaaagtttggattgaaagcacaagggaaagctagcggctttaaagaaaatgagggatcatccagtagcgctggggaatcatccagtatggacattgacaaagctgagtcttctctaccaaagaaacaattaactggcgtctatgatttggttgctgtcttgacacacaagggaagaagtgcagactctggccactatgttggctgggtaaagcaagatgacggaaaatggatcgagtttgatgatgacaacccaaacatccgcaaggaggaagacattttgaaactatctggtggaggtgactggcacatggcttatatctgcctatacaaagcccgcatggcggagttgaagagttaggccggagtggttctacatttctgtgccgcgaacgcaacattagtttttctgcccatgagtgatcatggtaattattttttccagttcgtaaagtggttactgtcgaatttgcttcaatgcggttggccattattcactgggatatgtatttttaggatttcaaatctagtacattttgtgttgtcaaaatatagaacaaagaaattcagaggaaagcttctgccttgacagtgaatctgattgatttgcgccaagtggtttcatccgtgtcttcctaataatagtgtatttaaaaaaaaaaaatcaaaa

SEQ ID NO: 117509 - DNA, 962 bp, Zea Mays
atgccgaccggtgagctcctctctccgctcctccgcctccgtccccatcctccccccccccctctatcgatctcgtcgcccccgcatcctccggttctggttcgaatcggcgtaagcgtgaaatggcagaaggagctctttccaggcatagagattgacactagccagcctccgattgttttcaagactcagttgtacacactaactggtgtgccacctgaacgccaaaaaattatggtgaagggaggaatattgaaggacgatgcagattggtctactttgggagtgaaagatggccaaaagttgatgatgataggcacggctgatgagattgtgaaagctccggagaaaggtccagtgtttgttgaggatctaccagaagaagagcaagtgattgcactgggtcacagtgctggtctttataaccttgggaatacatgctatatgaattccacattgcaatgtctgcattctgttccagagctgaagtcagcgctgctaagctattcagatactgtaagaggtaatggcattgaccaagcttctcataatttgactgttgctactcgtaatacctttggtgatcttgatcaaagtgttcgccctgttgcacctctacaattcttgcagacactgcgtaaaaaatacccgcaatttgcacagcagcataataatgtctacatgcaacaggatgcagaagaatgctggacacagttggtgtatacgctttctcaaactcttacctcagattcaagtgaatctgcagctcttccgatgaagcaactatttgggatagatctcgtgagcaggttctgtccccccctcccttgtattatatgccctatatatgtatatgttactttttgttctacaattgtagtttggtgcgaccgtttattttttactcaaacaggcaggagaggtgcatagaatagcatataattatagaagaaaaatatggt

SEQ ID NO: 117510 - DNA, 1609 bp, Zea Mays
gcactcggcccacgcggcgcacggcacctcaagctctgctcctccttttccactgctctgcgtctgcgtctgcgtctgcactgcttcgcgtctccctccccccgcctccgcccccgccccggcaaaaagcaaaacacggccatggaaggctacgaccgcgagttctaccagttcagcgaccagctgcgcctgcagacggccgccttctcgggcctctccctcggcgactccatctggtcccccgccggccggcgcaacaacagcaacgacgtcctcttcgccgcctccgcgtcgcccgccgacgccgccgccaagagcaacgccgtcgtcgggctcaagctcaacgacggagggcccggcctcatcggctccgggaagctggccttcggcggcggcgccggaggcggcggcaccaacaaggccgaccgctacaacaacaacaacctccccaacaccgacaacaagaccgtgtacaacaccagcagcagcagcttcatgggcaacggcagcagctacgccaagaacaacaacaacaacgccgacatgctggcgttcgacaagatggggagctacggctacaacggcggcggtaataccaacaacaacagcaacggcgtggaggtgaagagctacttcaacaagtccgccgggagggcggcgagcaacaacaacaacaacaacaacagccacgccggcggcggcaacaagaagggcggcgccggggagtacggcaggaagaagcacgccaagagcgagggcgcggcggcggccacggacaagcagcggttcaagacgctgccggcgtcggaggcgctgccgcggggccaggccatcggcgggtacatcttcgtctgcaacaacgacactatggacgagaacctcaggagggagctgttcgggctgccgtccaggtacagggactctgtgcgtgctatccgcccgggactgcccctcttcctctacaactactccacgcaccagctccacggcatcttcgaggccgcgagcttcggcgggaccaacatcgacccgacggcgtgggaggacaagaagtgccccggcgagtcgcgctttcctgcgcaggtgcgggtggcaacgcggaagatctacgacccgctggaggaggacgccttccgccccatcctgcaccactacgacgggcccaagttccggctcgagctctccgtcaccgaggccctcgccctcctcgacatcttcgccgacaaggacgacgcctgatccccatcggatctgtcgtcgggccactcgaagctcggatgcacgaatgaatgaacaaacaataataacgaatggatgtgcatgtatatcgtcatgcgcatgtcccacgacgagacgggagtataccacggtgtagtagtattatattaatacgtaattaatatagtatgtccacctttgtttgatactactaagggctatgtattgaggcacgcgtcccattgttttgtttttataacacttgtgcgatggttgcagaggactagccctctttttttttggtaagatgtctgtattattattattattcgggttccactgacatggataaaaaccatctgtgaaatagtttgctcttgtgctgtgctac

SEQ ID NO: 117511 - DNA, 2103 bp, Zea Mays
gctcctccttttccactgctctgcgtctgcgtctgcgtctgcactgcttcgcgtctccctccccccgcctccgcccccgccccggcaaaaagcaaaacacggccatggaaggctacgaccgcgagttctaccagttcagcgaccagctgcgcctgcagacggccgccttctcgggcctctccctcggcgactccatctggtcccccgccggccggcgcaacaacagcaacgacgtcctcttcgccgcctccgcgtcgcccgccgacgccgccgccaagagcaacgccgtcgtcgggctcaagctcaacgacggagggcccggcctcatcggctccgggaagctggccttcggcggcggcgccggaggcggcggcaccaacaaggccgaccgctacaacaacaacaacctccccaacaccgacaacaagaccgtgtacaacaccagcagcagcagcttcatgggcaacggcagcagctacgccaagaacaacaacaacaacgccgacatgctggcgttcgacaagatggggagctacggctacaacggcggcggtaataccaacaacaacagcaacggcgtggaggtgaagagctacttcaacaagtccgccgggagggcggcgagcaacaacaacaacaacaacaacagccacgccggcggcggcaacaagaagggcggcgccggggagtacggcaggaagaagcacgccaagagcgagggcgcggcggcggccacggacaagcagcggttcaagacgctgccggcgtcggaggcgctgccgcggggccaggccatcggcgggtacatcttcgtctgcaacaacgacactatggacgagaacctcaggagggagctgttcgggctgccgtccaggtacagggactctgtgcgtgctatccgcccgggactgcccctcttcctctacaactactccacgcaccagctccacggcatcttcgaggtacagtacagcacagcacagcacagtagccactagccagttcgtggttccctttccttgcttcttcttcgttcgctgtccttgcttcttcttcgttcgctgtattcacgaggacccggttccgatcctccgatcgccaggccgcgagcttcggcgggaccaacatcgacccgacggcgtgggaggacaagaagtgccccggcgagtcgcgctttcctgcgcaggtaccctactgtactgtctgcttcgatccacagtctagtactctagtctagcagccatggcggcggcggcggcggcgggtgatcgatcagctcaacgtaccacacgccacactagcgaagcgtgacttgtacgcttgtttcaattgtgttcaacaccaccaaacagtacatgtacatgtatcaccgacagacgaaaggctatcaatcacatcacgtgctgcgatggcgtgtggaatcgcaaaaagatttggtcagcggaggtaggttttggttgcgaaaaagtgaccgcccgccctaccctatacggcgggaccgcgtcaggtcagcagcttggttggctcgtagctttcgtcctagctagctactgtagtgtaggttgcttggtcagtcggcagaggatctggtcgcaggctccaagtgcgaccatctagatgctgtagctgctgcatttcctcgttattgacgcatggtgcttgcgatgtgatgtgctgcaggtgcgggtggcaacgcggaagatctacgacccgctggaggaggacgccttccgccccatcctgcaccactacgacgggcccaagttccggctcgagctctccgtcaccgaggccctcgccctcctcgacatcttcgccgacaaggacgacgcctgatccccatcggatctgtcgtcgggccactcgaagctcggatgcacgaatgaatgaacaaacaataataacgaatggatgtgcatgtatatcgtcatgcgcatgtcccacgacgagacgggagtataccacggtgtagtagtattatattaatacgtaattaatatagtatgtccacctttgtttgatactactaagggctatgtattgaggcacgcgtcccattgttttgtttttataacacttgtgcgatggttgcagaggactagc

SEQ ID NO: 117512 - DNA, 1265 bp, Zea Mays
ggcgcacggcacctcaagctctgctcctccttttccactgctctgcgtctgcgtctgcgtctgcactgcttcgcgtctccctccccccgcctccgcccccgccccggcaaaaagcaaaacacggccatggaaggctacgaccgcgagttctaccagttcagcgaccagctgcgcctgcagacggccgccttctcgggcctctccctcggcgactccatctggtcccccgccggccggcgcaacaacagcaacgacgtcctcttcgccgcctccgcgtcgcccgccgacgccgccgccaagagcaacgccgtcgtcgggctcaagctcaacgacggagggcccggcctcatcggctccgggaagctggccttcggcggcggcgccggaggcggcggcaccaacaaggccgaccgctacaacaacaacaacctccccaacaccgacaacaagaccgtgtacaacaccagcagcagcagcttcatgggcaacggcagcagctacgccaagaacaacaacaacaacgccgacatgctggcgttcgacaagatggggagctacggctacaacggcggcggtaataccaacaacaacagcaacggcgtggaggtgaagagctacttcaacaagtccgccgggagggcggcgagcaacaacaacaacaacaacaacagccacgccggcggcggcaacaagaagggcggcgccggggagtacggcaggaagaagcacgccaagagcgagggcgcggcggcggccacggacaagcagcggttcaagacgctgccggcgtcggaggcgctgccgcggggccaggccatcggcgggtacatcttcgtctgcaacaacgacactatggacgagaacctcaggagggagctgttcggtgagcgatattatattattatcttcggcgggtacgatgatgaacaccaccagcagcagcagcatactgattgtttgatgggtggaatggattggaattcaattgatgcagggctgccgtccaggtacagggactctgtgcgtgctatccgcccgggactgcccctcttcctctacaactactccacgcaccagctccacggcatcttcgaggtacagtacagcacagcacagcacagtagccactagccagttcgtggttccctttccttgcttcttcttcgttcgctgtccttgcttcttcttcgttcgctgtattcacgaggacccggttccgatcctccgatcgccaggccgcgagcttcggcgggaccaacatcgac

SEQ ID NO: 117513 - DNA, 540 bp, Zea Mays
gtttgcctccgtctcgtggtggtgttgcactgccgtcgagtcccgatatcgatctggttgtcgtcgaagtgaagctcagtttaaagctcgccaagggtttgatcaaagattttattcggagactatcgacgttctcgcaagctttaagtcggatttaatggacggtacgttaattaatcgcgtgatgcggaagatgccccgagtcgaccccaagcgcggactaaaccgcaggatgatgctgatggatgaactggaagatggataatctgagcgagtgccaagccaaaggatgatcgtcaagtggacatcgcctaacaaacactaacctagtgttactcaggcaagccccggtgcatgcaaccccttccttgtgtttttaaatacttttcgcacactttaagtctagtgaaatgtgcattaggtttataggagttgcttgaaaccctttgatgcattgccttccttgatatccatacctttatagatacttctgatgaagtatcaaaatatgatttacaaaatttgcttagccttgcttag

SEQ ID NO: 117514 - DNA, 1298 bp, Zea Mays
acggttaattaagcattccaatcctcagccatggccgtggacactactcaaccggagtactggctcaactggaggttcttgctgtgcgcgctctgggtctactcctgcatggccttggcattcttcttgattaagaagtacgagggggccagttcaccggacagcaatggcgatgacggtggagacagagaagaggcgttaccacgtgtcagacctggtgttgtttatcttgaagattgctggaagacatgccttgaggcaggtgcaggtcctgggggggatttggaccccgacgctgtgccagaaggaagctgcatagtggaaccagaggaagatgtggtagcagtcttcgtctgcttgaaggcagaggtcacagatggggttggcaatcacacctttctcgaccaagcttactttgtgcttgattttgctttgattgaggagccacataaagagcttcaaccgttccacacaaagtcaggctcctctaggttgggggctgacagagattggatcattgtgtaaagggctccggagtgcaacttgccagtgatgtcaatgaggggactccggagctgatctggcagatcagtgatatcgacgttgttcagagcaagttggagaatggccatctcccgttgggcagttcgactgagacgagttctcaggttgttgatcataccagtttgcataacctggctaacaattggttcaacatctgtcacatggttgcagagagcaggcaggtgttccacgatcgggccaaaggggagccagacgtccaaccataacgatgtggtcgtgccatttccaacacagaccgaagtgatggcccggtacagggggagaagggtctggaggtggttccagtgatcccctgcaggtttgttcctgtcatcggattgggcccaagccacccaggatgacagagcaggttggtgtagacgatggatgagcttgaggaggcaggtattcccacaggaaaatatatactatgacagttacgtgctttgacagtgtaagatacatgttacatgaagtaattttatagcatttagttagctttgtatgaaaccacctccaaaagctagcattccttccggcggccagctgtttgtttaaagctagctagctagcagagagagatggatcacttgttcttgcactccctgctgtcgtctgtgtatatgatccggctgccaggaatctatcacttcatcatcaagtcgaatcgcatacacatatatatatgtgggctggtacgacagtttcacttggtgtgattttgcatgctgttt

SEQ ID NO: 117515 - DNA, 1125 bp, Zea Mays
cacgaccatgatttggtaaagaaagcaggaggaagccggcggtgtaggcgacccatggctccacagacgaggagagagaggttggcgggggaggcgcggccgagctcgtcggggctaacaccggcgaagccgggggcggtcgaggtgcagcgccgacgggtgggcagcggttggacgagccgtcggatctccatctacgcctcccgagtctacttcctcctcatcatgctccagatcccgctcttcagggtcccttgtagagctggcacatgcacaactcctattcaagtaacatcatctcagttggtctcaaatgatatattcccagcagctgttgtgaaggccatgctctaccctggagctaccgtgagcagcctaactaaaagcaagacatttccgagttggaatgacctgtttgacatgtacaacctgacagaagcaaaaaatgcttctgcagtagttgatctccagcgtctagagatacttgccggaagctacttctgtgttgctggagcgctcattggcatcataaatcctgggaggatgactttgtttggtacccttttgattatctggggtatggtgaaagaagcactatttgggaagccagtgaacagtgatctgactcaatcaactcatgtctacccaaccattttgattgcacttatctgtgcattcatgtcaataacttacaacgtaaagaagacagcaagaagtagtactcctgtttctatcgctaagccactgataagttctgccaagtcaaaactgaagtagacttacaagtttaatcctcgtaactcttttgagatatttatttatgtgaaaaaaaacaggtttgaggatgacctgaggatgcttttggtgtatatctgactctttcaatactgtaacattcagtttcctttattgtattaacaattcgcaagggcacaccgtctgtaatgtttacaaaaaaaaccagctaaatcttggttttcccccaatgtttctgctatctaggcaggtttaattcagtttcatattgtatccaataagattgtagtctattttaccacaaggatggaaagttgtaattcctgacaggttctgggtcagttgttattcttctgtgtttggattttc

SEQ ID NO: 117516 - DNA, 1890 bp, Zea Mays
atggatcgatcgcctgcgttggaggggaaggatgccggcaggggctccggcagctggccacgcaccccacgcttcgccgtgggggatgaggtcgaggtcctcttcaccggatcgggctttcgtggcgcgcgcttcgaggccaccgtcactgcgcgcttcccggactcccgtcgctacgaggtcgtgggagtctccgagctacggccgaggccgccgccgccgcagccggggcgcgagttcgagctgtttgacctcgtcgaggcgtacaacaacgacggatggtggccgggcgtcgtgtccgacatccggcccaagcggaggcggaaccaagcgaaacgattcgccgtgtcgctcccgctgttccgcgaggtactggagctctcggcctcgttcgtgcggcccaggcgggagttcgtgtacggaagctggatagacgcgcaggaagtgctcgtagcctcttataaaattttacatgcattggtcacgaactatctgcccgatgggaccctcagccatgcaagccaaacagtacatggaatggaaaggctagtgtcagcaaaggtttatttgtcttatcagggcggaatgcccggtaatggcgagcagtggcgtcatgcgttgaggagttggatccggcggcgaggagagacatccggctgggtggaccactgcgtgaaggaccagacgctcgtcgtggttgccgagaagaagcaaaaggaggagctcaaagaggtgctgggcgacggcagggtggtggtgacagacgacaagaagaagagggtgcagcgcgccaagaagaagccagcgacgttccacggtgaaggtaagctgcgagggataccacagtatgcagaaggaagccgcgtagaggtgatgtgtgataaacagggcagagtttggaggccggctactatcaagaacatggtcggcggtaccaactatgttgttagctatggaaatgggcagagctcgattgaggtcctccacacaatgttcattcggcggccagaacccatccaaatggaagttgaagcccctaatgatagcaataaaggtttcacctggaaacctgtacgaacttgcattcatacgctgacaggaccaaaactgtttccagcagccaatgatattacaattgtatcatcacaacatccttgggctgaacctctacaacctgtttctgagaaatcacctggaccatcttcattgcttcatcctgttgtgatggcggatacatcagcattcatggcattggcagtgcctaacagtagtgatctttcaacggcgttctcgacaacttccttgctgctgatgcccaatgacaaaatggaggtcttccagaagctaccacagattccacacttccgcgaggcatggaattgccctccagaacttcgtgaaggaagagccctaggacttatggtctgttttgcaaacatggccaaaagcataaaagacatgcgaattcaggaggaaccacgactttatcaagagaagatgaacatcctgttagagatggaagagaatgggtttgaaactgggcccctgaaggttcgtctccataatcttctttgtacaaggaatcaccatatgaatctcaagagcaggaaagtaagattagagaaggagatacttgagatagaagcaataaactgtggattagagcagcgactcaagttccttgacatgtgcatcatggggatggaggagaagaaataccaagagatgaaaggttcacttgacatccaaaaaacagaaaattgttcacttatttcaaagctccaagtatatttgtgtcaagttgaggaatcactcaagtatgctgaagccgatttttgtagtattgctactgcaccgtggcaaccacatgttgtgccttcgataccgtaa

SEQ ID NO: 117517 - DNA, 1859 bp, Zea Mays
ctgggctgtacgtatataggtcgcccacaggcagcccagtgactccactccacccacgcctccaccacagagagccgcagcagactcgcaagggggtagtgttgtgtactctgcgctgtgcggacggcggccggcggccggcgaaggagatggatcgcctgcccgagtcgacccggagcatgaggaagtacgcgtcggaggccggcgggctgcgcgcggcgcggcagggcccccacgggcggtcgctgacggcgcgcacggcgcacagcatgtccacgacggcgctgcgcaccaagtccaagtcggccgcgtcgctgctgcgcagggtgcccttcgcgccgctccgccccgtcctcgccaacctgcaggaggtgttcctcggcaccaagctcgccgtgctattccccgccgtgccgctcgccatcgccgcccagtgcgcgcacttcggccaggtgtgggtgttttcgctcagcctactcggcctcatccccctcgccgagcgtgtcagcttcctcaccgagcagatcgcgatatacaccggccccaccgtgggcggcctcctcaacgcgacgtgcggcaacgccacggagctcatcatcgcgctcttcgcgctcatggagggccagatcgaggtcgtcaagtgctccctcctcggctccgtcctctccaacctgctgctcgtgctcggcacgtccctcttctgcggcggcgtcgtcaacctcggctccgaccagccgtacgacaggacccaagcggacgtcagcacgggcctcctcatcctcggcgtgctgtgccagtcgctgccgctcatgctgcgctacgcggtgggcgccggcgagcactccgtcgccgcggccaccacggtgctcgacctctcccgcgcctgcagcgtcgtcatgctgctcgcctacgtcgcctacctcttcttccagctcaagacgcacgcgcagctgttcgagccgcaggaggtggacgacggctgcgaggcggaagaggacgagcaggccgtcatcggcttcgccagcggactcttctggctcgccttcaacaccgtgctcatcgccatcctgtccgagtacgtggtcggcaccatcgagcctacctccaagtcctggggtttgtccgtcagcttcatcagcatcatacttctacccatcgtggggaacgccgcggagcacgccggagcaatcatttttgctctcaagaacaagctggacattaccctcggagtagcgttggggtcggcgacccagatctccatgtttgtgacaggtgccgctgagtgtcattgtagcttggatcgcgggtattcaaatggatcttgacttcaagctcatagagaccggctctctcttcgtctcagtaatagtgacagcattcaccctccaggatggttcgtcacactacctcaaggggatccttctgctgctgtgctacattgtgatcggtgcatgcttctttgttacgaggcaacctgcaagtaacaacaatggcgctgggctgtcgctgccaactggcactttgagtgcacaagctgcatgatggttcaagggtcctgcctgagcctgaacaaatgagcatccaaggcagcaacgcagttgtgagtctgaaacaatgccgtgcaaaggttgatgctttcagaagcggtgaaatctcagccggtggctcagtgctatgggagaaatgaaggctagctgctgttgcaataagggtagcgaatttgcatccggtctatgtatatgatgctgtgttgtttcatttattatacagcttaataagatatatgcagagggtggatttgtatatatttgtggcttgccggcttgtgcggttgtacaagaggattcccagcttgtttc

SEQ ID NO: 117518 - DNA, 1945 bp, Zea Mays
gcctggttaatttgatacccatggtttccaatcaattccaacaataattcattcattcgcccactgccacacagcgagcgcgctctcaggctgggctgtacgtatataggtcgcccacaggcagcccagtgactccactccacccacgcctccaccacagagagccgcagcagactcgcaagggggtagtgttgtgtactctgcgctgtgcggacggcggccggcggccggcgaaggagatggatcgcctgcccgagtcgacccggagcatgaggaagtacgcgtcggaggccggcgggctgcgcgcggcgcggcagggcccccacgggcggtcgctgacggcgcgcacggcgcacagcatgtccacgacggcgctgcgcaccaagtccaagtcggccgcgtcgctgctgcgcagggtgcccttcgcgccgctccgccccgtcctcgccaacctgcaggaggtgttcctcggcaccaagctcgccgtgctattccccgccgtgccgctcgccatcgccgcccagtgcgcgcacttcggccaggtgtgggtgttttcgctcagcctactcggcctcatccccctcgccgagcgtgtcagcttcctcaccgagcagatcgcgatatacaccggccccaccgtgggcggcctcctcaacgcgacgtgcggcaacgccacggagctcatcatcgcgctcttcgcgctcatggagggccagatcgaggtcgtcaagtgctccctcctcggctccgtcctctccaacctgctgctcgtgctcggcacgtccctcttctgcggcggcgtcgtcaacctcggctccgaccagccgtacgacaggacccaagcggacgtcagcacgggcctcctcatcctcggcgtgctgtgccagtcgctgccgctcatgctgcgctacgcggtgggcgccggcgagcactccgtcgccgcggccaccacggtgctcgacctctcccgcgcctgcagcgtcgtcatgctgctcgcctacgtcgcctacctcttcttccagctcaagacgcacgcgcagctgttcgagccgcaggaggtggacgacggctgcgaggcggaagaggacgagcaggccgtcatcggcttcgccagcggactcttctggctcgccttcaacaccgtgctcatcgccatcctgtccgagtacgtggtcggcaccatcgagcctacctccaagtcctggggtttgtccgtcagcttcatcagcatcatacttctacccatcgtggggaacgccgcggagcacgccggagcaatcatttttgctctcaagaacaagctggacattaccctcggagtagcgttggggtcggcgacccagatctccatgtttgtggtgccgctgagtgtcattgtagcttggatcgcgggtattcaaatggatcttgacttcaagctcatagagaccggctctctcttcgtctcagtaatagtgacagcattcaccctccaggatggttcgtcacactacctcaaggggatccttctgctgctgtgctacattgtgatcggtgcatgcttctttgttacgaggcaacctgcaagtaacaacaatggcgctgggctgtcgctgccaactggcactttgagtgcacaagctgcatgatggttcaagggtcctgcctgagcctgaacaaatgagcatccaaggcagcaacgcagttgtgagtctgaaacaatgccgtgcaaaggttgatgctttcagaagcggtgaaatctcagccggtggctcagtgctatgggagaaatgaaggctagctgctgttgcaataagggtagcgaatttgcatccggtctatgtatatgatgctgtgttgtttcatttattatacagcttaataagatatatgcagagggtggatttgtatatatttgtggcttgccggcttgtgcggttgtacaagaggattcccagcttgtttc

SEQ ID NO: 117519 - DNA, 1828 bp, Zea Mays
gcctggttaatttgatacccatggtttccaatcaattccaacaataattcattcattcgcccactgccacacagcgagcgcgctctcaggctgggctgtacgtatataggtcgcccacaggcagcccagtgactccactccacccacgcctccaccacagagagccgcagcagactcgcaagggggtagtgttgtgtactctgcgctgtgcggacggcggccggcggccggcgaaggagatggatcgcctgcccgagtcgacccggagcatgaggaagtacgcgtcggaggccggcgggctgcgcgcggcgcggcagggcccccacgggcggtcgctgacggcgcgcacggcgcacagcatgtccacgacggcgctgcgcaccaagtccaagtcggccgcgtcgctgctgcgcagggtgcccttcgcgccgctccgccccgtcctcgccaacctgcaggaggtgttcctcggcaccaagctcgccgtgctattccccgccgtgccgctcgccatcgccgcccagtgcgcgcacttcggccaggtgtgggtgttttcgctcagcctactcggcctcatccccctcgccgagcgtgtcagcttcctcaccgagcagatcgcgatatacaccggccccaccgtgggcggcctcctcaacgcgacgtgcggcaacgccacggagctcatcatcgcgctcttcgcgctcatggagggccagatcgaggtcgtcaagtgctccctcctcggctccgtcctctccaacctgctgctcgtgctcggcacgtccctcttctgcggcggcgtcgtcaacctcggctccgaccagccgtacgacaggacccaagcggacgtcagcacgggcctcctcatcctcggcgtgctgtgccagtcgctgccgctcatgctgcgctacgcggtgggcgccggcgagcactccgtcgccgcggccaccacggtgctcgacctctcccgcgcctgcagcgtcgtcatgctgctcgcctacgtcgcctacctcttcttccagctcaagacgcacgcgcagctgttcgagccgcaggaggtggacgacggctgcgaggcggaagaggacgagcaggccgtcatcggcttcgccagcggactcttctggctcgccttcaacaccgtgctcatcgccatcctgtccgagtacgtggtcggcaccatcgaggacattaccctcggagtagcgttggggtcggcgacccagatctccatgtttgtggtgccgctgagtgtcattgtagcttggatcgcgggtattcaaatggatcttgacttcaagctcatagagaccggctctctcttcgtctcagtaatagtgacagcattcaccctccaggatggttcgtcacactacctcaaggggatccttctgctgctgtgctacattgtgatcggtgcatgcttctttgttacgaggcaacctgcaagtaacaacaatggcgctgggctgtcgctgccaactggcactttgagtgcacaagctgcatgatggttcaagggtcctgcctgagcctgaacaaatgagcatccaaggcagcaacgcagttgtgagtctgaaacaatgccgtgcaaaggttgatgctttcagaagcggtgaaatctcagccggtggctcagtgctatgggagaaatgaaggctagctgctgttgcaataagggtagcgaatttgcatccggtctatgtatatgatgctgtgttgtttcatttattatacagcttaataagatatatgcagagggtggatttgtatatatttgtggcttgccggcttgtgcggttgtacaagaggattcccagcttgtttc

SEQ ID NO: 117520 - DNA, 1747 bp, Zea Mays
gcctccaccacagagagccgcagcagactcgcaagggggtagtgttgtgtactctgcgctgtgcggacggcggccggcggccggcgaaggagatggatcgcctgcccgagtcgacccggagcatgaggaagtacgcgtcggaggccggcgggctgcgcgcggcgcggcagggcccccacgggcggtcgctgacggcgcgcacggcgcacagcatgtccacgacggcgctgcgcaccaagtccaagtcggccgcgtcgctgctgcgcagggtgcccttcgcgccgctccgccccgtcctcgccaacctgcaggaggtgttcctcggcaccaagctcgccgtgctattccccgccgtgccgctcgccatcgccgcccagtgcgcgcacttcggccaggtcacgggcgtcgtcagttcttcaagcctaccacacggccggcttttttccaagcctaacgctagcttctgctgctgttctgctctgctgcatggcgcgtgtgcagtgggcggcctcctcaacgcgacgtgcggcaacgccacggagctcatcatcgcgctcttcgcgctcatggagggccagatcgaggtcgtcaagtgctccctcctcggctccgtcctctccaacctgctgctcgtgctcggcacgtccctcttctgcggcggcgtcgtcaacctcggctccgaccagccgtacgacaggacccaagcggacgtcagcacgggcctcctcatcctcggcgtgctgtgccagtcgctgccgctcatgctgcgctacgcggtgggcgccggcgagcactccgtcgccgcggccaccacggtgctcgacctctcccgcgcctgcagcgtcgtcatgctgctcgcctacgtcgcctacctcttcttccagctcaagacgcacgcgcagctgttcgagccgcaggaggtggacgacggctgcgaggcggaagaggacgagcaggccgtcatcggcttcgccagcggactcttctggctcgccttcaacaccgtgctcatcgccatcctgtccgagtacgtggtcggcaccatcgagcctacctccaagtcctggggtttgtccgtcagcttcatcagcatcatacttctacccatcgtggggaacgccgcggagcacgccggagcaatcatttttgctctcaagaacaagctggacattaccctcggagtagcgttggggtcggcgacccagatctccatgtttgtggtgccgctgagtgtcattgtagcttggatcgcgggtattcaaatggatcttgacttcaagctcatagagaccggctctctcttcgtctcagtaatagtgacagcattcaccctccaggatggttcgtcacactacctcaaggggatccttctgctgctgtgctacattgtgatcggtgcatgcttctttgttacgaggcaacctgcaagtaacaacaatggcgctgggctgtcgctgccaactggcactttgagtgcacaagctgcatgatggttcaagggtcctgcctgagcctgaacaaatgagcatccaaggcagcaacgcagttgtgagtctgaaacaatgccgtgcaaaggttgatgctttcagaagcggtgaaatctcagccggtggctcagtgctatgggagaaatgaaggctagctgctgttgcaataagggtagcgaatttgcatccggtctatgtatatgatgctgtgttgtttcatttattatacagcttaataagatatatgcagagggtggatt

SEQ ID NO: 117521 - DNA, 1865 bp, Zea Mays
actccactccacccacgcctccaccacagagagccgcagcagactcgcaagggggtagtgttgtgtactctgcgctgtgcggacggcggccggcggccggcgaaggagatggatcgcctgcccgagtcgacccggagcatgaggaagtacgcgtcggaggccggcgggctgcgcgcggcgcggcagggcccccacgggcggtcgctgacggcgcgcacggcgcacagcatgtccacgacggcgctgcgcaccaagtccaagtcggccgcgtcgctgctgcgcagggtgcccttcgcgccgctccgccccgtcctcgccaacctgcaggaggtgttcctcggcaccaagctcgccgtgctattccccgccgtgccgctcgccatcgccgcccagtgcgcgcacttcggccaggtgtgggtgttttcgctcagcctactcggcctcatccccctcgccgagcgtgtcagcttcctcaccgagcagatcgcgatatacaccggccccaccgtgggcggcctcctcaacgcgacgtgcggcaacgccacggagctcatcatcgcgctcttcgcgctcatggagggccagatcgaggtcgtcaagtgctccctcctcggctccgtcctctccaacctgctgctcgtgctcggcacgtccctcttctgcggcggcgtcgtcaacctcggctccgaccagccgtacgacaggacccaagcggacgtcagcacgggcctcctcatcctcggcgtgctgtgccagtcgctgccgctcatgctgcgctacgcggtgggcgccggcgagcactccgtcgccgcggccaccacggtgctcgacctctcccgcgcctgcagcgtcgtcatgctgctcgcctacgtcgcctacctcttcttccagctcaagacgcacgcgcagctgttcgagccgcaggaggtggacgacggctgcgaggcggaagaggacgagcaggccgtcatcggcttcgccagcggactcttctggctcgccttcaacaccgtgctcatcgccatcctgtccgagtacgtggtcggcaccatcgagcctacctccaagtcctggggtttgtccgtcagcttcatcagcatcatacttctacccatcgtggggaacgccgcggagcacgccggagcaatcatttttgctctcaagaacaagctggacattaccctcggagtagcgttggggtcggcgacccagatctccatgtttgtggtgccgctgagtgtcattgtagcttggatcgcgggtattcaaatggatcttgacttcaagctcatagagaccggctctctcttcgtctcagtaatagtgacagcattcaccctccaggatggttcgtcacactacctcaaggggatccttctgctgctgtgctacattgtgatcggtgcatgcttctttgttacgaggcaacctgcaagtaacaacaatggcgctgggctgtcgctgccaactggcactttgagtgcacaagctgcatgatgggtgagcctgcagaaccttgtttttccttgttcatctatccactagtaggttgtagtagtttaaaaaaggataataggtgtttggtttcgacctctgatggcagagatgatacgaaagcaactcctgttgtcttaatcatgcaaaatgcatgcccccgttgctatagaatcatcctgaccttgggacagctggtgtgttcatcatctgatctgatgagtagctcatgtgtcgtattcataggttaagtatatataggtcctagtatataattttgccgcggcggtcacatgtcatgcatggaacttacttaaatgtgtctcgatttatttgtcatctctctgggccgaatgcttgttctcccacac

SEQ ID NO: 117522 - DNA, 180 bp, Zea Mays
atgcaggtaatctacaggggaacctactggtgccgttcctgggcgctgcttcaaaggcatgaagctgcaaaggagaagatagtccaggcttgcagacatctggagagagtggtgatgatggtgtttgcgcattatggatggcgtttctccaatcgcagtactctgtagtttttttgatgt

SEQ ID NO: 117523 - DNA, 1764 bp, Zea Mays
atgacgaagcacggcctcctcttcttcctcgccatcgccttgcttctgcaccgccactacacgagcgcctcttccactggtcagccaacaagaagcagtagcacagcatcaagatcaactgcagaatggcagcccttgcactgcagtccggtgtcctcatgcggctcgttcctctacgtcactcctggagggcggaacctgtcagagatagcctccgtattcaacggcaacgcatctctcatccagcccgtcaagcgtctctccgggtcagaggacctgctgatggccgtggcatgcgagtgtcaggccatcagcaacaccaccacggctgctgcttttcttcatgacactcagtacaaggtggagccggacgccatacctgacgacgtcaagagcaatactttcagtgggcttgcgatggatgttggtgatggcttcccactgacgcccggggctacagtcacggttcgcctcccgtgcgggtgttcctcctcgacagcgtccaagggagtgctgtcttattcggtgcaggaggaagataccctgagtactatcgcaagcttgttcagttcaagtccagaagccatcttgaacttgaatccgagcgtgaaaaatcccgatttcatcaaacccgggtggatcttgtttgttccaatgggggttgctggttcttctaagaaaaaaagggttggtagtacgacaatcacaatagcagcatccgtatcagctataatactgtccgtctgcgtcctcactgtcattcttcgcctcagaaggaggccttctcagcaaaatgctgaagctcctgaaataaaaatggagagagcacccaatatcgacccattccagacagagaggcctgtcattttcagtctgaaagtagtcggagatgctacagctaacttcgatgagaagagaaagatcggcgagggaggatacggcagtgtttacctcggtttcataggaacacatgaaattgcggtcaagaagatgagagcaagcaaatcgaaggagttctttgctgagttgaaagctctgtgcaaagtacatcacattaacgtggttgagttgatcggttatgctgctggggatgaccacttgtacctggtgtacgaatatgtccagaacggatcgcttagtgagcatctgcatgacccgttgctgaaaggtcaccagcctctttcatggactgctagaacgcagatagcattggacgcagcgcgtggtatcgagtacattcatgaccataccaaggcctgctacgttgcagatttcggactagtgaagcttgttgaacgtagtgacgaagaggaatgggttgccactcgtttggttgggacgccaggataccttccacccgagtcagttcttgaacttcacatgaccaccaagtctgatgtgtatgcgttcggagtagttcttgcggagctcattacaggactccgtgcacttatccgggataacaaggaagtcaacaagacaaagtcaataatctcaattatgaggaaagccttcgattcagaagatctagagaggtcactggagacaatcatagaccctaacttgaaggacagctaccccatagaagaagtgtgcaagatggctaacgtttcgatgtggtgccttagtgaggatccactgaaccggcctgagatgagggacaccatgccggccctgtgccagatccatctcgcctctatcgagtgggaggcgtcgctcggaggtgatggtgaagtgttcagtggtgtttcctatggcagatga

SEQ ID NO: 117524 - DNA, 1897 bp, Zea Mays
ctttgagctagtgagcctcgcgtccatggtatgcgcgggaacctcccgtctctcgccgtggccagtaatggcgccgccctccctctgtccttctcccagacgaagcagctccacgcgcgcctcatcgtcgcgtcccccttctccgcctctggccctgcctacctccgcctcctagtgctccgctcctatgccgcccgcggagacctttcctccgcccgccgcctgctcgacgaggctccccgcccggcctcgccgcttctctacaacgccctaatccgcgcgcacgcccgccgtctcgaccttccagccgcgctcgcgcttttcgcccgcatgcgccgctccgccactccgcccgacgcgcacaccttcgcctgcgtcctccgcgcctgcgctgaatcctcgcgcccggatgctgttaaggtcgttcatggtatcgctacaacatgcggtatgtgctcccgtccgattgtcctgagctcgcttgtcagtgcgtacgcgaagcttggcctcgtggacaatgctcgcagcttgttcgatggattgtgtgagccggacttggtcatttggaactccatgatgtccgcatatgggtaccaagggatgtggtatgatggtctacagatgttctccttaatgcggagagctgggcagcatccggatgggtattcaatggttagcttagtctcatgcttctggaatccggaaatacttgcatttggtcaagcagttcatggaatatgtgtcaagggaggttatgactctggacaccatgtgagaagcacacttgtgtcaatgtacatgaggtttgggtgtgtggaatctggccaaagattgtttggtagcttgtctgatgtggatttgattacctggtcgtcactgattactgggctaatacaaacgggcaagtatgaggaatcatttgatttgttccggaaaatgtgctttacaggtaggaggcccgacagcatattgattgctagtgttctctcggtatttgcttctactgctgctattagctataccaaggaggtccactgttatgcagtcaagcttggagctgatatagacataagagtctcttcttcgctaatggatgcttatgcaaaatgtggtttcactgagctcggatactgggtgttccgccaagtacctaataagaactcagtcatgtacaacacggtcatatcaaaccttggatctcacgggtttgcaactaaggctattgaagtcctagatgagatggttaatgataagctcaggcctgatagtgctaccttctcctctttacttgctgcttgttgtcatgtggggcacttggaggagggatggaagttgttcaggagaatgagggatgagttcaagatagttgttgaaatggagcactatgtgtacatggtgaggcttcttgcaacatttggccagctgaaggaggcatatgatcttatacagacaatgcaaatccaaccagattgtggtgtgtggggtgcattgctttggggttgttgtgtccatcgtgattctagcttcggcaggattgttgctgaaaagctatgtgaactcaattcagacaaagctgcttacagggttatgctctcaaacatgtatgcctcacaagagatgtggtgggatgctgaggaggttagggatgagttatcaaaagaaaatatgtacaagaacacagggacgagttgggttggtgaagtaaaaaaatgatggttggcatttgtcattgagaaagcatgtcagatatcaagtacatatgaactctatattgttatattccggtagagatgaaatcttgtgaaactccaaacatgtactcgttggattttagcttaaccagttttgtactcagtctttccttataatcatgggaggttcatttgcatacatgaaa

SEQ ID NO: 117525 - DNA, 648 bp, Zea Mays
atgaaaagtgtatctgtgtgtgtgtctgtcgatcgagtgagtgttggacgacgacatgcaccaacgacctcctggccgtacgtcgcgcgtcggcgtagtcgtacgtcagaggaagtcgacgctgaactcgtcctccagcgcgctgcgggcgaggtcgaagcaggaacccggcaggtcccgcgacatggaccgtatcgggaagcccgcagcagcgccgccgacgttgtgatcatggagcctcgccgccgggtgctgctgccaggggctgtacttggccgggtcgacgaactgatggtacgccgccgcctgggcagcatcgcggccgaacatggccacgtgcggcggcatcggctcgccgccgctgcaggcccaggtgccgttgccgttgctgttgctggagctgtctccgccgccgccgccgccgcctgtgtagggggcgctgtacgccgtggcggcgtccgagaccacgtcgacgccgccgccgccgtagtcgcagaggtggtcgttgtcggagcggaacgagccgtaggagccctgctgcattgccgtggggacgttggtgacggacagtgggtcgaagctgacggtcggggagtgtggcgcgagagggtcgtcgctgctcatggcgaagcagtggtcgtcggctga

SEQ ID NO: 117526 - DNA, 2859 bp, Zea Mays
ccacctcctctctcactacctatctgccatcccgagtgattgtctgtgcgaccaagacatggcttctgacggcggcggcagctcccctcctcccgcatcgtcgccctatggtcggccgtcaagcccactcgcggttactaactcctccccatctcagcccacacgccgctccggcggtcgccgtcgccgtggttccgctagtccttatgcttcgtccccttctctcggggggttcgagacgccgccgcaccctggccgccgcacgccgtccggagctggggctggcgcccctcggcagccgcgtcagaactcgactggccggttcccgccgacgccctccactccaatgtccaccgatgacgtccctccatcctccgaagctggggacgacgagaccgacggcggcggcggcgtcgacgccaccccggtcttcgtctggggcaccaacataagcgtgcaggacgtcaacgccgccattctccggttcttgcgccacttccgggacccgcgcgacgctggccgcgtcgacccggtcatggacgagggcaagtacatgcgcgccatccaccgcatcctcgagctcgagggcggggagtcgctcgacgtcgatgcgcacgacgtgtttgaccacgacccagacctctacagcaagatggttcgctatccgctcgaggtgctcgccatcttcgacatcgtgctcatggacctcgtcgcgcgcatcgagccgctcttcgagaagcacatccagaccaggatctacaacctcaagtcgtccatttgcttgaggaatctcaacccatctgatattgagaagatggtatccatcaagggtatgataattagatgcagctcggtcataccggagctcaaggaggctgtgttccgctgcctggtttgtggtttctactcagagcccgtcatggttgatagaggaagagtaactgaaccacacatttgtcagaaagaacaatgtaaagccacaaattctatgaccctagtgcacaacagatgcagattttcagacaagcagatcataaagttgcaggaaacaccagacgagataccagaaggtggcactccacatacagttagtgtcttgatgcatgataagcttgttgatgctggaaagcctggagatagggttgagataactggaatatacagagctatgagtattcgaattggaccaactcaaaggacagtgaagtctatattcaagacatatattgattgccttcacataaagaagacagacaagtctaggcttcatgtggaggacaccatggatattgataattctaacgctagcaaatctactgaagaggattttcttagtgataaggttgagaaactaaaagagctttcgaagttgcctgatatctatgaaagattgactagatcattagctccaaacatatgggagttggatgatgtcaaaagaggtctcctttgccagcttttcggcggcaatcccttgaagcttccttctggagctagtttccggggtgacatcaatattttacttgtgggggaccctggaacaagtaaatcccagcttctccagtacatgcataaactgtctcctcgtggtatctatacgagtggtagaggaagttctgctgttggtcttactgcttatgttaccaaagaccctgagactggcgaaactgttctagaaagtggagcacttgttttgagtgacaaaggtgtttgttgcatagatgagtttgataagatgtctgataatgcccgaagcatgttacacgaggtgatggaacagcagacagtatccattgcgaaggctggaataattgcatctttaaacgctaggacatctgtcctggcatgtgccaatcctactgaatcacgttacaatccaaggctctctgtaattgacaacatccacttagcgccaacgctactttcaagattcgacctgatttatcttatcttggacaaggcggatgagcaaactgataggcgcctggcaaagcatattgtttcgttgcattttgagaatccaaatttagaggagctcgaggtcttggacttgcagacactagtttcctacataagctatgcaaggaagtatattcagccacagttatctgatgaagctgcagaagagttaactcgtggctatgtcgagatgagaaaaagagggaatagccctgggagcagaaagaaggtcataacagcaaccgctagacaaatagagagtttgatccgtctcagcgaagcattagcccgaatgcggttctctgaagtggtcgaggtgcgggatgttgtggaggcattcaggcttcttgaagtcgccatgcagcagtctgcgacggatcatgcaactggtacgattgatatggatctgatcatgacggggatatccgcaagcgaaaggcagaggcgggagaacctcgttgccgcaacccgtaacctgattgcggagaaaatgcagcttggaggcccctcgatgcgcatgattgagttgctggaggaactgaggaagcagagctcaatggaaattcatatgcacgaactccgcggtgctcttggcaccctgatgactgaaggcgcggtggttatccatggagacaacgtgaggagagtttgatgtcttgacggccatctgcggtgatgcttctataaggctccaacccgccacttccttgaacagacaaggttccgaagataactgtagcacttagccgtaacttgtggtccgaggtctaaactggtccagatttgtagcagtattgctagttgtagatttttttttaaaaaattgttatcagaattttgttctcttgctattgtccgagtttactgcaacaaggcaactatcatctcgttctctgatca

SEQ ID NO: 117527 - DNA, 1274 bp, Zea Mays
tgtcgtgagcacgcttcgcttagcagcatatgccagtaaatattcggaaaaccgccacggccgacctcgccttctgcctctccgatccgcatctccgatccgcatctccgcttagtatatacatggggattggtagcgagcgattgattacactgggtgaccatcatcatcagtaactaataattactttagattagaaagcaagaatcgagtcgagaagatggtgcagttcggcaagtggctgaggaggcagatcgagcggagcctcccggagtggcaggaccagttcctgcggtacaaggagctgaagcggtgcgtcaaggcccgctccggcggctgcccgccgttgcccgcggaggaggccgagttcgtggccgagatcgacgcggagaccgagaagatcaacgccttcttcctcgaccaggaggaggagttcatcatccgccaccgggagctgcagaaccacatcgagcgcgcgctgggccgcggcaggccggcgccggcgccggcgctgcacgaggccgaggtcgccgccatccgcagggagatcgtcaacttccacggcgtcatggtgctgctcctcaactacagcagcatcaactacataggcctggccaagatcctcaagaagtacgacaagcgcaccggcgcgatgctgcggcttgccgtgatggagtcggtgctgcagcagcccttcttcaagacggagacggtgtcgcatctggtgcgggagtgcgagtccttgatggaggccgtgttcccggaggcgcgcgatcggggccaggccgccgccgcggcgctcgccgtcgcggaggcggagcagggcatcttccgcaacaccgtggccgcgctcctcaccatgcaggacgtccgcgcggggagctccaccagaggaagccactcgctgccgccgctcaacctgccggactccgactggctacggtccttcgacccgccgtttccgatcccgacccgatgacacttgttgctcgccgctcctagtaggcttgcgccagcctcctcgatctcccttccttttcgtctagcttcttggcccgcccggtcccggcccggtacatgctgtgcactgtgcttgccttggttttccattttcccgctttctaagttctaattaactaatgtatgtagagtgcagtagtgagactacagtaaataaatgtaatttactggaatgacagccgagagaacgtacaagctcatactcaatttggttccaattttgtggaaaaaaaacctactgttaactgtgaaaa

SEQ ID NO: 117528 - DNA, 1333 bp, Zea Mays
tgtcgtgagcacgcttcgcttagcagcatatgccagtaaatattcggaaaaccgccacggccgacctcgccttctgcctctccgatccgcatctccgatccgcatctccgcttagtatatacatggggattggtagcgagcgattgattacactgggtgaccatcatcatcagtaactaataattactttagattagaaagcaagaatcgagtcgagaagatggtgcagttcggcaagtggctgaggaggcagatcgagcggagcctcccggagtggcaggaccagttcctgcggtacaaggagctgaagcggtgcgtcaaggcccgctccggcggctgcccgccgttgcccgcggaggaggccgagttcgtggccgagatcgacgcggagaccgagaagatcaacgccttcttcctcgaccaggaggaggagttcatcatccgccaccgggagctgcagaaccacatcgagcgcgcgctgggccgcggcaggccggcgccggcgccggcgctgcacgaggccgaggtcgccgccatccgcagggagatcgtcaacttccacggcgtcatggtgctgctcctcaactacagcagcatcaactacataggtaggaggagctctagctctagctagctagctgtacggagttgaattgaaagcctgcaggcctggccaagatcctcaagaagtacgacaagcgcaccggcgcgatgctgcggcttgccgtgatggagtcggtgctgcagcagcccttcttcaagacggagacggtgtcgcatctggtgcgggagtgcgagtccttgatggaggccgtgttcccggaggcgcgcgatcggggccaggccgccgccgcggcgctcgccgtcgcggaggcggagcagggcatcttccgcaacaccgtggccgcgctcctcaccatgcaggacgtccgcgcggggagctccaccagaggaagccactcgctgccgccgctcaacctgccggactccgactggctacggtccttcgacccgccgtttccgatcccgacccgatgacacttgttgctcgccgctcctagtaggcttgcgccagcctcctcgatctcccttccttttcgtctagcttcttggcccgcccggtcccggcccggtacatgctgtgcactgtgcttgccttggttttccattttcccgctttctaagttctaattaactaatgtatgtagagtgcagtagtgagactacagtaaataaatgtaatttactggaatgacagccgagagaacgtacaagctcatactcaatttggttccaattttgtggaaaaaaaacctactgttaactgtgaaaa

SEQ ID NO: 117529 - DNA, 858 bp, Zea Mays
tgtcgtgagcacgcttcgcttagcagcatatgccagtaaatattcggaaaaccgccacggccgacctcgccttctgcctctccgatccgcatctccgatccgcatctccgcttagtatatacatggggattggtagcgagcgattgattacactgggtgaccatcatcatcagtaactaataattactttagattagaaagcaagaatcgagtcgagaagatggtgcagttcggcaagtggctgaggaggcagatcgagcggagcctcccggagtggcaggaccagttcctgcggtacaaggagctgaagcggtgcgtcaaggcccgctccggcggctgcccgccgttgcccgcggaggaggccgagttcgtggccgagatcgacgcggagaccgagaagatcaacgccttcttcctcgaccaggaggaggagttcatcatccgccaccgggagctgcagaaccacatcgagcgcgcgctgggccgcggcaggccggcgccggcgccggcgctgcacgaggccgaggtcgccgccatccgcagggagatcgtcaacttccacggcgtcatggtgctgctcctcaactacagcagcatcaactacataggtaggaggagctctagctctagctagctagctgtacggagttgaattgaaagcctgcaggtctgtccttttgcccatgcatgtctcctctccatgcatgatgattctaaccaatcccgttccatcctccatgtctggctgctggctgctggctgcttgcaggcctggccaagatcctcaagaagtacgacaagcgcaccggcgcgatgctgcggcttgccgtgatggagtcggtgctgcagcagcccttc

SEQ ID NO: 117530 - DNA, 415 bp, Zea Mays
tcgagcaaccacaatcagggcgataatgtcaatgaatcgcagtcacaacaaggttctataccatctgttaatggttccgaagcaataggaggaaatgaggaagtggaagagattgaagtatctaatgatgaagactagaatggtggtgttggttcaaagagaaagttgacttcaactatttggaatgaattcaaaagggttaaagttggggataaaattgaagcaaagtgcaattggtgtgcaaaaaagcttggaggagagacaaaaaaatgaaaccaaacatcttcatgatcatctcaagatatgcccatagcgtaagagtaaaatggcctggcaaaacaagacatttagccaaagctcattaaggtttggttcccatgataaaggaaaaacctcagtggaaaacaatacattt

SEQ ID NO: 117531 - DNA, 504 bp, Zea Mays
atggaggtgctcgcgctgaccgtgtcgacaaccatgatgtccgctggatccggcgccctcccacctagctacgaagaatcgagagaccggagcccaagcggccaaacaaacaattgttggaccaaatttgctggaaccgtctactcctctgccggaatcgcgctgcaagaaaagagggagaaacgaatagctgagactccaatccaacacatgaaaggagatgaaggcaaccaagaaccaacaagcaagaggaatggcacggctaccaaactaacgccaggaacccaatcaatcaatcaatcggtagttgaagctcaagccgagatcaatgattgggtgggggaaagagaggaaaggggaagcggacgaggcaaggagataaggagggaggaggcggtaccggcggcggatagggcgatcggacggccgcggaggcgtcgctgggtcgcggaggaacgggaggttgcttcggccgtggcggaattgcggcttgtgggcgggtag

SEQ ID NO: 117532 - DNA, 336 bp, Zea Mays
atggaggacacaatgctggtgctgatgccgagcgacaaaatgcgggagacccctcacaccacggtggccgcacagatgttggaggacgccgccatcggcctcctccaccttctctacctcgttctccaccctgccacatcagggttatcccgtgatgttcgctgcaacgcccctgcttcctcccccttctccgcccctgccacgctggggttctcttgtgatgttcgctgcaacatccctaattcgcagcatgagagggagttgttgcatgcacggagggggacttccactttaagggctgatttggtgacaagaaaattggaggcggtccattga

SEQ ID NO: 117533 - DNA, 748 bp, Zea Mays
gtcagacagtggcccttatgtattactatccaatatttatgcctccaaagggctatgggtggatgtgcagcagctaagactgaggatggattatgctggggcggtgaaggagccaggttatagttggattgaggtgatgaaggaggttcatatgttcattgcaagagggacagaacacccacaggcagaattgatatatgcagtattggatgaactgacgggtctactaaaggattttggctatcaccctgatatctctgaacttgcattgcttggtgagactggttagtgctacttgctcattggtcagctctgggatgatgaggctgtgatatagtattagtggctttagaattttactgttacttacaactgccagttccaaaacaataacctgactggagtcatcttccgatgctgaaccagaaatcaagacttgagtcatcttctatgcatgatgctagacaaataaaaaaatcagcaggtcctcagctcgtgaatgattccagaagcaaggggatggttctgacaaatttcggtcccatgtacctagatgcatggatgcgaacagtgacttgtatagttcctggcatcagtatgaggtggtgtacggtggttttctttcagcactgattatgccctaggtagtctaacatacctgggtacttcaaacagcaaatccattttagccatcagttatgatgtgatgggcaagacgttttgctagattattcaactaagttgcatc

SEQ ID NO: 117534 - DNA, 829 bp, Zea Mays
atgaatcctctgtccggttcatcttccaccatctcgtgtttctccacccaattacgcagtctcgcgcaagttctgctctccggccgagcaggcagccgcctccgccgcgtcctcccggctgcccacgcccgcgccatcatctccgatggacttggcttcctgtttctcgcgaaccttctcctcgacggttactctaagctcggccgcatccacgacgcgcgccgcctgttcgatggaatgccgcaccggaacctcgtgtcctggtcgtcagccatctccatgtacgcgcagcacggcgccgatggccaagcccttgccctgtttgcagccttcaggagatcctctgacgaggcacccaacgaattcgttcttgccagcgtcgtgcgggcctgcatgcagtccagggatgttccttttggcgagcaagtgcatggaaagatcattaatcttggcctggatgtcaatctctatgttggcactgcactcgtcaacctatatgcgaaggttgcctgcatggatgcggccatgcgtgtgttccatgctctcccaacaaagaatccggttacttggacagcaatcatcactggttactctcggattggccatggagaactagccctgggcttgtttcaaacgatggtcgctcaaggcgtccagcctgacaggtttgtgttagcaagtgctgtcagtgcctgctctgcacttgcctttctacagggaggcaggcaaatacatggctacgcttatcgaagtgcagcagaagtggatgcttccgtgatcaacgcgctcatagatttgtattgcaagtgctccagaccgttagtggctc

SEQ ID NO: 117535 - DNA, 2931 bp, Zea Mays
ccgcgcctccttcctccgtcctccggctcggcggtccgccgccctccttcatcctccggctggaggccctcctccacccccgcctcgcggccctacactctcgttgggtcggcacccgtgcctcccattctctcctcttctctcgctcgagcgccgcggcctctgctcgctcggtcgaggctgaaggacgggacaaagcgcagattgaccaccgggcgtcggaaccgccgccgctgccgccgaaggggttataagatcagatggggacttcggtgcaggtgacgcctctcagcggggcgtacggggagggccccctgtgctacctactcgccgtcgatggtttccgcttcctcctcgactgcggatggaccgacctctgcgatacctcgcaacttcaacccctcgcaaaggttgcaccaactgtagatgctgttcttttgtcacatcctgacatgatgcatctaggagctttgccttacgctatgaaacaccttgggctgtctgcaccagtttatgcaacagaacccgtgtttaggcttggccttttgaccatgtatgaccatttcctgtctcgatggcaagtttcagactttgacttgtttactctagatgatgttgatgctgcattccaaaatgttgtgagactgaagtactcacaaaattaccttctgaatgataaaggtgaaggagttgttattgctccacatgtggctgggcatcttttgggggggacagtttggaagattacaaaagatggggaggatgttgtgtatgctgttgacttcaaccatcggaaagagaggcatttgaatggcaccgttcttggatctttcgtgcggccagctgttctgataactgatgcttacaatgctttgaacaaccaaggctatagaaaaaagcaggatcaagatttcattgaatcattaattaaagttctggcaactggtggaagtgtgctacttcctgttgacacggctggtagagtgttggaacttcttttgttattggatatgtactgggatgaaaggcgattgcagtaccctatctacttcctgacaaatgtgtcgacaagtaccgttgattatgtcaagagttttcttgaatggatgggtgatcaaattgcaaaatcttttgaaagcagtagagccaatgccttcttgttaaaaaaggtcacgctgataattaacaaagaagagcttgagaaattgggagatgctccaaaggtggttctggcatccatggcaagtttggaggttggcttttctcatgacatatttgtggagatggcaaatgaagcaagaaatctagtgctctttactgagaagggacagtttgggacactggctcgaatgctccaagtggacccaccccctaaagctttaaaggtcactatgagcaagaggattcctttggtgggtaatgaactaaaggcttatgaagaagagcaagaacggataaaaaaagagaaatcgctaaaggctagccttgtcaaagaagaggagctaaaggcttctcatggatcaaacacaaaggcttctgagccaatggtcattgatgcaagctcatctcgaaaatctgtgaatgcttcacattttggtgggaacaatgatattctcatagatggatttgtccctcctttaaccagtgttgctccaatgtttcccttctttgaaaacactgctgaatgggacgactttggtgaggtcatcaaccctgatgattatatgatgaaacaagaagaaatggataatactctgatgcttggccctggagatggattagatggtaggatcgatgatggctcagcacgcctgcttcttgattcaacgccctcaaaagtcatttccaacgagatgactgttcaagtgaaatgctcattggtttatatggactttgaaggtcgctctgatgggcgttctgtaaaatcaattattgctcacgtggctccactgaaacttatcctggtgcatggatcagctgaagcaactgaacatttgaaaatgcactgcgcaaagaatttagatttgcatgtttatgctccacagattgaggaaactattgatgtaacatcagacttatgtgcttataaggtacaactttcggagaagttaatgagtaacatcatttctaagaagttgggtgagcatgaaattgcttgggtggatgcagaagttggaaaagaagatgagaagcttattttgcttcccccatcgtcaacaccaccaccccataagcctgttcttgtgggtgatctaaagttgtctgattttaaacaatttttggaaaacaaaggctggcaggttgaatttgccggaggtgctttacggtgtggcgaatacatcatggtgcgcaaagttggtgattctatcctaaagggcagcacagggtcccagcagatcgtcatcgagggccccctctgcgaggactattacaagatcagggagcttctgtactcgcagttctacttgctgtgaggcaacgtacggcaaagcttaggctttatttacattggttataaattattagattagatgttgactgtaagactatcctggtgttttctgtttttacattgtttgtttcccctttcacaagcttaggcttgtgttgtccgaaatttggcgtgggatgaccgtgacaaagttttggcatcagtttccggatgaccgtgctgactaccaagtggtccaagaacgatgacaatgcatccatccaaagaagaacaaaaacaacgacgacaaagcgtccacctattttccacctaggggtgcaatcaatcagatcggagatgggtaatgcttgtatcatattttctctttagatttagattagatatattttctttttagatttagatcagatacgaatattattggtctatgaccgtaagatttgaatggatatcaatatatcttaaatacctatactcta

SEQ ID NO: 117536 - DNA, 2811 bp, Zea Mays
ccgcgcctccttcctccgtcctccggctcggcggtccgccgccctccttcatcctccggctggaggccctcctccacccccgcctcgcggccctacactctcgttgggtcggcacccgtgcctcccattctctcctcttctctcgctcgagcgccgcggcctctgctcgctcggtcgaggctgaaggacgggacaaagcgcagattgaccaccgggcgtcggaaccgccgccgctgccgccgaaggggttataagatcagatggggacttcggtgcaggtgacgcctctcagcggggcgtacggggagggccccctgtgctacctactcgccgtcgatggtttccgcttcctcctcgactgcggatggaccgacctctgcgatacctcgcaacttcaacccctcgcaaaggttgcaccaactgtagatgctgttcttttgtcacatcctgacatgatgcatctaggagctttgccttacgctatgaaacaccttgggctgtctgcaccagtttatgcaacagaacccgtgtttaggcttggccttttgaccatgtatgaccatttcctgtctcgatggcaagtttcagactttgacttgtttactctagatgatgttgatgctgcattccaaaatgttgtgagactgaagtactcacaaaattaccttctgaatgataaaggtgaaggagttgttattgctccacatgtggctgggcatcttttgggggggacagtttggaagattacaaaagatggggaggatgttgtgtatgctgttgacttcaaccatcggaaagagaggcatttgaatggcaccgttcttggatctttcgtgcggccagctgttctgataactgatgcttacaatgctttgaacaaccaaggctatagaaaaaagcaggatcaagatttcattgaatcattaattaaagttctggcaactggtggaagtgtgctacttcctgttgacacggctggtagagtgttggaacttcttttgttattggatatgtactgggatgaaaggcgattgcagtaccctatctacttcctgacaaatgtgtcgacaagtaccgttgattatgtcaagagttttcttgaatggatgggtgatcaaattgcaaaatcttttgaaagcagtagagccaatgccttcttgttaaaaaaggtcacgctgataattaacaaagaagagcttgagaaattgggagatgctccaaaggtggttctggcatccatggcaagtttggaggttggcttttctcatgacatatttgtggagatggcaaatgaagcaagaaatctagtgctctttactgagaagggacagtttgggacactggctcgaatgctccaagtggacccaccccctaaagctttaaaggtcactatgagcaagaggattcctttggtgggtaatgaactaaaggcttatgaagaagagcaagaacggataaaaaaagagaaatcgctaaaggctagccttgtcaaagaagaggagctaaaggcttctcatggatcaaacacaaaggcttctgagccaatggtcattgatgcaagctcatctcgaaaatctgtgaatgcttcacattttggtgggaacaatgatattctcatagatggatttgtccctcctttaaccagtgttgctccaatgtttcccttctttgaaaacactgctgaatgggacgactttggtgaggtcatcaaccctgatgattatatgatgaaacaagaagaaatggataatactctgatgcttggccctggagatggattagatggtaggatcgatgatggctcagcacgcctgcttcttgattcaacgccctcaaaagtcatttccaacgagatgactgttcaagtgaaatgctcattggtttatatggactttgaaggtcgctctgatgggcgttctgtaaaatcaattattgctcacgtggctccactgaaacttatcctggtgcatggatcagctgaagcaactgaacatttgaaaatgcactgcgcaaagaatttagatttgcatgtttatgctccacagattgaggaaactattgatgtaacatcagacttatgtgcttataaggtacaactttcggagaagttaatgagtaacatcatttctaagaagttgggtgagcatgaaattgcttgggtggatgcagaagttggaaaagaagatgagaagcttattttgcttcccccatcgtcaacaccaccaccccataagcctgttcttgtgggtgatctaaagttgtctgattttaaacaatttttggaaaacaaaggctggcaggttgaatttgccggaggtgctttacggtgtggcgaatacatcatggtgcgcaaagttggtgattctatcctaaagggcagcacagggtcccagcagatcgtcatcgagggccccctctgcgaggactattacaagatcagggagcttctgtactcgcagttctacttgctgtgaggcaacgcttgtgttgtccgaaatttggcgtgggatgaccgtgacaaagttttggcatcagtttccggatgaccgtgctgactaccaagtggtccaagaacgatgacaatgcatccatccaaagaagaacaaaaacaacgacgacaaagcgtccacctattttccacctaggggtgcaatcaatcagatcggagatgggtaatgcttgtatcatattttctctttagatttagattagatatattttctttttagatttagatcagatacgaatattattggtctatgaccgtaagatttgaatggatatcaatatatcttaaatacctatactcta

SEQ ID NO: 117537 - DNA, 2885 bp, Zea Mays
atggggacttcggtgcaggtgacgcctctcagcggggcgtacggggagggccccctgtgctacctactcgccgtcgatggtttccgcttcctcctcgactgcggatggaccgacctctgcgatacctcgcaacttcaacccctcgcaaaggttgcaccaactgtagatgctgttcttttgtcacatcctgacatgatgcatctaggagctttgccttacgctatgaaacaccttgggctgtctgcaccagtttatgcaacagaacccgtgtttaggcttggccttttgaccatgtatgaccatttcctgtctcgatggcaagtttcagactttgacttgtttactctagatgatgttgatgctgcattccaaaatgttgtgagactgaagtactcacaaaattaccttctgaatgataaaggtgaaggagttgttattgctccacatgtggctgggcatcttttgggggggacagtttggaagattacaaaagatggggaggatgttgtgtatgctgttgacttcaaccatcggaaagagaggcatttgaatggcaccgttcttggatctttcgtgcggccagctgttctgataactgatgcttacaatgctttgaacaaccaaggctatagaaaaaagcaggatcaagatttcattgaatcattaattaaagttctggcaactggtggaagtgtgctacttcctgttgacacggctggtagagtgttggaacttcttttgttattggatatgtactgggatgaaaggcgattgcagtaccctatctacttcctgacaaatgtgtcgacaagtaccgttgattatgtcaagagttttcttgaatggatgggtgatcaaattgcaaaatcttttgaaagcagtagagccaatgccttcttgttaaaaaaggtcacgctgataattaacaaagaagagcttgagaaattgggagatgctccaaaggtggttctggcatccatggcaagtttggaggttggcttttctcatgacatatttgtggagatggcaaatgaagcaagaaatctagtgctctttactgagaagggacagaaaatatttgctctccagtttgggacactggctcgaatgctccaagtggacccaccccctaaagctttaaaggtcactatgagcaagaggattcctttggtgggtaatgaactaaaggcttatgaagaagagcaagaacggataaaaaaagagaaatcgctaaaggctagccttgtcaaagaagaggagctaaaggcttctcatggatcaaacacaaaggcttctgagccaatggtcattgatgcaagctcatctcgaaaatctgtgaatgcttcacattttggtgggaacaatgatattctcatagatggatttgtccctcctttaaccagtgttgctccaatgtttcccttctttgaaaacactgctgaatgggacgactttggtgaggtcatcaaccctgatgattatatgatgaaacaagaagaaatggataatactctgatgcttggccctggagatggattagatggtaggatcgatgatggctcagcacgcctgcttcttgattcaacgccctcaaaagtcatttccaacgagatgactgttcaagtgaaatgctcattggtttatatggactttgaaggtcgctctgatgggcgttctgtaaaatcaattattgctcacgtggctccactgaaacttatcctggtgcatggatcagctgaagcaactgaacatttgaaaatgcactgcgcaaagaatttagatttgcatgtttatgctccacagattgaggaaactattgatgtaacatcagacttatgtgcttataaggtacaactttcggagaagttaatgagtaacatcatttctaagaagttgggtgagcatgaaattgcttgggtggatgcagaagttggaaaagaagatgagaagcttattttgcttcccccatcgtcaacaccaccaccccataagcctgttcttgtgggtgatctaaagttgtctgattttaaacaatttttggaaaacaaaggctggcaggatttttcagttgaacgtgagaggatcaaatatgttgagattcagtcgctaaggaaagagctgttgcaggttgaatttgccggaggtgctttacggtgtggcgaatacatcatggtgcgcaaagttggtgattctatcctaaagggcagcacagggtcccagcagatcgtcatcgagggccccctctgcgaggactattacaagatcagggagcttctgtactcgcagttctacttgctgtgaggcaacgtacggcaaagcttaggctttatttacattggttataaattattagattagatgttgactgtaagactatcctggtgttttctgtttttacattgtttgtttcccctttcacaagcttaggcttgtgttgtccgaaatttggcgtgggatgaccgtgacaaagttttggcatcagtttccggatgaccgtggttagtatgctgaagcttgtttcgtccttcatcattatgggcatgtgttctatattgatcgtattgactctttttgaattggttgagcatattttaaatcttcttccccttgataccttctttcatcaacatcaaagctgactaccaagtggtccaagaacgatgacaatgcatccatccaaagaagaacaaaaacaacgacgacaaagcgtccacctattttccacctaggggtgcaatcaatcagatcggagatgggtaatgcttgtatcatattttctctttagatttagattagatatattttctttttagatttagatcagatacgaatattattggtctatgaccgtaagatttgaatggatatcaatatatcttaaatac

SEQ ID NO: 117538 - DNA, 3047 bp, Zea Mays
ccgcgcctccttcctccgtcctccggctcggcggtccgccgccctccttcatcctccggctggaggccctcctccacccccgcctcgcggccctacactctcgttgggtcggcacccgtgcctcccattctctcctcttctctcgctcgagcgccgcggcctctgctcgctcggtcgaggctgaaggacgggacaaagcgcagattgaccaccgggcgtcggaaccgccgccgctgccgccgaaggggttataagatcagatggggacttcggtgcaggtgacgcctctcagcggggcgtacggggagggccccctgtgctacctactcgccgtcgatggtttccgcttcctcctcgactgcggatggaccgacctctgcgatacctcgcaacttcaacccctcgcaaaggttgcaccaactgtagatgctgttcttttgtcacatcctgacatgatgcatctaggagctttgccttacgctatgaaacaccttgggctgtctgcaccagtttatgcaacagaacccgtgtttaggcttggccttttgaccatgtatgaccatttcctgtctcgatggcaagtttcagactttgacttgtttactctagatgatgttgatgctgcattccaaaatgttgtgagactgaagtactcacaaaattaccttctgaatgataaaggtgaaggagttgttattgctccacatgtggctgggcatcttttgggggggacagtttggaagattacaaaagatggggaggatgttgtgtatgctgttgacttcaaccatcggaaagagaggcatttgaatggcaccgttcttggatctttcgtgcggccagctgttctgataactgatgcttacaatgctttgaacaaccaaggctatagaaaaaagcaggatcaagatttcattgaatcattaattaaagttctggcaactggtggaagtgtgctacttcctgttgacacggctggtagagtgttggaacttcttttgttattggatatgtactgggatgaaaggcgattgcagtaccctatctacttcctgacaaatgtgtcgacaagtaccgttgattatgtcaagagttttcttgaatggatgggtgatcaaattgcaaaatcttttgaaagcagtagagccaatgccttcttgttaaaaaaggtcacgctgataattaacaaagaagagcttgagaaattgggagatgctccaaaggtggttctggcatccatggcaagtttggaggttggcttttctcatgacatatttgtggagatggcaaatgaagcaagaaatctagtgctctttactgagaagggacagtttgggacactggctcgaatgctccaagtggacccaccccctaaagctttaaaggtcactatgagcaagaggattcctttggtgggtaatgaactaaaggcttatgaagaagagcaagaacggataaaaaaagagaaatcgctaaaggctagccttgtcaaagaagaggagctaaaggcttctcatggatcaaacacaaaggcttctgagccaatggtcattgatgcaagctcatctcgaaaatctgtgaatgcttcacattttggtgggaacaatgatattctcatagatggatttgtccctcctttaaccagtgttgctccaatgtttcccttctttgaaaacactgctgaatgggacgactttggtgaggtcatcaaccctgatgattatatgatgaaacaagaagaaatggataatactctgatgcttggccctggagatggattagatggtaggatcgatgatggctcagcacgcctgcttcttgattcaacgccctcaaaagtcatttccaacgagatgactgttcaagtgaaatgctcattggtttatatggactttgaaggtcgctctgatgggcgttctgtaaaatcaattattgctcacgtggctccactgaaacttatcctggtgcatggatcagctgaagcaactgaacatttgaaaatgcactgcgcaaagaatttagatttgcatgtttatgctccacagattgaggaaactattgatgtaacatcagacttatgtgcttataaggtacaactttcggagaagttaatgagtaacatcatttctaagaagttgggtgagcatgaaattgcttgggtggatgcagaagttggaaaagaagatgagaagcttattttgcttcccccatcgtcaacaccaccaccccataagcctgttcttgtgggtgatctaaagttgtctgattttaaacaatttttggaaaacaaaggctggcaggttgaatttgccggaggtgctttacggtgtggcgaatacatcatggtgcgcaaagttggtgattctatcctaaagggcagcacagggtcccagcagatcgtcatcgagggccccctctgcgaggactattacaagatcagggagcttctgtactcgcagttctacttgctgtgaggcaacgtacggcaaagcttaggctttatttacattggttataaattattagattagatgttgactgtaagactatcctggtgttttctgtttttacattgtttgtttcccctttcacaagcttaggcttgtgttgtccgaaatttggcgtgggatgaccgtgacaaagttttggcatcagtttccggatgaccgtggttagtatgctgaagcttgtttcgtccttcatcattatgggcatgtgttctatattgatcgtattgactctttttgaattggttgagcatattttaaatcttcttccccttgataccttctttcatcaacatcaaagctgactaccaagtggtccaagaacgatgacaatgcatccatccaaagaagaacaaaaacaacgacgacaaagcgtccacctattttccacctaggggtgcaatcaatcagatcggagatgggtaatgcttgtatcatattttctctttagatttagattagatatattttctttttagatttagatcagatacgaatattattggtctatgaccgtaagatttgaatggatatcaatat

SEQ ID NO: 117539 - DNA, 1980 bp, Zea Mays
tcccaggctctcaactcccagtagaaaacttcaccggctgcctgcctgcccacagaaattgcgcccggccgccccccattcaccttcaaaaaaggagccaggcttcccatcaacgagggtgtcggccatctgagcagctcccctgcccctcgcagcggctactctacaggtctagcgactctttcgccatccatagagggaggaggcgcggcggagatggtgggcggtggcggcggcgggccgctgcggcgggtgggcaagtacgaggtgggacgcaccatcgaggaaggcaccttcgccaaggtcaagttcgcgcagaacaccgagaccggggaaagcgtcgccatgaaggtgctcgaccgctcctccatcctcaagaacaagatggccgaacagattaagagagaaatatccataatgaagcttgtcaggcatcccaatgtcgttaggctacacgaggttttggcaagccggaagaagatatttataattctggagttcatcactggcggcgagctattcgataaaattattcgtcatgggagactcagtgaagcagatgcacgcagatactttcagcaacttattgatggtgttgatttttgtcacaagaaaggagtctaccatcgagacttaaagcctgaaaatctcctccttgattcccaaggcaatcttaaaatttcagactttggactgagtgcatggcctgctcagggatctttccttctacgtacaacctgtgggactccgaactatgttgccccagaggttctcagtcataagggatataatggcgcacttgctgatacatggtcatgtggagtaattttatatgtattgttagcaggttatcttccatttgatgaagtggacctgactaccctttatggaaagattgagagtgcagaatattcattcccagcctggttttcaggtggtgcgaaatcactgattcgtagaattcttgacccaaatccagagacacgaatcaggatagaagagatcagaagtgatgaatggtttcagaaaaattatgaacctatcaaagaaatagaaaatgaggaagtcaatctcgatgatgtcaatgcagcttttgatgatcctgaggacgataatgaggatgcttttgaagatgaaacaggtcctctaacacttaatgcattcgacctaatcattctttcgcaaggattgaatcttgcagcgctctttgaccgcagacaggactgtgacaagcttcaaaatagattcttatcacgcaatccagcaaaggttatcttgtcaagcatggaggttgttgcgcaatcaatgggatttaagacacacattcgcaattataagatgagggtggaaggtctaaatgccgacaagactagccatctctcagttatggttgaagttttcgaagttgctccatcaatcttcatggtagaactacaaagagcagcaggagatacttcagagtataacacgttcgtaaataactactgcagcaaattagatgatatcatctggaaatttccaactgagaagggaaaatcgaggataccccggttatcaaagtctcattcataatctagtgctgtgtgttatcaattactatggacttaagtggatatatttgcagagtgtatcgcaattggattatgatattctaagtgtagctcttcgagtagtatatgtttgtatattcagagtccccatgtacaaagaggccgttttaattgaggtttccgtacctcgattccctgtgcaaagttttcatcgatgttttagactacacatctgtatattttgtcgagagcatcagtttcttagacaccacctatgtatcatgcgtttgttgccatctagtgtcattttgtaagatctaacttgtgatatacttggattgagtggtatggttgaaaagagtgaaagtcctttaaaaatcttagtgaaaaatacaaacttacacaaagttgatagaacatttttgagtta

SEQ ID NO: 117540 - DNA, 1561 bp, Zea Mays
tcccaggctctcaactcccagtagaaaacttcaccggctgcctgcctgcccacagaaattgcgcccggccgccccccattcaccttcaaaaaaggagccaggcttcccatcaacgagggtgtcggccatctgagcagctcccctgcccctcgcagcggctactctacaggtctagcgactctttcgccatccatagagggaggaggcgcggcggagatggtgggcggtggcggcggcgggccgctgcggcgggtgggcaagtacgaggtgggacgcaccatcgaggaaggcaccttcgccaaggtcaagttcgcgcagaacaccgagaccggggaaagcgtcgccatgaaggtgctcgaccgctcctccatcctcaagaacaagatggccgaacagattaagagagaaatatccataatgaagcttgtcaggcatcccaatgtcgttaggctacacgaggttttggcaagccggaagaagatatttataattctggagttcatcactggcggcgagctattcgataaaattattcgtcatgggagactcagtgaagcagatgcacgcagatactttcagcaacttattgatggtgttgatttttgtcacaagaaaggagtctaccatcgagacttaaagcctgaaaatctcctccttgattcccaaggcaatcttaaaatttcagactttggactgagtgcatggcctgctcagggatctttccttctacgtacaacctgtgggactccgaactatgttgccccagaggttctcagtcataagggatataatggcgcacttgctgatacatggtcatgtggagtaattttatatgtattgttagcaggttatcttccatttgatgaagtggacctgactaccctttatggaaagattgagagtgcagaatattcattcccagcctggttttcaggtggtgcgaaatcactgattcgtagaattcttgacccaaatccagagacacgaatcaggatagaagagatcagaagtgatgaatggtttcagaaaaattatgaacctatcaaagaaatagaaaatgaggaagtcaatctcgatgatgtcaatgcagcttttgatgatcctgaggacgataatgaggatgcttttgaagatgaaacaggtcctctaacacttaatgcattcgacctaatcattctttcgcaaggattgaatcttgcagcgctctttgaccgcagacaggactgtgacaagcttcaaaatagattcttatcacgcaatccagcaaaggttatcttgtcaagcatggaggttgttgcgcaatcaatgggatttaagacacacattcgcaattataagatgagggtggaaggtctaaatgccgacaagactagccatctctcagttatggttgaagttttcgaagttgctccatcaatcttcatggtagaactacaaagagcagcaggagatacttcagagtataacacggtcagagcttttcttttgcacttcttactcttttcatatgattgcaactgatataccacctaaaactttatgcaaccagatacatccaaag

SEQ ID NO: 117541 - DNA, 129 bp, Zea Mays
atgtttgatattgaaagcttatcaacattgctgtgctctaacttcgagaattgcagagtatcattggtccaattaacagggacaagaacaatgaaagctagaactgagattggagcaaatattttaagt

SEQ ID NO: 117542 - DNA, 129 bp, Zea Mays
gcttatcattatattaaagtagagggaaaaggcctaggacaatcggaacacaacacaaaaaaagaacacatcagacgcacacacaaaaaaacacaccaaacacacacaacacaaacacataccaatcac

SEQ ID NO: 117543 - DNA, 537 bp, Zea Mays
attgttgagcgtcgatgagtgtcgcaaatggaccatccattgtatggtgctgcattgtatttgaatccgggaaaattctttgcaattaagaacaaaggagatgatagatatgttgcagagctaagaagctgctctaatgatgtgcttgcaagaatgggaccagatgatgctattcggtctaagattgatgaatttgcaatgcattatgaggaccaacgtggtcctatcctctcaaacaatttggcacttgcaagcattgaaacaaaaagccctcttgaatggtggtgttcgtatggtggtcgtgccttcgaattgcaaaggtttgtaaagcgtgtggttagtctatgtgcttcatcatccggttgtgagaggagttggagtacctttgaatttatgcacacaaaaaggaggaaccgattgctacacaaaaggctaaatgacttagtctttgtatcatacaaccggaagatgcaaagtaggttccaaaagagtagggagacaggtggtacaagttatgacccattagtgcttgaggat

SEQ ID NO: 117544 - DNA, 1002 bp, Zea Mays
atggccataggtggattattgggtgggccggggcgctgcacagttgtgtctatggatgagataaaaagcttgtgggagaacgatcagaatgtctttatggggtcaagtaaagataactttcatggaatgtcaaaaactggagaacagttccttgctggagtgtatcatcaccttttgtcaatattggcatttaccgctcctcacccaaacaggatactgatgaaaccatttgaacactacgatcggattcagccagatacttggagtggagcttatctatgctgggggaaagagaacagggaggctccattaagaaccgcatgcccacctggtgtgcctcttgatttagtcagcaacttcgagatcaaatcctttgatggttgcgcaaatccgcacttgggtcttgctgctatcgtagctgctggcatcgatgggctaagaagacaccttaagttacctgagccaattgaattaaacccttctgatcactcttcaaaactgaaaaggctaccgcagaacttgcaggaatctgtagaatcgctttctgtagataaggttttgcatgagttaattggtgataaacttgtcacaactgctatagctatacagaagcaaggaatcaaatacagcaatttctcagatttgtgccagaagcaagaggctgttaaagaagtgcttggatctttagcaaagtttgcatgtgttttattccctaatattcctgaagcctacttggatcgctggtgcgacgtttacagctttggtgtcatattatgggagctggcaacgcttagaatgccatggagtgggatgaatccaatgcaggttgtgggggcagttggtttccaggatagacggcttgatattcccaaggaagttgatcctctggtagcaaggatcatattcgaatgctggcagaatgaccaaggtggtgaagatgataactttgctattgtgtttgctgctatgggagtgaacatggaaaaaactcaattcttgtaa

SEQ ID NO: 117545 - DNA, 1486 bp, Zea Mays
cgcgccgccactccaccgtcgtcccccagaccttgctccctccgcgagactaccccgtccttctcctcgagcgcctcacagacaggcggcctcatgtcgcggtgccgatgcgctcgaccgcgacccgagtttcacttcaacatcatctcaaacggatcgcggacgtcgtcctccattttaacagtataacacacatttgtacatacgttatctatgctattatatgtttccgttgcaacgtacgagcactcacctagtctatatataaatctttaatttataacgtataaaaaatgacatatataagatgtcggtagatagaaaatgatgtagaggtcttttactaacagggaaagggaagggatggccacagcgcgcctgctccgttgcgcctcctccaccttccttttcagcacctgcaccaccaatccgttgcgctcgtgctcccctctcgtccgccgccagcacccccgcgccgccatggccacggactcctccgccgcctcgttccagaagatccagatccagcgcgaggacaccacttttgatgcttatgttgttggcaaagaaaatgctcctggaattgtggttttgcaagagtggtggggagttgactatgagataaagaaccatgcgatccacatttcccaacttggtggaggatacagagcactcattccagatttataccgtggaaaagttgctctcgatgttgctgaggcacaacatctgatggagggtctcgactggcagggtgcagtcaaggatatccaggcttcagttaaatggctgaagtcaaatggatcacccaaggttggtgttactggctattgcatgggaggtgctttatcaattgcaagtggagttttagtcccagaggttgatgctgttgttgctttctatgggacaccatcttctgagcttgctgatccttctaaggctaaggctcctatacaggctcatttcggggagcatgacagttttgttggtttttcagatgtcactgcagccaagtccctggaggagaagctcaaatcttccgggataccatatgaagttcacatataccctggatgttcgcatgccttcatgaacacttcgcctgaggcactcaagaggaagaaggggatgggtctgactgatgagaaccaggaagccgtcgacctggcctggtctcgcttctcttcttggatgggccggttcctcggatctgcttgattatgtgccgcgtgatgatgtggagtcaggtcccatgaataaaatagaataaaataaaatgttcagattcaggaaccatgcaaatggactgggctgtacggttctctggatttgcttgtccttctgtttatagttatctacctcagtgtggtttccttattttctgtggatggatgcatattgtggaatagccgtcgatggcttctgacagtaagcagcgacaaggcaactaactgctggccagagttcaccctatcgttttgaattc

SEQ ID NO: 117546 - DNA, 885 bp, Zea Mays
atggacccgctccggatgggcagcatggtggacttcccggggttcgagtcccacctcgtcgacctcctcgatcccgccgagatgcagacgcacgcggacgaacgggagcggctccgtggagccgaggtgcggttccacgccgaggtgcaggggcccaagagcgtcgccttcgacccgcagggccgtacacgggcgtcgccgacggccgggtcgtcttctgggacggcgagcggttatgttgaccactttgttaaaggtgtgtattataaatgtggtctctttgagaaggctaagggactgctaactgaactggaagcctcaggggaagacaggctcacaggtgccatccgtggatctcaaccaagtgtagatttcgaagacatgagctacgagatgatatacggccaggtgccgcctccgttggaagaagacccaacgtcgaagcaagcttgctacccgagcctctgttccatgtcgacgtcgtctgccccggcctgtcccaagcttcaaacatccatcgtcgcgagagtgaaagaggcaatggatagagaaccccaaccgctaacccctgagcaaagatacaacctttcgtgggaggcagcgaccgagagattcatggagtattcagaccttgaaaaggttctgaacaatgaggctgctcaacctgaacaagtatttgctacccatgtgcctgatttatccttcccttctatgttgttcagttcctgttgcggtagtccccaaccgtcatcatgcagaacgaggaggggtgatgctgacagctcgttggacaggccgtggcagaagaagaagtttgagatcaagcagtaggtcttgcatgtagttccaccaggaatggactcttgagggatactgctttagcta

SEQ ID NO: 117547 - DNA, 1776 bp, Zea Mays
tcatctcttcgacactctcacatgcatcgaagattccgctgacactaaaaagatcgaaatggcgccgggatcgtcgtcgtctcgtaaggccaaggccctcaaggcatcgtaccggctcgtcgccgacaacttcctcgccgtcctcgccatggtttctgtcgtcgccgtgctcttcgctgcatggccgatcagcatcgaggaccttgcctgccggctgcacgcggtgcggccactccacgtcctcacggcggcgatcctgacggcggccctcgcgaagctgaggcgcatgagccggccgagcgacgtgtatctcgtggagtacggctgcttctggcccaagccgtgcttccgggcgccgttcgcgacgtgcctggagcacgtgcggctcttgccgtacctggtcaacgaggacgacatcagctggggctggcggctcctccagcggtccgggatcggcgaggagacctgcgtgccgtacgcctaccactacctgcccccggaccgcagctttagggcctccctggacgagaccgagctggtcatcttctccgccgtcgacgatgtgttcgcccggacgacggccgtgacgcccgcggacatcggcgtggtgatcgtgaactgcagcatcttcacgcccacgccggtgttcacggacatgatcgtgaacaggtacaagctgcgcgccgacgtgcggagcgtgaacctgtccgggatggggtgcagcgcggcgctcatctcgatcggtctcgccaggaacatgctgcaggtggcgccgccgggcacgcacgcgctgatcgtgtccacggagatcctctcgtcgcagtactacgtcggcatggaccgctccatgctcctgcccaactgcctcttccgcatgggcgccgccgccatgatcatgtccaacaccgcggcccgaggcgcgcggttccggctcgcccgcgtcgtgcgcacggtggcctccgcgcgggacgccgcctaccggtgcgtgttccaggtggaggacgaggagagcaacacggggatccggctctccaaggacctcgtgcccactgccgcccagaccctgaaaagcaacatcgtcgccttcgggcccctggtcctgcctgcctcggagaagctcctcgtcgctctgtccatcctgaggcggaggctagtacagagcagccgggggagggtgtaccgcccggacttccgcaccgcgttcgagcacttctgcatccacgccggcgggcgcggggtcatcgacgaggtgcagcgcggcctcggcctctccgacgaggacgtggaggcgtcgcggatgacgctgcaccggttcgggaacacgtccagcagttcggtggtgtacgagctggcgtacatcgaggccaagggcagcatgaggaagggagaccgcgtgtggatgatctccttcggcgccggcttcgactgcagcagcgtggcgtgggagtgcatcgagcccgccgccgacgctgctgggccgtgggccgactgtatccaccgctacccagtgcagctccctaaattgatggaggcccttgattgaatccgtacatgtagacgtgaagtggcataatcaatcaatgttgtactgtatctttaatgtccaaatctgtcatcaacggacgggacatgtgattttttaacggactagttccaaataaactgttactgatctttcaattatatttggacatactaataagaatagtaaatcagtgcagatctcatcatcattgtgtgcacatcaaatatatggacaggtcaaggggggcaaac

SEQ ID NO: 117548 - DNA, 1849 bp, Zea Mays
ggcccaaacagggtcggcccatttgaacatcactacacataccgaaccagacttcgttcgccatagacgcgcgccaggcaagcaacaatggccaagcttctcaagccttggtacgcggccttcgtgaacagattcctcgccatggtcgcggtggcatctatcgtagccgccgcgctccggcgggcgtggccagcattcagcatggacgatgtcgtcggcagccttggcgccgcgcggccggtccacgtgctcatggcggtcatcctggctgccggcgtggcgaagctgaggcgcctgcgccggccgcgggacgtgtacctggtggagtacggctgcttccgaccgcggccgtgcttccgggcgccgttcgccacgtgcctggagcacgtgcacctcctgccgtacctggtggacgacgagagcgtcagcttcgccatccgcctgctcgagcgctcggggctcggcgacgagacgtgcctgccctactcctaccactacatgcctccggaccgcagcctcgaggcggcccgggaggaggccgagctggtcatcttctccgcagtggacgaggtgttcgccagggcgagcgtgaggcccgaggagatcgacgtgctcatcgtcaactgcagcatcttcacgcccacgccggtcttcgccgacatggtcgtcaacaggtacgggctccgcgccgacgtgcagtgcctgaacctgtccgggatgggctgcggcgcggggctcgtctccatcggcctggccaagaacctcctccaggtggcgccgccaggcacgcgcgtcctgacggtgtccacggagatcctctcgtcgcagtactacgtcgggagcgagcgcgcgatgctgctgcccaactgcctcttccgcatgggggccgccgccacgatcctctccaacagccccgagcgcgcgcggttccggctcggccgcctcgtccgcaccatgaccgccgcgcgggacgccgactaccgctgcatattccaggaggaagacggcgagggcatcctgggcgttcgcctctccaaggacctcaccacaacggccggccatgcgctcaagcggaacatcgcggcgttcggccccctcgtgctgccggtctcggagcagctcctggtggcgatgtcgctgctcaagcgcaagttcatgagcggccggcgcgccagggtgaggctgtaccgcccggacttccgcaaggcgtttgagcacttctgcatccacgccggcggccgcgcggtgatcgacgaggtgcagcgcgggctcggcctgtccgacgaggacgtggaggcgtcgcggatgacgctgcaccggttcgggaacacgtccagcagcctggtgctgtacgagctggcctacatcgaggccaaggcccggatgagggcgggcgatcgggtgtggatgatctccttcggcgccggattcgagtgcagctgtgtggcattggagtgcgtcaagccgccggccgacgccggcgggccctgggccgactgcatcgaccgctacccggtgcatctccccgaagtcgccaaggacaacatctgatcaaccccttcttctggatctggggcatgctgcatcatgctggacatgaacatgcccaaggcttccttcgtcgtcgatgtcgtcgtcctttgtgccgggctgtcggccgccgcccaacatgtcgtgctctgtctatgatcgatctcttggaaataatgtagccctacccctacggtgtccaaaacgcaagtatggcgcgtttgtgtttgttaccactgcacttgtttaccacgctgcactgcgtttgtgtttgttaccactgcacaaagttaattaagcgccagttacgattaaaata

SEQ ID NO: 117549 - DNA, 252 bp, Zea Mays
atggcaacatctttgcaagcaagtggtgaatgggaaaccgaggaagaagagagctcaccgggggacttgctagagcagcgagcgaggatcggccctatggcagcgccgttggagttcatgcgggtgcggctgctcgccggaccggctcagacatcgaattggttggtcgtggggcttgctgtgctcacgcacagggaatatggggagggcagttatgggaggctccatgtcgtgggctcgtggccggcttaa

SEQ ID NO: 117550 - DNA, 1324 bp, Zea Mays
tatatgtaaaaagtcgcgacataagtctgaactccttgctcctcccgctgattcgctccgccctccgcccatgtctggccgcgtcctcctccgcgcggctgccttcggcctcgccgccgcgggtgcggcgtccctgcatgccgtgtccaagtggacgcctcccggggagatccctcccttcgacctgtccgtgaagttcaatctcttggaatccgcgaacggtctccaggccgccctgctccgcgcgcacccgctcttcggtgtgcacctccatgacgtccgagcccgcgccgaactcgacctcgcgcgcgttgacatggagattggccatggcggcgatcccgccgccgccgcggacctccgcctcctcctcgcgctcctcgccgtgcgcgacggtcgcgcggacgaggcgatgcggctctacgaggaagcgttccgccacgcgcctttcgacccccggccccgcgccctcgcgtataacctctgtttcctctgcgggcgagaggacgaatctgcagcgtggagaagtgcttacgaccgcctcgtcccgggctccatccagtacccgggatgggagtccgataaaacaagggagctcgtccacgagctcgtgatcgcggcgacgctgggcggcgtgaacgtgctcctcgaccctgagtggtacttggtcatgcacgtggccagcaaagctatggacaaggcgctggtcgcagcgctgcaggacaaggcgctatctgcgacggagaggcttcagttccgattgctccgcgtgttcctggacaacttcatggaggtggaggcggagctggccgaggacgactgaggaggcatcgtcttcggggtcatcatgcggttgccatagctacaaaagccgacaatcttgtttttctgaagggcctcatagaccgagttactttgaagatcatgttcgacacatcagctttatggctctagatcgtaagcagagttatcaaactagcagttctgttaatcacagaagctagtttaatctttcataaggattctaattcagatgctgctccaaaagaattgcctgatacagggtgatatgctcgaaggtgaccgttccagcagcttattagtgatatgctcaaaggtgactaacattactagccatatagctcttattcagtaagcccttttttcactcagatgttagatgaagatgcaataacatttcacacactggtgtataagccattgtaacctgtgtttgcattcggtcaatatatgtgctccgatttcttgataagtgaacctgggtttttgttggatgtcatgtcagcttctgcttgctcgtgtt

SEQ ID NO: 117551 - DNA, 3141 bp, Zea Mays
gtcccctcctcttgagtcttgacgaaagagagacagggaaagagggagaggcaagagtcgcagcctcgcagctctagacccagaccgcctccgcctccgccggtgatcgagtcgcgtcggcgctacattcaagctagaagacaataagcttcggcattcggaagccatgttcggctccaccaatccatttgggcagtcatccacaagcccatttggtaacaacaactcgtttggaactccccagggatttggccagtcttccactgctgccaacaatccctttgccccaaaaccatttggcagcccgaccacgccttttggggcacagactggaagctcgctctttgcaactacatctactggtgccttcggtcagcagcaatccgctcccgcatttggcacaacatccactggtgcctttggtcagcagcaatccactcccacgtttggcaccccatcctcctctcagttcgggagctctacaccagccttcggtgcatcccccactcctgcctttggtgccacatcctctgggtctttgttcggacagaagccaagttttgggggttttggatcatctcctagccagtcaagtccttttggtagcacgttccagcaaacacaaccaacatttggaacgacgccggcatttggtaccatgactactcctgcatttggtacaagtacaccagcctttggcaccacaactgcaccagccttcggtgccacgactaccccagcatttggttcaacatcaacatctttattcggtgcttctagcaccccagtgtttggttctacagcctttggcacatctgctactggttttggaacttcagggactacagcattcggtgtgagtagtactactacaggttttggatcttcaagcacaccttcatttggcacatcagctagcgtgttcggttttggttcttcaccatcttttggacaaacaacagtttcttctggcagcactccctttggaacaactccttcaccctttggtgcaccagttcctgcatttggctcgcagacagcagcaccagcttttggacaacctcagtttgctaatcaagctggaggaaccagaataaaaccttattctcaaacaccagatgttgacagtgctactagtggtactcagcctgctgcaaaacttgattccatatcggcaatgcctgaatacaaagacaagagtcatgaagaattgaggtgggaagactaccagcgtggagataagggtggaccaaacacttctggaactcaagcagtggcacctagctttccgtcactaatacaacagaatgctccaaacccattttcgacaagcaatccattttcaacaaacaatccatttgctcctaagcctgctccaactattacttcaccattcaacacctcatttaacaatgcatcagttacaagttcgagcccattcacatcatcccctagtaccacaatgtttgggcaaacaggtgtttctacactttcagcaagtaattcgccatcattgtttggaaataccaatccagctcctgttacatcatcattatttgccacatcagtgacaaataatccaagtccattcggcactggctcattattcgctaacactcaatcagccccattatttccctcagcatttgctcaaccgacatcaagtacaccggctttctcctctggcagcctatttggctcaactaatccgggcagtctgtttagcagcagcggtccttcacttttttcaacaccaacatttcaaccatcggcccctgctcaaacttcgaacttattctccttccaacctccaattcaaccagcttctacaggtggattccctggtttttccaatactacaaaccaagccttgatgggacagccaactcctaccctgtccagtatggtcatgcagcctgctcctgtttcaaatccatttgggatgcttccagcaatgcctcacatgtccattggaaatggtggatcttcaccttcagttcaatatggaatatcaagtttgccggttgtggagaagcttcttccaagtagatcattgtccatggcgtttcctaggcatttggcacagagaaggataaaactgctgccgagaaaatataatccaatatctgatggcaaggttccattctttgctgatgatgaagaatctccagcaacaccaaaggcagacgctttttttgtccctagagagaacccaaggaatctggtaattcgtccaattgagcagtggccttcgcggagagaaactgaccgacaattgactgtgaagaatgctactgatttgaacaaatatgaagatgcttccattgaaagtgagcgtggtaagtctgcctctgccatgtcaccaagcagcaggcctcctgcagtggaaaatgacaatcagcatgaggctagggccatggctcaacatgggaatgggaatgctacttcagtcgagaggttattgcctaagcttccacgtgcagattacttcacagagcctagtatagaggagcttgcggccaaagaacgtgcggaggcaggctactgcggtcgagtgagggactttgttgtggggcgacatggctacggcagcatcatttttcttggggagacggacgtgaggtgcctggatctggagtcaatagtggagtttaacaaccgggaggtggttgtttacaaggacgacagcaagaagccccctgtgggtgaggggctgaacaaggctgcggaggtgactctactgaacatcaagtgcgtaaataagaagactggggaggagtactgtgaggggacaagggtggagaggtacagggagatgctgatgaagaaggcggaggagcagggcgcggagtttgtgtcctttgatgctgccaagggagagtggaagttcagggtgaagcatttcagcgcctatgggctcccttgttgttaagtattctgtttgttttgatggagcagtgataactaagttgcacgctttacgctcttgtcaaatagtatcatgcttgattctgttgtgctgctttgtacaatgttgctgctgttaaaatgcttgcaaattgcactgctctgctgctgagaacgtattctaattataagacgttttagtttttctaaacacatgattttttccctaaacac

SEQ ID NO: 117552 - DNA, 228 bp, Zea Mays
atgagggaccgatctggtgctccggctttgccgcccgtgagggaccgatctggtgctctggctttgctgcccgtgagggatcgatctagtgctccgactttgccgcccgtgagggaccgatttggtgctctggcttgtgaggctgttattccttcaacggagcccatcaacatagatcctgacactgatgtgcccgatgctgaggagacaacacacctactagttctc

SEQ ID NO: 117553 - DNA, 1427 bp, Zea Mays
gagagcatgaagcaacgatttccaagcagcagcacgcgttccaagtctgaggcagctgtgcaaacgcgggcatcaagagcaccatcgcccaaagtcaatcctgctactccaggtccaggcccaggggtgaaggccagaccaagatcggctgccgccgccgccgccgccaccaccatggcagcgacgaggaggcagcctgccgtgcctatgcccgtgtggaagtcggagacggcagaggaggaggtggtgcggctgcgcggggaggttgatgccttgcagaaagaggtgcagcgtctgctccgcctcaacgcagagctccggaccaaccatgacgctgcagccagcaacagatcacaacctcccagcaagatttcggcttccggagtagtcgttgcaccgccgccgccgccgcccccgccgccaccgccaccgccaccgcacctaaagcagcgaggagtccgtttcccttcagctccgagcacaagcccggcgagcaaggccactgcgctggtcgacatgtacaactcgctgcaggccagcaacaagccgtcaaagcgcacagacaaaagtagcagccatagcagcatcgttgacgagctgcagaaccgctccaggcacttgctagcgatcaaagcagacgtggaaacaaaagccgagttcatcaactatctcatcgacagaatccacactagtacctacaccggcgtggaacaagtactcacctttgtggactggctggaccaacaactctcgactctgactgatgagtcagccgtcttgaagcacttcaactggcctgagaggaaagccgatgcgcttcgtgaagcggcatctgaataccgacacatcaactgtcttctaacagagatctcttcctccttaagaagagacgaagacgatggtggtagcagtagcactctcaggaagatttcaagcttgctagataaattggagaagagcatgagcagactggtggatctaaggagatcggcgatgccgtcctacaaagagttgaggattccaacgaactggatgcttgattcagggatggcctcaaagatgagattggcatcggtgagtcttgcgaaactgtataccaagacagtcctcaaggaactggatgcaagtgggacgacggggaacaaggctgctctggttgctcagagcgtgcgcttcacctacagagtccaccagtttgctgggggccttgactgcgaagcaatgcatgcctttgaagagctaagaaggcgggttcagttgctctctcaataaccctattcatctctgtcttcttcttattataacagtatatgtcagatcaagtcttgtcggaaatggagagggggaaaatcatgctgtggtttctcatcgtgtatggaaaatctggttatccactgattttatttctctgatccatgtcaagtaca

SEQ ID NO: 117554 - DNA, 1515 bp, Zea Mays
gagagcatgaagcaacgatttccaagcagcagcacgcgttccaagtctgaggcagctgtgcaaacgcgggcatcaagagcaccatcgcccaaagtcaatcctgctactccaggtccaggcccaggggtgaaggccagaccaagatcggctgccgccgccgccgccgccaccaccatggcagcgacgaggaggcagcctgccgtgcctatgcccgtgtggaagtcggagacggcagaggaggaggtggtgcggctgcgcggggaggttgatgccttgcagaaagaggtgcagcgtctgctccgcctcaacgcagagctccggaccaaccatgacgctgcagccagcaacagatcacaacctcccagcaagatttcggcttccggagtagtcgttgcaccgccgccgccgccgcccccgccgccaccgccaccgccaccgcacctaaagcagcgaggagtccgtttcccttcagctccgagcacaagcccggcgagcaaggccactgcgctggtcgacatgtacaactcgctgcaggccagcaacaagccgtcaaagcgcacagacaaaagtagcagccatagcagcatcgttgacgagctgcagaaccgctccaggcacttgctagcgatcaaagcagacgtggaaacaaaagccgagttcatcaactatctcatcgacagaatccacactagtacctacaccggcgtggaacaagtactcacctttgtggactggctggaccaacaactctcgactctgactgatgagtcagccgtcttgaagcacttcaactggcctgagaggaaagccgatgcgcttcgtgaagcggcatctgaataccgacacatcaactgtcttctaacagagatctcttcctccttaagaagagacgaagacgatggtggtagcagtagcactctcaggaagatttcaagcttgctagataaattggagaagagcatgagcagactggtggatctaaggagatcggcgatgccgtcctacaaagagttgaggattccaacgaactggatgcttgattcagggatggcctcaaaggtcgatagctagctctacttacattcctatatatctgtataacagacaagacatgttaagtacgtacgtagtgggtttttttgtgcagatgagattggcatcggtgagtcttgcgaaactgtataccaagacagtcctcaaggaactggatgcaagtgggacgacggggaacaaggctgctctggttgctcagagcgtgcgcttcacctacagagtccaccagtttgctgggggccttgactgcgaagcaatgcatgcctttgaagagctaagaaggcgggttcagttgctctctcaataaccctattcatctctgtcttcttcttattataacagtatatgtcagatcaagtcttgtcggaaatggagagggggaaaatcatgctgtggtttctcatcgtgtatggaaaatctggttatccactgattttatttctctgatccatgtcaagtaca

SEQ ID NO: 117555 - DNA, 2697 bp, Zea Mays
atgacgatgaagcagctagtacagttagtggccaagccgttaacgccgccaccaccctgctgcagctcctcgtcacaagacgatgaagacgacgatgtggtgcggcaactggttatgggccgttggcgttcgtccctatcgtcaggcctccgtgccgccctcgcctgcaccatcgtgggcctcgtctccctctacgcaccggacgccctccgcagacacatcaccttcccggccttctcctacgtcgtcacggtcatcctcgtcacggacgccacactcggcacggccctgcgcggcgcggtgagcgcgctccacggcaccctcatgggcgccgcgccgtccgtggtggcgctgtggctcgcgcaccgcacgggcgccgcggagtcggcggtggccacgtcggccgtggtggcgctgacggcgttcgcggtggcgctcccggagtcggtgggcccggtggcgaagcggatcgcgctggggcaggccatcataatctacgtggcccgcaggttccagccgggggagcgccccagccgcggctgggtgctgctgcacccggccaacgtggtggcgtgcacggcgctcggggtggcggcggcgctgctggccgtgctgcttccctggccgaggctggccacacgggaggccaaagacaagagcaggacgtacaaggtggttgcctcagagagggtcagggtcctggctgatgccttcgtcgttgccgctgctgtgggtgtggaggaggccgatgaggggtgcagcaggcagcggcgatggcagatagcggcgtgcatgtcggaggccaagcggctggcctccgcaagtacaacactcctcagccgcatgaacgccatcaaggaggatttgcagtgggagcagagagcagtggcggtggcggtggaggagaaggataacaagggcagcatcgagatgctcctggcaggaatgcagatcgcactcgcgaccatgcaacaagccgacggcggccatgggaggaatataaacatggtcggccttgtcatggcgatgagggaccagatacgcctcgcgcttctcacgcccaacaacaagcagcagagcagatcaacatgcacgcccagctaccagttgccagctacgagcttcgactatcgcaaccacgagcagcatcagcgggcgtcttttttgttcatcttctctctctaccagctccatcattgctgctgcgatggtggtcccaagacgccttcgacggcagctaccatgctgcccaacgccaagcaggtagcgccggcggcaaccacgacgacacgccaaaagctactactactggagcaaccagcagccgacttactgccggacgacgagcaagaagaagaagaagaagcaggtcagcatgtggagcaggacgacggaccatcttcacaagctggggcagccactgcaggagaggagaaggctacagcgacggcggcagcggcggcgaccaaggacaagcacagcaggcagacacgcagctgtcgccggctcgtggcggcggccaagtgcggcttctccctcggcctcgccgtcctgctgggcctgctcttcagcaacgaccacggcttctggtcgggcctcatcgtcgccacaaccatgacggcggggcgcgaatccacctgggccgtggccgtggcgcgcgcccacggcaccgccctgggctccatctacggcgtgctgggctgcctgctcatgtcgcagcagcagctcgtggccatggacctgcgcttcgtggccctcctcccctggatggtcctcgccaccttcctcaaacgcagccgcgcctacggccccgccggcggcgtggcggccgcgctgtcggtcgtcatcatcatggggcgccgctacgacgagcctcccatggccttcaccatcgcgcgcctggtggagaccttcataggcatctcctgcgtcgtcctggcggaccttgtgttccagcccggggcgaggccgtcggtgcaggccagggagcagctcgcccgctgcatcgccgcgctggcagcctgcagccgccttgttgttgctgaccctgctgcttcatcagaattattgaagagggtgcagcaggagctggccctcttgaggaagcacgccgcggaggccggcagcgagcccacctacctgtggctgccgccgttcccggcggcctgctacgaaacgatccagggcagccttggcaggatggcacagctgctgcagctctaccatcaggcacgccgctacatgagtgtgtctttgtcccagcagcaggtggacgtggacgatgatatcaacaccatccaacaccggcgcttcagcaacctcgcctccacctccctcggccactgccttcacatgctgacagcagcagaaggcaaggaggccaacaaaaagcccaaggcccaggtcgtcgttgaccttgaggctgggactgcggctgcctgtggctgctgctacagggatgacgaggtggtgggctccttcgtagcgcaggcaagagagctgctgttgaacgatgacgacgacgacgatagcgttgagcaacaacaagaggaggagaggtttttggcagtgtgctgcctgggctccattgtcctgtgcatggaagagatcctcaaggaggcccggcggctggaggcgcacatcctagacctcaacaacaacctgcaactcaaatcagcactcgctgatatattatag

SEQ ID NO: 117556 - DNA, 2885 bp, Zea Mays
ttgtcgcctcgccgcttctccacctcccgtctcgtctgcaactgcaactccacctcggccgtcggccttctcatcctcgtcaccaccggccacggccggcctccaccaccgcctgcccaccgctcgctactcttgtctcccctccccccaagtggaagaagaatcgggctgttgctcactcagagctctctcagtgaggcgggcctcactagtcactagccttgctgttatgccttccccgccgctcgccagagtccaccgccaccggacaggaagcaccacctagttcctgaccctgatgcccatggcaccggaccaccccttcgatgccttcgtcgccgcagcccgtggcgccgtagcccaccttcacctccccgtcatccacatccctggatccaattccagtccccatcccaactccaagcagcacaagggactcgaggtcgactgcctgctccacctccacgtcctcgtcaccaacttcctccacaagcccctcaagtcattcgccaggtgcttcaggcccaagcgacgggcagacacacactccccgccgctccaccaggagcccagcaatggcaccaccccgcaaaagcaactggagttcctgctctgcattgcgttcgacgccttcgcccacaacctccacgcgctggatgacgcctgcaagcacaaaggcgaggaatttgctgccgctacccgacagttggagcaatttgtggttctcaggaaggtaatcgatgggaagagggccgatttcgatgggttcctttccaatctgggctttgcaaaggttggggcaccgccaccgccagcaagcatcgtgggtggtgcgtcccctgtcccagcatcagcaccagtcagcaatcaggaggatggtgccgtgattggaaacggcgagggggtggacagtgctagtggtacacaacagcaggcacagaaattgcctgcccggttgcttaacattcctttgtcgaatgtggagcgtctgcggtctacgctttctgcagtttcactgacggagctcattgaattagtcccgctgctggtgagcagatcatcgacatcggcagatgcacatcctgacaagaagaagcttttctcagtgcaagatttcttcagatatgcagaaattgaaggaaagcgattctttgaagagttggacagagatggtgatggccaagtcactctagaagatctcgaaattgcaacgaggaagaggcggttaccaaggaggtatgctcgagaattgttccgccgtacaagaagcaacttcttttcgaaatcaattgggtggaagcaatttttatccttgatggaacagaaggaagcaaccattctccgagcgtataccacgttgtgtttgagcaagtctggaacacttcacaaaagtcaaattttgacttctttgaaaggtgctggacttccagccaatgaagataatgccgctgccatgctacgttatctaaatgctgattcagaaggatcaatctcatatggccatttccgcaacttcatgcttctacttccttcggaacgtcttgaggatgatcctcggaacatttggtttgaagcagccaccgttgttgctgtccccccacctatagaaatatctgcaggaagtgttttgaagtctgctttagctggaggtcttgcaagtgcgctttctacctctctgctgcatcctattgattcaatgaagacacgtgtccaagcatctacactctcatttcctgagctcatttcaaagcttccacaaattgggcttcgaggattgtatcgaggttctatcccagcaattctcggccagttttcaagccatggtttgaggacaggaatctttgaagcaagcaagcttgtattaattaatgtagctccaacacttccagagattcaggtgcaatcaattgcatccttctgcagcacagtcctagggactgcagtccggatcccttgtgaggttcttaagcaacgtttgcaggctggaatattcaacaatgtaggggaggcgattgttggcaccatgcgacaagatggcccaaagggtttttttcgcggcactggggccacactgtgtcgcgaggttcctttctatgttgctggaatgtgcctctatgcagaagctaagaaggcagcacagcatgttttgaggagagacttggaagcatgggaaatagtggcagttggagcattgtctggaggacttgcggcaatagtaaccactccctttgacgtgatgaagactaggatgatgactgcccctccaggcacaccagtgtctatgcagatgataatcttctccatccttcgaaatgagggtccacttggactctttaagggcgcgatcccccgcttcttctggatcgctcctcttggagcaatgaattttgcaggctatgagcttgccaagaaggcgatgatcaaagatgagaacagttccagtgagtcaacaaaagagaacttgccaagaaatcagtgatcaaggatgagtgtgaatctagggcgtcaatacaggacaagaaaaccatgatggataccacaggataatctaacgtttacctggttaacatctatggtgcaaagaaattgaaaccatggaacagtttttttttgtgtgtgtgttcatgtagcagagaagcaacagaacatctgccttttttgatacttgaatctaattttgggttgccgcgtctttttgcccctctaggaattccattcccataggccttgagatggttgtatagtatacagtacatgagagagacagatgcacatgctggagctgttgctcttttgtttgttatttgacgatgatccatagccttcctggttaaacatgatgtaaatttgctcttgtacttaccctgatgaggacagttggcttt

SEQ ID NO: 117557 - DNA, 685 bp, Zea Mays
cctcctccgccaaagtcacatgtcatcgccagaacacaccctgccctcctccgcctcccctcatcggccattggccgccacccctcaaatcttcacgctcttgctgcgccactgcctcaggtccctgcaggattgccaacgaccgaggggcatgcaagagtgccaacgaccagacatgaagctctgccgcgtgggaccgatgtagtccacaccaccaccattcactacccatttgccaatgttcctgtttttggttcgatgaatgcaaggcaagagtcgaaatccgaacgtttctgcggtagcttgattctgaatatacaagccatgattctacagtgtcattttaatgcagtgtcatgattctgaataagtcacggttattgatttgattatagtttcgattaatttatctgaaacaaaagagaacacgtgtgctgccttctcatagcagagctttcatttttgtactccttctgccacctacaacagttctactggaggatgaacacagattgttaggtttgcttgggatttctggtgatccagttgcaaccactaattagtagtgtttattttcaattcctggaatttgccttagcccattagatctcttaggccccgtctgtttcctttcattttgaggaattgaaatcttactaatggaatagactatttttttagaata

SEQ ID NO: 117558 - DNA, 1931 bp, Zea Mays
tttccctagcaattgtttctcatagctttttccataaaccaacttgtgcacaagttatatttgtgccaaacaaggccatagtattattctttgctatttttcacagaaagttgatcattttgttcttttatgtcatgttatataaagcatgcatgctttgtataaaatctgttttttttatcttgtgatagatgactgcttcaaggatacagatcgctggtaggttcaagtcctgtgctcacatgggctgctttgatttagaagcttttattgaaataaaccaacgttcccggaagtggcaatgcccaatatgcctgaagaattactctctagagaacataataattgatccttatttcaatcgcatcacttctttgatcaaaagctgcggagatgatacatctgaaattgatgtcaaacctgatggttcctggagagttaagggcagacctaaactgaaggaccttacacagtggcatctaccagatggtactctctctctgtccacagatacagcagccaaacctggaatgtgcattgtaaagcacgaggtcaaagaagagccattgtctgaagaggtgggatgtcatcttaagttgggacttaggaaaaaaagcaatggccagtgggaaattagcaagagagtggatgctgatctggtgccgtcttctggtaacgaccatgaccattcaggacacgatgaaaacaaaaactgcatcactcactcaagcaatattgatgatacaaacattgcagatgaaggttataatttagagccagcaacaaatggttatcccatgacccatgtccatgatcttgactcttcatccgcagacgaaaatggtcctccagcatcgacagggcaggatatagtagttttgagtgactcggatgatgatgctatcatggtgttgtctcccggtgctgtgaactgtggctcgatgcataacactggaaatctgtttccacccaacacacctgaaaatttaggagtgtgtagtggagaaactggtggatgccccaaggagacatcattccttgcattaaaagaagattttggtgatccggggttgtcattttgggaaagtcatggtagtccccgagatgcttctacttcccagatccccgatgccagtacaaaggcagtagataatccaggtgaagtggacaactaccctgccaatgatcaatctaagcaagggcaagtttctggggctgattttggagtagcagcaaatccggtgccattggaagatgggcatgatagcgcactgcaaccttgttcaatgagtgaaagagatagtgccatgggtcttgctagcctgggagcggatactcaatcatgtgttgatgtccattctgacaattggacatctgtcagcattagtggccgtgatgaagttttaactgctgccaaaattgcatctaggaaaaggagcaatcctggagacagaatagaagatttagatgcttcacttgtgggaagcccaaaccaagatgagtgcagcggagggagatgttcagttcgaccgagattgatactagagatttcctcagattctgattagcacacatttgtgttggctgatgcctgcatgacttggagaaaaggaagggggtggatgtgatgctgtctaacgcggtcagcgaactggcaagcagctagaggcctctcctctatcctgtaattggagatcccatctctgttaggtggtagaacgtgacaccaggagcaacatatagagtggcataatagagctgaaccatatatacatgcagtgtaggcaattttgtaccatatatgtcatgaaccgaggtggcagttagttgatgtaaatatgctccctctctgtttttctatattattggctgaaaggagaggggaggatgcatgcttagtccggcctggttatttatcatttatttatgat

SEQ ID NO: 117559 - DNA, 1546 bp, Zea Mays
aggattgataatattggcagagacaaaatggttcaagtagtgacagataatggcgccaattataaggctgcaggcaagattctcatggatcaaattccaacattgttttggagtcctggtgcagctcattgcttggatctaatgctagaagatattggaaagttgaactatttcaagaaaacaattgctcaagccaaaagagtcaccacttttatttataggcatgaaaggatccttagtgcaatgagggagcaaagaggtggcatggacctagttagacctggagccactaggtttgccacttgcttccttactttgaagagcctacacaagcatagatatcctttgaagggtctatttttgagtgatgcatggaagtcaaacaagttgtcaaaaacagaggctgggaagggagtttatgacattgttctatcctcaacgttttggagcaccgttgaagtttgccttagagcttcagcaccacttattgcccttagggtggccgatggtgatgagaagcctgccatggcagaaattgcagcactaatggatagggccaaagagaggataaagcttagctttacatcacaaaacaagcaagttttgctaaaagagtcttgggtattgttgagcgtcgatggtgtcgcaaatggaccatccattgtatggtgctgcattgtatttgaatctgggaaaattatttgccattaagaacaaaggagatgataggtatgttgcagagctaagaaactgctttaatgaggtgcttgaaagaatggaatcggatgatgctattcggtctaagattgatgagtttgcaatgcattatgaggaacaacgtggccctatcttctcaagcaaattggcacttgcaaacattgaaataaaaagccctcgtaaatctgtgcttttgttaatttcagcatgctacatgcctacataatgtccctaatatgtatgtgccatgtgacatgttatagttgattttggcattcgtatggtggtcgtgccttcgaattccgattgtgagaggagttggagtacctttgaatttatgcacacaaaaaggaggaaccaattgctacacaaaaggctaaatgacttagtctttgtatcatacaaccggaagatgcaaaataggttccaaaagaggagggagacaggtggcacaagttatgacccattagtgtttgacgattttgattgggacaatgagttggtacactcatcagttgtacacactggtagggatgatgatgagcataacttgacatgggaacaagttgatgaagccattggagcatctgagtcccttcgaggccgcaactttccaacacaagctcatttgtatgcaaacacctaccatagacgtagtacaatgagggcacaggatgatgaacaaggtgaggatgatgatgatggaaatgattcaagcaatgaagtggtggatccacatgatgacattggtatgagtgatagtgatgaggtaaacgaggcggaagatgatggagaagacaatcctacaccccatgatgagtttgatgat

SEQ ID NO: 117560 - DNA, 1134 bp, Zea Mays
atggcgtcgccggacgaccccgtgctctccgcttgcaagaaaaacttgagccacttcagaataaaagagctcaaggatgttctacaccaacttggactttcaaagcaaggaaagaagcaggacctagtggacagagttatggcagtgttgttgagccagcaagatcaaggcattaatgaaatcttggcaaactatcgcttgttgcttcctgtttcaagaaaaatgcaagaccctacaaatactgttgcagtctcaaggagccacgaattaggagacagtgttacgtgtaaaaagaaaccggatgattctgctcaggcagttaaggttcgttgcccttgtggtgactccaagccaaatgattccatgattaagtgtattgatccacaatgcaacatatggcaacatgttggctgcgtcgtcatacccgatactgagaaatccgcggacaatatttctcctgaattaccttcctgcttttattgtgaagtgtgccgacttagcagggctgatcctttttgggtcactgtgaaccatctgttactccctatcttaataggaccctctactgtagcagcagacgggtcatacactgtacagtataccgcaaaaagctttcagctttcaagagctaatagagaaattctgcagcaagctgaatgcaatattcaggtttggtgtatccttctcagtgacaaagtaccttttaggatgcactggcctttacactctgacatgcaagttaatggtatttatgttagggtggttaacaggcaacccacacaaaagttaggggccaatggtagagacgatggtccactattaacagattacctgaaggagggacctaacaagatttctctatcaagaaatgacactcgtactttctgtttgggtatcagaattgccaagaggagatctctagaacaggtcctaaatttggtgccaaaggaacaagatggtgaaaacttcgatgacgcccttgcacgtgtgcgtcgctgtgttggtggtggagctgaggcaaataatgcagacagtgatagtgatatcgaagttgtggctgattttgtctctgtgaatcttcggtgccctgtaagcaatctggttattactgtggatgctttagatcctcaatga

SEQ ID NO: 117561 - DNA, 1951 bp, Zea Mays
aggactaggagtccagtagcctgctagctatctatcagtgatccctcgcgaacgatgtgggacgggctggagagcgcggcgaccgtggcgcagctggtcggtctcgacgtcggcggcctcatcaccatgatcgggcaggcggcgcggaaggctcggcagaacaccaaggactgcgagcacctagcccgccgcgtcggcatgctcgcggagctggtcccccacctgcaggacccggaggccaggcgggcggtggccgggctcaaagatgcgctcgtggaggctcaccagctcatcacatcctgccagaggagggggctcacgtcccagctgttctcggcgtccaggcaggccgacaggttcagggacgtcgagcgcaagatcgaaacctgcgtgtccatcatccctgtcatcggctacatcggcataacaagacgcctcgatggttcgcaatcccagtcccagctggtaagtgttcatcgtcgtctatccatcgtcaagtcaactctctttctttctgtgatgcatgtattgtcttggatcagtcggcgggaggggctgaggatcgggagttcacgctggcggagatcgccgtggccaccaacaacttcgccgtcgtgctcagcaacgacgccgacactggcaccaaggtatacaagggaaggctcctgcagaacgggcctgaggtggccgtcaagcgcctcaaccgcgcgcggcggggagcggaggacgccttcttcgcggagcagcacatcctctcgccgctccgccacgaccgcatcgtccgcctcctgggcacctgcgccgacgacggcgagcgcatgctgctcacccagtacatgcccaacggctcgctccacgaccacctgcacgggcaccacctgtcgtcctcgtcggcgtcgccggtgacggcgtcctggaggactcgcgtccaggtgctggttggcacggcgcgcgccgtcgagcacctgcactgccacgccgtgcctctcatcatccacggcaacgtcgcctcctccaacgtcctcctggacgccgcctgggcgccgcgcctggccggcttcggcgcatcggtgtggcgcgcggccggcgtggactcccagcccgtggaggtcgccggcgccgcgtcgtgcggcgggtacgccgacccggagtactgcggcacgggccggatcaggccggcgagcgacgtttacggcctcggcgtgctgatgctcgaggtcctgacggggcaaccaccggtggtcagtgtctgggacgcggcgaagcagggcgtggtggccgtgaccttggcgtcgttcgcgctgccgagcatccaggccggccggcttggggacgtgctcgacaggcgtccggcgccgcagcagctccagccgctgcagctggtggccaacatggcggcgcgttgtctgcatctgcaggggggtagtcgcccggccatatcagacgtcgtcgccaacctcgagcaggcactccgcctcatatgaaagcatgtggacatctttgcttgtacaaaagtgaacttgcttgtcgttcagctagctatgatgctcaaactgtgtctgtgtgtacgtttggtccgtgcgagtcctcctagtagaccatggtagacttgcaacatttgcgcaacatctcctactagagaagcagcagggtgcatcaatgatggtgcccaaatatggctgccagcgtccttgcattgctccaccattacccatgattttcttgattgctttgtctcatgaaataattgtacgagcaattcaataatatggtggatctctctaccgtcgatatgggcgaagacataaaatgacccataaattagccttaaaaagttgacaaagcaactaacattatatgaggaagaagaggctaaagaggaagatgacgaagattagtagtggtgtattatgtgattttatttgcttaattatttatttcgataaaatga

SEQ ID NO: 117562 - DNA, 1755 bp, Zea Mays
ttaaattactgggtgcctgggtgggtgtctaggactaggagtccagtagcctgctagctatctatcagtgatccctcgcgaacgatgtgggacgggctggagagcgcggcgaccgtggcgcagctggtcggtctcgacgtcggcggcctcatcaccatgatcgggcaggcggcgcggaaggctcggcagaacaccaaggactgcgagcacctagcccgccgcgtcggcatgctcgcggagctggtcccccacctgcaggacccggaggccaggcgggcggtggccgggctcaaagatgcgctcgtggaggctcaccagctcatcacatcctgccagaggagggggctcacgtcccagctgttctcggcgtccaggcaggccgacaggttcagggacgtcgagcgcaagatcgaaacctgcgtgtccatcatccctgtcatcggctacatcggcataacaagacgcctcgatggttcgcaatcccagtcccagctgtcggcgggaggggctgaggatcgggagttcacgctggcggagatcgccgtggccaccaacaacttcgccgtcgtgctcagcaacgacgccgacactggcaccaaggtatacaagggaaggctcctgcagaacgggcctgaggtggccgtcaagcgcctcaaccgcgcgcggcggggagcggaggacgccttcttcgcggagcagcacatcctctcgccgctccgccacgaccgcatcgtccgcctcctgggcacctgcgccgacgacggcgagcgcatgctgctcacccagtacatgcccaacggctcgctccacgaccacctgcacgggcaccacctgtcgtcctcgtcggcgtcgccggtgacggcgtcctggaggactcgcgtccaggtgctggttggcacggcgcgcgccgtcgagcacctgcactgccacgccgtgcctctcatcatccacggcaacgtcgcctcctccaacgtcctcctggacgccgcctgggcgccgcgcctggccggcttcggcgcatcggtgtggcgcgcggccggcgtggactcccagcccgtggaggtcgccggcgccgcgtcgtgcggcgggtacgccgacccggagtactgcggcacgggccggatcaggccggcgagcgacgtttacggcctcggcgtgctgatgctcgaggtcctgacggggcaaccaccggtggtcagtgtctgggacgcggcgaagcagggcgtggtggccgtgaccttggcgtcgttcgcgctgccgagcatccaggccggccggcttggggacgtgctcgacaggcgtccggcgccgcagcagctccagccgctgcagctggtggccaacatggcggcgcgttgtctgcatctgcaggggggtagtcgcccggccatatcagacgtcgtcgccaacctcgagcaggcactccgcctcatatgaaagcatgtggacatctttgcttgtacaaaagtgaacttgcttgtcgttcagctagctatgatgctcaaactgtgtctgtgtgtacgtttggtccgtgcgagtcctcctagtagaccatggtagacttgcaacatttgcgcaacatctcctactagagaagcagcagggtgcatcaatgatggtgcccaaatatggctgccagcgtccttgcattgctccaccattacccatgattttcttgattgctttgtctcatgaaataattgtacgagcaattcaataatatggtggatctctctaccgtcgatatgggcgaag

SEQ ID NO: 117563 - DNA, 1730 bp, Zea Mays
acgcgcacacacacacacacacacacacatattttgagaacggagagggagcgagcctcttacgttacgccttccgttcacgtcctagcaaatcaaaccaattccatctctctctttctctctctctccccgatccatcttgtccaactcctcgatcggccgttcatatgtttatgcgttagcaaaccaattcccattccattactccggcggcggccgcaccaccgccaaaaaccaatgcagatgacggcggatcaggaatcggcggccaaggcgacggaggacgacacgatgagcggccggcggcgggtggacgacgaccacgaccacgacgtcgtcttcgacgccgggaaaccgccgccgttccgcatcggcgacgtgcgggcggcggtgccggagcactgctggcgcaagaacccctggcggtcgctgtggtacgtggcgcgggacgtggcggtggtggcggcgctgggcgcggcggcggcgggcatggacagttgggcggtgtggccgctgtactgggcggcgcaggggaccatgttctgggcgctcttcgtgctgggacacgactgtggccatggcagcttctcggacagcgcgacgctcaacagcgtcgtgggccatctccttcactccttcatcctcgtcccttaccatggatggaggatcagccacagaacacaccatcagaaccacggccacatccacagggacgagtcatggcacccgatcacggagaagctgtaccggcaactagagccacgcaccaagaagctgagattcacggtgcccttcccgctgctcgcattccccgtctacctcttgtacaggagccccggcaagtcgggctcccacttccttcccagcagcgacctgttcagccccaaggagaagagcgacgtcatggtgtcaaccacctgctggtgcatcatgctcgcctccctcctcgccatggcgtgcgcgttcggcccactccaggtgctcaagatgtacggcatcccatacctggtgttcgtgatgtggcttgacctggtgacgtacctgcaccaccatgggcaccatcagcttcctctcccctggtaccgcggccaggagtggagctacctgcgcggcggcctcaccacggtggacagggactacggctggatcaacaacgtccaccacgacatcggcacccacgtcattcatcacctcttcccgcagatcccgcactaccatctcgtcgaagctaccaaggcagccaagccggtgctggggcgatactaccgggagccgcacaagtcagggccgcttccacttcacctcctcgtcgtgctcctcaggagcctcagagtcgaccacttcgtcagcgaccacggggatgtcgtctactaccaaaccgaccatgacttgaacactagcagtgctcatcgctgggccaaccaaaaccaccataagcaaaaataatggtttctcaaacacagagacggcctgatggttgctgttgttattgctccaaggactcacagtacaatatataggcatgcgtatgagaaagccaaataattaaagagaagggagggatcctctagctgaagcaatcaattaattacagtatcccactagatcgagtttgctaagcattactcctactatatacaatatgtactgttgcttgtattaattagctagatgttgtgttggagccttggatgatgaaactaaaggatgagccactgaaatttgtacca

SEQ ID NO: 117564 - DNA, 1313 bp, Zea Mays
ctgcagaaatggacctttgttatgggccgtaacgaagcccacatcctatccgacaggcagaagcagagcacccccaccactcgcctccaccgcacgcaagcagacgtcccaccgtccccatggccaccatggcttccaccgccaccgctgctgcttctctccgcctcgccttccctctcctctccgcgccggcttcctcctcgtcgtactccaatacccttcgcttccctctccgccgccgcagctcctgccgccccctcgccgtcgccgccttcaagaagctctccgaggcgtcccccgtgcccatccctcaggagcccacccaacccctcctggtcgacgaagacgccctgcctcctaaggccggggtctacggcgtctacgacgccgccggcgagctgcagttcgtcgggatttcgcgcaacgtgagggccagcgtcgagggccaccgccggaaggtccccgccaacctctgcgcctccgtcaaggtcgcagtatcagatgaggaggcaccagatcgatctgcccttaacaatgcctggaaatcatggatggaagaacacatagcggccacgggcaaggcgccaccagggaacgttgcaggaaaccacacctgggttggtgccccccagcggcccccggacctgcgtctgacgcctggacgccacgtccagctgacggttccgctggagcagctgatagaccggctggtgaaggagaacagggtggtggccttcatcaaaggatcaaggagcgctccccagtgcgggttctcgcagagggtggtgggtatcctggaagcgcacgccgcggatttcgtgaccgtggatgtgctcgacgaggagcacaaccacgggctgagagaaaccctcaaggcttacagcagctggccgacgttccctcaggtcttcgtcggaggggagctcgtgggaggctgcgatatcatttcgtccatggctgagagaggggagcttgccgccctattgattcagaaatgaagacttgatttagtacagcgacttggaataaatgtttgcttccatgggtgactgatccgttgcttgcacacgtagcatgccatccaagttggtatctgtggctttcggcaaggaaagaaagaaaccgttgctctgcgtctggacagtccggtatcgatttaattatatatatatatatatatatatatatatatatatatttatatacttattagaataaaattaaaacatgtgcatgcaaatgtcagcagtgtacgatggacgtggtacgtcccaaattgaaaagcaaagcatgtggtgtggtgtgggtggttg

SEQ ID NO: 117565 - DNA, 2250 bp, Zea Mays
gtaggagacaaggagcaccgtctgctgctcgctctataaaacgaacggaggctgcagagcagagcagagcagagcaagaagctttacagtgaacgagtgagtatgtgcggcatacttgctgtgctcgggtgcgccgacgaggccaagggcagcagcaagaggtcccgggtgctggagctgtcgcggcggctgaagcaccggggccccgactggagcggcctccggcaggtgggcgactgctacctctctcaccagcgcctcgccatcatcgacccggcctctggcgaccagcccctctacaacgaggaccagtcggtggtcgtcgccgtcaacggcgagatctacaaccacctggacctcaggagccgcctcgccggcgcaggccacagcttcaggaccggcagcgactgcgaggtcatcgcgcacctgtacgaggagcatggagaagagttcgtggacatgctggacggcgtcttctccttcgtgctgctggacactcgccatggcgaccgcgcgggcagcagcttcttcatggctgctcgcgacgccatcggtgtgacgcccctctacatcggatggggagtcgatgggtcggtgtggatttcgtcggagatgaaggccctgcacgacgagtgtgagcacttcgagatcttccctccggggcatctctactccagcaacaccggcggattcagcaggtggtacaaccctccttggtacgacgacgacgacgacgaggaggccgtcgtcaccccctccgtcccctacgacccgctggcgctaaggaaggcgttcgagaaggccgtggtgaagcggctgatgacagacgtcccgttcggcgtcctgctctccggcgggctggactcgtcgctggtggcgaccgtcgccgtgcgccacctcgcccggacagaggccgccaggcgctggggcaccaagctccactccttctgcgtgggcctggaggggtcccctgacctcaaggcggccagggaggtggcggagtacctgggcaccctgcaccatgagttccacttcactgttcaggacggcatcgacgccatcgaggacgtgatctaccacacggagacgtacgacgtcaccacgatcagggcgagcacgcccatgttcctcatgtcgcgcaagatcaagtcgctcggggtcaagatggtcatctccggcgagggctccgacgagctcttcggaggctacctctacttccacaaggcgcccaacaaggaggagttgcaccgagagacgtgtaggaaggttaaggctctgcatcagtacgactgcctgagagccaacaaggcgacatcagcttggggcctggaggctcgcgtcccgttcctggacaaggagttcatcaatgcggccatgagcatcgatcctgagtggaagatggtccagcctgatcttggaaggattgagaagtgggtgctgaggaaggcattcgacgacgaggagcagccattcctgcccaagcatatcctctacagacagaaggagcagttcagtgacggcgttgggtacagctggatcgatggcctgaaggctcatgcaacatcaaatgtgactgacaagatgctgtcaaatgcaaagttcatcttcccacacaacactccgaccaccaaggaggcctactactacaggatggtcttcgagaggttcttcccacagaaatctgctatcctgacggtacctggtgggccaagtgtggcgtgcagcacagccaaggccatcgagtgggacgcacaatggtcaggaaatctggacccctcgggaagggcggcactgggcgtccatctcgccgcctacgaacaccaacatgatcccgagcatgtcccggcggccattgcagcaggaagcggcaagaagccaaggacgattagggtggcaccgcctggcgttgccatcgagggatagacgacgacgcatatataagcttcctacttttgtttcaatgcatgcatgctatgtatctgtgtccaccggctgtctagccttatcatcatcactgtctgcaacaaattaataatcaagtggtatggggtacctacgtttaatgtatacggagtattgtattgcttgtgtgtggtatgcttaggttggccgtgagtaagggattacaagtattcgatatcgggtgtttctataggttgaagtgctcataaagggctccctatcctctatggtcatgtttgtaatagtttttttttctaaagagcttttctatgaatttggattcctgat

SEQ ID NO: 117566 - DNA, 2114 bp, Zea Mays
caacatcgtgacaagatggagattaggaagttatggccttcttgacaggctacctagttttgtttgcattgcaaaatacgagacaagatggagatgagcatgcaccttgtgagtatgtgcggcatacttgctgtgctcgggtgcgccgacgaggccaagggcagcagcaagaggtcccgggtgctggagctgtcgcggcggctgaagcaccggggccccgactggagcggcctccggcaggtgggcgactgctacctctctcaccagcgcctcgccatcatcgacccggcctctggcgaccagcccctctacaacgaggaccagtcggtggtcgtcgccgtcaacggcgagatctacaaccacctggacctcaggagccgcctcgccggcgcaggccacagcttcaggaccggcagcgactgcgaggtcatcgcgcacctgtacgaggagcatggagaagagttcgtggacatgctggacggcgtcttctccttcgtgctgctggacactcgccatggcgaccgcgcgggcagcagcttcttcatggctgctcgcgacgccatcggtgtgacgcccctctacatcggatggggagtcgatgggtcggtgtggatttcgtcggagatgaaggccctgcacgacgagtgtgagcacttcgagatcttccctccggggcatctctactccagcaacaccggcggattcagcaggtggtacaaccctccttggtacgacgacgacgacgacgaggaggccgtcgtcaccccctccgtcccctacgacccgctggcgctaaggaaggcgttcgagaaggccgtggtgaagcggctgatgacagacgtcccgttcggcgtcctgctctccggcgggctggactcgtcgctggtggcgaccgtcgccgtgcgccacctcgcccggacagaggccgccaggcgctggggcaccaagctccactccttctgcgtgggcctggaggggtcccctgacctcaaggcggccagggaggtggcggagtacctgggcaccctgcaccatgagttccacttcactgttcaggacggcatcgacgccatcgaggacgtgatctaccacacggagacgtacgacgtcaccacgatcagggcgagcacgcccatgttcctcatgtcgcgcaagatcaagtcgctcggggtcaagatggtcatctccggcgagggctccgacgagctcttcggaggctacctctacttccacaaggcgcccaacaaggaggagttgcaccgagagacgtgtaggaaggttaaggctctgcatcagtacgactgcctgagagccaacaaggcgacatcagcttggggcctggaggctcgcgtcccgttcctggacaaggagttcatcaatgcggccatgagcatcgatcctgagtggaagatggtacttactgacactaccctagctgagaacggaaagagagctcattgcttttttttcaatcaaacaaagcaaatcaaagcacatatcctctacagacagaaggagcagttcagtgacggcgttgggtacagctggatcgatggcctgaaggctcatgcaacatcaaatgtgactgacaagatgctgtcaaatgcaaagttcatcttcccacacaacactccgaccaccaaggaggcctactactacaggatggtcttcgagaggttcttcccacagaaatctgctatcctgacggtacctggtgggccaagtgtggcgtgcagcacagccaaggccatcgagtgggacgcacaatggtcaggaaatctggacccctcgggaagggcggcactgggcgtccatctcgccgcctacgaacaccaacatgatcccgagcatgtcccggcggccattgcagcaggaagcggcaagaagccaaggacgattagggtggcaccgcctggcgttgccatcgagggatagacgacgacgcatatataagcttcctacttttgtttcaatgcatgcatgctatgtatctgtgtccaccggctgtctagccttatcatcatcactgtctgcaacaaattaataatcaagtggtatggggtacctacgtttaatgtatacggagtattgtattgcttgtgtgtggtatgctt

SEQ ID NO: 117567 - DNA, 654 bp, Zea Mays
atggtggtgacgatgaagtgttgcttctcgtacgtggccggcaccacaccctactatagtcgttgctcttcgggccccttttccgacgacgacttccatgctgtctccaccgccatctccgggaaaccccagggatctacaagagaggcaacattgattaaactggttgatgcgttagaaagttttatgctccatggccttgtggagaacaagcactcgattgtttggctgtcatcacatttgttggcgcaactgatctggctgaaacagagtcgtcttttgaaagccatgtgggatgtgattcatccaaaatctggttcaaatgtattttttccatttacttactaccgtattttgcaagctgatgctggaaggagctgtcgcattgttaacacatggggaaatggtggttctaaaaacaagcttttcctagatatgcaagaattaaaagccaaaatatcaggtttggccttgaatctttctgctgaggttggggggaaaggtgtagatatgaagaaccttgctgaccaaagagacttgtttcaactttttactccaaaacatttagttttgctctgcttaagtgttaatgaatcaaagttggatacgcggtctctggtcaatctggaggtaagtgctcgtgctttgccatga

SEQ ID NO: 117568 - DNA, 502 bp, Zea Mays
gtaacagccagcttagcccagtttgagatgaaagcatagatgatttttgcagcttcatatagttcttcgtcatacagacggtcaccaacattttgaaggttggcaacgtttggcataagaatgaattcctcaatatcactgagcctgtcaatcttagcatatgcaaaaatgagttctccatcgactttgggttcccgtgccttttgccttaccatcagaaggtacttcactaaatcattgtacacattagcttcctcggctgcacggatgacatcaaggaagtgtgcagcatcatctgcacgaatgaaggactcaattgcttcactgaccagaccttcacgtaactgggctttggcaacctggctccaaacagcatcttcttcaacacggaaagcaaattcctcagctctttctatgctccggatgttgtccaagagaacatcgacagcctgcacatttaagttgaacttcttgaatatagcaaaagcctcctcatacagtt

SEQ ID NO: 117569 - DNA, 1495 bp, Zea Mays
ggcaccgagcacgagacgaacagacctctaaaacctagcagaggcccgcgccgccgccgccaaccgcgacgaggaaggaagcaggaacgcgatgccgaagtcgaagcgcaaccgcccagtgaccttatcgaagaccaagaagaagccaggtttagagcgcaagggcaaagtagtcgccgagataaaagatgctgtcgacaaatacagcagcgcctatgtttttacctacgataacatgaggaatcagaagctcaaggacctcagggagcagctcaagtcttcgagcaggatttttctcgctggaaagaaggttatgcagatagcgctggggcgttcgcctgctgatgaagctaaaacaggcctccacaaactttccaagttccttcaaggcaactctggtctgttattcaccaatcttccaagggatgatgttgagaggtagtatccggatgtcatcaccattacttacatttcttgttgtagctttatatgaagattttgatatgctcgtatatatcatactggcaggatgtttcgagaattcgaggagcatgattttgcaaggacaggaagtactgctatcgatacggtattctagttttgcttttcatgtatatccctggtctggtttcttcaaatagactggctaggaaaaccatgttctgctgaccaatgtcaagtttaggctcttggtgttaatgtattaccagtatatactgatactatcacgcacacagtggtaacagtactttgacaatggcacttatttgtagtagctctgtagtgccattttcggtttcttgtataatgagtttcaccaaatttacaacattttacaaacaacatctacaattcctcaggttgagcttaaggaaggccctctggaacagttcacacatgagatggagccatttctacgcaagcaaggacttccagttcgcttgaacaaaggtgttgtagagttggttgcagaccatgtagtttgtgaggaaggaaagcccctttcgccagaagcagcgcagactctgcggctgcttgggatacaaatggcgacattccgtctataccttgtgtgtcgctggtcgggcgatgactttgaagtttacaaagaaggcttgatgcacctaggagctgatgaatcctcttaagcttttgtttcctgtatacacaaagggctcacttgctgtctttgctgggacagcttttggtaactgtgcgtgtggccatgtaccagggagtattggaagttagaaagatacaatctgcaggaaaaaaatgctagtgtatttcttcattctgccccatatttactcaactgttgaaaggtgtaagctgatttgaatatcgtatcagcattagttaagaggttgattgatatcatattcttgtaatgatagaatattctattggaaaccataaccctaactagagttttggggttccctattaatagggagaaaacaaatataggttgggccaagcccattataggtgt

SEQ ID NO: 117570 - DNA, 1144 bp, Zea Mays
cgccggcagtggcaccgagcacgagacgaacagacctctaaaacctagcagaggcccgcgccgccgccgccaaccgcgacgaggaaggaagcaggaacgcgatgccgaagtcgaagcgcaaccgcccagtgaccttatcgaagaccaagaagaagccaggtttagagcgcaagggcaaagtagtcgccgagataaaagatgctgtcgacaaatacagcagcgcctatgtttttacctacgataacatgaggaatcagaagctcaaggacctcagggagcagctcaagtcttcgagcaggatttttctcgctggaaagaaggttatgcagatagcgctggggcgttcgcctgctgatgaagctaaaacaggcctccacaaactttccaagttccttcaaggcaactctggtctgttattcaccaatcttccaagggatgatgttgagaggatgtttcgagaattcgaggagcatgattttgcaaggacaggaagtactgctatcgatacggttgagcttaaggaaggccctctggaacagttcacacatgagatggagccatttctacgcaagcaaggacttccagttcgcttgaacaaaggtgttgtagagttggttgcagaccatgtagtttgtgaggaaggaaagcccctttcgccagaagcagcgcagactctgcggctgcttgggatacaaatggcgacattccgtctataccttgtgtgtcgctggtcgggcgatgactttgaagtttacaaagaaggcttgatgcacctaggagctgatgaatcctcttaagcttttgtttcctgtatacacaaagggctcacttgctgtctttgctgggacagcttttggtaactgtgcgtgtggccatgtaccagggagtattggaagttagaaagatacaatctgcaggaaaaaaatgctagtgtatttcttcattctgccccatatttactcaactgttgaaaggtgtaagctgatttgaatatcgtatcagcattagttaagaggttgattgatatcatattcttgtaatgatagaatattctattggaaaccataaccctaactagagttttggggttccctattaatagggagaaaacaaatataggttgggccaagcccattataggtgt

SEQ ID NO: 117571 - DNA, 4373 bp, Zea Mays
caaccgagggctcggatgttagattcattgtgcacatacactctctgggtcatcaacgggcggcttcatcgaggcgtagaggtcgtgctcgacatagctgtcgtagacgacgagaggaggatgcgtggactccaccacctccacctgcggctgtgggtccttcaactcgatggtgctggacaccgtcgcggtagacgtctgtgacctctgtgacgaccgacttcccaccacggcgaccgcatcgtgggagactcctccaccgagacggagtagagcgacggcggtggcagcggcaggaggtcaaggatatacgtctgtaaaccgcggacggggctcgggcgtgcgcagcggctgcaggtctcgccagcgtcggcgtcggcgaggtcgccgccatgggcgcgcggccgtgtggtcacagtcacagtggtcggagtgtgattggttggaaatcgaacgcgatgcgggccttccttttgggctcggtgggccgtgagtcccattttgtttgggcggcaaaggaaacaaaattgatcctactcatcatattcgtttggcttcaacggtcaggatttggcttccactccatgggcctttcgctcgacaagctcatcaaagccgccgccgccgccgccgtcgcctcagctcgctccggctgcctctgcctcccctgcctctgaggatttgcttggggagagacttattatgagattcgcgggttggtacctgaagatcgcggcggtaggggcctccattggcgccgccatggagctcttcatgatccacacgggcttctacgagaaggtaactgtcttggagtcagaaaaacgagcttgggaaagcagtccagaggcccaagcaatgagagaagctctcaatccatggcgcaagcatgatgaacaagaacaacagaagtagtcaagatttatgtgtcttgtcgagtgtctgtgcccccccatccgtagacccatgaatgaggtactattagtgtcaatcttctgcatttggtgaacaatctacatttttttatgtacttccctaaaagtgctggatgcctagacggtaccctccagaaggcgctgaagggctatgtgaaacggttacaggttgtgtgtttttttccgctggagcaaaaataataatctaaggggaaaatttgtaaaataagactgatttcttgtatgatatattaacattaaaacagcaaattatgggtataggaatgggtggaagttgtattcttttctctacaataattgaatgctctgtggattgctcacttaaagctttttcagctatggctcacctgagtagtacgccccaggcgttcttgtaaaatttagaaactggctgtgtgattttgtggtgcttgaacaacttatgacacccctatttgaagcattagtgcctccttggcacagactgaaggagaagttttcacatttaattttaggcagaaagctgaaatgctagtcagattcaatcctgaagtcctgcatgctgtaatcattataagtgttacataaaaaacagtaattatggagcatttggcacacaactccattccactggcaacaacagtctaactctaaactgatttcatgctatcctgggtaaacggagtgttcgttctgtactttaacatttcagctataaagctgttaattactgttccatcttggtctcgtcctgtcaagtatttgcattcacatcctccagctgtaaccctcagatgaagtaatatgaatgggatcctttttgtacaagctactcattttcacatattttttgtaacccgtttcagctagaactatcaactaaccaaaattttatacaagctagcggtgattacaacagtaagtttctctgtcaactactttaactggaaacttggtgaaggtgcttacaacttgaccgactagcagcagtggcataagctggctttgttcttatgaatagaactatgcttgatgctaaccccagaaatgtgatgcaagcccacacgacgaaggtggttgagtagcacttcacccctatgcacacagtcatggtgtcaacaatgccagtgcggttatccactactgtcatcttttggccatttgcatcgtataccatggcagcaatctgcccatagaggagtgagccaagcgggatattggtgataaggatgttgtgattcaccccaacgctatttggtccaaagagctccgaggtcactgacactgctgcagcaaagatgaaccctgagcttaggccaattagcgctgttcctgctaccagggtgcttccatcttgtttgttccacataaggaaaaaggccattggcatggggaccaatgcagcagcaagccaccctgtgcgagcaagtgacaccttcctgtggacaaattttagttaggaagcatgagatatgatgatatatatgtatgcatataaagcaaaacagatacctgtgaaggaggtcaggtagtgcagagagaagacggccgaagaaggagcaggatgagtagacggcaaggagcatggtgagctgtgactgctggtgcaatgactgagcaatctgacccaagttgttgctgtataccaggccaacagtggctccacagaagtaggctgtgtagtagagccagaagtccacacaccgaatgagcttctttgcactgtgttcttcaccgagcgtcgccaggcggcccttgacctgcacctggttctcctttggcttttgcatcatggcattggactccatctgactgatgaggagtggcttatgtgggtcatcatatgcagggtcagggccatctgagcaactggagcaggcagggatgatgagaggaagggcgaggaggaccatggcacctgtgaggatgacccacgcagtagagctggttgcggtgaaagatccaaagaccaccagatatatgccggtgatgaatgcgaggatgtagaggccgaggaagacgcggccgtcatgcccgggcgcactttggatgtggccctcatttttgtggcagaggaggatcgctgggagtgcaaggacagagacggcgagagggaggattgcattgaggaggaggtagacagctggggagaaaggggagagcgcgttggcaaagagagtgtagaaggcagcgctgagcccgttgaagcttatggagagggagagggctagggagcggctgctcgcagagaagctgcggatgcagagaacaaagcagactgtgttgaaccagcagatgctgcaccctgctatcaagcagaacaagaacacctgcagggggggcaacatgtgaatcagaggagtttggtcagacaattaagttcgatataagtaagttgcatgttgttgtcttgacagttgaacctctgttgtcttttttttttatcttgacttaaatctgtttgaggatagtgcttgcaatcagtttgtcaaaagaataaagacaggttgcttgcttgctgctagaggttgtctaatatggaatgcattgtacataatcatgcatctggggatacgtaacggcagcgtgattctaatttgtgtgctgtaatgtcatatattcctccgtgctgcttcttgaaggaaggtgtcaaaagaaggctagttttgtagtggctggatgatgcagctgtgacttgtgagactggaacggcatgccgtaggccggtgaggatgccgatgttgtggtatctagctgattgtgattgcgatgtgtgtttgtcgttgtgatggcagactggtatcttttgctgcgttggaataatatgtggtcgctgttttttaggattaattgggcacacctatcaacgaacaagatatttggtgtgcaggtgggtcactcatctagcagtcaaaagcagagaaggggcagactggtaggaggaaagcagagttcagccggttgcagatgacatccaattcagagtttctgttggttggtttgttgatgatgaatgttcttaactttttgctggatactccgctgatttattatagtgtccccatctcatgtcacgtcatttaagctcggtcctttgtttggatttttttaaagaaattgtttggtgtctgatttttttaaaaaaagatgatttgaaacaatattattatactatcaacgtcaactaaaacaaatcaattgttcttttggtttgtctttgtaccatggtatatcattttgttcctgaatgcagaaaccattgtaaactataattgtctttgtgccaactttaatcagattttagcggaattacccttttgtctaacggttttttgttttggaaatttaaaataaattattatgcattatttatgcttatcgaaattgcaacgagctaaagctataaaactacaattctaatatgaaatatgcgcaata

SEQ ID NO: 117572 - DNA, 3310 bp, Zea Mays
caaccgagggctcggatgttagattcattgtgcacatacactctctgggtcatcaacgggcggcttcatcgaggcgtagaggtcgtgctcgacatagctgtcgtagacgacgagaggaggatgcgtggactccaccacctccacctgcggctgtgggtccttcaactcgatggtgctggacaccgtcgcggtagacgtctgtgacctctgtgacgaccgacttcccaccacggcgaccgcatcgtgggagactcctccaccgagacggagtagagcgacggcggtggcagcggcaggaggtcaaggatatacgtctgtaaaccgcggacggggctcgggcgtgcgcagcggctgcaggtctcgccagcgtcggcgtcggcgaggtcgccgccatgggcgcgcggccgtgtggtcacagtcacagtggtcggagtgtgattggttggaaatcgaacgcgatgcgggccttccttttgggctcggtgggccgtgagtcccattttgtttgggcggcaaaggaaacaaaattgatcctactcatcatattcgtttggcttcaacggtcaggatttggcttccactccatgggcctttcgctcgacaagctcatcaaagccgccgccgccgccgccgtcgcctcagctcgctccggctgcctctgcctcccctgcctctgaggatttgcttggggagagacttattatgagattcgcgggttggtacctgaagatcgcggcggtaggggcctccattggcgccgccatggagctcttcatgatccacacgggcttctacgagaaggtaactgtcttggagtcagaaaaacgagcttgggaaagcagtccagaggcccaagcaatgagagaagctctcaatccatggcgcaagcatgatgaacaagaacaacagaagtagtcaagatttatgtgtcttgtcgagtgtctgtgcccccccatccgtagacccatgaatgaggtactattagtgtcaatcttctgcatttggtgaacaatctacatttttttatgtacttccctaaaagtgctggatgcctagacggtaccctccagaaggcgctgaagggctatgtgaaacggttacaggttgtgtgtttttttccgctggagcaaaaataataatctaaggggaaaatttgtaaaataagactgatttcttgtatgatatattaacattaaaacagcaaattatgggtataggaatgggtggaagttgtattcttttctctacaataattgaatgctctgtggattgctcacttaaagctttttcagctatggctcacctgagtagtacgccccaggcgttcttgtaaaatttagaaactggctgtgtgattttgtggtgcttgaacaacttatgacacccctatttgaagcattagtgcctccttggcacagactgaaggagaagttttcacatttaattttaggcagaaagctgaaatgctagtcagattcaatcctgaagtcctgcatgctgtaatcattataagtgttacataaaaaacagtaattatggagcatttggcacacaactccattccactggcaacaacagtctaactctaaactgatttcatgctatcctgggtaaacggagtgttcgttctgtactttaacatttcagctataaagctgttaattactgttccatcttggtctcgtcctgtcaagtatttgcattcacatcctccagctgtaaccctcagatgaagtaatatgaatgggatcctttttgtacaagctactcattttcacatattttttgtaacccgtttcagctagaactatcaactaaccaaaattttatacaagctagcggtgattacaacagtaagtttctctgtcaactactttaactggaaacttggtgaaggtgcttacaacttgaccgactagcagcagtggcataagctggctttgttcttatgaatagaactatgcttgatgctaaccccagaaatgtgatgcaagcccacacgacgaaggtggttgagtagcacttcacccctatgcacacagtcatggtgtcaacaatgccagtgcggttatccactactgtcatcttttggccatttgcatcgtataccatggcagcaatctgcccatagaggagtgagccaagcgggatattggtgataaggatgttgtgattcaccccaacgctatttggtccaaagagctccgaggtcactgacactgctgcagcaaagatgaaccctgagcttaggccaattagcgctgttcctgctaccagggtgcttccatcttgtttgttccacataaggaaaaaggccattggcatggggaccaatgcagcagcaagccaccctgtgcgagcaagtgacaccttcctgtggacaaattttagttaggaagcatgagatatgatgatatatatgtatgcatataaagcaaaacagatacctgtgaaggaggtcaggtagtgcagagagaagacggccgaagaaggagcaggatgagtagacggcaaggagcatggtgagctgtgactgctggtgcaatgactgagcaatctgacccaagttgttgctgtataccaggccaacagtggctccacagaagtaggctgtgtagtagagccagaagtccacacaccgaatgagcttctttgcactgtgttcttcaccgagcgtcgccaggcggcccttgacctgcacctggttctcctttggcttttgcatcatggcattggactccatctgactgatgaggagtggcttatgtgggtcatcatatgcagggtcagggccatctgagcaactggagcaggcagggatgatgagaggaagggcgaggaggaccatggcacctgtgaggatgacccacgcagtagagctggttgcggtgaaagatccaaagaccaccagatatatgccggtgatgaatgcgaggatgtagaggccgaggaagacgcggccgtcatgcccgggcgcactttggatgtggccctcatttttgtggcagaggaggatcgctgggagtgcaaggacagagacggcgagagggaggattgcattgaggaggaggtagacagctggggagaaaggggagagcgcgttggcaaagagagtgtagaaggcagcgctgagcccgttgaagcttatggagagggagagggctagggagcggctgctcgcagagaagctgcggatgcagagaacaaagcagactgtgttgaaccagcagatgctgcaccctgctatcaagcagaacaagaacacctgcagggggggcaacatgtgaatcagaggagtttggtcagacaa

SEQ ID NO: 117573 - DNA, 640 bp, Zea Mays
ggccgctagtgaaaacatcagtaatactgcgacaacaggtaatgtccagcttcagcaggttctttagccttgacacaacaaaagagagttctgtatctgtcactccagatgacttgctaagacttagctcccttaaagaaacacaagaggtcccaatggcttttagtccattggccatgatttgcagccttccagcttcagggcctgcagtttaggaagcttctggaagtttctcaccatagaaggagtaacctgatacatgaagggtgtagattaagctgtgagggctcaggtcatgccaaggtgatacaataatatgaccagatggttagctacttacaggacagcagtatgaaagatccagttccaatagattgggtaccgacttcaggatggatgaaactcctacatcggtgatattctgacactgagacatatcaagcacctgcaaccgtgcaagcatgcaagttcagttaagtaataaacggagctttgtgctactatcaaacacttcttttgtgtgatctatcaaaaatacatattttagtacaggtgaccagttcagacaaggcatcttcatagttcagaacctaacagtgtaagatcaaatagaaaataatatagtggcgtttcgaatgaa

SEQ ID NO: 117574 - DNA, 255 bp, Zea Mays
atgtctcgttccttcgatactaccagccccaaggcgcctgacctcgctctcttccccttacccttcagctgtatgcttcgatcgagtttcatgtgcctgtccaaccctgatccaaatcggactcaacaaactccaggaactacatcctcctgtgtcgtatgcaaccggcaaatccacttcattccaagcaggcagagatcaccagtgccccttcattctcttcttgcatcccaaacacggcagtataaaacatga

SEQ ID NO: 117575 - DNA, 1387 bp, Zea Mays
ttttttttatttagtagaagggataaacttggatgaaaccattctagtttttgtttgtatgatggttagctgtcactactcgagagaggcgggggcggccatcccagttttcgagagcacgagagaggcgaggccggcaccatccactcggtttttttagaccacaccgccataaaaaattgctccagtgttcacctcatcccgtgtgaccctcatccaaacattatagaaaatgtggccacccctttatatcaatttttgtacatccaaccaaacacaacacagtagaaccttctccatccacctctgaacttcacatgctatacaacacaagtttctgtcaaccaaacaaaaacaggtcccaaagcactttgagcagcacaactctgtacagccagcaacaggccagtctacgattacaggaggatacatcccactatcgccagccaacaccaaaagctactttcactcgtctttcattgccatctcatgcctcctcttctgtgcaacctcgacaagtagagtcagcagggcttcgcatacctgcgacgtgtccgcctgatccccagactcttctttcagcgacgaatacaccatccacgcgtggtctagcttccgctccggccggaccgccactgaaccaggaacctcagcatctttcctcgtcacgagaccgtcactcttctcgccatacctcgccaccagcaactgcgagcatgctgccatcgcggctgaaagtggcatcacaactgggatcctagtggaattgccatcgccagcaatcgggagctccaggtgtgcaacgtgagagagcgctgtgagcacgctgggagtgatgcttgcctccgtgtggaacgaaacgataggaacatcctgaggtagcgggtgccgtcgcaggaattctttccgcctttcataagtcagatcttctagagcctgcagatcaccctgaacacaaggcaattaatagagtcagcaacactgtcattcaataggcaggctggttagtgactggattgctggaatgatcaaggaaaataccttaaggaccttggataccaagatctccatgatcttacgcagcctgacatagtcaccaagctgcccctctcgcaggatatctgaagcaacggggcttcctccatatggactttgggctaatgctaaacctgcgactttgtctttgagttgtggccagtagagggagagggctgcagccgcatcaacaccacccttgctgtgaccaaggaggagcacacgtttccttgatccccagtatatttcttctatgtattcctttatctctcgtgcatttttactcactgaagactgcaatgtggtttttttttaatgcactgctttgtcaactaagtgtcaagaagcaaaa

SEQ ID NO: 117576 - DNA, 2138 bp, Zea Mays
gccgtgggctatatgtcagtaaggaaagaaaagagaaagtatccagccagccagccagccagcgagcaactgaccagtgggcccgatggacgacttcgatccagtcccctccgactgcgacgacggcgatggcggcgtcgccgccgcctcctcctcctctcccggccgttccatctgccacgccggctgtggccgcccgtcccgcgtctgcctgtgcccgtacctccctgcctcccctctccagacctccacgaccatcgtcatcctccaccacccgcacgccctccggcggaacccgctctcaacgctgcccctcctcgcgcgctgcctctccaacctccgcctcgtcccgggccgccgcctcctcccctcctccaccgctcccgccccgggccccgtcctcctgctctacccgtcgcccgccgcctccgacctcgtctcctggtgccggtccacgccgcggcccgcgcgcgccgcccccaccctcctcctcctcgacggcacctggaggcaggccagggagatgcacgcggccagcctggccgtgctcgcgtcgctgggcgcggtccccgtcgccctccccgtcgacagccgcgccgacggggacagcatgttcgagtccgacctcgtggtgaggaaggagccgcgcaaggggtgcgtcagcaccatggaggccgtggcgagggcgctgcggctgctggagccggagcgggagggcgccgtggtcgaggaaaccatgctcggtgtgctccgcgccatggtcgccttccagaccgagcatctgctgcaccggacggtgaagcctagagcgaagatgaggaagaagaaggaactcaggagggagcaggagatgcagagggatgctgtggactgatgcggcttgctcgtggtgctgtgtggaatttcttgccttggaatctatcacaaaatccaccagactccagcagtgaaggtctgattttacccaggcatatcgatggtctcttcacttaggatgcattgttgcttagcataaccggatcatgttggttctagctcaaaatgcctatgtctttccgatgttgtaagctgggttcatgttgattctagctcaaaaggattctgtgacgcaattattctcctttaatcatatgttcaactaattcgcaattttttttcagatcagtacatagcagaggttcacagcttcttataatcttcatcaagctggatccgtagctaaattcttcatcagtagaagaaaaaaaaactaacaaatgagaaacctgaaccaacatatgagttgtctgaaggggattggatggtgcgtttgtgatgcgcgcatggatctagtggtggtaccccgcgaacttggaagggggcagggacggacggcagaagaagataccattcaatttcaatgggtttatcatgctggcatgaaaagaccacaacatattaacatgcattgcattgttactatgccctacaaaaatgcaataacatgctaccgaaacatataaaatatctaccttcctctattttggagaaaacatcatatacgttttggaatgtgaagagtacaaagtgtggattagatgagatttggcgagtttaaatctatagcaagttaaaatctccactaactttttctaatcttatctaaaccatgtggcgtaggaataatggaacaaggcattaaatgatttaccatagattttggacaagctggtgatgaagagttttggggcaaatccactccatagtggagaaaaggtattcttgcggtggtcaggagagagaagtgtgtttttcagatcctttggtgtttctttcgttaatagagagggaaatgagttagctcacctttgtgcaagtaaggctgtagagttggctcctgttttattttggctagattgcttctctaattgtcttttgtaagtagctagcgggaattgtaatttcactttgaaccagtaataaagaacttgtgttctacctcaaaaaaaaaaaaaaggagtgagtgtccacggttgtccttttaactgtactactagttggttacataaaattgttgcatgtaaccgttatctaaaatttacgcacctgaaacatagcaacctaaaagcatacaaaaccttggtttagaaaacaaaaaa

SEQ ID NO: 117577 - DNA, 127 bp, Zea Mays
cgttaataccatttgaggagattggcattttaagatgtccggctttgttaatggtctcaagaaacccaaacatttagggtctgtttggaagcacccaatttttaagaaactggtttatagaaagtga

SEQ ID NO: 117578 - DNA, 2004 bp, Zea Mays
atgttactcactgtaagtgattgggtgagctccaatttctcttgttctccattcagcgaggagaagaaaaaagaagaaccagagacacccaggtatcgtgatcgtgctaaggagcggcgtgaagatcaaaaccctgattatgaacctacagaacttggttcgtttcatgcagtggcacctcctgggagtgatttgaggttggcggatgcccacaagatttcaattgagaaaagcaaatatcttggaggacagggtccttttcagacagggataacacgatgtggtgtttgccaggattatattgcttggaacaatgttactattctttctcacctgctattgctagcgcaagcagttcctcacctcactgtgcattacctatcaaactggagcatgggcaaggccacaaggcaacacttggccattggctaccaaactgacttgatcatggaatatgcagtccatgtaattttgtgttcattgatttcgcagaaatcccctgttgatgagcaactggtggtcctattgtactgcttatttataggtgatttggagcatacacatctggtcaagggcctgggctatgctctacttcacaaagtacggagtgaaattgaaaagaaacctgaggcagaggatgggaaggatgcaaagtcaagggcaacaaaagaagatcaggcagtctccttccgcactgcaactgcaaagtctgtctaccagtggatcataaagcctcaaagcataattaaagagaatgaattgtttcttcctggtcggatgtcatttatttacaacttggaggaggtagtaaccaatgacattccaacaactcttcataggagcaaagctgattgcccagttcaagaggagatggtaactgtaagtgtggatggttctgtacttgacaggattgctaaaattatgacgtaccttcggcttggatcatcagggaaggttttgaagaaaaagaaaaaggagagagatataaaagggaagaacaatttggcaagtggcgactgtgatgagtcagtaaaaccttccaaaattaatggttctactcagaaacatcaatcagatatgccaccaccaccagctcgaccccctcagaacaataatttcactggaaaggagaaacaaccagtccctgttgcaagagcagacgatgatgacatttttgttggagatggagttgactatacagttcctaacgaggaaatgagtcagagccctgtttctgatatggatgaatccccacataaccatcagaagcagtccaatttcattgaacccatgtatggccctgtaccaccatctgaacctgctcaagcttggcaacagccgaatgggtatgatgctgttcaagcccagatggcagctgctggatatcaaggtgactggtcaagctatgtgtatgcagaacagcagttgggttatccagagcagtacgtgcagcaaagcacacaggaatatgatgtgttagctgaccccagtatatcacaggatccgaggttcatgactcaggcagacaaggatcggggtttaggttctgttttcaaacgtgacgatcaaaggcttaatcagctgagggaaaaggacgaacgggagagagatccaaattttatttcagatagttactcagagtgttatcctggttaccaggagtataataatgagatcgcaggaagcgatgatgaagatgatttatcgaagatggatatgggtggacgggcgaagggccgtcttcacaggtgggacttcgagactgaagaggagtgggccaagtacaacgatcagaaagaagccatgccgaaggctgccttccagttcggggtgaagatgcaggacggcaggaaaaccaggaagcagaacaaggaccagaagctgacgaatgacctccacaagatcaacaagattctggctaggaagaagggcgagaaagatggggcggaagatggcggtcactacgatgatgatttacctagctcaaagaaacagcgtggctga

SEQ ID NO: 117579 - DNA, 1795 bp, Zea Mays
cctagcccagcccaacggccgagcacacgatccgttcgagagcgagaaggtcctccggcctcagcaccctcaagtacacagtacaccctcgcaccggtaccgcggtccgcggcacacgacacccccactcgtctgtcgactcacgtctgatcgtctctccccaacaatctctcgagtcttgccattcgcctcagcttgcccctcctccaagcgtccaagccccacccggccattgcctcctcctcctgccgcagtgcaggcacatggcgccgaccaggcacgcggatgagggcgggcagctccagctcatagacgccgccagcgtcgacgaggaggaggagtgctttgagtccatcgacaagctgatttctcaggggataaatgcaggagacgtgaggaagctgcaggatgcagggatttacacttgcaatggcctaatgatgcataccaagaagaaccttacaggaatcaaaggtttgtctgaagcaaaagttgataagatctgcgaggcagcagaaaaacttctgaaccagggcttcatgacaggaaatgatctccttctcaagcggaagtctgttgttcggattacaaccgggagccaggcacttgatgagctgcttggcggggggattgaaacactttgcatcacagaggcattcggggagttccggtcagggaagacccagttggctcataccctatgtgtctccactcagcttccaatccacatgcatggggggaatggaaaggttgcctacattgacactgagggaacattccgacctgaacgcattgtgccaattgctgagagatttgggatggatgccaatgctgttctcgacaatatcatatatgctcgtgcgtacacatatgagcaccagtacaacttgctcctgggccttgctgccaaaatggctgaagaacctttcaagcttctgattgtggattctgtgattgcactgttccgtgttgatttcagtggcaggggtgaactagcagagcgccagcaaaagctagcacagatgctgtcacgccttaccaagattgccgaggaattcaatgttgcagtgtacatcaccaaccaagtgattgctgatccaggtggcggcatgttcataaccgatccaaagaaaccagcaggcggccatgtgttggcgcatgctgccaccatcagattgatgctgaggaaaggaaaaggcgagcagcgtgtctgcaagatcttcgatgcacctaaccttcctgaaggagaagctgttttccaggttacatcaggtggaatcatggacgtaaaagactgattcgggttttcagccagagtttctgccgaagaagattgttcatgtttctgcagtgaagttcacatagcttgcataggtacacatcgagcgaagttacagcagtggtgtactctgttttatcattgacgtaggaaaaataaataggcgaaactctatgttgcttaggcctcccattgggtagttttttgccacggattacatgtttccttatggagggagtatgttaccgtgtcctttgctttcccaaatgagtgctaggcactaggcagagaccatctactgttagttgtttaagcatgctcatctccatgcttgcgtataaataacactgttctttctcattagtttggtttgacaatgaatggaactggaaagtaaagatactcggaggtcgtaactcgtaacttttgcaagttgggaacagatgaccaagctactgctgctaatcagtaccattccgggcagagcagaagagcagaggcatgcttccaagttcc

SEQ ID NO: 117580 - DNA, 1790 bp, Zea Mays
cctagcccagcccaacggccgagcacacgatccgttcgagagcgagaaggtcctccggcctcagcaccctcaagtacacagtacaccctcgcaccggtaccgcggtccgcggcacacgacacccccactcgtctgtcgactcacgtctgatcgtctctccccaacaatctctcgagtcttgccattcgcctcagcttgcccctcctccaagcgtccaagccccacccggccattgcctcctcctcctgccgcaggcacatggcgccgaccaggcacgcggatgagggcgggcagctccagctcatagacgccgccagcgtcgacgaggaggaggagtgctttgagtccatcgacaagctgatttctcaggggataaatgcaggagacgtgaggaagctgcaggatgcagggatttacacttgcaatggcctaatgatgcataccaagaagaaccttacaggaatcaaaggtttgtctgaagcaaaagttgataagatctgcgaggcagcagaaaaacttctgaaccagggcttcatgacaggaaatgatctccttctcaagcggaagtctgttgttcggattacaaccgggagccaggcacttgatgagctgcttggcggggggattgaaacactttgcatcacagaggcattcggggagttccggtcagggaagacccagttggctcataccctatgtgtctccactcagcttccaatccacatgcatggggggaatggaaaggttgcctacattgacactgagggaacattccgacctgaacgcattgtgccaattgctgagagatttgggatggatgccaatgctgttctcgacaatatcatatatgctcgtgcgtacacatatgagcaccagtacaacttgctcctgggccttgctgccaaaatggctgaagaacctttcaagcttctgattgtggattctgtgattgcactgttccgtgttgatttcagtggcaggggtgaactagcagagcgccagcaaaagctagcacagatgctgtcacgccttaccaagattgccgaggaattcaatgttgcagtgtacatcaccaaccaagtgattgctgatccaggtggcggcatgttcataaccgatccaaagaaaccagcaggcggccatgtgttggcgcatgctgccaccatcagattgatgctgaggaaaggaaaaggcgagcagcgtgtctgcaagatcttcgatgcacctaaccttcctgaaggagaagctgttttccaggttacatcaggtggaatcatggacgtaaaagactgattcgggttttcagccagagtttctgccgaagaagattgttcatgtttctgcagtgaagttcacatagcttgcataggtacacatcgagcgaagttacagcagtggtgtactctgttttatcattgacgtaggaaaaataaataggcgaaactctatgttgcttaggcctcccattgggtagttttttgccacggattacatgtttccttatggagggagtatgttaccgtgtcctttgctttcccaaatgagtgctaggcactaggcagagaccatctactgttagttgtttaagcatgctcatctccatgcttgcgtataaataacactgttctttctcattagtttggtttgacaatgaatggaactggaaagtaaagatactcggaggtcgtaactcgtaacttttgcaagttgggaacagatgaccaagctactgctgctaatcagtaccattccgggcagagcagaagagcagaggcatgcttccaagttcc

SEQ ID NO: 117581 - DNA, 1784 bp, Zea Mays
cctagcccagcccaacggccgagcacacgatccgttcgagagcgagaaggtcctccggcctcagcaccctcaagtacacagtacaccctcgcaccggtaccgcggtccgcggcacacgacacccccactcgtctgtcgactcacgtctgatcgtctctccccaacaatctctcgagtcttgccattcgcctcagcttgcccctcctccaagcgtccaagccccacccggccattgcctcctcctcctgccgcaggcacatggcgccgaccaggcacgcggatgagggcgggcagctccagctcatagacgccgccagcgtcgacgaggaggaggagtgctttgagtccatcgacaagctgatttctcaggggataaatgcaggagacgtgaggaagctgcaggatgcagggatttacacttgcaatggcctaatgatgcataccaagaagaaccttacaggaatcaaaggtttgtctgaagcaaaagttgataagatctgcgaggcagcagaaaaacttctgaaccagggcttcatgacaggaaatgatctccttctcaagtctgttgttcggattacaaccgggagccaggcacttgatgagctgcttggcggggggattgaaacactttgcatcacagaggcattcggggagttccggtcagggaagacccagttggctcataccctatgtgtctccactcagcttccaatccacatgcatggggggaatggaaaggttgcctacattgacactgagggaacattccgacctgaacgcattgtgccaattgctgagagatttgggatggatgccaatgctgttctcgacaatatcatatatgctcgtgcgtacacatatgagcaccagtacaacttgctcctgggccttgctgccaaaatggctgaagaacctttcaagcttctgattgtggattctgtgattgcactgttccgtgttgatttcagtggcaggggtgaactagcagagcgccagcaaaagctagcacagatgctgtcacgccttaccaagattgccgaggaattcaatgttgcagtgtacatcaccaaccaagtgattgctgatccaggtggcggcatgttcataaccgatccaaagaaaccagcaggcggccatgtgttggcgcatgctgccaccatcagattgatgctgaggaaaggaaaaggcgagcagcgtgtctgcaagatcttcgatgcacctaaccttcctgaaggagaagctgttttccaggttacatcaggtggaatcatggacgtaaaagactgattcgggttttcagccagagtttctgccgaagaagattgttcatgtttctgcagtgaagttcacatagcttgcataggtacacatcgagcgaagttacagcagtggtgtactctgttttatcattgacgtaggaaaaataaataggcgaaactctatgttgcttaggcctcccattgggtagttttttgccacggattacatgtttccttatggagggagtatgttaccgtgtcctttgctttcccaaatgagtgctaggcactaggcagagaccatctactgttagttgtttaagcatgctcatctccatgcttgcgtataaataacactgttctttctcattagtttggtttgacaatgaatggaactggaaagtaaagatactcggaggtcgtaactcgtaacttttgcaagttgggaacagatgaccaagctactgctgctaatcagtaccattccgggcagagcagaagagcagaggcatgcttccaagttcc

SEQ ID NO: 117582 - DNA, 828 bp, Zea Mays
ccttaatgggcatgcatctgcgaaagtccagttggagccaactattacagatgaaatctaaattgaaaatgcgtgagctctcccctttgtcatgggtgccatcatcttcacatgctgatctggtggggaaaatcatcttaagttggcttgatgcaaccatctcttgtccgtcatcctgcctccagcctgaggaaagtactaggtatcgaggacttgatgcaagtagcactggcttgttccccattgagtatggctgtaacaattttaaacagacgagcaatagaccagtgatgcccaaagatcattagtgttggctccctttcagaaatgccgcagctttgtcattgtccagtacggaaacacaaacaccgatatttttaagtacttttagtcacctgtttcaccagtggaagaaatgacagatggcacagatgattcatctgtatgaaccagatatcaagtacggccttggagaagcttaagggctcgttcgtttctgcaggattgcaccaagaattatttctgttgatcataacttatacaaatcagagaagcaatccgggccggaacagtttcggtcttctattccctgtcaaccgaacgggccctaagctaggtggttattggatcaggcgtctatgctgtgagagaactggcaaagaggatcctccgtttgtccttggcttctggtgttacagaagaaactgcagaacccatgagcgaaaagggtggattagttttagcaaacaagtggttacactagttgtagctgtactatgtgtcctctgaatttccctgtgaaagcaatatgatcaaagactgtcaaat

SEQ ID NO: 117583 - DNA, 863 bp, Zea Mays
ctccctctttccccccgggcctcgtctgctctgttcgactgttgttgcagtgccttcgcctctccagcaagcaaagccgacccccacaccagccagtcaggaatcgccgccggcggaagccaagcatcatccccagacaccccgtccgtcatggatccggcggcgtggccgccgtggacgtcgctcctgctgcgggcgctgagccggcggcggacctgggtggcgctcttcctcgcagtgtacgccgcgctgctctcctcctcctggtccctgctggcctccgtccgcgcctggtactacgccgcctcctccgcctccgcctcggcggccgcctcggcagcgcccgcctggcccgcggcgctctacgcctccgtcacgtacggcgccgtgttcggcctactctccatggccgccgcgctcgccgtcgccgcccccgccatgctggtcacctggaccaccgtccttgtgctcctcgccttcgcggggcgccggcccaggtcgctcgtcgccgagggccgacgcgccaccagggacatcgcgggcctcgcgctccgcgtcctcctccgcgagggcaacgccgtcgccgcgctctgcgctgccgccagcttcgccgcgctcctcctcggccggcgcgacgacgatgccgcacgccgcgcttcctagttcgagctggttgtagcctgttgtagcatcgcccccctccccttttacacctcttcctcctcttctctcaagctagatctccagccctgttgttcctctccgggcgtaaccgcctgcgcaagagattatgatttgtttgttgcagctagtaggtgtaaattatcacaccagtttgtttcagttactccacaaattggaca

SEQ ID NO: 117584 - DNA, 1770 bp, Zea Mays
gaaagcgaaaccacttggctgcgtgtaggagtagtaggatcctcctcagatcggcttcaaaaatcaaagtgggggggacaacaaggcaggggatgagtgcagctgcaaccaaggtgaagagacgtgtgggcaagtacgagctcggccgaaccataggcgaaggcacattcgccaaggtcaggttcgccaagaacaccgagaccggggagccggtggccgtcaagatcctcgacaaggagaaggtcctcaggcacaagatggccgagcagattaagagggagatttcgaccatgaagctgattaagcaccctaacgttgttcgcatatatgaggtgatgggaagtaaaacaaaggtctacattgtgctggagtatgttaccggcggcgaacttttcgacacaattgctaaccaaggtcgaatgagggaaggcgaggcgaggagttacttccaacaattaatcaacgcagttgattattgccatagcaggggtgtgtaccaccgggatttaaaaccagaaaatctactgcttgactcatatggaaatctgaatgtctctgactttgggctgagcgcgctgtcccagcaaatcaaggatgatggattgctgcacacaacttgtgggactccaaactatgtggcaccagaggtcctagaagatcagggctatgatggtgcaatggctgatctgtggtcatgtggagttatcctgtttgttctgctagctgggtatttaccttttgaggactctaaccttatgacgctgtataagaaaatctcaaatgcagaatacacatttccaccatggacatctttccctgccaagagaataacaatccctgaaatactggaggatgagtggttcaaaaagggctacaagcgcccggagtttgacgagaaatatgacacgccattggatgatgtggatgctgtcttcaatgactcagaagagcaccacgtgacagagaagaaagaagaagaacccgtagctctcaatgcatttgaactgatttcaaggtcagcaggcctaaatcttgggaacctatttgactcggagcaggaattcaaaagagaaacgaggttcacgtcaaaatgtccaccgaaagaaatcattcgcaagattgaggaagctgcaaaacctctaggatttggtgtccagaagaaaaactacaagttgaggctagagaaagtaaaagcagggaggaagggaaacctgaatgttgctacggagatactacaggttgcgccctcccttcatatggtacaagtccggaaagcaaaaggcgacactctggagttccaaaagttctacaagaacctttccaagaccttaaaggacgttgtctggaaatctgaagacctgcaaatgcgagctgcttcttagcatccactagatggcgagatgttcgtacgtgtcagattccattcccgtagcatgatgtgtcgtcagccgtttctgttcactgcactctgcatggtccggtgggcgcgtggcttggcattttcagagaccgcgttgctcgttgcagcccgggatgaaggcgatgcagtaggttttgtggatgtggtgagctctgtatatgcctattgatgagtcatgttgcaagctgtaacgacactatgatccgtgaagtgtagaagcagccaagtatgttctttctatgctgccccatttcccggcagtttccatgcattttgaagaaaaaaatagtggctaactcattgatatttgtatttggtcatcattaataaatcgcctctccatctgtgca

SEQ ID NO: 117585 - DNA, 2067 bp, Zea Mays
acataagcttttatctaggcttgcggctacttgcatcggagcaagtcagtcacatctcacagctcagtgagatccagagccaaagggcggggcgtctcccactcccaatcccaagtccagccgccgccgtctcttgctcgctccaaaagccgttttccagagatctttttcagggccagacgccagccgccgtctctcgcttgcctgcatttccgatcctgaggcagtcctcatctcattctcatccaaccgggaggttgggaacgagatcacagctacagttacctgagtagtaggatcctcctcagatcggcttcaaaaatcaaagtgggggggacaacaaggcaggggatgagtgcagctgcaaccaaggtgaagagacgtgtgggcaagtacgagctcggccgaaccataggcgaaggcacattcgccaaggtcaggttcgccaagaacaccgagaccggggagccggtggccgtcaagatcctcgacaaggagaaggtcctcaggcacaagatggccgagcagattaagagggagatttcgaccatgaagctgattaagcaccctaacgttgttcgcatatatgaggtgatgggaagtaaaacaaaggtctacattgtgctggagtatgttaccggcggcgaacttttcgacacaattgctaaccaaggtcgaatgagggaaggcgaggcgaggagttacttccaacaattaatcaacgcagttgattattgccatagcaggggtgtgtaccaccgggatttaaaaccagaaaatctactgcttgactcatatggaaatctgaatgtctctgactttgggctgagcgcgctgtcccagcaaatcaaggatgatggattgctgcacacaacttgtgggactccaaactatgtggcaccagaggtcctagaagatcagggctatgatggtgcaatggctgatctgtggtcatgtggagttatcctgtttgttctgctagctgggtatttaccttttgaggactctaaccttatgacgctgtataagaaaatctcaaatgcagaatacacatttccaccatggacatctttccctgccaagaggttgttgacaagaatccttgatccaaatccgatgacgagaataacaatccctgaaatactggaggatgagtggttcaaaaagggctacaagcgcccggagtttgacgagaaatatgacacgccattggatgatgtggatgctgtcttcaatgactcagaagagcaccacgtgacagagaagaaagaagaagaacccgtagctctcaatgcatttgaactgatttcaaggtcagcaggcctaaatcttgggaacctatttgactcggagcaggaattcaaaagagaaacgaggttcacgtcaaaatgtccaccgaaagaaatcattcgcaagattgaggaagctgcaaaacctctaggatttggtgtccagaagaaaaactacaagttgaggctagagaaagtaaaagcagggaggaagggaaacctgaatgttgctacggagatactacaggttgcgccctcccttcatatggtacaagtccggaaagcaaaaggcgacactctggagttccaaaagttctacaagaacctttccaagaccttaaaggacgttgtctggaaatctgaagacctgcaaatgcgagctgcttcttagcatccactagatggcgagatgttcgtacgtgtcagattccattcccgtagcatgatgtgtcgtcagccgtttctgttcactgcactctgcatggtccggtgggcgcgtggcttggcattttcagagaccgcgttgctcgttgcagcccgggatgaaggcgatgcagtaggttttgtggatgtggtgagctctgtatatgcctattgatgagtcatgttgcaagctgtaacgacactatgatccgtgaagtgtagaagcagccaagtatgttctttctatgctgccccatttcccggcagtttccatgcattttgaagaaaaaaatagtggctaactcattgatatttgtatttggtcatcattaataaatcgcctctccatctgtgc

SEQ ID NO: 117586 - DNA, 2152 bp, Zea Mays
acataagcttttatctaggcttgcggctacttgcatcggagcaagtcagtcacatctcacagctcagtgagatccagagccaaagggcggggcgtctcccactcccaatcccaagtccagccgccgccgtctcttgctcgctccaaaagccgttttccagagatctttttcagggccagacgccagccgccgtctctcgcttgcctgcatttccgatcctgaggcagtcctcatctcattctcatccaaccgggaggttgggaacgagatcacagctacagttacctgagtagtaggatcctcctcagatcggcttcaaaaatcaaagtgggggggacaacaaggcaggggatgagtgcagctgcaaccaaggtgaagagacgtgtgggcaagtacgagctcggccgaaccataggcgaaggcacattcgccaaggtcaggttcgccaagaacaccgagaccggggagccggtggccgtcaagatcctcgacaaggagaaggtcctcaggcacaagatggccgagcagattaagagggagatttcgaccatgaagctgattaagcaccctaacgttgttcgcatatatgaggtgatgggaagtaaaacaaaggtctacattgtgctggagtatgttaccggcggcgaacttttcgacacaattgctaaccaaggtcgaatgagggaaggcgaggcgaggagttacttccaacaattaatcaacgcagttgattattgccatagcaggggtgtgtaccaccgggatttaaaaccagaaaatctactgcttgactcatatggaaatctgaatgtctctgactttgggctgagcgcgctgtcccagcaaatcaaggatgatggattgctgcacacaacttgtgggactccaaactatgtggcaccagaggtcctagaagatcagggctatgatggtgcaatggctgatctgtggtcatgtggagttatcctgtttgttctgctagctgggtatttaccttttgaggactctaaccttatgacgctgtataagaaaatctcaaatgcagaatacacatttccaccatggacatctttccctgccaagaggttgttgacaagaatccttgatccaaatccgatgacgagaataacaatccctgaaatactggaggatgagtggttcaaaaagggctacaagcgcccggagtttgacgagaaatatgacacgccattggatgatgtggatgctgtcttcaatgactcagaagagcaccacgtgacagagaagaaagaagaagaacccgtagctctcaatgcatttgaactgatttcaaggtcagcaggcctaaatcttgggaacctatttgactcggagcaggaattcaaaagagaaacgaggttcacgtcaaaatgtccaccgaaagaaatcattcgcaagattgaggaagctgcaaaacctctaggatttggtgtccagaagaaaaactacaagttgaggctagagaaagtaaaagcagggaggaagggaaacctgaatgttgctacggaggtagtaaaaaacaactcatcaactgtaaacaataatccaagcaaactttcttgtgcctagcatttactaatgtgtttttcatccagatactacaggttgcgccctcccttcatatggtacaagtccggaaagcaaaaggcgacactctggagttccaaaagttctacaagaacctttccaagaccttaaaggacgttgtctggaaatctgaagacctgcaaatgcgagctgcttcttagcatccactagatggcgagatgttcgtacgtgtcagattccattcccgtagcatgatgtgtcgtcagccgtttctgttcactgcactctgcatggtccggtgggcgcgtggcttggcattttcagagaccgcgttgctcgttgcagcccgggatgaaggcgatgcagtaggttttgtggatgtggtgagctctgtatatgcctattgatgagtcatgttgcaagctgtaacgacactatgatccgtgaagtgtagaagcagccaagtatgttctttctatgctgccccatttcccggcagtttccatgcattttgaagaaaaaaatagtggctaactcattgatatttgtatttggtcatcattaataaatcgcctctccatctgtg

SEQ ID NO: 117587 - DNA, 1918 bp, Zea Mays
cataagcttttatctaggcttgcggctacttgcatcggagcaagtcagtcacatctcacagctcagtgagatccagagccaaagggcggggcgtctcccactcccaatcccaagtccagccgccgccgtctcttgctcgctccaaaagccgttttccagagatctttttcagggccagacgccagccgccgtctctcgcttgcctgcatttccgatcctgaggcagtcctcatctcattctcatccaaccgggaggttgggaacgagatcacagctacagttacctgagtagtaggatcctcctcagatcggcttcaaaaatcaaagtgggggggacaacaaggcaggggatgagtgcagctgcaaccaaggtgaagagacgtgtgggcaagtacgagctcggccgaaccataggcgaaggcacattcgccaaggtcaggttcgccaagaacaccgagaccggggagccggtggccgtcaagatcctcgacaaggagaaggtcctcaggcacaagatggccgagcaggcccaatatgggctttggcatacttgttcagagttcagtcagtagatttggtggaactagtcatttcgctgacgatgacacaaactactacatggttcgatgcagattaagagggagatttcgaccatgaagctgattaagcaccctaacgttgttcgcatatatgaggtgatgggaagtaaaacaaaggtctacattgtgctggagtatgttaccggcggcgaacttttcgacacaattgctaaccaaggtcgaatgagggaaggcgaggcgaggagttacttccaacaattaatcaacgcagttgattattgccatagcaggggtgtgtaccaccgggatttaaaaccagaaaatctactgcttgactcatatggaaatctgaatgtctctgactttgggctgagcgcgctgtcccagcaaatcaaggtgatggcctcttgcccatattatgccacttaagttaattaccaacgagtactgagtaccaacaggccatacacctttgtatgaacagacaattagttatagcattttatgtttgaaagtttttagaccccactacatacttttaagcatgctcctttatcttgtttaggatgatggattgctgcacacaacttgtgggactccaaactatgtggcaccagaggtcctagaagatcagggctatgatggtgcaatggctgatctgtggtcatgtggagttatcctgtttgttctgctagctgggtatttaccttttgaggactctaaccttatgacgctgtataagaaaatctcaaatgcagaatacacatttccaccatggacatctttccctgccaagaggttgttgacaagaatccttgatccaaatccgatgacggtatgcaagagcacagaagctgctcgaaataaaatactacccaaaacaatgtaggaattttggaaagtctaaaagttcctactgcacttactagcacatagccagcgatagatgtatttgggggaaagattcttttaggcctcgttcgttttcagccgatcagcccattcctgttccgggtggaacgaatggacctggtttggaatttggtacaactcattgaaattgtttgtttcggcccgaattggaatcgaaactggcccagattaaaatttcccttcaccccatggcccggaacaaaaccttgtgtcgtaccctccggatcgaagcctggacacgacgcggccggagcgacggcgcggcggcggctcgacgcgaccggcgcgacggcggcttgatgcgaccggcacggcggcggcgcacagccccgacgacgaccctccccgctgccttctccctgggttgattttgcgtccatattatagctgagcaactctttcattcctagcagattcatctctcc

SEQ ID NO: 117588 - DNA, 1979 bp, Zea Mays
cttcttctctctgcatttgcgtgcccattgccaccaccactccctgctgcctgctgcctgtccttgggaactccttcaatggaaaaggggtgatccagttattgatggcctgcagtacagcttgaccgctgggcactgcttgctcctacggcaactacaatgcctctgctctggaccatcatccgttgaaagcaaggcaggcgtcacacatgtccaacctcgccatcaccgatgcgtgtctcgtgacagaatcagagcaagcatcatgcagcagcagcagccaggagcagagggcgccgtcatgaagccatcagagcctgctgaggatgagcagcatcagcagaagccaggactagagggcgccgtcatgaagccatcaaagcctgctgaggatgagcagcatcagcagaagccaggactagagggcgccgtcatgaagccatcagagcctgctgaggatgagcagcagcaggaggaggctgagcgcagaaggctctaccaggcttggaagggaaacaacatattcctgtgcggcgggcggctcatgttcgggcccgacgccgcgtccctcctgctcacgacattcctcatcgtcgccccgaccatcgtcttctgctaccagataaaatccacgttctacggctctggtgggcggcagcagcagcagatgcaccaggcagcagcgctcgtagtcaccgtcacaacgatcatggaccttgtcttcctatccatgacatccaccagagacccaggaatcgtgccaaggaactcgagggcgccccctgaagccgacgagttcctcggctgcaacacgccgtctatggactggagcggcgggagaaccccgcggatgaggctccgccggaccaaggacgtcatcatcaacggcttcacggtgaaggtgaagttctgcgagacctgcctgaggtaccgtccgccacgatcctcgcactgctccatctgcaacaactgcgtccacaagtttgaccaccactgcccatgggtcggccagtgcattggacttaggaactaccgtttcttctttctgttcatagcaacgtcgactttcctgtgcatatttgtctttattttttcatggctgagtgtctatagccaaatggaagaaaatggaggctctatctggaaggccttgcgcaaggaagcgtgctcgtttgcgctaatcatatatacttccattgttgtttggtttgtcggaggcctcacagtgtttcatctctatctaatcggtactaatcagacaacatatgaaaactttagataccattatgacaagaaggacaatccctaccgcaagagcattgcagcaaactttgcggaagtgttctttaccaagataccacctccgatgaatgattttcgttcatgggtaggtgagggcgcacttgaagctggattctacactccatacattgggctggatgtgacaaacccaagggaaaagattgacctagacatggaaagcaaagaagtacttgttgggggtatccagattccaacggcacttcagaacatagactatggttccttcgaagagagttcaggtgacaagaacagaaatgctggccaaaaatcagcgcatttccctatagcttgggcacaaggaaatgaagctgctggaacatctgcaggagctaccgtgacattcaataacaaaacaagcgatgatggtgttaatgaattcgacagtccgaatacaactaccacccaagcatctacaaaagctaacacagaaccaccaggtagggttgataaaatggaagggacaatggataggtacgaccggagatgtaatacaatttagattttgtgcagactatagcacactggcaattgatttttgtagaaggaattcatacatcgatgaatgacatcattaataaacaaatgtcatctctcgttattgagagttgagagaacagtagcattggaaacaaggtaaatggtgaagttgcatagct

SEQ ID NO: 117589 - DNA, 2600 bp, Zea Mays
gggccccacgcgtcggcgggcgcgcgccgccgaacgaaaccatcccggcaaggcaagcaagcaaccgtggccacgccgcggcgcgaccctgacgcccgccgtctccggcacccgataggcctcctccccacacccctcgcgtggcttccgtggcccgtagcccggcgcgcttcccttcaaagccactgcttcgcctcctccttctacttaagcgcagccggccccggccggcattcgcatccggtagctcgatcacttcttcctctggattttgggaaggaggcatcggacgtcggatgcatgacacactcattgcattagcgcctacgcctaccgcaagtggaagcctatggatctcaagcaagccttctctggtacaatcttctgccttctgcttctattctgcgtgggctgcagatgtcggactttggaaatagaggccacccagacagcagccctcaaggttgatgcctcgccacagcttgcccggaagatccctgaaacactgtttgggatattttttgaggagatcaaccatgcaggagctggtggcatatgggcagagcttgtcagtaacagaggtttcgaagctggaggctctcatactccatcaaacatcgacccgtggtccatcattggagatgactcctccgtgttcgtggcgactgatcgtacatcatgtttcagtcgaaacattgttgctctgaggatggaggtcctctgtgatgactgtccagctggtggtgttggtgtttataacccaggtttttggggcatgaacatagaagatgggaaggcctacaatctcgttatgtatgttcagtccccagaaacaaaggatctaacagtttcattaacaagctctgatgggttgcaaaacttggcttcagctacaataacagtttctggcacatcaaattggacaaaagtggagcagaagctggttgctaaaggaaccaatagaacatcaaggcttcaaataacaacgaacaaaaaaggagttgtttggcttgatcaagtatcactcatgcctgaagacacatacaagggacatggtttccgcacagaacttatatccatgcttttggatttgaaaccacgattcttgagatttcctggaggttgttttgtagaaggtgactggctaagaaatgcattcagatggagagagtcaattggtccatgggaagagaggcctggacacttcggggatgtttggcattactggactgatgatgggcttggatattatgagttccttcagcttgcggaggacctgggtgctgccccaatctgggtattcaacaatggaataagccacaatgatgaagttgatactgtagctattgccccttttgtaaaggatgtattggacagtctggaatttgcaagggggagtgcagattcaacatggggctctgttagggctgcaatggggcaccctgaacctttcctggtcaaacatgtcgcaattggaaatgaagattgcgggaaaaagttctaccgtggtaattacctcaaattctacaatgctataagagaggcctatccagacattcagatgatttcaaactgtgatggttcatctagaccacttgaccatcctgcggatttgtatgatttccatgtctatactgattctaagactttgtttaacatgaggagcacatttgacagaacatctcgtagtggacctaaggcttttgtgagcgagtacgctgtctggagaagtgacgcgggtagaggcagtcttcttgcttcgttggctgaagctgctttcctcactggtctggagaagaacagtgatatcgttcagatggcaagttacgctccactcttcgtgaacgacaatgaccaaacgtggaacccggacgctatcgtcttcaactcctggcagcactatggaactcctagctactggatgcagacgattttccgcgagtcaagcggtgccatgatccatccggttaatatcagttcccggtactcgagttcgctggccgcgtctgcgatcacgtggcaggatgcagagaatagcttcctgagagtgaaggtcgtgaacttcgggtcggacaccgttaacctcacggtctccacgagcggactcggggccagcgtcaacgcgctgggatcaaccgccaccgtcctcacgtctggcaacgtcatggacgagaactccttcagtaacccgaacaaggttgcgccggtgaaaagccagctgagcaacgccgcggagcagatgcaggtcacgctggctcctcactccttcaccgccttcgatctggcgctggctgagcccaagcttgtggcggagatatgatgtgtgtgctgttagcgatcttgatcgataaaaaggctttgtactggtgtaccatgatacaggataacgtactacgtactgttgcttcatgaaataaaaaccacatcaggtttttgcttggtgttggttggtttcctttctcctgtacgtgtttgctttgcatgttcatcaccatctactgtacgggatgatggtacattgatggtgagaacgacagcctcctgtggattaaacaaattgtcgatggatgccttcatggtaaacaactttatcatgaatc

SEQ ID NO: 117590 - DNA, 2434 bp, Zea Mays
gggccccacgcgtcggcgggcgcgcgccgccgaacgaaaccatcccggcaaggcaagcaagcaaccgtggccacgccgcggcgcgaccctgacgcccgccgtctccggcacccgataggcctcctccccacacccctcgcgtggcttccgtggcccgtagcccggcgcgcttcccttcaaagccactgcttcgcctcctccttctacttaagcgcagccggccccggccggcattcgcatccggtagctcgatcacttcttcctctggattttgggaaggaggcatcggacgtcggatgcatgacacactcattgcattagcgcctacgcctaccgcaagtggaagcctatggatctcaagcaagccttctctggtacaatcttctgccttctgcttctattctgcgtgggctgcagatgtcggactttggaaatagaggccacccagacagcagccctcaaggttgatgcctcgccacagcttgcccggaagatccctgaaacactgtttgggatattttttgaggagatcaaccatgcaggagctggtggcatatgggcagagcttgtcagtaacagaggtttcgaagctggaggctctcatactccatcaaacatcgacccgtggtccatcattggagatgactcctccgtgttcgtggcgactgatcgtacatcatgtttcagtcgaaacattgttgctctgaggatggaggtcctctgtgatgactgtccagctggtggtgttggtgtttataacccaggtttttggggcatgaacatagaagatgggaaggcctacaatctcgttatgtatgttcagtccccagaaacaaaggatctaacagtttcattaacaagctctgatgggttgcaaaacttggcttcagctacaataacagtttctggcacatcaaattggacaaaagtggagcagaagctggttgctaaaggaaccaatagaacatcaaggcttcaaataacaacgaacaaaaaaggagttgtttggcttgatcaagtatcactcatgcctgaagacacatacaagggacatggtttccgcacagaacttatatccatgcttttggatttgaaaccacgattcttgagatttcctggaggttgttttgtagaaggtgactggctaagaaatgcattcagatggagagagtcaattggtccatgggaagagaggcctggacacttcggggatgtttggcattactggactgatgatgggcttggatattatgagttccttcagcttgcggaggacctgggtgctgccccaatatgggtattcaacaatggaataagccacaatgatgaagttgatactgtagctattgccccttttgtaaaggatgtattggacagtctggaatttgcaagggggagtgcagattcaacatggggctctgttagggctgcaatggggcaccctgaacctttcctggtcaaacatgtcgcaattggaaatgaagattgcgggaaaaagttctaccgtggtaattacctcaaattctacaatgctataagagaggcctatccagacattcagatgatttcaaactgtgatggttcatctagaccacttgaccatcctgcggatttgtatgatttccatgtctatactgattctaagactttgtttaacatgaggagcacatttgacagaacatctcgtagtggacctaaggcttttgtgagcgagtacgctgtctggagaagtgacgcgggtagaggcagtcttcttgcttcgttggctgaagctgctttcctcactggtctggagaagaacagtgatatcgttcagatggcaagttacgctccactcttcgtgaacgacaatgaccaaacgtggaacccggacgctatcgtcttcaactcctggcagcactatggaactcctagctactggatgcagacgattttccgcgagtcaagcggtgccatgatccatccggttaatatcagttcccggtactcgagttcgctggccgcgtctgcgatcacgtggcaggatgcagagaatagcttcctgagagtgaaggtcgtgaacttcgggtcggacaccgttaacctcacggtctccacgagcggactcggggccagcgtcaacgcgctgggatcaaccgccaccgtcctcacgtctggcaacgtcatggacgagaactccttcagtaacccgaacaaggttgcgccggtgaaaagccagctgagcaacgccgcggagcagatgcaggtcacgctggctcctcactccttcaccgccttcgatctggcgctggctgagcccaagcttgtggcggagatatgatgtgtgtgctgttagcgatcttgatcgataaaaaggctttgtactggtgtaccatgatacaggataacgtactacgtactgttgcttcatgaaataaaaaccacatcaggtttt

SEQ ID NO: 117591 - DNA, 3931 bp, Zea Mays
aagtggaagcctatggatctcaagcaagccttctctggtacaatcttctgccttctgcttctattctgcgtgggctgcagatgtcggactttggaaatagaggccacccagacagcagccctcaaggttgatgcctcgccacagcttgcccggaagatccctgaaacactgtttgggatattttttgaggagatcaaccatgcaggagctggtggcatatgggcagagcttgtcagtaacagaggtttcgaagctggaggctctcatactccatcaaacatcgacccgtggtccatcattggagatgactcctccgtgttcgtggcgactgatcgtacatcatgtttcagtcgaaacattgttgctctgaggatggaggtcctctgtgatgactgtccagctggtggtgttggtgtttataacccaggtttttggggcatgaacatagaagatgggaaggcctacaatctcgttatgtatgttcagtccccagaaacaaaggatctaacagtttcattaacaagctctgatgggttgcaaaacttggcttcagctacaataacagtttctggcacatcaaattggacaaaagtggagcagaagctggttgctaaaggaaccaatagaacatcaaggcttcaaataacaacgaacaaaaaaggagttgtttggcttgatcaagtatcactcatgcctgaagacacatacaagggacatggtttccgcacagaacttatatccatgcttttggatttgaaaccacgattcttgagatttcctggaggttgttttgtagaaggtgactggctaagaaatgcattcagatggagagagtcaattggtccatgggaagagaggcctggacacttcggggatgtttggcattactggactgatgatgggcttggatattatgagttccttcagcttgcggaggacctgggtgctgccccaatctgggtattcaacaatggaataagccacaatgatgaagttgatactgtagctattgccccttttgtaaaggatgtattggacagtctagaatttgcaagggggagtgcagattcaacatggggctctgttagggctgcaatggggcaccctgaacctttcctggtcaaacatgtcgcaattggaaatgaagattgcgggaaaaagttctaccgtggtaattacctcaaattctacaatgctataagagaggcctatccagacattcagatgatttcaaactgtgatggttcatctagaccacttgaccatcctgcggatttgtatgatttccatgtctatactgattctaagactttgtttaacatgaggagcacatttgacagaacatcacgtagtggacctaaggcctttgtgagcgagtacgctgtctggagaagtgacgcgggtagaggcagtcttcttgcttcgttggctgaagctgctttcctcactggtctggagaagaacagtgatatcgttcagatggcaagttacgctccactcttcgtgaacgacaatgaccaaacgtggaacccggacgctattgtcttcaactcctggcaacactatggaactcctagctactggatgcagacgattttccgcgagtcaagcggcgccatgattcatccggttaatatcagttcccggtactcgagttcgctggccgcgtctgcgatcacgtggcaggatgcagagaatagcttcctgagagtgaaggtcgtgaacttcgggtcggacaccgttaacctcacggtctccacgagcggactcggggccagcgtcaacgcgctgggatcaaccgccaccgtcctcacgtctggcaacgtcatggacgagaactccttcagtaacccgaacaaggttgcgccggtgaaaagccagctgagcaacgccgcggagcagatgcaggtcacgctggctcctcactccttcaccgccttcgatctggcgctggctgagcccaagcttgtggcggagatatgatgtgtgtgctgcacattacagtacacaaacagcgcgcggatggcagcaaccagagggtgtggagtgtggtgtgctgttagcgatcttgatcgataaaaaaggctttgtactggttgtttgctttgcatgttcatcaccatctactgtacgggatgatggtacattgatggtgagaacgacagcctcctgtggattaaacaaattgtcgatggatgccttcatggtaaagaactttatcatgaatcacggtatgtggctgtcaatgtttaatgagtatactgaccgcaagtttcttgctgctgccggtacaatgtttccatcacatattgacatattgtaatgcttaagagatgcttaagaggtttcttcgtcttaaaaattatcttgtgttaatggtggctggtgataagtggccagcagccagcttataaggatgagatgatcagtaaccacaatacaaggatggtatggcacccagttcactgctttggtttgtttgatgagtgtaaccaccaattaattgtttctgatggataccctgttgtaccaaatgtattagattcatttatcttgccaaagacctagaaacaaaaacaatctctttctagtgtatggtaattctcactgtgcaaaactttacctgaatatttatagctggttctctctgtacacacagggacatggtttccgcacagaacttatatccatgcttttggatttgaaaccacgattcttgaggtttcctggaggttgttttgtagaaggtgactggctaagaaatgcattcagatggagagaatcaattggtccatgggaagagaggcctggacacttcggggatgtttggcattactggactgatgatgggcttggatattatgagttccttcagcttgcggaggacctgggtgctgccccaatatgggtattcaacaatggaataagccacaatgatgaagttgatactgtagctattgccccttttgtaaaggatgtattggacagtctggaatttgcaagggggagtgcagattcaacatggggctctgttagggctgcaatggggcaccctgaacctttcctggtcaaacatgtcgcaattggaaatgaagattgcgggaaaaagttctaccgtggtaattacctcaaattctacaatgctataagagaggcctatccagacattcagatgatttcaaactgtgatggttcatctagaccacttgaccatcctgcggatttgtatgatttccatgtctatactgattctaagactttgtttaacatgaggagcacatttgacagaacatctcgtagtggacctaaggcttttgtgagcgagtacgctgtctggagaagtgacgcgggtagaggcagtcttcttgcttcgttggctgaagctgctttcctcactggtctggagaagaacagtgatatcgttcagatggcaagttacgctccactcttcgtgaacgacaatgaccaaacgtggaacccggacgctatcgtcttcaactcctggcagcactatggaactcctagctactggatgcagacgattttccgcgagtcaagcggtgccatgatccatccggttaatatcagttcccggtactcgagttcgctggccgcgtctgcgatcacgtggcaggatgcagagaatagcttcctgagagtgaaggtcgtgaacttcgggtcggacaccgttaacctcacggtctccacgagcggactcggggccagcgtcaacgcgctgggatcaaccgccaccgtcctcacgtctggcaacgtcatggacgagaactccttcagtaacccgaacaaggttgcgccggtgaaaagccagctgagcaacgccgcggagcagatgcaggtcacgctggctcctcactccttcaccgccttcgatctggcgctggctgagcccaagcttgtggcggagatatga

SEQ ID NO: 117592 - DNA, 2675 bp, Zea Mays
aaaaaaaccaatgatagatgcggataaggcgacagcacagctgacagggccccacgcgtcggcgggcgcgcgccgccgaacgaaaccatcccggcaaggcaagcaagcaaccgtggccacgccgcggcgcgaccctgacgcccgccgtctccggcacccgataggcctcctccccacacccctcgcgtggcttccgtggcccgtagcccggcgcgcttcccttcaaagccactgcttcgcctcctccttctacttaagcgcagccggccccggccggcattcgcatccggtagctcgatcacttcttcctctggattttgggaaggaggcatcggacgtcggatgcatgacacactcattgcattagcgcctacgcctaccgcaagtggaagcctatggatctcaagcaagccttctctggtacaatcttctgccttctgcttctattctgcgtgggctgcagatgtcggactttggaaatagaggccacccagacagcagccctcaaggttgatgcctcgccacagcttgcccggaagatccctgaaacactgtttgggatattttttgaggagatcaaccatgcaggagctggtggcatatgggcagagcttgtcagtaacagaggtttcgaagctggaggctctcatactccatcaaacatcgacccgtggtccatcattggagatgactcctccgtgttcgtggcgactgatcgtacatcatgtttcagtcgaaacattgttgctctgaggatggaggtcctctgtgatgactgtccagctggtggtgttggtgtttataacccaggtttttggggcatgaacatagaagatgggaaggcctacaatctcgttatgtatgttcagtccccagaaacaaaggatctaacagtttcattaacaagctctgatgggttgcaaaacttggcttcagctacaataacagtttctggcacatcaaattggacaaaagtggagcagaagctggttgctaaaggaaccaatagaacatcaaggcttcaaataacaacgaacaaaaaaggagttgtttggcttgatcaagtatcactcatgcctgaagacacatacaagggacatggtttccgcacagaacttatatccatgcttttggatttgaaaccacgattcttgagatttcctggaggttgttttgtagaaggtgactggctaagaaatgcattcagatggagagagtcaattggtccatgggaagagaggcctggacacttcggggatgtttggcattactggactgatgatgggcttggatattatgagttccttcagcttgcggaggacctgggtgctgccccaatctgggtattcaacaatggaataagccacaatgatgaagttgatactgtagctattgccccttttgtaaaggatgtattggacagtctagaatttgcaagggggagtgcagattcaacatggggctctgttagggctgcaatggggcaccctgaacctttcctggtcaaacatgtcgcaattggaaatgaagattgcgggaaaaagttctaccgtggtaattacctcaaattctacaatgctataagagaggcctatccagacattcagatgatttcaaactgtgatggttcatctagaccacttgaccatcctgcggatttgtatgatttccatgtctatactgattctaagactttgtttaacatgaggagcacatttgacagaacatcacgtagtggacctaaggcctttgtgagcgagtacgctgtctggagaagtgacgcgggtagaggcagtcttcttgcttcgttggctgaagctgctttcctcactggtctggagaagaacagtgatatcgttcagatggcaagttacgctccactcttcgtgaacgacaatgaccaaacgtggaacccggacgctattgtcttcaactcctggcaacactatggaactcctagctactggatgcagacgattttccgcgagtcaagcggcgccatgattcatccggttaatatcagttcccggtactcgagttcgctggccgcgtctgcgatcacgtggcaggatgcagagaatagcttcctgagagtgaaggtcgtgaacttcgggtcggacaccgttaacctcacggtctccacgagcggactcggggccagcgtcaacgcgctgggatcaaccgccaccgtcctcacgtctggcaacgtcatggacgagaactccttcagtaacccgaacaaggttgcgccggtgaaaagccagctgagcaacgccgcggagcagatgcaggtcacgctggctcctcactccttcaccgccttcgatctggcgctggctgagcccaagcttgtggcggagatatgatgtgtgtgctgcacattacagtacacaaacagcgcgcggatggcagcaaccagagggtgtggagtgtggtgtgctgttagcgatcttgatcgataaaaaaggctttgtactggtgtaccacgatacaggataacgtactacgtactgttgcttcatgaaataaaaaccacatcaggtttttgcttggtgttggttggtttcctttctcctgtacgtgtttgctttgcatgttcatcaccatctactgtacgggatgatggtacattgatggtgagaacgacagcctcctgtggattaaacaaattgtcg

SEQ ID NO: 117593 - DNA, 2440 bp, Zea Mays
aaaaaaaccaatgatagatgcggataaggcgacagcacagctgacagggccccacgcgtcggcgggcgcgcgccgccgaacgaaaccatcccggcaaggcaagcaagcaaccgtggccacgccgcggcgcgaccctgacgcccgccgtctccggcacccgataggcctcctccccacacccctcgcgtggcttccgtggcccgtagcccggcgcgcttcccttcaaagccactgcttcgcctcctccttctacttaagcgcagccggccccggccggcattcgcatccggtagctcgatcacttcttcctctggattttgggaaggaggcatcggacgtcggatgcatgacacactcattgcattagcgcctacgcctaccgcaagtggaagcctatggatctcaagcaagccttctctggtacaatcttctgccttctgcttctattctgcgtgggctgcagatgtcggactttggaaatagaggccacccagacagcagccctcaaggttgatgcctcgccacagcttgcccggaagatccctgaaacactgtttgggatattttttgaggagatcaaccatgcaggagctggtggcatatgggcagagcttgtcagtaacagaggtttcgaagctggaggctctcatactccatcaaacatcgacccgtggtccatcattggagatgactcctccgtgttcgtggcgactgatcgtacatcatgtttcagtcgaaacattgttgctctgaggatggaggtcctctgtgatgactgtccagctggtggtgttggtgtttataacccaggtttttggggcatgaacatagaagatgggaaggcctacaatctcgttatgtatgttcagtccccagaaacaaaggatctaacagtttcattaacaagctctgatgggttgcaaaacttggcttcagctacaataacagtttctggcacatcaaattggacaaaagtggagcagaagctggttgctaaaggaaccaatagaacatcaaggcttcaaataacaacgaacaaaaaaggagttgtttggcttgatcaagtatcactcatgcctgaagacacatacaagggacatggtttccgcacagaacttatatccatgcttttggatttgaaaccacgattcttgagatttcctggaggttgttttgtagaaggtgactggctaagaaatgcattcagatggagagagtcaattggtccatgggaagagaggcctggacacttcggggatgtttggcattactggactgatgatgggcttggatattatgagttccttcagcttgcggaggacctgggtgctgccccaatctgggtattcaacaatggaataagccacaatgatgaagttgatactgtagctattgccccttttgtaaaggatgtattggacagtctagaatttgcaagggggagtgcagattcaacatggggctctgttagggctgcaatggggcaccctgaacctttcctggtcaaacatgtcgcaattggaaatgaagattgcgggaaaaagttctaccgtggtaattacctcaaattctacaatgctataagagaggcctatccagacattcagatgatttcaaactgtgatggttcatctagaccacttgaccatcctgcggatttgtatgatttccatgtctatactgattctaagactttgtttaacatgaggagcacatttgacagaacatcacgtagtggacctaaggcctttgtgagcgagtacgctgtctggagaagtgacgcgggtagaggcagtcttcttgcttcgttggctgaagctgctttcctcactggtctggagaagaacagtgatatcgttcagatggcaagttacgctccactcttcgtgaacgacaatgaccaaacgtggaacccggacgctattgtcttcaactcctggcaacactatggaactcctagctactggatgcagacgattttccgcgagtcaagcggcgccatgattcatccggttaatatcagttcccggtactcgagttcgctggccgcgtctgcgatcacgtggcaggatgcagagaatagcttcctgagagtgaaggtcgtgaacttcgggtcggacaccgttaacctcacggtctccacgagcggactcggggccagcgtcaacgcgctgggatcaaccgccaccgtcctcacgtctggcaacgtcatggacgagaactccttcagtaacccgaacaaggtatgcgtaccgatggtccatgcatgcactaagcttgttggtttctgaatggaaggagcgacgtgtggagcttgttctgaaccccaaagcttgctgcttgcaggttgcgccggtgaaaagccagctgagcaacgccgcggagcagatgcaggtcacgctggctcctcactccttcaccgccttcgatctggcgctgg

SEQ ID NO: 117594 - DNA, 1304 bp, Zea Mays
ccatacccagtaagtgagacttgtcgtccattctgaagtccggcggcggcggcagcggcgagggcgaggcctctgcgacttccagatctccccgacgaggaggaagtctctacagcggaggggagggagatgtcgtacatgcggggtgacctgctgacgaggatgcgtaagctggtgaagggcctcgccaggcccgagccccggtggctcaaggccttggaacgggctccgccagtgacatttcctcgcccagaggggaagatcaagactctggtgcttcctgaggatgtgtatgtcacgaagttcaacagaatacatccagattcgctttaccatgatgcaatcaagataagtggatttgatccaccgccagctcgagtgtttgcttggcgtgtcctggagttgaaagagcaaggagtcgatgaagatgttgcgatggctgtagcagataacgagtaccggacagagaagaaggcaaagaagaaagcgtacaaggagctgaaagaaatcgcccgcagcgaagggaggaagccacctccgaatccatacccgagtgccataaaggaaatacaagcggaggaaaagaagtatgtcatggaccgtttgcataacccgaaggtaatcgagattgcgaacaagatgaaggaggagcgagacaggatgttgagggatagagcagcaggtcagcggtagtcgtagcagcaggtaatgtttggactggcccgactgggtgttgtcgtttacgacatgggccaactggcgtcataaataatggttgttggagattgatatggcaaatatgaaactcgtgtttttgttattcgtatttctgggatttagatggcctctggaatgcaatgttgattgggatgtgtttttgccagcaagctggtaaattgagacgtgttttgcttgctccagaaagttctgcttatagctgatacaaggctagaccgaatcagcagttgcattgtgatatgttagcagaacgccagttccccttctattcgccccttgcatgttaatttctgcatatccctgtgatgagcattttagtaatctgagtgagtgctcattcagttggtgctccctccgatgagaggttgaaggaaccaatacctgttgagatgtggcattctgagggatatgattgagttgttggttgctctctaacattcaaggtttttttttgttgttgtttttttacttcaagaatttcttgcgaatttttctctctctctctgtgtgtgtgtgtgtttgccttgccgtttagttttggaagatcttgtcgctgttcttaaatc

SEQ ID NO: 117595 - DNA, 870 bp, Zea Mays
atggccactgacgttcaggttgcgctgcacggctctgctgcctccacacacaaggtaaacaatacggttgatcttgctaatgttttcactacaatccacaaaagcttagacagtgtgcctgtttgctccctcggcgttggcatgatcaatatgagtaccactttactgaactctgccccagctgcccatccgattgagtgcccacttaccaactgcttagacagtatcctagagagtggccctagcgctgttccggtctctgcttggccggacaattttttatctggccaacagactttgctttcagagtcacaacctgtgaacgataatcgagctattgacttcatcatgcctgctcctgatctgggtgggctgtcaggtggctcagtcgcccatgatccagttgtcactgacaatcaggaagccgtgagaaatctacctcccctcggatcagagaacctaccgacagacaacaccaaattgacagacttcatagccacaataaccaagacaccagagccacctttgatctcatccccgccgcaaccacacctgttaaaatctcagaagcaacccaccactagaagatcaagtgttaggttggctgctaagaaatgcattaagcccgggcgtaaccgggatgcaatatccaaggcccaggaaatcatacttgccaaacttaacaactcggctgttaaaaaggttgactgctctagttcttcaaattgttctaactttgatgagtcttttgagcagatgacaagccttctcacaaagcctctatcgaagaagcaaatggatgcaatcatggagcttttaaaccaagacaaggtgaagacagcaaagaataaaaaaaggggagaaaggtga

SEQ ID NO: 117596 - DNA, 1387 bp, Zea Mays
gcagcagctggagtgaagaggaggaagagatccaagaggtcaatgctgaagcaaattcagagcagcagcaggatggagccgtcgagccagatgttattgtgacagctcagagtgaggttcaatttttaatgtgtgacagtacttactccgcacgtaatctttatgatattcagattctttctacagtcaaattctctcaagagtcagattctcagaaaaactcctcaactgaaccaaacagaccctacatctagcgtctcaccaccaatattatccagcctgtttgtttggctttaattcgtaccaatttttactatctttataatgttttgtctctatagattgcagctgcagcagtccaaattgttggtattaatacgaagtgaataggctgatcagcctcggacaacttgaagattacaacctcaagattctcctagagaatggtttcctggagatctgggacttggggcgacgcttgctagcaaaggtaccacgtgcagcgaatcgcttgtacatactgaaccgtcacattgggagcaaagtgtgagaacggactctacatgcgtggcattgggagatgaagactggtggtgcgagtctatgttgatgatcagggataaatctttaggagggactgaactaaaccactgcatatagaagtcacttctacactatactgcatatgttggtggtggaattgagctgtgccagagcgcttacgcactcaaactgcttggaaaggcagggatggataactgcaattccagtgcgacatcaatgaaggcaagactggagctgtccaagacaagtgattcagcaccaggaacattggaagtctgcagtacctgctccacagccgacctgatattgcaatcagtgttgggtatcgtctcagcaggttcatggaggaacccaggcaggagcacatggctgcagcctgcagcgaagcgtatgcttcgctatgtcgtggggacgactgattggtgtcgtcatgctcatttgaacatttgaacagcacatgaattagggggagattgtcaggtacttcaagtgttttattgagagttgcagattttcagtcagtgttgtcgcgtttcacggtatggaaactaaataagtacagatttttttagcgcttcacggtatggaaactaaataagtacagatttttttagcgcgttaggaggttgtagttgagttctacgcgcgctcagttcgcacgagctgtggaaggcatttagtggcttcagagtctgtatgtgtttagtggcttcagtttttaataggaagagtctcggaaaagcggttgttgccacaccaaacgaatgtgtctctctgtgttccagccattcgcgtgtgctgtgtatgtgtttttcctctgttc

SEQ ID NO: 117597 - DNA, 330 bp, Zea Mays
tacgccatcagtcgttccttacatgcctttaggcctggttgcacttacagcaggaccgacctgtcacagcaactggaaggatgtttccatcttctgtctgaggactccatgctccctgttcaagttctggaaggacctcatacaattacagacacaaacggcaggtgtatcagtaatggatgatgattaacaggtctagctcagaaagaaggtaatgtaagttactgtccattataaacaaaaggacaaccagcccgtgaaactatcaacagccaagaaggggatggtcctaagtcctaaatgttagaagaaaggagagcaatagagcat

SEQ ID NO: 117598 - DNA, 608 bp, Zea Mays
ttggagtgccagacaagcatatctggaaattctccccgacaggccaatactcttcaaagtcggcttatgatatgttatttctaggttccacttcttttggtgcatatgagcgcgtttgggaatcttgggcaccttcaaagtgcagtttcttcctttggcttgtcatgcacaacagatgctggaccgtagaccgtcttgctagaagagggctaccccaccctagtgtgggccccctttgcgaccaagaagaggaaacaatacatcatcttctcatctcttgtgtctttgcatgacagttctggtattccttgttgagcaggtctaggttgcctaatctttcaccagataatgttgtttgcagccttgatgactggtggagcagggttgtggagaagattccccgtgatcttcaatcgggcttcaattctctagttattcttggcgcttggagcctttggcgtcatcgcaacatctgtgtgttcaatgggaggtcgccgtgcctggcgagtgctctcaccctcgctggcgatgagctcatgatgtggtgtagtgccggggcgagagggttgaacctgctttcaactcttatgtttatgcttgacccaggg

SEQ ID NO: 117599 - DNA, 3332 bp, Zea Mays
aatgctcgcctctggccttcttacattatgccttcccaaaattccatgcatctttattgtcaccttgccttttatcaaaaggtttgaataaacgcttcctggatggcaataattttggcacaaacagcttgcattcctggtctatcttttggtgattccatggagcacatcaggccaatttcaaccagtggtatgagatagttttgcatgcgtagattacaaacaacttcgccctcattttgcatctgcgggtctaaaatctcatcgattttatcagggaatgctatatccacatacttgtgaaggctgaggtcgttgccaaatatttcgtcagttggtcgctttgctgtgagcaattctagcaggagcactccaaaaccataaacatcagcatcggttgagattttgcatcccattccatactctgtgaaatagacacacacacaataacgcacatagaaaaattgcgaagctagccaaaaaaaatagtaagcttatagtcctcccaaggttggagccataaaacatagtacaacttaccaggtgcaatatacccaattgttcctgaggcgccaacaaagccttctggactgctgctagtaagacttgaagagagaaactttgctgacccaaagtcaccaaggcgtgaggtcatgtcataatccaaaagaacattgctaggctttaaatcacagtggatcaatggaggtatcaactggttgtgcagatagtcaagagcagaagccacatctgcggcgatactaattcgttgacctaaacttagcaccctccttcgtctaccttggtgcagacttgggtgtatccacatgtctaggctaccatttgccatgaactcatatactagagctttgaattcgttgttctcaaaatctactgtcgagcacaaggtgattgcttgaattagattgcgatggcgggtctgctttaagacttcacactcattgaaaaagccattaagggaaccttgctcgtcgagatgaaataccttgatggcaacaaggtctgtatcaaactcaaagcggccaacgtatactgatgccgtatgacttgagctaatcttgttgactggagagaaccaatttgtggctttaagaatgtccccatatgacaccttcttcattgtctctctgaagctttcaggtggttgggttgctattcctttcgtaacagtggcaagaacacataaaaatgacaacaaagcgatagtagccggtggggctactatgagcagcaggcgtgcatcgtttttcctttttgttactgatgatgtggtggggcagatcggcaatgcaaatatggtactttgttgacataatcctaagttatcgtccaacatgacagcatttggatttgtgaagataccactggttggaattggtcctaccagtttgttgtgtgacagatcaaggtgatataaggtcctgaagctctcgaagaattctggaatttgacctgacaagttgttttcagagagatccatctgctctatgccctttagttcactgagagactgaggaataatcccactaaacatgttgctttccatctgaaggtatgacaataaaacacactgtccaagttcagttggtatctcaccagataatctgttgctggaaacattcagcaggccgagattgatcaggtttccgatctgtggcggtattgttccattaaggttgttgtttgacaagtccaaccctaaagaaagcgaagaaatgttcaggatttcacttggtatggatccatcaaggttattgactgataagtttaacatattcaaccttttgcactgtcctagacttgccggtatgtttccggacaacaagttatcgtccatgtaaagctggttcagctgagggagatcgccaattgtcgatggcatttcacctgacaatctattcgtggacagtgctaggacaaccaagttttttagattaccaatagttgagggaatgcttcctgaaagcatgttgtggtccatggcaagcagagtgagattcacaaggttgcctatcgcagctggtatcgttcctgaaatccagttacctctaaagttaagccgttccaggtttctcgaaagattgccgactgattctggaaggcttccttccagagaattcccgtctatggataacattgatagttggctgcaatttgtcagagaggtcagaaacacccagtcttcggcctgcagcatgttgcttccaagaatcagtcgactcaagttgctcagggatcctagagatggaaccgagccgtttagtaaatttcttgagagatctatttcttggagctttgacatgttggccagtgaagacgggaccactccagtgaatctgttgcctctcatgatcagtgacatgaggtttgggagtgagtggccagtgttaggaagtatctgcccatcaagcaaattgttgcccaagtgaagatatctgaatgatgagacattgtatatcgccgctgggacattccctgataacatgttttcacttagatctagaatgttcaagttcaggatatgacctaaggcttctggaatcggtcctgacaagttgttctctgccagcaggatggtgtttaaggatgaaacatttcctaaggatggtggaacccttccagaaagaacgtttccagtaaggccaagaaattgcagagacgtggggttttggagggaaggaatgggtccagtaagatgattcagctggaggtccactgtgacaagtttggatgaattactgttgaatatggtaactgggatcattcccgctaggatattcatggacaggttcagcacacgaagcgatggagctttgggtaaggaatcaggaataactccgctaagattatttcctgcaagattaacatacctaagagaaggtgatgctacacccagtgacggagggatgctacctgaaaggatgttgccggcaagcatcagagtctggaggcctggaagcgtggccacctcctcaggtatggttccggaaatatggttgcctgaaagatccaacctcaccagcgaagtgaggttcgccatgcaattgtgtagcagtgttccgtggagccgcacagaccttagttctagggacagcactcggagtgggaggctggagctgcagctgacccctcgccagccgcagaagctgagcgagtcggcgctccatgacgtgaggacgcggcgagggtcgtcggagatgccggatttgaagcagagcagggcttggcggtcagcctctgacctgttgccgggctgtgccgacgagaacgctgagttgtttgagaggaaaacgaggacgctggtgcacagg

SEQ ID NO: 117600 - DNA, 574 bp, Zea Mays
attattaggaagagcactgttttgtctccggcccgtcgcagccccactgccgtgcgccgccaccctgccggcgcacccggccccttcagcgcgttcgaggccgacgcgcgccgacacctgccgcgtcacgctccggccattcctgccccctcaccattctgccgcctccaccgcagcagccgcggcgatgctacccgcatcctcctcctcccgcttctcgaccacaacatctccgtctcgctgccgacctgaacaacgaggcacactccattgttggccatgcttgatctcctcatcctgctgcagtgctgctgccgtggaagggaggccagtgcgggaacaacccagactgcgagcgccttcgcgccgagctccgccggatgccgccgccaaacggccgagccgtgctgctctttcgcaatcccgtgtggctgctctgcacttcttgatgcatttttgttgacatggtttgcgtttcattcaaacttagaatgcttcttaatttcttttcgttgcattgaaaatatccagcggtttattggtgtttgggctaataaatagataaactgttcac

SEQ ID NO: 117601 - DNA, 686 bp, Zea Mays
agacgcaccagacgacattatttccgcggtcctttccgccgtcccactcccacgaatcgagcctatcggatggcgagcggcggcgcattccccgtgcagctcctgcacctccccggcggcgtcggcggaggaggcggccactggagcaacctcggcgccgcatacgccgccgtcacgttcctccgcccgcaggggaaatccctggtcctgtacgcggcgggccccgacgccgacggccagtgccagcagcagcatccgcaggggcgtatcgtgttcgcgtacccgatcctccccggcgacgccttcgagaggctggacggcgcgacgctgtcgtgggcggagcccgagtccggcgccgagttcgcgctctgcttcgtcgacgaggccgcgtgcgccgccgtctgcggggccatctccgcctccgtgtcgtcgagggtgagccccgccgcgggggtcgagggcgtcgcggagaggctagcgaggctgcgcgtggcgagggaggaggccgcgccggcgcttggcggggcggacatcgccgcgcgcctggcgcagctcagcatcggccgcccgtgaactcaacagcctgagagagagagagactgcaactgagccactggctgcacggcgaatggtgtttcttcgtagacgagaaagggaattaaaagtatgcattggttttggaacat

SEQ ID NO: 117602 - DNA, 736 bp, Zea Mays
ttattagtacgtccaagaacgacgtacatggcttcagctgctgcggctagcagcgctgttaaggaggccttggtcgtcgtcgccgtgtgcatcgtgctgctgctccactcttcggcgggacatcagccgcccaagtcgccgcctccaccgcattgccattacacggggcagcagccaccgccctcgccggtgccagcgtcgttgtactcgccgccgccgccaccaccagtaccagcgcccatgccgtcgccgtcgccgccgccaccgccaccgccagtacaagcgcccatgccgccgccgccgccgccggcaccaacgccgacacctgcgccaacgcccacgccgtcgccgtcgccggcacccgtcaataactgcagctacatgtactgcgccatgcaatgtagcccggtctgccaagccaaccacgacgccggcatcgccaagtgcgaaagcgacctcgccaccaactacaacgggtgctacgacagctgcaccagccatgtctgccccggcgactcctgcgccggcagtggctgcggcttcggccactgcccctgcgacaacgccaacgcgaccagctgctgccagtcctgcggcaacgttctgtaccccgaggagcagcgctgccggaattactacgacagggctgtggagtactgcatgatcgactgccaggacacctgctacaagaactgcactcagggcgcgtagagctcttgcttggtcttgtcatctc

SEQ ID NO: 117603 - DNA, 1060 bp, Zea Mays
gtgtaaaactgtgctcctacacaattctctggatctccaaaatctgaccagattggatgtgcgattcccgtttcttttcatgtctccctgtcgagacgagacgtcgtcggtgccattaaacggaaataaacctttcccggcatatatgagcagctagccttcctcttccacccacgtcctcctccatatatataaaaagtcccacaccctcctccactccacctccaaggccgtgattgcagtagagcatctccttttctttatttgctatatatatatgcatgttgtgatcttcaagcagctcggccgatcaagctcatcaaacccatagcatcgccaccaaattaaaggtcttctctagatcattacatacacatatatatggggcctcagcaagacgggcggtcgtccacggcgaacggcggcacggcggcgaggcgcaaggaggccgccgcgaagcaggtggtgcggtaccgcgagtgccagcgcaaccacgcggcgtccgtcggcgggcacgccgtggacgggtgccgcgagttcatggcgtccagcgcggacggcacggcggtggcgctcacgtgcgccgcctgcgggtgccaccgcagcttccacaggcgcgaggtggcgacggcgacggagacggccgccgactgccgcgaccgcgcctccaccacctccgggtgaactcgacgtgatgggcattggaatggttgttacagtagttgttcttggatgatttttgagtggattttattgcgtgtactatatgctcgatgcaattaacagcatgcgtgtggatcgtcgttcgtatatacgtacggtgcttgtaactgatgattgtggaccgtggacgtgtatataaataaagtgagtggttcttccattccatgtcgcttcttgccttcttctttatagaaatatggaagaacatgcatgttgccttcttatttgtactgaaagcgaggagtccagtttgttttgttttagctgaatgaatgagatcatatcagcaggctatgagcactatctctagtgctagagctcgatcgatcatgttcgt

SEQ ID NO: 117604 - DNA, 2874 bp, Zea Mays
gccctcacgaacactacttgatcttatccgagcgcgccgtccggctgcgccgcggcggccggagccggctcctccttggccgtgtcgcccccgccgacctccaagggtcattgggttggtggcgcggtttgttggaaagaggcggcgctggcacccgcggttgctgccggcgacgagcgatgacgactgcccgcggtcggagcgcgcgcgatgatggccgcgcgggttcaccccaaaacaacaaacaattcgcgatgctctgctttcctttcatttgttcttttcgaaaaattagaagtattttttaataaaaaagatatctgttgtttgttgaatggctctgtcttctgtttgtgcataatcgttttcttagtggggtctaattctatatcacatcattgtcttgatttacgtggctctgttattgcgggtgcaggcgtgcagctctgttataagggctattaatatggtgctgcataaatattttactgatgtaaacatcttctgtcattaaattatctgtttcagtatcaatagtcattgcccttgctcgataagtttagcttctacaatctgttgcaatcttctgcctatttgaaattaattcatactgttgcattgttagttaacctcatggctaaacatttagaatgcacttgtcaccatatgtattgcgtatttgcacaatgtatgttatttggctgcttttgctcatattaggtgctacactggcatcaatcaactaatggttccgttagatatcatcgaaaaagcagctaatagctttttattagcagggctataagctaataagtttgattatctttgtattcttagttagtgggatttaacttagccaaccttttatttattttgagttattagttatggatctaaacagcccctaaaggaactcggccttccttaacaagttgacatgattatccacgttccgtgatcatgaggacgatatgataaacaagctttggtccagtgttcattctgcatgcgtctggcattaatatggcattgagccccaccctctattttggattagcgagatgtaagttttggtgcagtgtggaactttatttctggctcaatggcaattgcatagtgccttttggatgaacaggtccctagcatgtactaccttattattactgtgagctgatattgtgtttttagctaatcattaaggttgggatgttttcatacatattccatctctactgatcattcatttgctgcagcttttgtgattcttaagatggagctcagaattgcttatttaaccaccttggcttataacatgtccattaggctttaagtttaacctgatgacatgtcataatctgggcgctaaactcatgtgcatgagatatattcttttgtgcacaatcgttttcttagtggctgtctgattctatatcacctttgcgtcattgacttgttttatgtggctctgttattgcgggtgcagctctgttataagggctattaataaagtggtggttgttaaactatgtcctgcatgtagtagagactgtgagctgatattatgttttcagctaatcattaaggatgggaaattttcataaatattccttctctactgattattcacttgctgcagcttttgtgatccttaagatggaacagataattgcttatttaaccacgttggcttctaacgtgtccgttaggctttaagtttaacctgatgacatgccatatatttgggactttttagttgcccctatggcttatatgctgtgcctgtgggatgaacacgtcccaacattcacttcattttttcactttgtcagctaatagccatacatgtttagctgattgttaagaccaggaaatgcacgcttttcatactgtgttgtatatgctctgctcgcctgctcgaacatatcttgttttgagagtaaatacgttgccccgatggtggcaatggtgcctgtgggatgagcaggtctcgatgtttgccaccatttagctcagttgttgttattccataaaccatttgttggtcattcacgaattggaaaagttaagtgtatattttgtagccttctgttttaccagttttataccatgaatgtgatttcgtggtggctgatttgtttgctcgtgtttctcttcagttaagatgtgtttttctttaatgaagaggtgaatcacctcctagcctagtgtttttcgtgtttcttctatgcatcagcagcaagcttgtgcttggcttaaagctacaggaggataatatgctgaacttttggccttggtaatgttgtatgtttacacaaatatcctggcaggtgccttggtgctgctgtgattctgatgctactcgacttgtggatttcaatgaagccgaaagatgttgctgttgctgccttgcagaatggtgtgatggtgtctaggcacgactctatgtattttaatggtgtgtttggttggacatacaaggaaggatggaagatggtggacatattttctatgatgtttggatgagagttatgcaggagtgaggtgaacaccagagcaatttttagtgccggtgtggtccaaaaaaatcgagcagagtgtgtctctctcgtctcatcctattttgacctcgccggtgtggtccaaaaaaaatcgagcagagtgtgtctctctcgtctcatcctattttgacctcaaacgaaacacattctaactccaccagtgaagaaactctattgtcttggttagttagaagaaaagaatgtctgatgtgtttcatactcgcaccggagcagactgctctgtcaaaatgtttaatgtgtacaacttgttttctgagatgagttggtaaacatgtgacctcttccttcaatagtc

SEQ ID NO: 117605 - DNA, 994 bp, Zea Mays
gccggtaaggcaacatgcgtctgagcgagacagcgagacagcgtaaaggggcggccggcggcggggtcctgtagcacgctacagtgatgtgaggcgccgccaccaagccgggtgaggcaccaccgcttagatccagcagagctccaggcgccgccaacccctgcctccagctctaggcgtcatcgaggcgtcgaccgctgcctccagctggctcgcaggccacactgcgccgacttggcgactcggatccagtcgtcgacgccccctgccacgctgcgccgccgccctctgcctgggcactcgtgacctgcgtccaagaatgcagcagccccaccccggcgtatcaggtcccaacagcgggcactcctctgcgaccaccatcgtcggctcatcatcagcagcaagaggcacctcacgcccgaaccctcgatccgtggccccgtcgtgcagcccctcgccctcttctatgcgccatggatgtcgatgatatttgtgacattgacaacaatgtgtcccatgaagatgaaatacatggtaccggggaggatgctaatggtaacaacagtgaacacatggtggaggaggaccatgttcctgcacctattggtagtgaggtgaatgtcctctgccaacaagttattcgtggaaaaacaagtccatagatggagaccatcgtgtagtgaagcgacaactaacaaccaagtcaaccaataccccaacaagcaagtttatggcaccttcatttaaagcagcaaggtcaaacgacaacatggatttagtgccacaattgccatgctagagtactatattgtatgatgtaaacttattgatatattgttatgttagagtactatgttgtatgatatatacttattgttatattgtcatgttggaccaactgaattatagcgaaagtatgcattatccgataagtacatgttatccgcaatgtatccggctacacaatatttgtatccgtcccttattcgcccga

SEQ ID NO: 117606 - DNA, 556 bp, Zea Mays
gccggtaaggcaacatgcgtctgagcgagacagcgagacagcgtaaaggggcggccggcggcggggtcctgtagcacgctacagtgatgtgaggcgccgccaccaagccgggtgaggcaccaccgcttagatccagcagagctccaggcgccgccaacccctgcctccagctctaggcgtcatcgaggcgtcgaccgctgcctccagctggctcgcaggccacactgcgccgacttggcgactcggatccagtcgtcgacgccccctgccacgctgcgccgccgccctctgcctgggcactcgtgacctgcgtccaagaatgcagcagccccaccccggcgtatcaggtcccaacagcgggcactcctctgcgaccaccatcgtcggctcatcatcagcagcaagaggcacctcacgcccgaaccctcgatccgtggccccgtcgtgcagcccctcgccctcttctatggtaatgttgttgcttttctagttttctgaacgaataaatatgtatgtgatgatgacagtccagttagtatggtttaccaactattag

SEQ ID NO: 117607 - DNA, 1454 bp, Zea Mays
gcagatgacagagcgcaacgaaacgactggctgtgaggtgtgagcctcagcacgacgggattgcgcccacaagcgacgcccccattcttctccggctccggtgcattccgtgtcctgtcttgatggaagcagcgatggctgccacgtcctccctactccttgcctccggctccaggaggtggccagcaaccttgcctccttccccctcgccccagcagcagcgtctggttattttctgcctcgctgcaagaacgaggccgctggacagcaagaggggtagctggaggcgctcttccagtgccactggcggccggtcgaccgccgtctcgtcgtcgtcggaaagatgggttctcgaccctgcaggagacggtgactggcgccacatcggctacaaagtcgcgcgccctggggcgatcgagatagtctcggaggacacggcggtgaccgtgggccgggtcgccgacaaggcggacatcgtgctccccgtcgccacagtttcaggcgctcacgcccggctggagaagaagggcggcagcctgctggtgacggacctggacagcaccaacggcacctacatcaacgagcgccggctcaacccgggcttccccgcgtccgtcgaccccggcagcctactcatcttcggtgacatccacttggccatgttccgtgtaaggaagacggtggtggttgaggcgcccagtactagtaccgaggaggccgagggagctcagcaagaggccaccgcagctgaagatatttgacatgtgcctttattacagtaacagtagccccattttacaaattacatggtgatcgtgatccatctacttccagtctcctcaaaagctacattattgatcggcttatatatccaatatataaattacatgatcagataaaagctgacagatcaacaaagaattgccgtaacactagcaatgtacagaaccattccatcgtttcgatttacttgacggcgtaacaccagtaatgctcaaacaaagtttatggtgaatgagacgtaaggatggacctctgattcacctcccagaccagcaactgccacgtcatcttcgcctttccaataaatactgtaatccaaatgttgcgtttcagtgggaaaaaaaaagatactatatgacttaacaaagtagttactgcagcagtccaagcactgaagaatcacctatggacattgccgcaaaggtcctctaagatgctcctcactttcttctcgccctttgtagacggagcaagaacggcagactgatgcaatagagagatcagacaacaagacacacaagatagagttaagtatcacaacaaagagtcagagactagcagagcggattaccaggaacgatggtggcagaccgtatctaagaatgctctctacaaatatgcgcacggcgcagaagtgcatccaggaactgaaaacctgcacagaaataatt

SEQ ID NO: 117608 - DNA, 1113 bp, Zea Mays
acactgtttgctaagcaaatcttcaccgccatcccatttctctaccaccatgtccctctggcgcgcggccgcctcccgcctcctcctcacacgccactcgccgtcgtctccctccgccgccactgccgctctcctcctccacgcgcgctccttctccccgccgccgccgcgcccggcccaggcgcagcccgaggcggaggtcacgccggccgaggcgcggcgcctggtgcgcctcgtcggcgtggaggcgctgaagcggcgcctgcgggacggccgggacgaggtggtggggtacgaccagctcctcgacgcctgcgtcgaggccggagccgcgcgcacgcacgccgaggccgaggcgctcgcgcgggccctggaccacgccggcgtcgtgctgctcttccgcgacaaggcctacctccaccccgagaaggtggtggacctggttagaagggccgtgccactcgcgctcgcgccagagaacgacccaagaaaagaggagttcgaactgctccgagagaagaaggaagcgatcgacaggctagcgcacaagcaagtccggcgcatcctgtggtccggcctagggttcttcatgtgccaggtcgggctcttcttccgcctcacgttctgggagttctcgtgggacgtgatggagccgatcgccttcttcaccaccgcgtccggcctgctcgtcggctacgcctacttcctcatcacctcgagggacccgacgtaccaggacttcatggagaggctgttcctgtcgaggcagaggaagctttgtgcggcgcacaagttcgatatggagaggttcatggagcttcagaagcactgtagatgtcccctggaaggccatggccctcgtggtccctgagcttcatgacttgtaacaccctataggttgcacgatagccactacttatttacacgacctcatcgttcgagacagcaagcaatgtgatcctgacagacatggatcatatactagttagctaccctttgcctgcttatcagaggcgaactgacctatgtgtattttgacaaattgttttgaaggacccttgcatgctgaagtatgcttgaatatattccaaattttgcaggtgacaaagaaga

SEQ ID NO: 117609 - DNA, 1224 bp, Zea Mays
acactgtttgctaagcaaatcttcaccgccatcccatttctctaccaccatgtccctctggcgcgcggccgcctcccgcctcctcctcacacgccactcgccgtcgtctccctccgccgccactgccgctctcctcctccacgcgcgctccttctccccgccgccgccgcgcccggcccaggcgcagcccgaggcggaggtcacgccggccgaggcgcggcgcctggtgcgcctcgtcggcgtggaggcgctgaagcggcgcctgcgggacggccgggacgaggtggtggggtacgaccagctcctcgacgcctgcgtcgaggccggagccgcgcgcacgcacgccgaggccgaggcgctcgcgcgggccctggaccacgccggcgtcgtgctgctcttccgcgacaaggcctacctccaccccgagaaggtcgcatttctcgagcgttacatcactttgtcactgcatcgtcataggttcttcgtccgcagccacctcgttccgaattcgaattcgaaactgcttgctgctcccgtaacggtggtggacctggttagaagggccgtgccactcgcgctcgcgccagagaacgacccaagaaaagaggagttcgaactgctccgagagaagaaggaagcgatcgacaggctagcgcacaagcaagtccggcgcatcctgtggtccggcctagggttcttcatgtgccaggtcgggctcttcttccgcctcacgttctgggagttctcgtgggacgtgatggagccgatcgccttcttcaccaccgcgtccggcctgctcgtcggctacgcctacttcctcatcacctcgagggacccgacgtaccaggacttcatggagaggctgttcctgtcgaggcagaggaagctttgtgcggcgcacaagttcgatatggagaggttcatggagcttcagaagcactgtagatgtcccctggaaggccatggccctcgtggtccctgagcttcatgacttgtaacaccctataggttgcacgatagccactacttatttacacgacctcatcgttcgagacagcaagcaatgtgatcctgacagacatggatcatatactagttagctaccctttgcctgcttatcagaggcgaactgacctatgtgtattttgacaaattgttttgaaggacccttgcatgctgaagtatgcttgaatatattccaaattttgcaggtgacaaagaaga

SEQ ID NO: 117610 - DNA, 1704 bp, Zea Mays
ctttaatcggaagccaacatctcgacatatagagcgttcgataggatgcttacttattctagtctattaaatttcccaccgctgctaattaatgctaatgaattaactctctctgcctatccctcgacatgcactaatgtaggagtatatcccaacgcccaaccacctcctaataacttcgacggatggcagctaccgtccatggaagatggtgacggaatgtccagcattccaccgactgccagaaactgcacgcacatctgtcatcagcaatcgctagcctatttaatgagcaacattccattgcaatctcctcaggccacttacctgcagtcaccactcccaagccagtacccacagtcctacgagcagtcgcacgcaagtgtcaagagacgaaacggtcgacatggctcgcacgcaatctgccgtagcggtcgccgtggtggccgcggtgctgctgctggcagcggcggcgacgacctcggaggccgccatcacctgcgggcaggtgagctccgccatcgcgccctgcctctcctacgcccgcggcacggggtccggcccctccgcgtcctgctgtagcggcgtcaggaacctcaagagcgccgccagcaccgccgccgacaggcgcgccgcctgcaactgcctcaagaacgccgccaggggcgtcagcggcctcaacgccggcaacgccgccagcatcccctccaagtgcggcgtcagcatcccctacaccatcagcacctccaccgactgctccagggtgaactaaaacctagaccacgcgcgacgacggccgcctgatcgatcgaccaaccattccgccgtcgccgccggccggatcatcgatcgtcgtcatgatgatatctatcaatctacgcgtgatgatcgatggctacttgtctactgctatgtactactaaataaaatctctccgtgtgtgcacgtacgcttgcatgtgcatggtagcatgtatgtacgacgtcgtccatgtatgtgtgtgtgacgtgtgagacagagagagagagagagagagacaggatcgatcgagagacggtcatgtccttttggctgtttggtttattcatatcacaacttttgagtgtatacaagattatttatgtggcagcttatttatccctagggtgatggaccaaacgggtagacgtcgatttggcaccaagcactaaagaactacctagcggtgctctctgtgtgagtgtggacggtccgcggcttagggtctccttcgcaaagaaccctaggattcgcccctcaggagggacccgacggggaggagagtttctaggggatgatttgggatcgacaagccacccaggatatccctagacgacataaggattcacccctcgggagggaccccgacggggaggagagtttcccggggatgatctaggatcgacaagccacccgggacatccctaggcgacataaaatcgcctagagatgaaataataggttaaggaagactaatactcgggctaaactaaagctatattactcgtactaccagtgaatggagagaacaatgcaaataaagtaaacttgataaatatatttagttggattgattgtgggggcgtcaatccgtcgtaccatttcgtttatataatggggaggtatggtgtcacacccggttttaagggcaaccctagacgcgaatcaaatgtgtgttaggatcaa

SEQ ID NO: 117611 - DNA, 812 bp, Zea Mays
ctttaatcggaagccaacatctcgacatatagagcgttcgataggatgcttacttattctagtctattaaatttcccaccgctgctaattaatgctaatgaattaactctctctgcctatccctcgacatgcactaatgtaggagtatatcccaacgcccaaccacctcctaataacttcgacggatggcagctaccgtccatggaagatggtgacggaatgtccagcattccaccgactgccagaaactgcacgcacatctgtcatcagcaatcgctagcctatttaatgagcaacattccattgcaatctcctcaggccacttacctgcagtcaccactcccaagccagtacccacagtcctacgagcagtcgcacgcaagtgtcaagagacgaaacggtcgacatggctcgcacgcaatctgccgtagcggtcgccgtggtggccgcggtgctgctgctggcagcggcggcgacgacctcggaggccgccatcacctgcgggcaggtgagctccgccatcgcgccctgcctctcctacgcccgcggcacggggtccggcccctccgcgtcctgctgtagcggcgtcaggaacctcaagagcgccgccagcaccgccgccgacaggcgcgccgcctgcaactgcctcaagaacgccgccaggggcgtcagcggcctcaacgccggcaacgccgccagcatcccctccaagtgcggcgtcagcatcccctacaccatcagcacctccaccgactgctccaggtagggtagtatgcatgcattcatggatatggatgtgtactgatgactca

SEQ ID NO: 117612 - DNA, 495 bp, Zea Mays
aaaaaaagaaaaaagaaaagaagaaataaatgaagaagaagtttgaatggaagacgaggagaactagtatcagcgtgtcgtttttccgtcgttggagagtgagcacgcacggtcgatgtcgatcgagatgaaatgaaatcagttggtgcgtttgctgggggcggagggcggcgccttgccccggggcttcttgttgagcagccactggtggcggccgccggcgagccgatgatgccgccggccctcgtcgtcgtcctctctgggcacggtcgccgacggtgccgcgaagacgaccgtcgctgtggtctcggcgtcggcgggtacaggcagcagtatgacgtcggtggcgtcggtcttgtcgacaagaagcacaggcctgcagctggatggctgcgtgaagacggcggcgaggaggacgaggaggaggaggaacaagctgctgaagcggggcggccggagccgcgtctgctgctgtcttcctgtgctgcccattga

SEQ ID NO: 117613 - DNA, 3082 bp, Zea Mays
atggtggacatcatcgacgcgtacccggcggtgcccgagcccgcgccggcgcacccggacccctcgtcgatcccccgcgacgcctggcggcgcttcgagagcgccgcgctcggcatactctacacgatccagcccagcgccacctccgagcacctccgcgccgccatcatcgactacgtccagcgcctcttggcgtcccactccggggttcaggtctttccatttggatctgttccattgaaaacttatcttcctgatggagacattgacttgactacattcggccctgcaatttctgatgaaaaattagcaaatgaagtatgtgctattctaaaatcagaagagcataggaaagattctgaatttgatgtcaaagatgtccagtatatccatgctgaggtcaaactggtgaaatgtgtagtacagaacattatagtagatatctctgtgaatcagattgggggactctgtacactttgttttctggagaaggttgatgagaattttggaaagaaacacctcttcaaaagaagcgtaatgctgattaaagactggtgttactatgaaactcgcattcttggtgcacaccatggattgatatctacctacgctttggagattttagtgctatacattttccatatcttccataagtctttgaatggcccattagctgtcctctataggtttctcgattactatagtcaatttgattgggatgctaagggaatcagcttgtttggtcctgtttccttatcttcactacctgatctagttactgaccctccagttattcatgatgatggttttcttctgcgggaaaagtttctcagagaatgtgcagatgcatttagtgtcccccctagaaactctgagaaagatgcacaactattttctcggaagtttttaaatatagtagatccactgaaacaaagtaataatcttggacgcagtgtcagcagaggaaatttttaccgaatacgtagtgcatttgattttggtgctcgtaagcttgggaagattcttcaaaggcctgtctgttatactgttgatgaagtgaatcagttctttgggaacacattaaagagaaatcgtattgggttcagacaagatgttttagtgagctcatctgatgatggtacattgacttatcatgccaccaacggttccttgtctctaggcttggattgcaaaagagtcaacaactgcagtgcacctttatacagcaatccctgtggtgatttctcttatcggtttaataacatcaacatttcagattccatcaatcatgatgactcaataaaacagaaacaatgtaactctattgctggagagaaagcgataaagtctatttctgatgggttgctagatagtgaaggctcaagtcatgctagtactgatgattcagtaagtgtgaggaacagtggtgacttctatgaagctttaacaactatctcgccatctgggagacgttatgccccacatcaattttaccaattagaaaatggtaaggtggttgttagacataacacaaacatgtcacaccatgggatgccaacaaagcagttcacaagcagatcttaccactcttttgaagatgccaagtatcacaatgagttttcaggaagctttctgccacccattgagcataatgcttactcttctgctggctttgttaatgttctggccacctctaactcagcatgtacacatgaaaattcacaacttggtggagccaataataacatcttgaaagatctcactggagattttgagacatacttccataatcttcagtatgcgcaagggttccagcaagataatccagtaaacccgttttcctctggaaggcctgctccaccatccctgcaatgtcagaacacgtgcccttcaaatggtcgaggaagaaaaaatccatattcatatgctagcatgaatggtgcagtcccttgccctccttacccatctggctatcttgtgtggagtccatttattcaaccagatgatcctatggctatgaggacccgtggaacaggcacctacttttctgaccgaaaattgcgcaagaataggccacccactggacgtgtggagagaggaagaaatcagttcgcttcaaataattatcaaaggttccatcaccatgtcagaacagatatgcctgcagatatgggatctggtctggaattgaggcatgagctaccacagatacatattcctggtgcaactgatcatggaatgccatctccaatgagtataccaatgtcatcgtcatctcttaactctccaagagatcaattgaaggtaccagctcattctccatcttcccaggttcgaaggaataatttccatggcaatggtttcatgctcctgcaagacagtaagcttgagtccaggacctttaacagtaaacttgagtctgggatattggggccgttgcctttagaagttacctccaaagaccatgctagcagatcagaatccgcttccagcaatcaagtttctggacctgtgagtactgtttctgctcctcgaaacactactacgacagattccaatctaatgagggatggcgctcaatcatatcgcctcaaggacagcagagacttccccccactgtccagttgaatgttgatggcggtacactgtagtatgaactgagaggtgactgtcaacgccgcacttgatcaccaggcaaaattaccgatgaatggtctgtgctgaaccgcagcagtggcaccgagttgttgctccctgaaaccagacaacatgttgtatatcctgccattttcttcccgtactccaggcgtcagattcaccttgtccctgcgatcagccttacaccctcatttggcaaaaaagaaaaaaaaagaaagaaaacaaaagggacagcaagagaagcagaaggaataaagatgcagggttatgacatgtagatagtactgttactaggaaaaggtcccccttcagacatgttggagggctagttggttgtgttgttgttgagaatagcgtttttagtagcctttgttggcgtttatataacgagtaaggggtctggcaggatctcgcaacaaataaa

SEQ ID NO: 117614 - DNA, 3066 bp, Zea Mays
cggcggcgcccagtcgcgaccgcgctctcaccgatcgcctcggtgagtgatactccgcaccgcaggccgcagcgcaagcgcctcgggccgtccgccgtcgccgcctgaagctagcgtctcctgtaagcggctggccgcttcactccgaggctctcgcacattgtttcggggctccggcgaccatggtggacatcatcgacgcgtacccggcggtgcccgagcccgcgccggcgcacccggacccctcgtcgatcccccgcgacgcctggcggcgcttcgagagcgccgcgctcggcatactctacacgatccagcccagcgccacctccgagcacctccgcgccgccatcatcgactacgtccagcgcctcttggcgtcccactccggggttcaggtctttccatttggatctgttccattgaaaacttatcttcctgatggagacattgacttgactacattcggccctgcaatttctgatgaaaaattagcaaatgaagtatgtgctattctaaaatcagaagagcataggaaagattctgaatttgatgtcaaagatgtccagtatatccatgctgaggtcaaactggtgaaatgtgtagtacagaacattatagtagatatctctgtgaatcagattgggggactctgtacactttgttttctggagaaggttgatgagaattttggaaagaaacacctcttcaaaagaagcgtaatgctgattaaagactggtgttactatgaaactcgcattcttggtgcacaccatggattgatatctacctacgctttggagattttagtgctatacattttccatatcttccataagtctttgaatggcccattagctgtcctctataggtttctcgattactatagtcaatttgattgggatgctaagggaatcagcttgtttggtcctgtttccttatcttcactacctgatctagttactgaccctccagttattcatgatgatggttttcttctgcgggaaaagtttctcagagaatgtgcagatgcatttagtgtcccccctagaaactctgagaaagatgcacaactattttctcggaagtttttaaatatagtagatccactgaaacaaagtaataatcttggacgcagtgtcagcagaggaaatttttaccgaatacgtagtgcatttgattttggtgctcgtaagcttgggaagattcttcaaaggcctgtctgttatactgttgatgaagtgaatcagttctttgggaacacattaaagagaaatcgtattgggttcagacaagatgttttagtgagctcatctgatgatggtacattgacttatcatgccaccaacggttccttgtctctaggcttggattgcaaaagagtcaacaactgcagtgcacctttatacagcaatccctgtggtgatttctcttatcggtttaataacatcaacatttcagattccatcaatcatgatgactcaataaaacagaaacaatgtaactctattgctggagagaaagcgataaagtctatttctgatgggttgctagatagtgaaggctcaagtcatgctagtactgatgattcagtaagtgtgaggaacagtggtgacttctatgaagctttaacaactatctcgccatctgggagacgttatgccccacatcaattttaccaattagaaaatggtaaggtggttgttagacataacacaaacatgtcacaccatgggatgccaacaaagcagttcacaagcagatcttaccactcttttgaagatgccaagtatcacaatgagttttcaggaagctttctgccacccattgagcataatgcttactcttctgctggctttgttaatgttctggccacctctaactcagcatgtacacatgaaaattcacaacttggtggagccaataataacatcttgaaagatctcactggagattttgagacatacttccataatcttcagtatgcgcaagggttccagcaagataatccagtaaacccgttttcctctggaaggcctgctccaccatccctgcaatgtcagaacacgtgcccttcaaatggtcgaggaagaaaaaatccatattcatatgctagcatgaatggtgcagtcccttgccctccttacccatctggctatcttgtgtggagtccatttattcaaccagatgatcctatggctatgaggacccgtggaacaggcacctacttttctgaccgaaaattgcgcaagaataggccacccactggacgtgtggagagaggaagaaatcagttcgcttcaaataattatcaaaggttccatcaccatgtcagaacagatatgcctgcagatatgggatctggtctggaattgaggcatgagctaccacagatacatattcctggtgcaactgatcatggaatgccatctccaatgagtataccaatgtcatcgtcatctcttaactctccaagagatcaattgaaggtaccagctcattctccatcttcccaggttcgaaggaataatttccatggcaatggtttcatgctcctgcaagacagtaagcttgagtccaggacctttaacagtaaacttgagtctgggatattggggccgttgcctttagaagttacctccaaagaccatgctagcagatcagaatccgcttccagcaatcaagtttctggacctgtgagtactgtttctgctcctcgaaacactactacgacagattccaatctaatgaggtatgtatggcatattattttcatcgccagcactaacaataattgtatggcagaaatgatgtttaatgtagtgggcatttccatgttacaacaattagatgttttactccttgtagtttggtactttggtgtttctgcaaagttatttagatagttgtgatgttgacggtcgggcattaatacatagagtaaattatactgcatgtaatttttttttgattatatcgtactgggttccttggtcttgactcttgagaaccacacgtgcgtaccattttgatgggaggcaattcaagttgtcattggtcacattatta

SEQ ID NO: 117615 - DNA, 1012 bp, Zea Mays
gtcgtcgtcctccgcggatcccgcgcgcctcctccgccgatagtccttgtggcgaacacgcgaaggcaaagcaacaccgcaaatctctccccctccctggattggattgattgagctgctcgcgtccacctccgctcgaattgccattcccccctctctcttggtttctcttggatcgaattgttagtttattagagtgaagttgtcgggggagggaggctaggcgttaggtgggcgcctgcgtgctacgcctcgggagaaggtcaaaagaaaccgccccaccaccaacccaggcgactccccctcaacccaacccaacccaacctgccattgctcttctttccctccccgtcgccagctggccagagccgccccgcccggagcccaaaggcgccgcctttcctgaaccccgtccgcggcagattgatcgattggttgttcggttccttggtcgggaatcagaggaggcagcaagagaagagatgtgcccgctgcgggtgatcctcatcttcctctccgccaccgttgccggcttcttcctcatcaggggcctcaacgctgagcccgaccagttcgacgccgacgccgacgactcgggatcccccagggcacccctgccccttcattccaaggttggatcggccgtgaaagcagggttctggacgatggtggacatggcgagcgggcggtacctctggcgcaccctcgctgcccaagcccagccttccaagtcggcgcggtgaaagtgaaagtgaaaccatctcgtcctgccgatgcagtggagactggtacagtcagtcatgttgttgtaatgctgttacgtattggtatatattcaagtaaatttgcaaaaacaaaaactattcttgtgctgagctgagccttgtgttgtgtgtaaagctggaagtggttgctgtcctgcaagtgtatactttggccatgagatttgggtccaagtttcgtcggtaacgaacattgtttgcattgcaagaaccgttttcgttttttgtta

SEQ ID NO: 117616 - DNA, 2916 bp, Zea Mays
caaaaagaagggagaggaagagggagggattgaaaagctagggttttcgccatggccattgcccacctcgagctcccctctctcgaatccacccttcccaagctctcctagctcccgcatctcgtatcttcacaaaaagcagacgcctttgattccccttcccgctgcgtcgcccccattcgagggttttccctccttccccaaatcgaatcgcagcattaccgaccgagcaagcaacccaccaacccacccgctttaagggtccgagccgagcgacggcgctggcgatccagctgggcgtgagggcggcggaggcggccggataatcaatgtgtacgctgtgcgccgtgcagcggtggtcgcggcgcgtcgccaccatgctcccgtggctcgtcgtcccgctcatcgtcatctgggccgccactcagctgctcctcccggccgcctaccgcttcgaggtcacctccccacgcctcgcctgcgtctccgtcctcctcctcaccctcttctggtacgagatcctcctcccgcgcctctccctctggcgctcccgccgctccgcgcgcctccgcgaggagcgccgggcccacgctctcgagctccataagctccgcaagactgcaacacggcgctgccgcaactgcagcaacccgtacagggaccagaaccctggcggtggtaagttcatgtgctcttactgcggtcatgtctccaagcgccccgtgctcgacctcaattcagccgggaaggcccctaccggatggccttgtgctcaggattgtggatattggctggacctgcactgctcctccagcaataacagctccttcttgggattctcgtggcgcttactttcatccttttgctcgacagcaatgaggtggttattaaggaatatattcagatttacattgtcaggggatggtgagggcttgaacatagatggtaaaaggttggcaaagagtggggagaatggaggaaaaaccgaggagagcaggaccaacaaggcaagaaggaaggcagaggagaagagactggcaaggctggagcgagaaatgctggaggaggaggaaaggaagcagcgagaggagatggctaagctagtagaggaacggaggaagctgagggatgaaaaggcagaggctgaagagcggtcaaaaagcgctacccctgttggggagaaggatgctaggagggaggtagagaagcggtgtcaggagaggaagaagaaagaggacaagggatcaagtaaaagcaattcagattgtgaggacattgatagaagattgaaccaagaaggcgatagaaagcgagactttgacagaaagagcgacttggacaggcgtgagagttacaagcctcgttacttcgatgctaacagtcacagtaataaaacaggggagagcagatcaagatactttggccgtgtgacaggtggcttcttatcttcttcaagagggtttggtggcggttccttctttggcagaagtgctcaggcccctgctcctcaagttagcaaggttagtagatctgtagttcctgcaactgaccagggtaatgcaatcaaaagagatgtccagcatgcagccacgcaagctacagacaaatctgctacagctggagaaactagaaatgcatggactaattttaatcgacctgttagtccaaatgtgcagccacaccctactggccttaaaaagtcatggcatcagctttttatacgctcagcatcagtggccccttatcctgacgttacaacttcagctcatgatatgattcggaagccagaaccaaatggagcacaaataaacaatgctcatacatttctctctcagtatcctcctctggactgcaagccaagttcaagccagtccatgcaatatcctggttttccaccacttaatggagcacctcccagtaacccactatttcatttttctgctggacatatgcccttctatgatgatgcagaatcaacactactcgaagaatcagagcaatttgaggacccatgctatgatccagatgcaattgcattacttgggccagtttcagaatctttagataacttccctccggacttagattgtggattcttctcgagtgatgttgctaaagaaccacatgggtggccttcaccaattgagtctcctctctcaagatcccacacggttgaagaaaagcttaccaagccctcgcactcatcagttgcaagaggttctggtggtcccattctgcctgtgactagcagtgaacaaggcacatggcaaatgtggagcacgccattggttcaggaaagtttaggtttgcaaggtcctcagagtcagtggtttcaacaaaacacaaatcaatttaaccatagtgctaaccttttcagtagtggaggcagggcaagaagtcccctgggtactggtttgaatgacagtgatccatggcttcagaaagcacctttccaacaattgccacctgatacatcaagcctgttcctttcacatgaaatgccaggaaaattgcacaatgacttggctttcgggtctccaaacaaatcagcccgcgaacacccctttgggccacctggttatttgttgcctaaggaggaactggtgctggatggagctcaggaaggcggcggcgggcatgttctgtcgccgtccggtgcacatgttggcttgttttctccaacaagtcctgatgtgcagccactgtggccattcagtgaaaaaagagagcatagaacgaacagacttttgtaatagaaggaagggaaaatgtggagccaaggcttccttgcctcctctcatgtagggtttacggtcggatataagctggactgtgttcctcttttttgcactgcattgggccttgtttcacctgatgatgttttatgcctgtatgtatgctattgtttctgtgatg

SEQ ID NO: 117617 - DNA, 1390 bp, Zea Mays
gttccctaccccagtccccagcacccagcccggaatctgcaacctcgccagcggttgctgggggttcttccccttgttcgatcggttggttgcttgactgattggcccgcttcctttgttcctggttgagaaggaaagcatcgcgagttcgccatacggatgggttccaaagcgcctttctgtctcacgctcctcttgctgctcgccgcggcctgtggacctgctgcacatgccaacgatgctgtcgagctcccgcatcatggctcagccttgaaggaacatatttcttcaaccaagattcctgcccgtctcaagaggggcagcggactatgctcggcctgtgaaaacttcacgagcgaagccgtcacttatctcggcaaggaacagacacaggacaggatcgtggagttccttcatgatgcttgctcccaatcattctcctttgaacagaagtgtgtcgagctgatggactcttatgcgactctcctgtttgccaagatcacggagatcagaccggaagcgttctgcaaacggtatggcctgtgcagggacacggctcttctctcccggtgtgggaagtgacagcacgtgtgtgttctgccaccatctgctcgatgaaatcatgtccaaactgaaagatccagatgcggagtttgagataattcagattcttgtcaaggagtgcaataagatcgaaggtcacgtccagcagtgcaagaggctggttctgcaatacattcccctcatcttggtgaacggtgagaagttcctcgagaagaacgacgtctgcgcgctcgcacaggcttgtccagcgagcagtaggaagacgttcagctcgatgttgaagggagcgttgtggagtgacgcctggcttgaaggttgaagaagaacacacggagcggtttagcagtggtcagaaatagtgtgaacaagtgctgtgctgtacatataataatgtcgtgtataaatgcatgaaggacgtgtgccctgcattcttttcgtcttgtatcataaattcataaacacgtcgtcttaagtaattgtttatggacacctagaggggatgaaggttaaaatatttggccttgaggtatgatgcagccaatcaatttgtatccacaaagtttcagcgctggcgacttgaaactgcaaatgatgtggtatttttatttgcatcaaagctcaagatttcagagtaggaaagagtggtgtttcagaaacaacagaatacgttgctgttaaaagtgacgctggaacggtttgctgcacttactgtttgtgtgtaaaaatagtgaagttagtggaatgaatgatcctggccagtttctcttaatgaatgattctggccggtttatgttaatgaatgattctggccagttttctcttagaa

SEQ ID NO: 117618 - DNA, 1426 bp, Zea Mays
gtggattcttatttttctaggcaagtgaatccggcacgcaacagcaacgaccgccccgaaagagagccggaaaaaaagggcaggaaatcgccaccgcccgcacctatttgagcagccgcttgttccttccgcaatccgcgtcctcgctgctcctcaattcgattggctccgtgtcgacctccaggttgagaaggaaagcatcgcgagttcgccatacggatgggttccaaagcgcctttctgtctcacgctcctcttgctgctcgccgcggcctgtggacctgctgcacatgccaacgatgctgccttgaaggaacatatttcttcaaccaagattcctgcccgtctcaagaggggcagcggactatgctcggcctgtgaaaacttcacgagcgaagccgtcacttatctcggcaaggaacagacacaggacaggatcgtggagttccttcatgatgcttgctcccaatcattctcctttgaacagaagtgtgtcgagctgatggactcttatgcgactctcctgtttgccaagatcacggagatcagaccggaagcgttctgcaaacggtatggcctgtgcagggacacggctcttctctcccggtgtgggaagtgacagcacgtgtgtgttctgccaccatctgctcgatgaaatcatgtccaaactgaaagatccagatgcggagtttgagataattcagattcttgtcaaggagtgcaataagatcgaaggtcacgtccagcagtgcaagaggctggttctgcaatacattcccctcatcttggtgaacggtgagaagttcctcgagaagaacgacgtctgcgcgctcgcacaggcttgtccagcgagcagtaggaagacgttcagctcgatgttgaagggagcgttgtggagtgacgcctggcttgaaggttgaagaagaacacacggagcggtttagcagtggtcagaaatagtgtgaacaagtgctgtgctgtacatataataatgtcgtgtataaatgcatgaaggacgtgtgccctgcattcttttcgtcttgtatcataaattcataaacacgtcgtcttaagtaattgtttatggacacctagaggggatgaaggttaaaatatttggccttgaggtatgatgcagccaatcaatttgtatccacaaagtttcagcgctggcgacttgaaactgcaaatgatgtggtatttttatttgcatcaaagctcaagatttcagagtaggaaagagtggtgtttcagaaacaacagaatacgttgctgttaaaagtgacgctggaacggtttgctgcacttactgtttgtgtgtaaaaatagtgaagttagtggaatgaatgatcctggccagtttctcttaatgaatgattctggccggtttatgttaatgaatgattctggccagttttctcttagaa

SEQ ID NO: 117619 - DNA, 1450 bp, Zea Mays
gtggattcttatttttctaggcaagtgaatccggcacgcaacagcaacgaccgccccgaaagagagccggaaaaaaagggcaggaaatcgccaccgcccgcacctatttgagcagccgcttgttccttccgcaatccgcgtcctcgctgctcctcaattcgattggctccgtgtcgacctccaggttgagaaggaaagcatcgcgagttcgccatacggatgggttccaaagcgcctttctgtctcacgctcctcttgctgctcgccgcggcctgtggacctgctgcacatgccaacgatgctgtcgagctcccgcatcatggctcagccttgaaggaacatatttcttcaaccaagattcctgcccgtctcaagaggggcagcggactatgctcggcctgtgaaaacttcacgagcgaagccgtcacttatctcggcaaggaacagacacaggacaggatcgtggagttccttcatgatgcttgctcccaatcattctcctttgaacagaagtgtgtcgagctgatggactcttatgcgactctcctgtttgccaagatcacggagatcagaccggaagcgttctgcaaacggtatggcctgtgcagggacacggctcttctctcccggtgtgggaagtgacagcacgtgtgtgttctgccaccatctgctcgatgaaatcatgtccaaactgaaagatccagatgcggagtttgagataattcagattcttgtcaaggagtgcaataagatcgaaggtcacgtccagcagtgcaagaggctggttctgcaatacattcccctcatcttggtgaacggtgagaagttcctcgagaagaacgacgtctgcgcgctcgcacaggcttgtccagcgagcagtaggaagacgttcagctcgatgttgaagggagcgttgtggagtgacgcctggcttgaaggttgaagaagaacacacggagcggtttagcagtggtcagaaatagtgtgaacaagtgctgtgctgtacatataataatgtcgtgtataaatgcatgaaggacgtgtgccctgcattcttttcgtcttgtatcataaattcataaacacgtcgtcttaagtaattgtttatggacacctagaggggatgaaggttaaaatatttggccttgaggtatgatgcagccaatcaatttgtatccacaaagtttcagcgctggcgacttgaaactgcaaatgatgtggtatttttatttgcatcaaagctcaagatttcagagtaggaaagagtggtgtttcagaaacaacagaatacgttgctgttaaaagtgacgctggaacggtttgctgcacttactgtttgtgtgtaaaaatagtgaagttagtggaatgaatgatcctggccagtttctcttaatgaatgattctggccggtttatgttaatgaatgattctggccagttttctcttagaa

SEQ ID NO: 117620 - DNA, 1470 bp, Zea Mays
gtggattcttatttttctaggcaagtgaatccggcacgcaacagcaacgaccgccccgaaagagagccggaaaaaaagggcaggaaatcgccaccgcccgcacctatttgagcagccgcttgttccttccgcaatccgcgtcctcgctgctcctcaattcgattggctccgtgtcgacctccagtatatttcttcccatggcaggttgagaaggaaagcatcgcgagttcgccatacggatgggttccaaagcgcctttctgtctcacgctcctcttgctgctcgccgcggcctgtggacctgctgcacatgccaacgatgctgtcgagctcccgcatcatggctcagccttgaaggaacatatttcttcaaccaagattcctgcccgtctcaagaggggcagcggactatgctcggcctgtgaaaacttcacgagcgaagccgtcacttatctcggcaaggaacagacacaggacaggatcgtggagttccttcatgatgcttgctcccaatcattctcctttgaacagaagtgtgtcgagctgatggactcttatgcgactctcctgtttgccaagatcacggagatcagaccggaagcgttctgcaaacggtatggcctgtgcagggacacggctcttctctcccggtgtgggaagtgacagcacgtgtgtgttctgccaccatctgctcgatgaaatcatgtccaaactgaaagatccagatgcggagtttgagataattcagattcttgtcaaggagtgcaataagatcgaaggtcacgtccagcagtgcaagaggctggttctgcaatacattcccctcatcttggtgaacggtgagaagttcctcgagaagaacgacgtctgcgcgctcgcacaggcttgtccagcgagcagtaggaagacgttcagctcgatgttgaagggagcgttgtggagtgacgcctggcttgaaggttgaagaagaacacacggagcggtttagcagtggtcagaaatagtgtgaacaagtgctgtgctgtacatataataatgtcgtgtataaatgcatgaaggacgtgtgccctgcattcttttcgtcttgtatcataaattcataaacacgtcgtcttaagtaattgtttatggacacctagaggggatgaaggttaaaatatttggccttgaggtatgatgcagccaatcaatttgtatccacaaagtttcagcgctggcgacttgaaactgcaaatgatgtggtatttttatttgcatcaaagctcaagatttcagagtaggaaagagtggtgtttcagaaacaacagaatacgttgctgttaaaagtgacgctggaacggtttgctgcacttactgtttgtgtgtaaaaatagtgaagttagtggaatgaatgatcctggccagtttctcttaatgaatgattctggccggtttatgttaatgaatgattctggccagttttctcttagaa

SEQ ID NO: 117621 - DNA, 1450 bp, Zea Mays
atgtcggaaagaggtcgcctggcaggacgattgattgataaccgcagcagagggtaccatgtagtccctctagttgaggatcccagaggccatcctgaagtcctcgtggatggggatcggaggggctactctgacattcgtggggttcagcagcgtcggggctaccctgacacccatctgcttgaggaacctaggggctaccctggtgttcgtgtggtcgaccataggggctatcctggcagtcgtggggttgatgaacgcagggcctatcctgagctccatcaaggctcacgcatgagggcggctcctcccccttacccagctgccttcgaggatgagcttgagttacaggaagttgaactccggaggctttcggcacataaccgtgctctagttgaggagcgtgaactgttaagcagggaaatacaagctggaaaagatgaggtccgccacttgaatgtgatcattgctgacattaacactgagaaagaagcttatatcagtaagcttatggacaagaggaggaagcttgaagctgaacttggagcaagtgagcacttgtgtgatgaggtcaggcatcttcgtggtgaaattgacaagctcgttaccgctcggaaagaactatctgcagaggctgcatctctcgtggaagagctgaacagggagcaatctgttaaacagcagctacctgtgctgaaaacagaaattgatggtctgcaacaggaacttgttcacgtgaggactgcttgcgggttagagcagaaggggaatttggaattgctggaacaaaggaaggcaatggagaagaatatgctttctatggcacaagagatcgagcagatgcgaggcgaattagctaattttgaagttagaccaaggggcccagcatatggcagagttcttatgcaattacctttatgtaacattttaggtggagcatatgggatgcagattgggagttcggaagtgaccttcactaagaacccatatgaagatggttataatgcttatgtgggggttcctgagaaagatcctttgcatcctcctgaatatgcttcgtgggggacatatgacaggagtcgccttcagtaccgctaagaccagaacttagtcattggagaaagaattgccttctaggttttaatggccatgtcttgtcgtttacagtaccgaagctttatgcctgctgcttggttttccattaagagttgtccttttcaatgcttctaatcataactttttccattacaaactggctagattattaaactattggtaccaagatgtccagcaatgtgcggaaagcaccttacatacatgtggttttgcgtgtctgttgacttcaccttctaccataacgtggatgaggatgtgcatagcttccttgtatcccaaatccacgggtttctttttcttctgcggggatatatatgtatttgcatgggtgttc

SEQ ID NO: 117622 - DNA, 1636 bp, Zea Mays
gtccgaacactgggccggcaggttgtccgccgcatccccttgcgttgcgttcacggttctcctctctgtctctcgcgcacgggatctcgttctccgcggcagctggtgtttcgctcccttctcgccctccgacggctggtgggctgccggcgccggcgccgccaaacgccaggtgctgaggccttcgccagtgtcttcgacggcgacgagcacgtaccagcaccaagcatcatgtcggaaagaggtcgcctggcaggacgattgattgataaccgcagcagagggtaccatgtagtccctctagttgaggatcccagaggccatcctgaagtcctcgtggatggggatcggaggggctactctgacattcgtggggttcagcagcgtcggggctaccctgacacccatctgcttgaggaacctaggggctaccctggtgttcgtgtggtcgaccataggggctatcctggcagtcgtggggttgatgaacgcagggcctatcctgagctccatcaaggctcacgcatgagggcggctcctcccccttacccagctgccttcgaggatgagcttgagttacaggaagttgaactccggaggctttcggcacataaccgtgctctagttgaggagcgtgaactgttaagcagggaaatacaagctggaaaagatgaggtccgccacttgaatgtgatcattgctgacattaacactgagaaagaagcttatatcagtaagcttatggacaagaggaggaagcttgaagctgaacttggagcaagtgagcacttgtgtgatgaggtcaggcatcttcgtggtgaaattgacaagctcgttaccgctcggaaagaactatctgcagaggctgcatctctcgtggaagagctgaacagggagcaatctgttaaacagcagctacctgtgctgaaaacagaaattgatggtctgcaacaggaacttgttcacgtgaggactgcttgcgggttagagcagaaggggaatttggaattgctggaacaaaggaaggcaatggagaagaatatgctttctatggcacaagagatcgagcagatgcgaggcgaattagctaattttgaagttagaccaaggggcccaggtggagcatatgggatgcagattgggagttcggaagtgaccttcactaagaacccatatgaagatggttataatgcttatgtgggggttcctgagaaagatcctttgcatcctcctgaatatgcttcgtgggggacatatgacaggagtcgccttcagtaccgctaagaccagaacttagtcattggagaaagaattgccttctaggttttaatggccatgtcttgtcgtttacagtaccgaagctttatgcctgctgcttggttttccattaagagttgtccttttcaatgcttctaatcataactttttccattacaaactggctagattattaaactattggtaccaagatgtccagcaatgtgcggaaagcaccttacatacatgtggttttgcgtgtctgttgacttcaccttctaccataacgtggatgaggatgtgcatagcttccttgtatcccaaatccacgggtttctttttcttctgcggggatatatatgtatttgcatgggtgttc

SEQ ID NO: 117623 - DNA, 1454 bp, Zea Mays
tctcctctctgtctctcgcgcacgggatctcgttctccgcggcagctggtgtttcgctcccttctcgccctccgacggctggtgggctgccggcgccggcgccgccaaacgccaggtgctgaggccttcgccagtgtcttcgacggcgacgagcacgtaccaggccaaagcaccaagcatcatgtcggaaagaggtcgcctggcaggacgattgattgataaccgcagcagagggtaccatgtagtccctctagttgaggatcccagaggccatcctgaagtcctcgtggatggggatcggaggggctactctgacattcgtggggttcagcagcgtcggggctaccctgacacccatctgcttgaggaacctaggggctaccctggtgttcgtgtggtcgaccataggggctatcctggcagtcgtggggttgatgaacgcagggcctatcctgagctccatcaaggctcacgcatgagggcggctcctcccccttacccagctgccttcgaggatgagcttgagttacaggaagttgaactccggaggctttcggcacataaccgtgctctagttgaggagcgtgaactgttaagcagggaaatacaagctggaaaagatgaggtccgccacttgaatgtgatcattgctgacattaacactgagaaagaagcttatatcagtaagcttatggacaagaggaggaagcttgaagctgaacttggagcaagtgagcacttgtgtgatgaggtcaggcatcttcgtggtgaaattgacaagctcgttaccgctcggaaagaactatctgcagaggctgcatctctcgtggaagagctgaacagggagcaatctgttaaacagcagctacctgtgctgaaaacagaaattgatggtctgcaacaggaacttgttcacgtgaggactgcttgcgggttagagcagaaggggaatttggaattgctggaacaaaggaaggcaatggagaagaatatgctttctatggcacaagagatcgagcagatgcgaggcgaattagctaattttgaagttagaccaaggggcccaggtggagcatatgggatgcagattgggagttcggaagtgaccttcactaagaacccatatgaagatggttataatgcttatgtgggggttcctgagaaagatcctttgcatcctcctgaatatgcttcgtgggggacatatgacaggagtcgccttcagtaccgctaagaccagaacttagtcattggagaaagaattgccttctaggttttaatggccatgtcttgtcgtttacagtaccgaagctttatgcctgctgcttggttttccattaagagttgtccttttcaatgcttctaatcataactttttccattacaaactggctagattattaaactattggtaccaagatgtccagcaatgtgcggaaagcaccttacataca

SEQ ID NO: 117624 - DNA, 426 bp, Zea Mays
atggatgaaggactatttgttttggtgacactggtagacacatcaggcgaagatgatctgcttacagataatatgctcttccttgttgctgaaggaactgagtttgagcccagtgaagcagctggatatcgcccatcacttgcactccctcttacaaggtataggaaaaagattagcagatctgtacatgcggaagtagtagaaattagccaagtacagttagaactacgaaggggatacccctcacatgtaagagaagatcttcgttgtgactgggacgctggtggcagagcggaggatcactcgtcctcttcagcacccgggatctccttccacgcctcaatcattcggttaatcgactctcgcacaaccttgaccttgtcaaaccttctggccttgaagaaggtgacgcaagaggatttgtag

SEQ ID NO: 117625 - DNA, 559 bp, Zea Mays
tacattttcttgcataatactgaatgcttatgcaaaagtgcctccaaaaccacacaaagaggtatttttttgttagactttttggatccactgggcaatacgtgtccacattcgaagctccgctgtgatcaatatattggatttacctatgtagtatcttgtaatgtgcaacaacgagtttgaagaactggaggttgttccgacatctgctgctatagatggccccctcgaacctccgctgtcatccatccactgctctagtttctgatgaatcatatcactggttaattactttaatgtatgttctcttccagtttcgtgaaactctgtttccttatggccattgccacatcctgattgatactctgtttgcttgtcatggttgattgttccatctgctactccagcacatcaaatacctcattctttagggggaggaccagctttctttgcacctacatcactctcttcaacatctgtggcaccactggcttcatccataatccctacagcgccgcctctccatctagcttcaacagctgctcaacgtcctccacac

SEQ ID NO: 117626 - DNA, 2017 bp, Zea Mays
tcaaccctacatacatacatgcatgatgagctgtgtacgccgcgggaaaaagggtaaaaagtccaatggcaaactttgtttaataaaaaacgcacgtgccgcatgtgcggattcctcccaggtgcaccgccacccacgttatatatagagccaaagccgcctcagtctttgtgccgcacattttcctctccttgtctctggcgccatggaagcagctgatgccttgccctgggcagcgcagtgtgcgggcatgaccgtcctcgcctcctccctctgcttggtggcgctggccctggtgctcctgctccttcggcgctggccgtggtgcagctgccatgtctgccgggcgtacctgacggggtcgtgggagcgggacttcaccaacctcggtgactggtacgcgcacctcatccgggagtcggccaccggcaccgtccacgtccacgtgctgggctgcaccgtcaccgccaacccggccaacgtggagtacatgctcaagaccaacttcgacaacttccccaagggcgagaccttcgcaacgctccttggggacctcctcggctgcggcatcttcaacgtggacggccacgcgtggcgctaccagcgcaagatggccagcctggagctcggcagcgtggccgtgcggtcctacgccttcgggatcatcgccagggaggtggaggcccggctcatgccgctcctcgccggcgccgccgacgccggcgcggtggtcgacctgcaggacgtgttccgacgcttcgccttcgacaccatctgcaagatctccttcggcctcgacccgggctgcctcgagcgggagatgcccatgtccaagctcgccgacgccttcgacaccgccacgcgcctctgcgccatgcgcggcgccgccgcgtcgccgttgctctggagggccaagcgcctgctcaacgtcggctcggagagggagctcagggaggccatccgtctggtcgacgagctcgcggctgccgtgatccgggagcgccgcaagctgggcgtcgccagcagccacgacctcctgtcgcgcttcatggtggcctcggccggcggcgacgcgcaccccggcgttgacgataagtacctccgcgacatcgtagtcagcttcctcctcgcggggcgcgacaccgtgtcctcggcgctcaccacgctcttcatgctcctgtccaagaacccggccgtggtggccgccatgcgcgccgaggccggggacggcgacggcgacggcgactcagcgccgctcacctacgagcacctcaagcgcctgcactacacccacgcggtgctgtacgagaacatgcgcctgttcccgccggtgcagttcgactccaagttctgcgccgggcccgacgtgctccccgacggcatctacgtgtccggcggcacgcgcgtgatgtaccacccctacgccatgggccggatgccgcgcatctggggcgccgaccacgacgcgttccgcccggaccgctggctcacgggcgccggcggttccttcgtccccgagagcctgtacaagtacccggtgttccaggcgggcctccgcgtgtgcctcggcaaggagctcgccatcacggagatgaaggcggtcggggtggccgtggtgagggcgttcgacgtccacgtcgtcggggacagtggcagcgccgcctgcgcgccaaagttcgtgtcggggctcaccgcgtccattagcggcgggctcccagtgaggattagtagaagagttcgaagctagagcgaggttcttgttttcgttcgtaaattaaaaaacaagtagagactactagatcgatagagctgtttcgcggataatgtacatagactaattaaaacaaattgcaagttgtaattccatatatatatttcgtatatatgggattttcttatgctgcaagcatgcaacagaaagccaactgttatcaccggaaaaattttggctgcagccggtgtaagttagggcttgtttagcacacggactaaagaatagttcatatatttaagtttt

SEQ ID NO: 117627 - DNA, 132 bp, Zea Mays
atgacgctcccgaggcaaagcggcagtggtgaccacgggagatgcgagttcctccaacagtcgcgtgaggcgcggtcgtctccgtcgattgcggccacgcgaggtgtgggtggctctggcgtccttcgataa

SEQ ID NO: 117628 - DNA, 4894 bp, Zea Mays
aaacttgctactgaagctcaacactggtaataaatcaacctctgactttcttttattcttctagattttcctgtaggtggcggagctagtcaagaatttgctactgtcaattcttgcctatctgtaaaagcttggcatatacactaatcaccataccaaccaaataactgctagccacttcatatttgatctctccggtcaaactagggcagctggcaaccatctttcctgaataatattgcactacttcgctgaaaagtcacatgaaaatcaagagatcagcagataaaaacgatagtgaaatcaatggagttcagtctaggttgaggccattttatagtaacttgtaaaaggtgctgatgtgtttagtcctctgggtagtgtgtgtgtgtgtgtgtgtgtgtgtttattagagagaaaaaaaagagagagccctgacctgatattgctaatagtcaaggttgcagagagagagagacatgttgacatttacctaccaatggtgcaattatatgagcttaccattggttggaacaactacgaggttccactaccctagctaggttcaatcaaataccatggcattggccaggagcaaaaaattgtcaccaagacgtacttgactccacttgtaccactattttgcgtggtgccaaacctgcatgatggcaattgaccgcaacagaaggatgcacagaactgtacttggctccaccacttatggaaaactataaagattttttttaacgcctcaatccagagcctacagacttttcataactgagttgacatgtctgcactagacagcacccctacacgatgaagtggtggcggcactgcattctgttcctttattctctttggtgacttgttgccatagcattccaaagaagagaataaacagatataatagtaaatcagctggtatcacagtttgaggagagattctaggagaaactgaacttaaagcttcttttttccttaacaggaaaagggggcagctaaatgagagttgcctaaacaaataaatctgcaaagacaaacatttgagggctgagaggcttccatgaggacagtgcagcatcttgtgatccagatcatgaaaaggcaatattagaaaacaggagaataagaatataggaaatttaagtaaacatcagatcaagcatgccaaatggaattgatagtttcaccgaaaactaaattctaaagaaccatattccttttttcccatttagatccagaaaagccacacttcctaattatacttcttttcatctagatgtttatttttttcacaataatgcatcttaatgtgttcaccagaaaccagacactactacaacttttccggaatagtccatatactttttcctttaaaaaagcgcagagctgatacacaaattcaatatggtaattaagcatcatattctgcagagcgcaaaccgcaaaggcttccacgtcagcaatttttgtctccaagcaaatgaaaaaaatccctttattttccaatgtatctccacaaactgatactaactaacttgccacaaacagctacatagatacgtcattttaagaaaaaaaaacggacaacaataaggtgcttgaagcgtgctctccagaaatctgatggtaacgattttatgtaaaagctcactttttttctatttcggaagggcacggagacaatggcacatgacaatttttgataacatgattaagcttctgcaaagtaactgtaatgcagaccatacatgtagatagtggagaatgattcccaataatacaagatttttactgtcccactttcctagagatgtgttatctgttatgttttcttgtggactccacagtgacctgaaatacttcatttcagtcatgaaagaacaattccgtgcatacgtagtcatcaaagaggggaaaaatgctttgtcccaagaaattcaacaaagaaacatgatgcattgcttgcatagattttatctgtaactgttacagaagtatgatatcctttgttggctttcttggaaaaagtggtacaaccttcctgttgccattgcagctgcatccacaccatacccaactaaaagacacacatgacacatgcctcacatcctctttttatatcctacactcagcagcagcctcataaccgctataaatagaggcttgtcctctaccaatgcccaataagcagctcacagtattcttgagtgcattcgcttgctccattcagtcagagcatttcttgtgcaaaattcaaatacctgtcacaccaaccatgtctaggtctgtggagcctctcatagtcgggcgggtgattggagaagttctcgactcctttaacccatgtgtcaagatgatagtaacctacaactcaaacaaacttgtattcaatggccatgagatctacccatcagcaattgtatctaaacctagggtagaggttcaagggggtgatttgcggtctttcttcacattggttatgacagacccagatgttccaggaccaagtgatccatatctaagggagcaccttcattggatcgtgactgatatacctgggacaacagatgcctcctttgggcgagaggtcataagctatgagagcccaagacctaacatcggtatccacaggttcatttttgtgctcttcaagcagaagggtaggcaaactgtaaccgtgccatccttcagagatcatttcaacacccggcagtttgctgaggaaaatgaccttggcctcccagtagctgctgtctacttcaatgcacagagagaaactgcagctaggagacgttgaaaattccagctcttattgtccacctgatgataataaaggccttctgatcttctttctaggaagccaatgaacttattctacattaaattctcctgagccctaccgtataaataaaccagatgcgttttgctgattgtattagtattagaatgctttgtacgtggcaagaatgagaattacaaatggtcaatgcttgtggtaaaatttgatgtgtaagacatctatcactgaaagtcagaaaccaggcttagtggacacccctcacagggggaaaatttcatcttctgtttgcagcttcgcactttgtgcactttttctaacatgcaaactcctggaaacaaaattcgttggacattttgcgccaacttatagaactataaacaccctaactgcattcgactactacattgttaagcaaggcatgtatagaatatggagatgtctaatttaccaacaggaatataggattgcccactggaagcatgaaaagtatggagacatcaatttttgtgcccctatttttccttcagcttgtccttaagccaaatgaccagaaatccatatcatgtatgcttgaacatgcaagatagctgcatatctttgaattaaaggacagacctagtgttggctgctcccacatgtgtgggttctagggaaggagtaaccaaggcaagccttatctctgcatttttgcagagaggttgaggaaaagggaagagaatcctgtacaaagcaacctccttaccagccagagggtctgaggatgtcacgagctaacactaaaaaatcacctggacacctggcatacaccaagaaatgatccaaccagaatacaaaagactcacacctgaccctctacatgaccttctatgcaaccaaatatgaatgcaaactgaatgctctctttcccattggcttctgtatgtgtttattggctacatacaaacaaactataagatgtaacaatgcaatgtgtacgattgtatcagtttacctctgttgatgaggactggggagtggaatcccaattccctttgctagttgaaggaagatctcaggtactgaatatgttaatctatataccttttgaagaaaatagactaaatcagatgttgaagggagtataatattaaaaacataaaactatcataaattctcacataattgatgtaaacatacaaaaatatgcacccccccccccaatacacaatttgaagactaatatccaacataaatatgacttcagattttagacttctaacttaccttacgaattcacaaatgtatgatgcaaacctatcaaacaatcggtattcatgtctctcctttctctcctgatgaatgtgagtatgttcaatagagaaaatgttttatattttcatatattataacgaaggtaaaacaaccagatgctcaattggcagtatgattggactgcttccttagtaaccattggcattgagtggccaaagatgcaagatgacaaaggaagcactagatacacttatcataggtgacaaatttgacattgagtatcagttgcagataaaagttacagtacatatcatcacaagtttatattttctgattccgaaatgctttaaataatatattttatgaattccatcatttgattataacagttcagaatgatgcaagttagaaagttctcttccccaaataggccatatcctacaggtttgtttattttgccaccctttttccctttgctgtgcttagtgcatgaatgtcacacagctatatatcatagccacagtaggcatttctgtcctttatgaagtctaggttcattgcagatttcaactatagcagacagctttgttctttctgaaccctaggttccttctatcgttctagatgtcaactttcaggtgcctagttttgctcaaggaaacgtggaacacacgccatatcagatgcggcccagttttatcacggatataaatcaaatcaacttttttattctgcgtggaaaataaaaaatcaactcaacttgagtaaatcaacggtagatacttggtagagatgttatcaaataagtacggaaataccagatatctgctggattat

SEQ ID NO: 117629 - DNA, 838 bp, Zea Mays
ccaataagcagctcacagtattcttgagtgcattcgcttgctccattcagtcagagcatttcttgtgcaaaattcaaatacctgtcacaccaaccatgtctaggtctgtggagcctctcatagtcgggcgggtgattggagaagttctcgactcctttaacccatgtgtcaagatgatagtaacctacaactcaaacaaacttgtattcaatggccatgagatctacccatcagcaattgtatctaaacctagggtagaggttcaagggggtgatttgcggtctttcttcacattggttatgacagacccagatgttccaggaccaagtgatccatatctaagggagcaccttcattggatcgtgactgatatacctgggacaacagatgcctcctttgggcgagaggtcataagctatgagagcccaagacctaacatcggtatccacaggttcatttttgtgctcttcaagcagaagggtaggcaaactgtaaccgtgccatccttcagagatcatttcaacacccggcagtttgctgaggaaaatgaccttggcctcccagtagctgctgtctacttcaatgcacagagagaaactgcagctaggagacgttgaaaattccagctcttattgtccacctgatgataataaaggccttctgatcttctttctaggaagccaatgaacttattctacattaaattctcctgagccctaccgtataaataaaccagatgcgttttgctgattgtattagtattagaatgctttgtacgtggcaagaatgagaattacaaatggtcaatgcttgtggtaaaatttgatgtgtaagacat

SEQ ID NO: 117630 - DNA, 857 bp, Zea Mays
ccaataagcagctcacagtattcttgagtgcattcgcttgctccattcagtcagagcatttcttgtgcaaaattcaaatacctgtcacaccaaccatgtctaggtctgtggagcctctcatagtcgggcgggtgattggagaagttctcgactcctttaacccatgtgtcaagatgatagtaacctacaactcaaacaaacttgtattcaatggccatgagatctacccatcagcaattgtatctaaacctagggtagaggttcaagggggtgatttgcggtctttcttcacattggttagcaatcaaatgttccatctttgacaaatattctacaaatactactacatctctgatggccatgctcatcaaatttcaggttatgacagacccagatgttccaggaccaagtgatccatatctaagggagcaccttcattggatcgtgactgatatacctgggacaacagatgcctcctttgggcgagaggtcataagctatgagagcccaagacctaacatcggtatccacaggttcatttttgtgctcttcaagcagaagggtaggcaaactgtaaccgtgccatccttcagagatcatttcaacacccggcagtttgctgaggaaaatgaccttggcctcccagtagctgctgtctacttcaatgcacagagagaaactgcagctaggagacgttgaaaattccagctcttattgtccacctgatgataataaaggccttctgatcttctttctaggaagccaatgaacttattctacattaaattctcctgagccctaccgtataaataaaccagatgcgttttgctgattgtattagtattagaatgctttgt

SEQ ID NO: 117631 - DNA, 5548 bp, Zea Mays
atggagtctaaagaggaaaatgttgcacttacggtcatccaaagagataatacattatctatagatgaatctctactaatgtccttgtctcataacaagccaaaaacatcggtgactactacaatagttccaaaagattatatttgcacgcagggtgatcttgcactcatcgattggattaaagaaatcccttgtgaaccaagggtagaagtcgtgcttattgatgatgcctttgtggaaaggaagtggatggaatgcctatttgaaccggacgcatatctaggtgatgaggtgatagactgttacataaatttaataaaagctcaagagcatctaaaatgccgatctggaggtcgtgtacacatagaaaatgcttttcagttcaactttctaaagcgagacggtgatgttgacactaaaacagatgagttatatccaagtaaagacatggcacaaatatctagcgccgaaagaagggttttactttatctagaccatgacatggtgtttattccaataaatatccgagaaatgcactggtatcttgccgtgatcaatgcacgaaatatggagatacaagtgctcgactcacttggtacatcatccggtcgcaatgacctcattgacactataaaaggactccaaagacaaattgatatggtatctcagcgtaaggagttaaaagatcacaggtggccagacctccgagttgcttcttggccacttagagaaatagaaatggaatatgcaaagcaaacagatagctcctcgtgtggcctctttctactaaactatatcgaatactggacaggggatgaactatctgataattttacccaggatgacatgtcacactttaggaaaaaattggctgctatattactatcttcagatataaacaagagaaaggggtgtccgttatacaagtatgacaaagaagtcgatgctggatgctcctctgatgttcagatattagatagtcccacaaatcctaagaagaggaaactactttgtgtatctgaaaagagcgaagtattgatggaagatgatgatggccccatcactcaagcagacttagaaaagtggtttgttcatgattgggataaaagaactcctataaaaatctcgaccgatgagtgcactaatgaatttttactgagtggcctttccacaaaggacatgccagtgaccaaagccgatttaatagatgttctatgtgattacatcatgacaatccaagatgatacggcattagagatgacatgggtgcgaagtttcaacccttttaagatagaaatatctgtcaaagacctgcaaaacgtattaagggtaaatctagatatgactctaaaatgttttgacatggctgttcgattgttggccattaaagagtcacatatgtcgaaagatgaaatgataaaggataaaaaacattatatggacacgcgcttctggagaatggttggttttggtaaacttccaaagtaccatcaggatcctacagcagaagagttagctaacacactcgactgttggccttcattgaactattatatcactggttgtaaatatgttcttatgccatggaaattcaacggatgctatgcacttttcgtaatcgatcatggtaaaaagcacgtaacttttatagactttacacccactcaagattggtgtaaacacatgccatacaagaggtttgcggaagcaattattatggcctccaagaaatataagattgcctacaataagaaacgttctggatgggcagatgatatttttaagtgggaacatacaattcggtctggtcttccgatggacttaaaaggggttaatacaagctacttcgttctacaagctatggttatgtgggggagtggtagacgaatggaatttaataggtggacttctctggatcttgctaagatgtctcgtgaaattagaggcagtccagagatcttgtttgcaagagaagttgcaagagcatgcagaatggggaactttatttccttcttccgtcttgcaaggaaagctacatatttggaggcatgtttgatgcatgctcattttgcaaaggagtggttggaagcaaataaagactaccgagctatagtcgatggtgcgaatattgcactatatcaaccaaattttgcggagggcggtttcagtttgacccagcttatggaaaatccatctaataggcatttgattgagacctggagaacaaatggggctttgtatacttcaccaagtgggtcaaatgatgactggtctgcaatgttgccgatgtcgaacccttcagctaatcccacacagcttacaattttctatggtggatcagtatgtgtgtatgactcggtgccaccagaaaaggctcaggcaatcatgcttatagctgcagctgcggcagctgcggcagccaccaaaggcagtgctgccactgcttttaatcctccaatgagcacttctgtagcagctggacaagctcaggttgttgctgaccctagctcaataagcaagcttcaggctgatctccccattgccaggaggcactctctccatcgcttccttgagaaacgtcgtgacagggtcgtgagcaaagctccgtacagccccgccaagtcgttcgatggcatggagtcagcgggaatggagatgactgtggacggcaagcagggcgcaaggcccagtatcttgaaagcacaagctcctgtagccgccgtcgtagcagccatttccagcatccgcttctcctcctccctgccggcactggttccgccgcctccgcccctgcacgatgagaacccgttcgctgcgctcctcgcctctgagcccccaccgccggagcctctccgccaggtgctcgccacgggcgacgtccactccgcgctccgcggcctcccgggcctcgcgcgccagctgttccggtgggcggagactactccgtgtggcttcccccgctccgcctccgcgttcgccgccgtcctcatcccgctcgcccgagccaaccacatccgggccgcctaccctgtctccctccgcgccctgcacctcgacctcctcctccccctggtgtccctcctgtccgctcccctctctaccgctccacggtcactattgagcctcctcttacgcttgtccaccaagtactcgaaggaatgcaaagcccgcgacgccacgctcgacacctgttcgacgctgtgcttgtccgccttccgcgagatggcaagccacggcgtggcccctgacgttaaagactgcaaccgtgtgctccgtgtattacgtgatgcggccaggtgggatgacatttgtgctgtgcatgaggagatgctcgagcttgggattgagcccagtattgtcacgtacaatactttgttggattctttcttgaaggagggaaggaaggacaaggttgccatgctgctgaaggagatggagacccgggggagtggttgcttgccaaatgatgtcacgtacaatgtggtgattactgggttgaccaggaaaggtgaccttgaggaggcagcagagctggtcgagggaatgcggctgtccaagaaggcttcatccttcacttataacccacttatcactgggttgcttgcaaggggctgtgtcaaaaaggtatacgatttgcagttggagatggagaatgagggcattatgcctacagtggtgacgtacaatgcgatgattcatgggctgcttcaaagtgggctggtagaggctgcacaggtgaagtttgcggaaatgagggcgatgggcttgctaccggacgtgatcacctacaattcgttgctaaatgggtattgtaaggcaggtaacttgaaagaggctcttttgttgtttggcgatttgaggcgtgcagggttagcgccgacagttttgacctataacattcttatagatggttattgtagattaggtgatttagaggaagccaggatattgaaagaggaaatgggagagcaaggttgtttgcccaatgtttgtacatatacaattctcatgaagggttcgcttaatgtgcgtagccttgctatggcaagagaattctttgatgagatgctgagcaaaggtttgcagccagattgctttgcttataatacaaggatttgtgcggagctaatcctaggggatattgccagagctttcgagttgagagaggtgttgatgttggaaggcatatcttctgatacagtgacatacaatattcttattcatggactgtgcaagactggtaacctgaaagatgccaaagagctgcagatgaagatggtcagtaatggtttacagcctgactgtatcacatacacttgcttgattcatgcacattgtgaaaggggacttctaagagaagcaagaaagatctttaataacatgatctcagatggtttgctaccctcagctgtgaccttcactgttattattcatgcatattgtagaagaggaaacctttattcagcatatggttggtttcgaaagatgctggaggaaggagttgaacctaacgaaataacatataatgtcctcatacatgcattatgcaggatgggcagaactcaactggcttctcatcattttcatgagatgctagaaaggggattggtggcaaacaaatacacatatactttgttgatagatgggaactgtaaagtgggcaactgggaagatgcaatgagattctattttgaaatgcatcagaatggtattcatccagattatttaacacataaagccttgctcaagggatttgatggtcacgtgcaccatacaattgagtacttggataacgttattttgggtgaatagattgattgacctctgaaagcttgtccttttgtcctcgcttcgctgatatctccctgtcagaggtgatagatggagttcctgggcccttcatttcaaactggaaacaaaaagagagtttgaaataacattctctgagttaagctgctgggtgctttctaaacgaatagttaagcacaaacatgccttcctcttgctggtcagcgatggtagatggagcttgggggcaattccatccaaaagaagaaaagcaagactttgggaccatgttcttttagtcattcagctgggtgcttcctaaatcagtagctgatcacaaacaggtcttccccttgctgcttaaaccttgtcagaattcctttcttggtatcatagccatggaaatatgttttctagtgaaaacttggtggtaggcatctgctccatttctaaaaacctctcttgatacgtcccctttgttatttccttttgataaggtaacctggaaacctgttggccttcaattcctcatccaactagctgagacagtaaatggacatggtcctttgcggctgactttcttcaattatatataggatttctcttggtaagaacaaaccaagatttttttgtaacgaataattcttgtatcaccataaattttgccataggcataagtcatagtatattgacctgtcagatatgtaactgtattctcattcattgaatcatttaatgagaagattattcatttaaaaaa

SEQ ID NO: 117632 - DNA, 318 bp, Zea Mays
aatatgtgttatactgttatgagaaaatgtttcataatccttttgtgatcctggcaatacataaattttgttattttaatatagctatttcaccactacatttcaatcatcagtaccatacatacttctatatataccacgatctgcatggtctcgtcgttagagagcacgtcacacacttgtgggaagaagttccctcgtacatcgtcgttagatctagtaaaagaaaaataagacagtgttaaacatacctgagttatcagatttgggagcttgaaaaatggaacccataagagtgcaaataatcaaaaaaaataa

SEQ ID NO: 117633 - DNA, 250 bp, Zea Mays
gataggagaagactcgctgctcccacaaaagattcatgcttttgagagtgtttgcgtgaaaatgattgctgccggtgccgaacatactgctgcagtaactgaagacggtggtgacctctacggatggggttggggtcgatatggaaacttaggtcttggtgaccgtaatgactgtttgcttcctgaaaaagtatcttctgtggaggtaaattatctaatttggctcggccagtctttttttccagtttag

SEQ ID NO: 117634 - DNA, 1134 bp, Zea Mays
gccatgtacatcttccgaatagagaccatgagacacatgagacatactacaatttagaaggagtacctttatagttgtcaaatagagaccatgagacacatcttccttcgtctccgcctctatgctatgctatagtgtagtaggaaccgtaaatataaagaatccacgtggcgaccccaacgagtcaaccatgcgttgcgcacgctggaaaacggaggcaaggcgcgtgcaaaactccgaactcctccatcgcgttcgcgtgcgcgcttctctctctcttcagcgtctccttgccatggccgcctcgcgagaccacctcggtggcgacccgccggagtcgacgcagctgcgcctcggagacgacatcgcgtggtcggagatcaacggcgtgtacgaccgcgacgactcgctcaaggagaacaccaaccccaagtgcgtcctcaagagccagcaccccggcgccgccgggtcctcgcagaggttctcgggcaacctgaagcccacggcggcgcccatcatcgggctttccgggaagctcggcgcgtgcgcgcgggggcaccgccaccgcccacccgccatgtttcctgggaaggccaggcccggcggcgggcgcgcgtccaaggcggccgtcccggaccccgggtcgcccaaggtgtcctgcatcgggaaggtcctctcggaccacgagcgagcgcgcgcgcgcctcggaggcggccgcggctccggggcgcctgggtgctgcggcttcttcatgcagcgcagccggagccggtccaggcacagcgccgtcgagtgcgtcgaccagtccccgccgccgcccgaggaggctgcagcggcgaggtccgcggaggaggcgacggcgccaccgccggggctgggaagtgtgcggcggtttgcgtcggggaggcgagcggcggagtgggcggccaaggtggaggacgacgggcgcgtggcgagatctgggccgttgtagcaccgtgcaggcagaggcagcggtggttgaggtgtggctttcggtttggttgcgcccgtgctttagttgtagttgagctgtgtacatacgtgcttctgttcaaatccgtagaaatttgatgcttgggttcacaaattttgctttatttttgccctgcttta

SEQ ID NO: 117635 - DNA, 1978 bp, Zea Mays
atctctcgtgaagtcgtgttcgcgtggaactggtacagaacacttcgcttcctggaaggctggaacagaaagaaccctaaaccctagcaatggcggcggcgaacctgctgtcgcgctcccttctccccaccccaaacactatccgaacgagccaccccaccccgcggagcccagccgtcgtctccttcccccgccgccgtgcccgcctgtccgtgtgcgcctccgtctccatggcctccccgtccccaccgccacagcccgcggcggccggcgtgccgaagcactgcttccggcgcggcgccgacggctacctgtactgcgagggagtgagggtggaagacgcgatggcggctgccgagcgcagccccttctatctctacagcaagcttcagatcctccgcaacttcgccgcttaccgcgacgctctccaggggctccgctccatcgtcgggtatgccgtgaaggccaacaataacctccccgtgctacgcgtcctgcgtgagcttggctgcggcgccgtcctcgtcagcggcaacgagctccgactcgccctccaggcgggattcgaccccgccaggtgtatatttaacggaaatgggaagacactcgaagatcttaaattggctgctgagagtggagtatttgtaaatgtggatagtgaatttgatttagagaatattgtcagagctgcaagagctactggaaagaaagtgcctgttttacttagaataaatccagatgtggatccacaggtacatccatatgttgccacgggaaataaaacatccaaattcgggatccgcaatgagaaattgcaatggtttttgaactctatcaagtcatactcgaatgaaatcaaactcgttggtgttcattgccatctgggatctactattacaaaggttgatatattcagagatgctgcagtgcttatggtgaattatgtcgatgaaattcgagcacaaggttttaagttggagtacctgaatattggaggtggtttgggaatagattaccatcataccgatgcagtcttacctacacctatggatctcatcaacactgtacgagaattagttctctctcaagatcttactcttattattgaacctggaagatccttgattgctaatacttgctgcttcgtcaatagagtaactggtgttaaatctaatggtacaaagaatttcattgttgttgatggcagcatggcagaactcatcagacctagcctgtatggagcatatcagcatatcgaattggtctctccccccactcctggtgctgaagtagcgaccttcgatattgttgggccagtttgtgagtctgcagatttccttggaaaagatagggaacttccaacacctgatgagggagctggactggttgttcatgatgcaggtgcctactgcatgagcatggcttccacctacaacctgaagttgaggccgccagagtactgggttgaagaggatggttcgattgttaagatcaggcatgaagagaagctcgatgactacatgaagttctttgatggtcttcctgcttagatgtttatttgtgactgctaggggcgatgttttcttggagataattgaatttttctttgtcaagctcattttgctttcttgtggttgttatggaatgttactggatactggatagttagttcggcctgtaggcgtatcctcctgaacttacctctcattgctgttagttttggcaccaagtttgttcccaattgctatttacggaagttattgcataaagggctgtttggttgtaatcttcccgtaagaataagatgcatgtttttgagttagaggaccatgcctgagcgtgatttgtttgggactgaatgttttacctggtgacttgcctgcttgtgatccaaatctgtcacctgggctccggttattcccatcatccatggattagagtccatggattagagaggattggaaaaaaataagaaaga

SEQ ID NO: 117636 - DNA, 2313 bp, Zea Mays
gtgttcgcgtggaactggtacagaacacttcgcttcctggaaggctggaacagaaagaaccctaaaccctagcaatggcggcggcgaacctgctgtcgcgctcccttctccccaccccaaacactatccgaacgagccaccccaccccgcggagcccagccgtcgtctccttcccccgccgccgtgcccgcctgtccgtgtgcgcctccgtctccatggcctccccgtccccaccgccacagcccgcggcggccggcgtgccgaagcactgcttccggcgcggcgccgacggctacctgtactgcgagggagtgagggtggaagacgcgatggcggctgccgagcgcagccccttctatctctacagcaagcttcagatcctccgcaacttcgccgcttaccgcgacgctctccaggggctccgctccatcgtcgggtatgccgtgaaggccaacaataacctccccgtgctacgcgtcctgcgtgagcttggctgcggcgccgtcctcgtcagcggcaacgagctccgactcgccctccaggcgggattcgaccccgccaggtgtatatttaacggaaatgggaagacactcgaagatcttaaattggctgctgagagtggagtatttgtaaatgtggatagtgaatttgatttagagaatattgtcagagctgcaagagctactggaaagaaagtgcctgttttacttagaataaatccagatgtggatccacaggtacatccatatgttgccacgggaaataaaacatccaaattcgggatccgcaatgagaaattgcaatggtttttgaactctatcaagtcatactcgaatgaaatcaaactcgttggtgttcattgccatctgggatctactattacaaaggttgatatattcagagatgctgcagtgcttatggtgaattatgtcgatgaaattcgagcacaaggttttaagttggagtacctgaatattggaggtggtttgggaatagattaccatcataccgatgcagtcttacctacacctatggatctcatcaacactgtacgagaattagttctctctcaagatcttactcttattattgaacctggaagatccttgattgctaatacttgctgcttcgtcaatagagtaactggtgttaaatctaatggtacaaagaatttcattgttgttgatggcagcatggcagaactcatcagacctagcctgtatggagcatatcagcatatcgaattggtctctccccccactcctggtgctgaagtagcgaccttcgatattgttgggccagtttgtgagtctgcagatttccttggaaaagatagggaacttccaacacctgatgagggagctggactggttgttcatgatgcaggtgcctactgcatgagcatggcttccacctacaacctgaagttgaggccgccagagtactgggaaaaatggaaaaagccactgcaagctagggaatttcaattacttacctggatattgcttccttagagcaactatagcagttttgggggttgattctaagaaatgagtccatcagggctgcaaaccccattgctcctgagtcctgttgagggctgaggagcctactgttggtagcttagacgagcttaaaggaaccaagcctggcaaggcttgaggtcgtagaacatgtaagtcaagaaggtgaaggggatcatgtaaaagagcttgacaacctgcacattctatgtgtttgaaatacccactctgcctattgccatccaatgtttttcagagttctgcatgttaaccatcgaaagcaacttggatatgaaaacgcataaagcttgcaggtggtagactaaccgtaaggagtcgactttggggatgaccattaatacctctccctgtgttgcctcttttgtctttatcagttttgttcatttctgttttgcattgcaggttgaagaggatggttcgattgttaagatcaggcatgaagagaagctcgatgactacatgaagttctttgatggtcttcctgcttagatgtttatttgtgactgctaggggcgatgttttcttggagataattgaatttttctttgtcaagctcattttgctttcttgtggttgttatggaatgttactggatactggatagttagttcggcctgtaggcgtatcctcctgaacttacctctcattgctgttagttttggcaccaagtttgttcccaattgctatttacggaagttattgcataaagggctgtttggttgtaatcttcccgtaagaataagatgcatgtttttgagttagaggacca

SEQ ID NO: 117637 - DNA, 1642 bp, Zea Mays
actggtacagaacacttcgcttcctggaaggctggaacagaaagaaccctaaaccctagcaatggcggcggcgaacctgctgtcgcgctcccttctccccaccccaaacactatccgaacgagccaccccaccccgcggagcccagccgtcgtctccttcccccgccgccgtgcccgcctgtccgtgtgcgcctccgtctccatggcctccccgtccccaccgccacagcccgcggcggccggcgtgccgaagcactgcttccggcgcggcgccgacggctacctgtactgcgagggagtgagggtggaagacgcgatggcggctgccgagcgcagccccttctatctctacagcaagcttcagatcctccgcaacttcgccgcttaccgcgacgctctccaggggctccgctccatcgtcgggtatgccgtgaaggccaacaataacctccccgtgctacgcgtcctgcgtgagcttggctgcggcgccgtcctcgtcagcggcaacgagctccgactcgccctccaggcgggattcgaccccgccaggtgcggctcttgttcctagatttttacttcctgggatgaactggtgtcattgagcaaatgtgtctgcactttcgggtggaagaataactttctgctgttttttttaattttggatggaataatagattatgttgcaattgctgctgctgacgatgatgaagggcgttcctgtatatttggtattggatagcagcaatgttagggcattttagtgagtgcacaaactgcattagcaatggtaatacattatgttaaaacttttggttttggtctccattgcagagaggctaggggtgatttttagttggtatacatctatttccttgtaatattatgaaagagattatactgttatcaaagtctatgtagcatggataagagtcttgttatcaggccgatatggatacatgcatttaccctcctaaaccccatatgcggatacattttagtattttctaataaaaatagtgcagattaaaattggggaaacatttttttctcgaacaaaattgaggaaacattgaaattaccttgcaaatattgtggttttactttttttccgataaggcaacagcaagccaagtccacccatttctgatttctccaactttaagactccaagtccaaagttgcagacaaaaaccaatcattcatgtatcacagtatataagtctaaatgtcttattcttgttgtataaatggagggcggaatggaggattgaagtatatatcaaattatcaaccttcactttcaggcagccttttcaggagatatccagcagatagcagtaggacaatgcaatgtagctagttagctaccggcaacagcaacttgtctggttccagcttctatggcagaacagaagtatacaattaaccaatatacataacaagacatgtagacaagtctcacatctcaattaacaaatcaccatagttgttaaggcagcaaggcgaggtaaggcgactgaccccctccttaccttttaagcgataaggcgtaaggcgaggcgacaccgtaaatatagttaaaattagaaaaaaatattgatatttgagaaagtatttaggataaaacattaataaagtagag

SEQ ID NO: 117638 - DNA, 781 bp, Zea Mays
tgcagtgcaagtgtctttggagtttcgtcagaatcaatgcagtgttcctatgattcccgaggaaacagtgtcccaacaatcctcttgatgatgcagagatgcctttatgaacatggaggtcttcaggcagaaggtatcttccgaataaacgcagaaaatagccaggaagaatttgtgagagaccaattaaataatggaattgttcctgatggcgttgatgtccactgtttggcaggtctaatcaaagcctggttcagagaaatgccgaggggggtactggactctatcccacctgaacaggtgatgcaatgccaatctgaagaggactgtgcttgggtatcgaaatgtcttccactagctgaagcagctttgcttgactaggctgttaatctgatggatgatgtagtccaggaagaacagataaacaagatgaatgatcacaatattgctatggtttttgtgccaaatacgactcagatggcagatcctttgactgcactgatgtatgcagtccaagtgatgaattttctcaagatgctggtacaaaagaccctcaaggatagagaggagtccactccagaggatgttttgctgccacagaaggaccaacaacaacaacaacaacaacaacaacaacaacaacaacaaagcctttttgtcccaagcacgttggggtaggctagagatgaaaccccgtatgaaaacctcagagctcaacccccaaagaacagaaaagggaaacaaaggcaaaggagaaccgaaaacaacgaaacggggaaac

SEQ ID NO: 117639 - DNA, 197 bp, Zea Mays
tgcagtgcaagtgtctttggagtttcgtcagaatcaatgcagtgttcctatgattcccgaggaaacagtgtcccaacaatcctcttgatgatgcagagatgcctttatgaacatggaggtcttcaggtgtgtgttttaggatcttctatgattctttgccctcagtgtttggaagccttatttctgatcaaataagt

SEQ ID NO: 117640 - DNA, 1315 bp, Zea Mays
acccccaagatgacctagaggctagagagttcgttcgttgtcagttgatatcccagccacagcccacagcttccttgctcgcttccctgcctctcctcctacctaacctcaccaccacctgcaacaacaaagcacacgcccggcactaccatccatccatccgcgcgctcttaatttagcttcctcctcctcacctactagcaggcacagcaggcagcagcatcgatcggatcggagcagcacagcgcgcgtcaccgcaagctcaagtgtcttcttccttgcttgcttgcctgctgcttacctctcagttccccactcacgtcccttgccgtacgtacgtgcgtccaacacaccaggtgaaaatgggctcggagacggagacggtcaacgtggaaggcatcccgttcccggcggagatcaccgtcggcaaccctctctccctcctaggcacaggtatcacggacatcgagatccacttcctgcagatcaagtacaacgccatcggagtctacctccacaacgccggcggcggcgacagcaccacgcccacgctgctgggccacctcggggcctggaagggcaagacggcggaggagctcctagcggacgccgccttctgggccgcgctggtcgcggcccccgtcgagaagctgttccgcgtcgtggtcatcaaggagatcaagggctcgcagtacggcgtgcagcttgagagctccgtccgcgaccgcctcgccgccgccgacctctacgaggacgacgaagaggaggcgctcgagaaggtcgccgacttcttccagtccaagtacttcaagccgggctccgtcgtcaccttccacttcccggcaccggcctccgcctccccgggacccgcggcggagatcaccttcgcgacggagggcaagggcgacgccaggatcgcggtggagaacgggaacgtcgccgggatgatccagacctggtacctcggcggcgactccgcggtgtcccccagcaccgtccgcagcctggccaaccgtttcgccgcgctgctcgccgtcgccgcgtgatttataccggtcggcgggccggttggtcgagttgcgttggatttgagttcgtgaatgtccgtcctgtacgcgtgttgtctcgtgtgtgttgtcgtttgcagcgaatttgcaagtaataataataaaaattatgtccggtaggttgtgcagattgtcgttgtggaaactgtaatatgagatagaaaatttgacggtctctcgacctcgaatccatggatcatggatgcactacacttctcaataaacgctcttcataattttgcctcccc

SEQ ID NO: 117641 - DNA, 1065 bp, Zea Mays
atgagaaaaacataacttgagttatggatcgattataacgaacaaacattgcggtgccccggcgcgttcctacccctatggatcgattggcaaacaaccgccgcccgtccgccatggatgcctaacctagacggcacagaacttcattattagttccatgacacagcgcaagctagctagctgggtacactggtagctaccgcaacttggcgaaaaggttgcggtgcggtgcggtgcttctttctttaatcattcaagagcaaggcagcacaagccgcccgccgtcggtacacaccggccaccgtcgcgtagcttcacgtgcatcgtttggctggcgtggcgttgctgtcgcgctccaaagcaaccaccgcaccctccagatcgcatcaatacaaaaccgcgcggggcacactagcttgctgcctgccgcatgcactgcctgccaccacagaataatggagcggcagactcgattcgtcctgctcgtcttcgccatcggggctctcctcgccagctccgccgccgcggacttgtcggcggctgctggttccctgcacgcgctgccgctgcggcgcgtggaggacgacgacgcaagcagcttcgtggaggaggcggcgtacccgccgaggagggcgctgtacgggggcgggtccatcagctacggggcgctcaccgcgaacaaggccgtctgctacggctcgtgcgccgctcgtgggcaggcgtatacccgcggctgcctggccatctacgggtgccgaggtggccgttaattaaccagaagcagcgcgtagctagcagtcgatgtctgttaattacatgtctgtttcttgtgctgcttctcgtttttcttctaatccccttctcttgcttcaaacaagccaagatccgatccatatatacatgttgtcgctcccaggttctgcattgtaattttccaccataataaatattgtattttctatacacggaactcatgctttataattggtcagcatgcatcctcgacctcttccatggaactataccaggaacctgttccatcaggttgcttctaataatctcgtt

SEQ ID NO: 117642 - DNA, 1772 bp, Zea Mays
ttcttttccttctccccccgcccgcggaatcaagactcgacagctccaggttggccatcgcccacccatcgtcgccagcacggaagaggcaactcgctaggcggcggcggagaactggccacgacgcgtccccggaagggccggttgcttgactgatcctcttcttgggcggcacggtgtcctgtgccgtgccgcgtgaaagattccaccggcatccccaatccccatggcctaccgccggaagcagggagtcgccgccgccgatcaccggagctcctatccccaggactccgcctcgtcccacggctacacgtcgttcaaaagcatagatgagcccaagctcgggctgtggcgaactctggcgaccagagccaaggggatcctcgacgaggacgggttggcgcataagttcgaggacttgcggaaagaacggcctcgtagcgacgccacggcatccagcaaagatcaggctcctaattctcgctggtcatttgagaaccactggaaggccggagacgccgcgtcgcggatcagacccgaggctctttctgcttctgtcaaccagcttagtggaaaaataaagaatgctttggaagtaatgtgttttacttaattctgtgcatctcgctccgttgttttctccccttcagttgagtcataaacttctagagccgttttctaaactgatcagtgatcacctgttgttttctttgttttacaggaagggctcacgatcgtggataacaagacctccagtattattgaggaaacaaagaaaattcagatcaggaggaaacctgctggctcaagccctcatgtgccgaattcagcggtagataagcatacgcttagcacccctgatctttcactccggcagcctgaatctgctgcccaggagactggactgaaagcttctcgcgacgttgctaatgcaatggctgctaaagcaaaacttgtactccgtgaactaaaatctgttaaagcagatctagcctttgcgaagcagcgatgcgctcagctggaggaagagaacaggctcttgcgagaaacaaagcagaaagggagcaaaactgaagaagacgatgacttgattcgcgtgcagctggagacattgctgtccgagaaatcgaggctggcgcaggaaaactcgacgtatgcccgtgaaaaccgcttcctgcgtgagattgtcgacttccatcagttcaccacccacgacgttgtctcattggatgacggcgacatggaaggcaccgaaccagaagaagacgacgacaacgacaacggcctcatatgtgctgagaacgttctgcctgcggttgaagaaaatccagtagacgaagaacactgccctgtcccctccaagctagaatctccagtggccagcctgggcgagccatcatcgtcccccaggtccagcgattgtcacagtgcctcgaagccagacgcgtcagcgtctgatgtagcttgatgatgcatgcgacattggtgactttgccatcttgtttggggtttcagttggcgttggttgtgagtgatgcatgtgtgtataatttttttgtccattgtccacattggattggtttgtagcatagttacaggtttctgcttttgtatagagcgtatagtgctgtgttttgatgggaaaactgactcgtatggtccgccaagttttaaggtgcatatggtttggtccacatgtaattacctgtggatttgactgttataaattggccaagtgaaagaatatattgaagactgagattgttgcttgc

SEQ ID NO: 117643 - DNA, 1651 bp, Zea Mays
ttcttttccttctccccccgcccgcggaatcaagactcgacagctccaggttggccatcgcccacccatcgtcgccagcacggaagaggcaactcgctaggcggcggcggagaactggccacgacgcgtccccggaagggccggttgcttgactgatcctcttcttgggcggcacggtgtcctgtgccgtgccgcgtgaaagattccaccggcatccccaatccccatggcctaccgccggaagcagggagtcgccgccgccgatcaccggagctcctatccccaggactccgcctcgtcccacggctacacgtcgttcaaaagcatagatgagcccaagctcgggctgtggcgaactctggcgaccagagccaaggggatcctcgacgaggacgggttggcgcataagttcgaggacttgcggaaagaacggcctcgtagcgacgccacggcatccagcaaagatcaggctcctaattctcgctggtcatttgagaaccactggaaggccggagacgccgcgtcgcggatcagacccgaggctctttctgcttctgtcaaccagcttagtggaaaaataaagaatgctttggaagaagggctcacgatcgtggataacaagacctccagtattattgaggaaacaaagaaaattcagatcaggaggaaacctgctggctcaagccctcatgtgccgaattcagcggtagataagcatacgcttagcacccctgatctttcactccggcagcctgaatctgctgcccaggagactggactgaaagcttctcgcgacgtaaggttgctaatgcaatggctgctaaagcaaaacttgtactccgtgaactaaaatctgttaaagcagatctagcctttgcgaagcagcgatgcgctcagctggaggaagagaacaggctcttgcgagaaacaaagcagaaagggagcaaaactgaagaagacgatgacttgattcgcgtgcagctggagacattgctgtccgagaaatcgaggctggcgcaggaaaactcgacgtatgcccgtgaaaaccgcttcctgcgtgagattgtcgacttccatcagttcaccacccacgacgttgtctcattggatgacggcgacatggaaggcaccgaaccagaagaagacgacgacaacgacaacggcctcatatgtgctgagaacgttctgcctgcggttgaagaaaatccagtagacgaagaacactgccctgtcccctccaagctagaatctccagtggccagcctgggcgagccatcatcgtcccccaggtccagcgattgtcacagtgcctcgaagccagacgcgtcagcgtctgatgtagcttgatgatgcatgcgacattggtgactttgccatcttgtttggggtttcagttggcgttggttgtgagtgatgcatgtgtgtataatttttttgtccattgtccacattggattggtttgtagcatagttacaggtttctgcttttgtatagagcgtatagtgctgtgttttgatgggaaaactgactcgtatggtccgccaagttttaaggtgcatatggtttggtccacatgtaattacctgtggatttgactgttataaattggccaagtgaaagaatatattgaagactgagattgttgcttgc

SEQ ID NO: 117644 - DNA, 1037 bp, Zea Mays
ttcttttccttctccccccgcccgcggaatcaagactcgacagctccaggttggccatcgcccacccatcgtcgccagcacggaagaggcaactcgctaggcggcggcggagaactggccacgacgcgtccccggaagggccggttgcttgactgatcctcttcttgggcggcacggtgtcctgtgccgtgccgcgtgaaagattccaccggcatccccaatccccatggcctaccgccggaagcagggagtcgccgccgccgatcaccggagctcctatccccaggactccgcctcgtcccacggctacacgtcgttcaaaagcatagatgagcccaagctcgggctgtggcgaactctggcgaccagagccaaggggatcctcgacgaggacgggttggcgcataagttcgaggacttgcggaaagaacggcctcgtagcgacgccacggcatccagcaaagatcaggctcctaattctcgctggtcatttgagaaccactggaaggccggagacgccgcgtcgcggatcagacccgaggctctttctgcttctgtcaaccagcttagtggaaaaataaagaatgctttggaagaagggctcacgatcgtggataacaagacctccagtattattgaggaaacaaagaaaattcagatcaggaggaaacctgctggctcaagccctcatgtgccgaattcagcggtagataagcatacgcttagcacccctgatctttcactccggcagcctgaatctgctgcccaggagactggactgaaagcttctcgcgacgtaaggtgccgccacatgcttatatcttgatggcaaatatacatgttattttacatcttctatgcaggaaaccagaattttcttttacatgcatcggaaaaccttcgacacttggtggtccttgtatgtgcatgtcaacatcaaaatctatgttttctagtgactagtcttgcgaaacgaggggcataattagttttcggaaaccagtatcttctgatgttgcccaatgttttgttatgat

SEQ ID NO: 117645 - DNA, 1847 bp, Zea Mays
tgagttccgacgttgcccgggaggggtggggaggggagcggcccatttggatttggaagcatcctcggcggcgagcggcggcgtcgcattcactctcatctctctctcacacagattccggctccttttccctctcccccaattcaaaatcaacccccctcgtcgcaaggccacaacaactccactcctccccatccctagctagccactagggtttgccagcctttgcagcgtcgcgctcgcgtctcatgcccttgcccatcgacggtagacgagagcgagcggtctgtgttcgtggagcaggggccggcgccatggagatcaacatcgtggacaagtacgagaagctggagaaggtcggggagggcacctacggcaaggtgtacaaggcgcaggacaaggcgacggggcagctggtggcgctgaagaagacccgcctcgagatggacgaggagggcatcccgcccacggcgctccgcgagatctccctcctcaacctcctctcccactccatctacatcgtccgcctcctcgccgtcgagcaggccgctaagaatggcaagcccgtcctctacctcgtcttcgagttcctcgacaccgatctcaagaagtacctcgacgtctaccgcagggggcccagcgccaggccgctccccgcgacactcatcaagaatttcctgtatcagttatgcaaaggagttgcacactgccatagccatggtgtccttcaccgggatttaaagccacaaaacctgctggtggacaaggagaagggtatactgaagattgctgatctgggactcggtagggctttcactgtgcccatgaaaagctacacccatgagattgtgaccctttggtacagagctcctgaagttttgcttggagcaacacattactcaactggcgttgatatgtggtctgttggatgcatctttgctgaaatggcccgacggcaggctctctttcctggtgactcggagttgcaacagttgcttcacatcttcaggtccttgggaacacctactgaggaacagtggcctggagtgagtgatttaagggactggcatgagtttccacagtggaagccccagggtttggcacgtgtcgtcccaacactggaacctgaaggagttgaccttctatcgaaaatgcttcagcttgatccttcaaacaggatatcagctttagctgcgatggagcatccctactttaacagccttgacaagtcccagttctagccgttgtactatgtggttcagaaggcgctaccctcgtacagagagatttccaatggtgttatgaatctcaattgccatctaggcaactggttcatgattttaccaatctgttagtgagtgaaaatcgtgcgagggtcatatgtgttccccttgtcttaaaaatctggtgtggtgtagaacaagagttacctgtgggaggcctgtgataatgccctttatgtctcaacatccattttcgtgcattccatgttcttcaatacggacttgaaacaggaattctgattttcttattactaccttcaagtttcagctttttattttttcctagcaagcctgtgatttaattttttttctcttccatgaagttcaagcaagcattatcaaagtcgagcaaccaagctgaaattcataagtagaaaaaaatgatatctagaacatattgggattaggggctctagctgagtagattagatggttgtactaacactccttaggacttgggtcttcttttgacaaaatgttcaaggagtttgaatgatatgtattggacatgacagtcaagtttggagcatgaaagaaaccaacatacacggtgttccctagggt

SEQ ID NO: 117646 - DNA, 1847 bp, Zea Mays
tgagttccgacgttgcccgggaggggtggggaggggagcggcccatttggatttggaagcatcctcggcggcgagcggcggcgtcgcattcactctcatctctctctcacacagattccggctccttttccctctcccccaattcaaaatcaacccccctcgtcgcaaggccacaacaactccactcctccccatccctagctagccactagggtttgccagcctttgcagcgtcgcgctcgcgtctcatgcccttgcccatcgacggtagacgagagcgagcggtctgtgttcgtggagcaggggccggcgccatggagatcaacatcgtggacaagtacgagaagctggagaaggtcggggagggcacctacggcaaggtgtacaaggcgcaggacaaggcgacggggcagctggtggcgctgaagaagacccgcctcgagatggacgaggagggcatcccgcccacggcgctccgcgagatctccctcctcaacctcctctcccactccatctacatcgtccgcctcctcgccgtcgagcaggccgctaagaatggcaagcccgtcctctacctcgtcttcgagttcctcgacaccgatctcaagaagtacctcgacgtctaccgcagggggcccagcgccaggccgctccccgcgacactcatcaagaatttcctgtatcagttatgcaaaggagttgcacactgccatagccatggtgtccttcaccgggatttaaagccacaaaacctgctggtggacaaggagaagggtatactgaagattgctgatctgggactcggtagggctttcactgtgcccatgaaaagctacacccatgagattgtgaccctttggtacagagctcctgaagttttgcttggagcaacacattactcaactggcgttgatatgtggtctgttggatgcatctttgctgaaatggcccgacggcaggctctctttcctggtgactcggagttgcaacagttgcttcacatcttcaggttgctgggaacacctactgaggaacagtggcctggagtgagtgatttaagggactggcatgagtttccacagtggaagccccagggtttggcacgtgtcgtcccaacactggaacctgaaggagttgaccttctatcgaaaatgcttcagcttgatccttcaaacaggatatcagctttagctgcgatggagcatccctactttaacagccttgacaagtcccagttctagccgttgtactatgtggttcagaaggcgctaccctcgtacagagagatttccaatggtgttatgaatctcaattgccatctaggcaactggttcatgattttaccaatctgttagtgagtgaaaatcgtgcgagggtcatatgtgttccccttgtcttaaaaatctggtgtggtgtagaacaagagttacctgtgggaggcctgtgataatgccctttatgtctcaacatccattttcgtgcattccatgttcttcaatacggacttgaaacaggaattctgattttcttattactaccttcaagtttcagctttttattttttcctagcaagcctgtgatttaattttttttctcttccatgaagttcaagcaagcattatcaaagtcgagcaaccaagctgaaattcataagtagaaaaaaatgatatctagaacatattgggattaggggctctagctgagtagattagatggttgtactaacactccttaggacttgggtcttcttttgacaaaatgttcaaggagtttgaatgatatgtattggacatgacagtcaagtttggagcatgaaagaaaccaacatacacggtgttccctagggt

SEQ ID NO: 117647 - DNA, 1992 bp, Zea Mays
tgagttccgacgttgcccgggaggggtggggaggggagcggcccatttggatttggaagcatcctcggcggcgagcggcggcgtcgcattcactctcatctctctctcacacagattccggctccttttccctctcccccaattcaaaatcaacccccctcgtcgcaaggccacaacaactccactcctccccatccctagctagccactagggtttgccagcctttgcagcgtcgcgctcgcgtctcatgcccttgcccatcgacggtagacgagagcgagcggtctgtgttcgtggagcaggggccggcgccatggagatcaacatcgtggacaagtacgagaagctggagaaggtcggggagggcacctacggcaaggtgtacaaggcgcaggacaaggcgacggggcagctggtggcgctgaagaagacccgcctcgagatggacgaggagggcatcccgcccacggcgctccgcgagatctccctcctcaacctcctctcccactccatctacatcgtccgcctcctcgccgtcgagcaggccgctaagaatggcaagcccgtcctctacctcgtcttcgagttcctcgacaccgatctcaagaagtacctcgacgtctaccgcagggggcccagcgccaggccgctccccgcgacactcatcaagaatttcctgtatcagttatgcaaaggagttgcacactgccatagccatggtgtccttcaccgggatttaaagccacaaaacctgctggtggacaaggagaagggtatactgaagattgctgatctgggactcggtagggctttcactgtgcccatgaaaagctacacccatgagattgtgaccctttggtacagagctcctgaagttttgcttggagcaacacattactcaactggcgttgatatgtggtctgttggatgcatctttgctgaaatggcccgacggcaggctctctttcctggtgactcggagttgcaacagttgcttcacatcttcagttgttgtatttcattagttctttgttgggataatctgaatgtgttactaaatgagatgatagtttgattttcaatactcttctctgttagacactactccaatggctaaattacacttgaaatcttgcttgttttaactttcaaggttgctgggaacacctactgaggaacagtggcctggagtgagtgatttaagggactggcatgagtttccacagtggaagccccagggtttggcacgtgtcgtcccaacactggaacctgaaggagttgaccttctatcgaaaatgcttcagcttgatccttcaaacaggatatcagctttagctgcgatggagcatccctactttaacagccttgacaagtcccagttctagccgttgtactatgtggttcagaaggcgctaccctcgtacagagagatttccaatggtgttatgaatctcaattgccatctaggcaactggttcatgattttaccaatctgttagtgagtgaaaatcgtgcgagggtcatatgtgttccccttgtcttaaaaatctggtgtggtgtagaacaagagttacctgtgggaggcctgtgataatgccctttatgtctcaacatccattttcgtgcattccatgttcttcaatacggacttgaaacaggaattctgattttcttattactaccttcaagtttcagctttttattttttcctagcaagcctgtgatttaattttttttctcttccatgaagttcaagcaagcattatcaaagtcgagcaaccaagctgaaattcataagtagaaaaaaatgatatctagaacatattgggattaggggctctagctgagtagattagatggttgtactaacactccttaggacttgggtcttcttttgacaaaatgttcaaggagtttgaatgatatgtattggacatgacagtcaagtttggagcatgaaagaaaccaacatacacggtgttccctagggt

SEQ ID NO: 117648 - DNA, 1075 bp, Zea Mays
tgagttccgacgttgcccgggaggggtggggaggggagcggcccatttggatttggaagcatcctcggcggcgagcggcggcgtcgcattcactctcatctctctctcacacagattccggctccttttccctctcccccaattcaaaatcaacccccctcgtcgcaaggccacaacaactccactcctccccatccctagctagccactagggtttgccagcctttgcagcgtcgcgctcgcgtctcatgcccttgcccatcgacggtagacgagagcgagcggtctgtgttcgtggagcaggggccggcgccatggagatcaacatcgtggacaagtacgagaagctggagaaggtcggggagggcacctacggcaaggtgtacaaggcgcaggacaaggcgacggggcagctggtggcgctgaagaagacccgcctcgagatggacgaggagggcatcccgcccacggcgctccgcgagatctccctcctcaacctcctctcccactccatctacatcgtccgcctcctcgccgtcgagcaggccgctaagaatggcaagcccgtcctctacctcgtcttcgagttcctcgacaccgatctcaagaagtacctcgacgtctaccgcagggggcccagcgccaggccgctccccgcgacactcatcaaggtactaaccacgcttacgtgcttcttctcactcggagagtagctattagtcacctgccctgcccagttcacctctatcgtctgtcaaaatgatacatttctgtagttgatctatcttctgcgctccatgaccagaaataagtagcctgtccgttacgaagccgaaccttgtctactgcatatgctccgatcgatccctgcaattgaccacctcgtgaccagagcaaactagcccgcgcgttacaaatggtgttttcagcactgataaaggtgtgtatctaattggatcatcataggttgaaagcatcgggccgtaagcccgtaaaatcgaaaacttacctgtgaaattaaattcggatgttctgtctgtacaagttctcctggttctgcactgaacataggcgc

SEQ ID NO: 117649 - DNA, 2263 bp, Zea Mays
tagacatctcacctctgtgacaactaccataaggtgaacgtggcgtggctccctcctcgatggcgagagggcgaaggcgtcgacgagctcgatgatggcgaggctcggccgcacggcgaaggtgctgcgcaggttcacgacgtctctcctcctgatgacgtcggtcgtgcatggtggggcatggacgcagaacacgacgaactgctggcgaagacttcggtgcgatgaacgacgatggcgatgctcgacgacggcgatccggccacggtggccacggctggccgggccacgggacgcacgaggcggccgcccgagctgcacaccgcgggctgcgccggcagcgcgtcgcgcgctgcgccgggacgccgggctcagctggagaaggggaacgacaggctcaggcgggctgcgcgtcgtgccagactgtgatttgcagagaacctcgtcgggacgggctcggccatggctgcagcatgactgcgcgccacgagcagggcccggggtcggccgtgcacgcaatggagaagacaaggaggcgaggggaccgaggccaggggaggtagagggagatgggcgccgtcgaggctggcctggcagtttttttggcggcgtgggcgcagggaatcgggtgtttggagaagaagacgtgcagcggcgactgaagcgcggctgggagctaggggaagcgtgcaggcgcgcgtgggccagcagggtgcgctaggcgctgcccacaagcgcgagcgcgcaacgcgctggggtgggccagcgacaggggcgcgacgcgctgggccgagtgggggcgctggccgagcaggctgctaactccacgcgcgggagtgggctgccggcgcgcaggagccgcgcgaccgagatgggccagcgcaagccgagggggagaagcgtggcctgggagcgggcgaacgcttgggccgcgctggggcgcacctcgctgggccgcgggaaggcctacgcgctgaagagcgcgagcggggttagggagctgggccgagacgcgggaggggggcacgggggtgaggcaggccaagagggggagaagggcacatgtgtcggggtggccgagcggcccaggagggggcgcagccagctaggggagtctaggctgggctttttccatttctcccttttttatctttttctttccatttcgaatttagctctatcttttaaattcaaaaattagcatgctacgtgagtttaaatagaggcacatcaacttaaaacatcatacaattttaggtgctctagcatgtgatgcaatcacaataattcctctagggtttgaacatactatgtttaatacttatatagtacaaaataactcctcaatatttagaaaaagagaagtaaatcaaataaagaagagggtaacacccaaatttgctggacattggaaaagaaattttatacctccaaattcatggtgttacagaattgaatgctcggtagtagtcgctattttacctattccttttaccttgccttgcttcccatctctaaagatgatcgtgtcatgagaatccttgttcttgatgttggaggtgaacatgttcacctcccccatcatgtggtttgtgcatccactaccaatgattcggtagaggccccggatgcataaacctgcaaggtatttaggcatggtatttaggtccccaacttgtgttgggtcctgtcaggttagttacataagtttttggaacccaaatgcaagtcttacctttattgcattttggtcccacatttgtagcaacaattttatcatttttacaatgaatcacataagatgcatcaaaagtgcggaataaaatgggagatccatgagatgcattcctatccttaggcatatgagaaacaacatgagaagcatgatgcctagttctactattagaatcactagatgaagcatgcatagtgcgaggagtaaaactataattgcaagtaacataataagcattataagaaacattcttggcatgagaatataagtaagcatggtttttcttctcatgaatagaatgcaagctattagtcatatgtgccttccccttctttgtgaagttgaggaccttttggctcttagtcttcttggttcccttttggaaaccaagtccatccttaatggagggatgtctaccaatgataaagacatccctatcaaacttaacgttttctacttcatttttgcaagttttaagttgaacacttaattgagtaatttcatcatttaattatgcgacggtagaat

SEQ ID NO: 117650 - DNA, 1616 bp, Zea Mays
catggatgatcgatcgatccatccatccatcctagcagactgtcaggcagtgtccctctcgttctcgtccatcttcttcctttcctccattccatgaaggagaagaagacatatatatcatagaatgatagtatgacggaggcttgacagcagcagcagccgcacatcacatggatccttctgtttccgtttgccgcctccacccgggcgtcgccgtcaccggcttctgccccgcctgcctccgtgaccgcctctccggcctccaccctccctccgccgctgacctacgccgctgcaagtccttctcctacgcgcgctctgcagccgcggtggagccgcagcgccgctcatgcgacctcttccgccacggtcagcccatcgcagcggcggtaccggaggaggaggaggaccagcaggagcacggccgctcacacagtcaccagtccaaaaagtcgtcgtctttgggtggcctcctgggcaacaagctgcagcaatggcgccgcaagaacaagaaggagccggagatggaggtgccctccagctgggacgcccggttgggacccgtgccggcgctcggccgcctgccggccacgatgctgtccctgcccgtggaagaggacgacgacagcatggcagcgccggcggtcccgcgctccgatgggcaaatccccgtggaggaagactactgctactactacgacaacgctaacaatatcaatgctgcggcggcggtgcccggcggctccgagcagacgagggactactacctggactcgtccagctccagcaggaggcgccgaagcgtggaccgctccaccacctccgggcgcaactccttctctgacgccaacagcagcgaggcggcgtgcaggatgatgatgatgatgaatgccgccgccaatggcaatgccagggtgtcaccggcgggcatcgccgccgcagagagtctgcaccactaccacgagtcccatcatcatcaccatcaccagagcgtgcttgtccatcatcagtgctacagagaagaagatgagcagcagcaggaggcctataatctccgcgccggcgacttctccggtagcaatggcgtgccggcgagcaagcctaataagaaggggattaaggggtggagcatctggggcctcataagcaagaagagcagcagcagcaggaagcactctgcagctgggggaggagcagtagcaggaggaggaggaggaggaggagagtacgagtacccatggccggagctccgggcaagggggtacaacgggcagatgctccggtgcaacagcagcataagcgcgagaagctccttcagcggcacaggcactgggagcgggaggaggagcgtctctggtgtggacatgcgcgataagtataacagtaacaatggcggcttgaggacgaggagggacgaggtccttctggagaggcacctcagcacgaggtcgtcttcttactcgagatcaggacatcatgacctggatccagcagctatggcaccgccgcagatgggaatgcagttgagcagccggccgcccaacatcccgaggcgctcctcttccaactccaagcatgaattgggcaagacaaggaggagcacacttggactctag

SEQ ID NO: 117651 - DNA, 1152 bp, Zea Mays
agattggaatccaattccagggctacacatgcatccatggaattcatgacttgcacgcatgtggcggcgaggcaagtggcaacgtgagcggcggtacggcacaaggccacgacaggccaaaagagaggagacggagcaatggaattggaaggccacgagaggagtctgagctcgccgctttagcgagcgcaagcagagcctgccaaaaggctagagaaaaaaaaatccgccttctcctcccagtcgcaggccaggctcagcctcccctctcccctcctcggcatcttcgccgccggcgatctatctctctcacaatggcggcgcccatgtcagccatcgactcagcgtggcagctcctgatcgccaacttcaccgagttccagctcgccaccgtcgtcaccttcctgctccacgagaccgtcttcttcctctccggcctcccctccctcctcttcgagcgcttcggactcttcgccaagtacaagatccagaagaagagcaacacctctgcttaccaaaacagatgtgtcttgcgcctcattctctaccatgtatgtgtgaacctgcctgtcatgattttctcgtatcctgccttcaaattcatgggtctcaggagctctcttcctttgccacattggtcggttgttgtatctcaagttcttttctactttgtccttgaggattttatattctattgggggcacagggcattgcatacgaaatggctatacaaacacgttcacagcgtccaccatgagtacgccacaccctttggtttaacatcggaatatgcccacccagctgaaattttgttcctgggattcgccacagttgttggtcctgctcttactggccctcatctcttcaccctgtggctgtggatggtgttgagggttttggagacagttgaagctcacagcggctatcacttcccatggagcccatcaaatttcctgccgctgtatggcggctcggacttccatgactaccatcaccgtgtgctgtacacaaagtcagggaactatgcctcaacatttgtttacatggactggttgttcggcacggacaaggattatcgcaaggcaaagaccattgaggagaaagaagggaaaaatctgtagattgtggaagctgctcagcaagactggcgat

SEQ ID NO: 117652 - DNA, 1607 bp, Zea Mays
agattggaatccaattccagggctacacatgcatccatggaattcatgacttgcacgcatgtggcggcgaggcaagtggcaacgtgagcggcggtacggcacaaggccacgacaggccaaaagagaggagacggagcaatggaattggaaggccacgagaggagtctgagctcgccgctttagcgagcgcaagcagagcctgccaaaaggctagagaaaaaaaaatccgccttctcctcccagtcgcaggccaggctcagcctcccctctcccctcctcggcatcttcgccgccggcgatctatctctctcacaatggcggcgcccatgtcagccatcgactcagcgtggcagctcctgatcgccaacttcaccgagttccagctcgccaccgtcgtcaccttcctgctccacgagaccgtcttcttcctctccggcctcccctccctcctcttcgagcgcttcggactcttcgccaagtacaagatccagaagaagagcaacacctctgcttaccaaaacagatgtgtcttgcgcctcattctctaccatgtatgtgtgaacctgcctgtcatgattttctcgtatcctgccttcaaattcatgggtctcaggagctctcttcctttgccacattggtcggttgttgtatctcaagttcttttctactttgtccttgaggattttatattctattgggggcacagggcattgcatacgaaatggctatacaaacacgttcacagcgtccaccatgagtacgccacaccctttggtttaacatcggaatatgcccacccagctgaaattttgttcctgggattcgccacagttgttggtcctgctcttactggccctcatctcttcaccctgtggctgtggatggtgttgagggttttggagacagttgaagctcacagcggctatcacttcccatggagcccatcaaatttcctgccgctgtatggcgggtaagtaagctagatcattgttttccttccccccccttaaaagagattgtgcttgtttatttgaagctgaacgtctggccatttgctgagcttttgtcatggtgaatagctcggacttccatgactaccatcaccgtgtgctgtacacaaagtcagggaactatgcctcaacatttgtttacatggactggttgttcggcacggacaaggattatcgcaaggcaaagaccattgaggagaaagaagggaaaaatctgtagattgtggaagctgctcagcaagactggcgatagagtttcactcatggaaggagatatggatgcaccctagaaacagtcagtttatctcctgaccatcgatactataggttgagatattgatttcctgtgtttgctatgatcaagaatgaggccctggtggccctggtctgtcatgaactgaatttgatgatttgtcatctcctcctggtggtttgctttgcgtttctttcgtgactcgacgggatgtatacatatggaatggcctggcagcagtaataaccatctgaattgagtcgtcagcgatggtgggggtagctttgcaccctagaaactttcctctgcacgcttgtgtattttgttggtaatcgattccggaa

SEQ ID NO: 117653 - DNA, 1457 bp, Zea Mays
atctaatcatacaaattgctgacctccgtcatcagcatcttctctctctctctctctctgctgagctgcttactcattccagcttcaattttctttgtccgtgatctagctagcttgcatgtctctctagagtcgatctgaatcgatacaattgagactagctactacgagtttgcagatgcatagctagctagctctcaatcacatgaactcctccagcgccaccgctatggatcaaataggcaagtactggggcatgtggggagcaaggagaagcagcagcagcagcagcacgatccccatctctgcttgggctgcggcgtacggcggcagcagcgagccgtcgtgggaggagcaggccttcgcacgcgacgcggcggaacacctcggcggctgcgtctggccgccgcgctcctactcgtgcaccttctgccagcgcgagttccggtcggcgcaggcactcggtggccacatgaacgtccaccgccgcgaccgagctcttctccggctggggggctcgtcctcccccgaggacgtgcacgccaccaccaacgatcagccacacccgcagcaaggtgctctcctgtacagggcagcagcctctaaccctagcactaccacgccgagtactactgcagctgcaggtactactgctgccggcccagcagcagccataaccatagcaggtgcaggggatggagatgccaacaccaccaccaccactacttacttgtcaagaattatcaaggagagcaagaacaagcgcttcatgcccatgccagatcactctgtcgcggggatgagagaagatcaggcggcggccatagatgatcatcgtcataatgaagatggcgacagctggcggtcagcctcagccgcgaaaaagaggaggcgtctggatcatccgttggcaacggcggcggcgcttctgatctttgtgcagccagcaccaaaggccgctaccaatgttgcagcatgtgaatcacaaggaggagctgatcatgagacaaaggtaccgcacacgacaaccctaacaagccctagctctagttcccctcttcttctggatcaacgacatgaattggatctagagctaaggcttgggactacaccaaaagttacgtacatacatggcaacgatacacgaagctagctagctagttcgtctgcacgctagtagttattaagcagatcgatttatttggtcttttgaatttactatcatatcactagttactcttgcttggttgttcatcatctttctcctcttcaatttctccccctttttcctttcttctgctatccatggggccgtacagactattacattttttggccaaagagctatacctctccctctttcaattcaatctcaactattgttcttgtttcaatacatacataaaaagttaaggggcatacgaatacaatacatagctcaaacattcttcctctgt

SEQ ID NO: 117654 - DNA, 1569 bp, Zea Mays
cctcatcgatcgtcagctaatataatagcatatatatactccgatctcagaattgaagctccgatccatccgtcgaccacctatggctgccgctgcagctttctcctccacttccgtcgtcgctgctctcgcggcgagcggcttcctcggcaagaagctcgtcaccagcatcatcatcaggaataagaagaaggggtacgactccctgcatggcgccacgaccaccatcagagtcagagccatggcggtgaacaaggagacggagcaggacaggtggaggggcctggccttggacacctcggacgaccagcaggacatcaccagggggaagggccgcgtggacccgctgttccaggcgcccatgggggacggcacccacgtcgccgtgctcagctcctacgactacatcagccaggggctcaggcactacagcttggacaacatgatggatggctactacatcgctcccgcgttcatggacaagctcgttgtccacatcgccaagaacttcatgcccctgccaaacatcaaggtgcccctcatcctgggtatctggggaggcaagggccaagggaagtccttccaatgtgagcttgtcttggccaagatgggaatcaaccccatcgttatgagcgccggcgagctggagagcggcaacgccggcgagcctgcgaagctgatccgccagcgctaccgcgaggcggccgacatgatcaagaagggcaagatgtgcgtgctgttcatcaacgacctggacgccggcgcggggcggatgggcggcacgacgcagtacacggtgaacaaccagatggtgaacgcgacgctgatgaacatcgccgacaaccccaccaacgtgcagctcccggggatgtacaacaaggaggagaacccccgcgtgcccatcatcgtcacgggcaacgacttctcgacgctgtatgcgccgctgatccgcgacgggcgcatggacaagttctactgggctcccacccgcgaggaccgcgtgggcgtgtgcaagggcatcttccgcagcgacggcgtccccgacgaggacgtggtgaggctggtggacgccttcccgggccagtccatcgacttcttcggcgccctccgcgccagggtgtacgacgacgaggtgcggcggtgggtggccgagaccggcgtggagaacatcgccaggaggctcgtcaactccaaggagggcccgcccacgttcgagcagccgaggatgacgctggacaagctcatggagtacgggcgcatgctggtggaggagcaggagaacgtgaagcgcgtgcagctggcagacaagtacctcagcgaggcggcgctgggcgacgcaaacgacgacgacgacttgtatggcaaggcggcgcagcatgtccgcgtgcccgtgccggaggggtgcactgaccccaaggccggcaacttcgaccctaccgccaggagcgacgacggcagctgcgtgtacaactaatataattgtccaaacaatttctgtggcacgtacttaagtttgagccaggatacaaactttggccgctaatggttgctgtcgccggtcaagagggc

SEQ ID NO: 117655 - DNA, 1535 bp, Zea Mays
ccgtgtgcgtgcctcgacgacctcactactttgagctgcaaggtccgaactaaaaagcacaagaaatggcggccgccttctcctccaccgtcggagctccggcctccaccccgaccaggagcagcttcctcgggaagaagctcaacaagccgcaggtgtccgcggccgtgacctaccatggcaagagctccagcagcaacagcaggttcaaggcgatggctgccaaggaggtggacgagacgaagcagaccgacgaggacaggtggaagggcctggcctacgacatctcggacgaccagcaggacatcaccaggggcaagggcctcgtcgacaacctcttccaggcgcctatgggggacggcacccacgtcgccgtgctcagctcctacgactacatcagccagggccaaaagtcttacaacttcgacaacatgatggatggcttctacatagccaagggcttcatggacaagctcgtcgtccacctctccaagaacttcatgaccctgccaaacatcaaggttcccctcatcctgggtatctggggaggcaaaggccagggaaaatcgttccaatgcgagctggtcttcgccaagatgggcatcacccccatcatgatgagcgccggcgagctggagagcggcaacgccggagagcccgccaagctcatcaggcagcgctaccgtgaggcctccgacctcatcaagaagggcaagatgtcctgcctcttcatcaacgacctcgacgccggcgcgggtcgcatgggcggcaccacccagtacacggtgaacaaccagatggtcaacgccaccctgatgaacatcgccgacaaccccaccaacgtgcagctcccggggatgtacaacaaggaggacaacccccgcgtgcccatcatcgtcaccggcaacgacttctccacgctctacgcgccgctcatccgcgacggccgcatggagaagttctactgggcgcccacccgcgaggaccgcatcggcgtctgcaagggcatcttccgcaccgacggcgtcgacgaggagcacgtcgtccagctggtcgacaccttccctggccagtccatcgacttcttcggcgcgctgcgtgcccgggtctacgacgacgaggtccgacggtgggtgagcgagaccggcgtcgagaacatcgccaggaagctcgtcaactccaaggagggcccgcccacgttcgagcagcccaagataacgatcgagaagctcttggagtacggacacatgctggtggcggagcaggagaacgtcaagcgtgtgcagcttgctgacaagtacctcaacgaggctgctcttggtgaagccaacgaggacgccatgaagactggctccttcttcaagtagaaagcaactctttgctattgctagctaggcgcgaggccggcataggatcgaggaggtgaatatatatattacttggatagttttgtaatatatatatatatattactgaaccaggacatgcatacatatattcgtctatataatggatcatgtatatttcatttcagg

SEQ ID NO: 117656 - DNA, 1979 bp, Zea Mays
ccgtgtgcgtgcctcgacgacctcactactttgagctgcaaggtccgaactaaaaagcacaagaaatggcggccgccttctcctccaccgtcggagctccggcctccaccccgaccaggagcagcttcctcgggaagaagctcaacaagccgcaggtgtccgcggccgtgacctaccatggcaagagctccagcagcaacagcaggttcaaggcgatggctgccaaggaggtggacgagacgaagcagaccgacgaggacaggtggaagggcctggcctacgacatctcggacgaccagcaggacatcaccaggggcaagggcctcgtcgacaacctcttccaggcgcctatgggggacggcacccacgtcgccgtgctcagctcctacgactacatcagccagggccaaaagtcttacaacttcgacaacatgatggatggcttctacatagccaagggcttcatggacaagctcgtcgtccacctctccaagaacttcatgaccctgccaaacatcaaggttcccctcatcctgggtatctggggaggcaaaggccagggaaaatcgttccaatgcgagctggtcttcgccaagatgggcatcacccccatcatgatgagcgccggcgagctggagagcggcaacgccggagagcccgccaagctcatcaggcagcgctaccgtgaggcctccgacctcatcaagaagggcaagatgtcctgcctcttcatcaacgacctcgacgccggcgcgggtcgcatgggcggcaccacccagtacacggtgaacaaccagatggtcaacgccaccctgatgaacatcgccgacaaccccaccaacgtgcagctcccggggatgtacaacaaggaggacaacccccgcgtgcccatcatcgtcaccggcaacgacttctccacgctctacgcgccgctcatccgcgacggccgcatggagaagttctactgggcgcccacccgcgaggaccgcatcggcgtctgcaagggcatcttccgcaccgacggcgtcgacgaggagcacgtcgtccagctggtcgacaccttccctggccagtccatcgacttcttcggcgcgctgcgtgcccgggtctacgacgacgaggtccgacggtgggtgagcgagaccggcgtcgagaacatcgccaggaagctcgtcaactccaaggagggcccgcccacgttcgagcagcccaagataacgatcgagaagctcttggagtacggacacatgctggtggcggagcaggagaacgtcaagcgtgtgcagcttgctgacaagtacctcaacgaggctgctcttggtgaagccaacgaggacgccatgaagactggctccttcttcaagtagaaagcaactctttgctattgctagctaggcgcgaggccggcataggatcgaggagggcgccaccaaaatgcattggagctaacgaacagcgaggggcgatcatggcagcagctgccactacatcttctaaacttgccatttttattatccctgatccatgtattactcttaatttgtacgtactacaatacgggatctggccaagcgcgatatatagctgggcatgcaaagtttttgtcgatgttttttttttgaaagaaacaaggtagaagggctagctgtgcttgttaaattaaaaagaaggtgagccaagactagcagaacaaggctgtacaaaaaaaactacacaaagtgtgccaaagaagaactctcagtgtcggcctatatatcaaaattgccatatgtttcactcctgccatgatccacactccgctttcatcttttattttctgtatgttgggctgtgtgtatgtgttggtgttgggcttggaccttgtacttaggggtgtttggttccttcagtcatatgtgtttgcaacctatatgagtaccctatctgacggagtatccccgtgacacaacgaacatgtctggtgtcttatggacctctcc

SEQ ID NO: 117657 - DNA, 1009 bp, Zea Mays
cagcagcagcaagcttgagccactgctgcacgtatattattaagatcgaaagccaccaccatggccttggcctctaataagctcctcatcaagtacagcttcgtcacggtggcattcttagtcgccagcactcgtgggagtggcaccatccagctgatcttggtgaacaactgcgcggaatccatctggcccgggcttctgggcaccgccggccagccgacgccgcagtcgggcggcctccacctggcccccggcgacgaggcggccttcgacgtgccggtggggtggtccggccgcgtgtggccgcggcgcggctgctccttcgaccagcgcgagcgggggcagtgcgcgacgggggactgcggcggcgtgctccgctgcgacgggcggcccggcgccgccccggccacggtggtggagatgacgctgggcacccccaagtccccgctccacttctacgacgtgtcgctggtggacggcttcaacgcgccggtgtccatggcccccgtgggcggcggcgccgggtgcggcgtggccgggtgccaggcggacctgaacgtctgctgcccgtcggcgctggaggtgagggaccgcgaggggagggtggccggctgccggagcgcctgcaaggccatgggaggggacaggtactgctgcacgggggactacgcgtcgccggacaggtgccgccccaccatcttcgcccacgtcttcaaggccgtgtgccccaaggcctacagctacgcgtacgacgacgccacctcgctgaaccggtgcaaggccagccggtacctcatcaccttctgcccaccgccgacatccaggaaatgacgaccacatccatggattgcatcttcaaaataataatacttactaaatgtccctacggtttttatatatcagtcatgtagagcttgtttaattaggatacttatttaaacatattccaatcggagaggtctctatccaacgatcaattgttcataaaaaataactacaatgtccatgt

SEQ ID NO: 117658 - DNA, 358 bp, Zea Mays
cttgcgcgagcacctggtgcgcatcagcatcgagcgttgcgaccgtggtgacacccttaagcacgccatcagtgccaacttttttctgggtaggcgccagctgcttgtagtgcctgcaccacgacgcgaagaactcaaccagcaccatgccgctcgagttcagcacttgcatgaaatgtgatacacgccacaccgctcggagaacctaaatggaggcaccaatctggtggctgagggacagtaggagtcacctcgatttgaagttgttagggttgggctggaggatagggaggcgtcgttcgactctgatcccacacgacaggccggcagggtgaggcggaccacggcggcgcgagaa

SEQ ID NO: 117659 - DNA, 490 bp, Zea Mays
cgcattgccagcccccgccctggcgacttgtccggccaatgtgggtgtttagctcatgtcgttgccgctcatccacatgcaggaggagggagccaccattgccgcatatccctaggagcttcttgagggttagatacgggaggatgacagttagagtagtgatgaggtaccttgttaacaagctgggccttgaggacgattcacagattaatccaaaagctgcagagtctctagcagatccttctgaatatccaaatctatttgaagactgacaggttgctctaactgtagaaaaaagtgttgcgtctcagaggggcaattatcttcctgctgaccagtatgatgctagggtccccctggacactgtgttcacagcttcagttatcctctgtacatgagcagattgagaatcagcatgccagtttgcttaatcttctccagtgagcagcactgaccgtttggtatgaatcatgcacccattcaatgagtc

SEQ ID NO: 117660 - DNA, 831 bp, Zea Mays
cttcaaagaaccttccttcagaataatgattctgtactgacatttttatttcttaggtaatgtcaaatttactgtattattatggcatgtgtaatgtcgtgaaggatattttgttgcaatgctactttagaaagggagtacgtggaggctcagctgaacctgaatcagatattgtgcaggcttgcagaagctttctagatcaacagcagtgcattaatgtgtggcgatttatctaaactatcaacgagagaaaagacttgacagagaacctgaagcagctacagtgcaggacactaatttttgttggtgagaattcccagttccatgctgaagttgtgcacatgactgcaaagcttgataggcgatatagcgctcttgtggaggtacaagcttgtggctcggttgtgacagaaaagcaaccacacgcaatgctgataccaatggagtactttctcatgggatatggactgtataggccaagacagataaactatagccctcgtagccctctgaatccgttttgtatatcaccagagctcctctctcctgagagcatgggggttaagctaaagccaatcaagacacgagccaaccttaaagcataggaacaggtgatgagaatgcgtaggaactgatgcgcatcccttgatttttttgtgctgaagtgacatagctattgtttccgtgatgtacataagacaagaggttagtcgggtcagggttgggtgggtggtcgattccattgatttgtagcctttaaaacagttgtacattgtcacagatttatttgttgaagggagaagaaataataaggggagatgagatgttgcc

SEQ ID NO: 117661 - DNA, 1966 bp, Zea Mays
gaaaaagtggtatcccactgcattatccagaaccgaaaaaaaaaactctgcggagattgaccgaccaccaccaccgcctgcgttcccgcgccgccaccgccatggctgccgctgccccccatgcatactcctccctcgtgcctgtttcggctgcgcggcctctctccggaagcacagtttctttcggtgcttcgtgccacaagtggaggaaggttccggcatggcgactccactgtgttgctgaagacgaaggcctgcttgactacattatgtgcatattgtgattctcagcagaggaagtcaaagattttggagtcaatatggcactatccatgctaaaattttacaaacgagaaatatcacctttactaccttcaagctgccgatatgtaccaacttgcagtgagtactctatgcaggcgtacaaacgatatggtgttgtaaagggttccatcttgactgcttggcgcctttgccgttgtaatcctcttggtggatatgggtatgatcctccaaaatggtttggcgaggaagatgtacctctgcaatagtaatgcctagtaattgaaagtacaggcattgtaattcttcagatccagacttgcagcagtttttatgtaatttactgaaactaaacccagaaacacaaggataaaattctgcaatatctatgcacctctgaaggagcatgtattttttttgtgtatgcctgtatggttattttatctagttctcgtgcaattcctccaaggtgattgtatgagcgaaattcatttattacctacaattaacatccataattcaccatattcgcctgtgtattctagtccgaggatccaactattttttctccaaagatactgatgacccaactgtcttttgctgcttctaaaatccataagggcttgttcggttagtaatggattgaaggggattggtgaggatatttcgagaaaaaaggggattggtgaggattaaatccctttctagtcaaaattgagtagaaggggatttaatccccctcaattctctccgatccagatgcaaccgaacaaggcctaaagaatttttcagtgaaacagatagatgtatggttgtagcttgtaacacttgttaggacagctaaaggactagcatcgacatatttgttattgaacatgatgatcatttcaaaattcaaaactaccacttcgttaaaaaattcaatgcattgtaggaacaattgtagttaaggagttcaagggaagactgtattcttgcagagtttgtaccatgttgtaatctttggctcacgggtatgtgctacacctgccgtacatttaaatatcttccttaggtatgctcatctgaacttcaggtcaccatggccccatatccttgtatgtggtgcttatttaattgtttcttctcggggtatcatatctgttcttgtccctgtccaatattttatacggtacatgctgtgtagatttggatacgtcgtcacatcgattcatatatcccagtggacctatcactggtcaaacttttttgtttttcagattgattatttggtgtccattttgatgttttgtttacccattccccatttccttttttcaggttctggtcactgtcagaaacaatgcacaactgtatgtggtagtttcaagggaaagcctccccatcgactatactgccaaggaacttgattggatttctgagatttctatgctgaagatacataaatggtaatggattttcttctatacaaacatggcccaaaacaaagcatcttctataaactactaagctacttggtgaccagtctatcagtatagttgaggatttgtattctaggaatcctattggtataacatgaggactgtgtagtttagtttagttaaaaaagtatactatctatgatctggaagaaaactgatcagaaaattcttttgatgcacgattttaacatgatcatcatgct

SEQ ID NO: 117662 - DNA, 1927 bp, Zea Mays
gaaaaagtggtatcccactgcattatccagaaccgaaaaaaaaaactctgcggagattgaccgaccaccaccaccgcctgcgttcccgcgccgccaccgccatggctgccgctgccccccatgcatactcctccctcgtgcctgtttcggctgcgcggcctctctccggaagcacagtttctttcggtgcttcgtgccacaagtggaggaaggttccggcatggcgactccactgtgttgctgaagacgaagcagaggaagtcaaagattttggagtcaatatggcactatccatgctaaaattttacaaacgagaaatatcacctttactaccttcaagctgccgatatgtaccaacttgcagtgagtactctatgcaggcgtacaaacgatatggtgttgtaaagggttccatcttgactgcttggcgcctttgccgttgtaatcctcttggtggatatgggtatgatcctccaaaatggtttggcgaggaagatgtacctctgcaatagtaatgcctagtaattgaaagtacaggcattgtaattcttcagatccagacttgcagcagtttttatgtaatttactgaaactaaacccagaaacacaaggataaaattctgcaatatctatgcacctctgaaggagcatgtattttttttgtgtatgcctgtatggttattttatctagttctcgtgcaattcctccaaggtgattgtatgagcgaaattcatttattacctacaattaacatccataattcaccatattcgcctgtgtattctagtccgaggatccaactattttttctccaaagatactgatgacccaactgtcttttgctgcttctaaaatccataagggcttgttcggttagtaatggattgaaggggattggtgaggatatttcgagaaaaaaggggattggtgaggattaaatccctttctagtcaaaattgagtagaaggggatttaatccccctcaattctctccgatccagatgcaaccgaacaaggcctaaagaatttttcagtgaaacagatagatgtatggttgtagcttgtaacacttgttaggacagctaaaggactagcatcgacatatttgttattgaacatgatgatcatttcaaaattcaaaactaccacttcgttaaaaaattcaatgcattgtaggaacaattgtagttaaggagttcaagggaagactgtattcttgcagagtttgtaccatgttgtaatctttggctcacgggtatgtgctacacctgccgtacatttaaatatcttccttaggtatgctcatctgaacttcaggtcaccatggccccatatccttgtatgtggtgcttatttaattgtttcttctcggggtatcatatctgttcttgtccctgtccaatattttatacggtacatgctgtgtagatttggatacgtcgtcacatcgattcatatatcccagtggacctatcactggtcaaacttttttgtttttcagattgattatttggtgtccattttgatgttttgtttacccattccccatttccttttttcaggttctggtcactgtcagaaacaatgcacaactgtatgtggtagtttcaagggaaagcctccccatcgactatactgccaaggaacttgattggatttctgagatttctatgctgaagatacataaatggtaatggattttcttctatacaaacatggcccaaaacaaagcatcttctataaactactaagctacttggtgaccagtctatcagtatagttgaggatttgtattctaggaatcctattggtataacatgaggactgtgtagtttagtttagttaaaaaagtatactatctatgatctggaagaaaactgatcagaaaattcttttgatgcacgattttaacatgatcatcatgct

SEQ ID NO: 117663 - DNA, 981 bp, Zea Mays
gaaaaagtggtatcccactgcattatccagaaccgaaaaaaaaaactctgcggagattgaccgaccaccaccaccgcctgcgttcccgcgccgccaccgccatggctgccgctgccccccatgcatactcctccctcgtgcctgtttcggctgcgcggcctctctccggaagcacagtttctttcggtgcttcgtgccacaagtggaggaaggttccggcatggcgactccactgtgttgctgaagacgaagcagaggaagtcaaagattttggagtcaatatggcactatccatgctaaaattttacaaacgagaaatatcacctttactaccttcaagctgccgatatgtaccaacttgcagtgagtactctatgcaggcgtacaaacgatatggtgttgtaaagggttccatcttgactgcttggcgcctttgccgttgtaatcctcttggtggatatgggtatgatcctccaaaatggtttggcgaggaagatgtacctctgcaatagtaatgcctagtaattgaaagtacaggcattgtaattcttcagatccagacttgcagcagtttttatgttctggtcactgtcagaaacaatgcacaactgtatgtggtagtttcaagggaaagcctccccatcgactatactgccaaggaacttgattggatttctgagatttctatgctgaagatacataaatggtaatggattttcttctatacaaacatggcccaaaacaaagcatcttctataaactactaagctacttggtgaccagtctatcagtatagttgaggatttgtattctaggaatcctattggtataacatgaggactgtgtagtttagtttagttaaaaaagtatactatctatgatctggaagaaaactgatcagaaaattcttttgatgcacgattttaacatgatcatcatgctaaatttataatctggtaaagtttattatcatattcagaa

SEQ ID NO: 117664 - DNA, 1694 bp, Zea Mays
agcaaagctccttctcctcctcctcctcctcctcctcctcctcctcctccttcctgccgtcgccgacgactgccccacctgtactctcccctgcgtcctcctcctcggctctgctacacgccttccttgcttcctccctccaggcaggccagctccttcctcctcacgctagctcggtgtcttccttttcccttttccagcgcgcgccggccggccggccggccaaattccaatcccatccaccatcttgttcttgtcttctccgacaattaaccatcaatcccaaaacgtcatattcatcttgtcgaggccataaagtcacaacaaacacgtcgtccatgcatccaccaccgcatccatccatgaagcccggcggcgaggaggaggaggatgtgcaggtgctggtggtgcggtcccaccaccactcggaccagagcagcacgaggagccaccaccaccagcaggtcgtcatcagggcgcggccctactaccggcggtggtcgccgtggctcgtctccggcgccaccgtggcctgcgtcgccatcttcctcgtcaccatgtacgtgaacgactgcccgacgcacaactccaactgcgccgccgcagggttcctcggccgcttcgccttccagccgctccgcgagaacccgctcctcggaccctcctccgccacgttagtgaagatgggggctctcgatgtggctaaggtcgtccatggccggcaaggatggcgtctgatcacctgcatgtggctccacgccggagttgttcacctgctcatcaacatgctgtgcctcctagtcgtgggcatacgcctggagcaagaatttgggttcgtgaggatcggtctggtgtacctcatctctggttttggcgggagcctcatgtctgctctcttcatacagtccagcagcgtctccgtgggggcctccggcgctctcttcggcctcatcggatccatgctctctgagctcatcaccaactggtcactctacgcaaacaaggtggcggcgctgctaactctgcttctggtgatcctctccaacctggcgctgggcctcctcccccgggtggacaacttcgcccacatcggcggcctcgtctccggcttcctcctcggcttcgtcgtcttcgtccgcccgcacttggactggctcacccagcagcagagaagcggcggcggcgggcaagggcaacagcaagctcctccgccggtggcagcggcgaggaaacgcaagcacaggacgtaccagtatgtgctgtggctggccgccgccgcgctgctcgtggccgggctcacggcggccaccgtgctgcttttccgcgggtacgacgccaaccagcactgcccgtggtgccactacctcagctgcgtgcccaccaggaggtggaggtgcgacgggtcgccgaccacgtgcacggccacgacgcaggagaacaacacgctcagcgtcgtctgcgagggcggcagcaaccgcacgtacgtcgtggcggcggcgtcgcaggacaggatcaaggacctctgcaatcagctctgcacctagcactgcatattcttcgtgtacatcgatccatttttactcaccgtcagagtgaggtcctagctttacagcaagagaaagaatttgttcgatttacaggcaaatatgatatttttgaaatgcagcaaacaaccaaagatttaccatttattt

SEQ ID NO: 117665 - DNA, 859 bp, Zea Mays
tgccgtcgccgacgactgccccacctgtactctcccctgcgtcctcctcctcggctctgctacacgccttccttgcttcctccctccaggcaggccagctccttcctcctcacgctagctcggtgtcttccttttcccttttccagcgcgcgccggccggccggccggccaaattccaatcccatccaccatcttgttcttgtcttctccgacaattaaccatcaatcccaaaacgtcatattcatcttgtcgaggccataaagtcacaacaaacacgtcgtccatgcatccaccaccgcatccatccatgaagcccggcggcgaggaggaggaggatgtgcaggtgctggtggtgcggtcccaccaccactcggaccagagcagcacgaggagccaccaccaccagcaggtcgtcatcagggcgcggccctactaccggcggtggtcgccgtggctcgtctccggcgccaccgtggcctgcgtcgccatcttcctcgtcaccatgtacgtgaacgactgcccgacgcacaactccaactgcgccgccgcagggttcctcggccgcttcgccttccagccgctccgcgagaacccgctcctcggaccctcctccgccacgttagtgaagatgggggctctcgatgtggctaaggtcgtccatggccggcaaggatggcgtctgatcacctgcatgtggctccacgccggagttgttcacctgctcatcaacatgctgtgcctcctagtcgtgggcatacgcctggagcaagaatttgggttcgtgaggatcggtctggtgtacctcatctctggttttggcgggagcctcatgtctgctctcttcatacagtccagcag

SEQ ID NO: 117666 - DNA, 718 bp, Zea Mays
ccgtgggggcctccggcgctctcttcggcctcatcggatccatgctctctgagctcatcaccaactggtcactctacgcaaacaaggtggcggcgctgctaactctgcttctggtgatcctctccaacctggcgctgggcctcctcccccgggtggacaacttcgcccacatcggcggcctcgtctccggcttcctcctcggcttcgtcgtcttcgtccgcccgcacttggactggctcacccagcagcagagaagcggcggcggcgggcaagggcaacagcaagctcctccgccggtggcagcggcgaggaaacgcaagcacaggacgtaccagtatgtgctgtggctggccgccgccgcgctgctcgtggccgggctcacggcggccaccgtgctgcttttccgcgggtacgacgccaaccagcactgcccgtggtgccactacctcagctgcgtgcccaccaggaggtggaggtgcgacgggtcgccgaccacgtgcacggccacgacgcaggagaacaacacgctcagcgtcgtctgcgagggcggcagcaaccgcacgtacgtcgtggcggcggcgtcgcaggacaggatcaaggacctctgcaatcagctctgcacctagcactgcatattcttcgtgtacatcgatccatttttactcaccgtcagagtgaggtcctagctttacagcaagagaaagaatttgttcgattt

SEQ ID NO: 117667 - DNA, 144 bp, Zea Mays
atgccgcgcggtgctacggtggccctcttcgccggtccatcgaggaggcctgccgtggtgctctcggcggtctttgattccacgcaggaagagccccgggcggtgcgcgcggcgcggatttggcggcggcctcatggcatgaac

SEQ ID NO: 117668 - DNA, 2055 bp, Zea Mays
atggctgaacttgcagccagcctggtggttgccccactgctgtccatgttgaaggagaaggtgtccagctctctcctcaaccagtacaacgtgatggagggcatggagaagcaccacaagaccctcatgcgctggctgcctgccatccaagaagttatcgctgacgccgagaggcagacgtctcgccgcggcgtggagaaatggctcgagcagctcaagacgacagcgtacgaggcgaatgaggtctttgacgacttcgagtacgaggcgctccgccgtcgagccaagaaaaatgggcacatcgccaagcttgccattatggcaagggtaaaacttttccctacccacaaccgtgttgcattccatatcaggatgagctacaggcttcgcaggattgttgacaccttcaaggaccttgtggaagaaatgaacacctttggattcaacaagcttgagcccgaggcaacaacgacatggaaggagtggcgtgagacagattctattatcgttgatcctgaaaatattgttgccaggtctagacatgatgagaggaagaaaattgttaacttattggtcaatggtcatgttaccgatggtgatcttatggtcgttcccattgttggaatgggaggactaggcaagaccacactcgctcagctcatctacaacgaccctcaggtcaaggagcacttccatctactaaagtgggattatcagattgatatggacaagcttatccaactatggatggccaatggttttatctcagatcaaaaaaaggtacctgctgaaaccgtaggtaaaaggattgtcaatgagctggtctcgaggtcatttttccagtatgaggagcgaagttggatggggtacaattctacaacttttttgaagattcatgacctcatgcatgatcttgcactgtctgtttcggaaaaggaatgtgtctgtataacaagggaattgattaaaaatagtgagttgcttccaagtgctgcccgccacatacttattcaaaattggataggtaaagagattcatggttatttatatggttctatgaggaaaatgtctcggcctatccaaacatttatgtttgatgggtctagtgaagctgccggtgtgcaacatttatcaagatatagttctttgcgagtactttctgtgccaggaattgggtttcatttaacaataaaaccaaagcatcagtgccaccttaggtttcttgatatcaaggacagtgtcatcaaagaacttccagatgacattagcgtcctttataatcttcagacacttttcgtcatctgtacacagatgggtgcacaagggaggaggagtgcaggagcagccaaccttaagaataagaaggaactgagacaactgtcactagagtggacaagtggtaaggaggagggactacagtgtcatgaggtgctagagggccttgaagctcatgatggactcctggctctaggaatacattactaccaaggcaccagttttccatcttggatgggattttgtgaggcagtgcatggatgtgcagtagcatttcctcagcttgagttattggaaattgacagctgtaaaaatctagcagctctaccagaagcatcgatgctgggagaagcatattgtggtggagatcatacagtggcgcgctctgcatttccagaactgaatattctcgtattgcaaggattgcgttttgaggtttatagcctgtctattgggtgtcgtgtttatttttatgcactctatgttgtgagtgctagtccatgcagttatgtggagcgagcccaacaacgataccagcctagcaagttggtctcgttgtacccccggaacaacgacaacgtgatggtggtggcgatgcgcaacgccgcggagccggcgtggcgacagcggcatcgtttcatggggaccccgatgccagtgacagaaggaggtggatacagggtcagggagaaaatgtcacttgctcctctctatctttttgagggattgattgataggagctttcgagggattaagaaaaaatgtaggacaaatggttga

SEQ ID NO: 117669 - DNA, 1741 bp, Zea Mays
cgcgcgcgcacttgcatcattgcatgcagcacacctgaacaacttgcctgttgtactgtaccacgagcagccacatgatgacgctcctcaagacgtacaaccacaacgacaagcagcaccagttctcgcttcccaagaggaacttcgtcacctacgccgtctacgcgctcatcgccgtcgcgctcctctacctgttcgtcgacccggcagctccgcctgctgcgggttcgggtgcgactgcggcatcatctacgaccaccaccaagccatcatcatcactacctccttctccttattacgaagcatcatcgccgatcatcagcacttcatcagcagccgcaccgctgtgcgactactccgacggcgagtgggtgccggacgcccggccgccgctctacgacggcacgacctgcggcgccatcaaggacgacgggcggagctgcacggcgaacgggcgcgcggacacgggctacgtgcactggcggtggcagccgcgggcgtgcgacctcccggacttctctgcggacgccttcctgcgctggctccgcaaccgccacgtggccttcgtcggcgactcgctggcgcgcaaccaggcggagtcgctcgtgtgcctgctctcgtcgcggtccccgtccccgccggacctcgcgcaccgcagcgccgacggcaggttcaggcgctgggtgttccgcgacgacagcggcggcaacgccaccgtctccgtcttctggtcgccgttcctgctcaaaggcgtcgagaagtccgagcgcgacggcgtgcgctacaaccaggtcttcctcgacgcgttcgacgagcgctggatgtcggagctccacggcatcgacgccgccgtgctgtccgcgggacactggttccggatccccagcgtgtaccaccggggcggcagggtcgtcggatgccacggctgcgacgactacgcggccgagttcaaccgcaccgtcgccgagagtaccagcagcttcttctccgtgttcagggacgccgtcagacggacgctcgccgaggccgcccgacggcatcgtcaccagagtagtagtggcgccggagggaagaagccgcagctagtggcgttcaccacgttctcaccgtcgcacttcgaggggcactggaacgagggcgcgccgtgcaagaagaaggccgacagggagctaggatacaccgagacggagatgaggaagatcgtcgtggaggcggtggaggaagccgcctcgacgatgtcctcgtccaatgatagtgcccagccgctgcggttcgcggcgctggacgtcacggcgctggccaacatgcggccggacggccacccgggcccgtacatgcgcaagaacccgttcgccgccgccggcaataacacgggagaccaccgcccggtgcagcacgactgcttgcactggtgcatgccagggccggtcgacacgttcaatcagatactgctccagaccatcctcctccgcgcgcgctagctgaaaccacctcttgcatgcatgccttcgtcgtcgtcgtccatgatctgcatcagaaacggataagtttctgatgcatgcatgtcgttgactgtacatatatacaagcagtatatataagtttcttaaacatttacttcaagttttgtttgcaaggttaaccatgcataaatgtaaactacgtacgtacttctaataaattcttgaaaaacatatccgatccttggacattttcgaccaataatatatttagttcttgc

SEQ ID NO: 117670 - DNA, 838 bp, Zea Mays
actaagccacggcgcgggcaatggactcaatgagcttcggcaatggcctgtgcagatacaggagaatggggagtacagtcccgcgtacagccccccgagagaggacatggcggcaggggaaggagcccacctcccaggagaggatatggcggtggccgtggtgaccatggctctgtcagcctcctggtccgcaacattccattgagatgcaggcctgaggaactacgtgtccctttcgaacggttcggccctgttcgggatgtttacctgccaagagattatcacactgggtaagtgttaattaggctaataaatggtttcttttgttgacatcccttcccttgtcgttacatgtgcatgccatggttggatatataaacatgtccagccattagggcttgttcggttaggggtttattgagggggattggaggggattaaatctcttccttcctgtttaggatatcattgcagggctgaggaatcctgtttctttttcaatataccatttctggccgttacatttgtattcctttttttgtaacatcaccggtggagggactcccacctgaacaaggttcaaggccagggatcgaactgtggcgagcacaagccactgcactacaaagtgcttttgcaccttccatgtttggatataaacatctctaaccatttggggttctacgaaagtgtttgggggctttctgctgctttttaggagctagcatttttggatcttatattttggccatgatgttgaaattaagactgctaaaaatgtttgcatgcgactgaaagctttgcttgggctgtacactttgctggatgtctacacact

SEQ ID NO: 117671 - DNA, 2887 bp, Zea Mays
aaatggattgtcaatgagatggtctcaaggtcatttttccagtatgaggagcaaagaaggatcgggtacaattccacaacatttttgaaggttcatgacctcatgcatgatgttgcactgtctgtttcgaaaaaggagtgtgtctgtataacagatgaattcatcacaaatatggagttgcttccaagtgctgcccgccacatacttattgaaacatcgatagagaaagaggtacatggttatttgtatggttctatgagggaaatgtctcgacccatccaaacattgatgtttgacaggtcttgtgatgatgtcgttgtgcaacatttatcaagaattagttctttgcgagtactttctatgccattatggtgtcatttgccaataaaactaaagcatcagtgccaccttaggttccttcatattacaaatagtagcatcaaagaacttccagatgacataaccatcctttataatcttcagacacttaaactttctggatgtttcaatcttattagacttcctaagagaatgaagcacatgagtgcccttcgtcatctgtacacagatgggtgcacgaggttggagtgcatgcctccagagcttggacaaatcacttcgcttcgaacaattacatggttcgtagtgggaagtggcttgagttgtagtagtcttgcggagctaaaggatttaaatattggtggttcgttaaagctaaagcaactcgaaaatgtgccagcggggagaagaaatgcagaagcagccaaccttgtgaataagaaggaactgagacaactgacactagagtggacaagtggtaaggcggaggaaaagcagtgtcatgaggtgctagagagccttgaagctcatgatggactgctggctcttgaaatatattcctaccaaggcaccagctttccatcttggatgggtatgttgaaaaacatactcgagcttcggttgtctgattgtagtaaagcagagcagcttccaccactgtgtcagctagcagaattgcaactccttcatttggaaggattgggaaatttgcggttcctgtgtagcaggtgtacatccttgacatttggaaagcttaaggatcttaagatagttggtcttgacgtttttgaaggattttgtgagacggtggatggaggtgcagtagcatttcctaagcttgagatattgcacattgagcgctgtggaaatctagcagctctaccaaaagcatcggtgctgggagaagcatattgcggtagagattatacagtggcccgctcagcatttccagaactgaagtggctcacattggaagatttgtgtagctttgagagatgggaggctgcccttgaaattgaagaaggacatgcgttattccctgtggttgaggttgttgttatcaggaaatgtccaaagttaacaactctacttagggcgccaaaggtcaaagaactaagtatacatgaagaaaacgaacatatctctgtaggagggattagatgtatgacgtcattgtccactttgcatttgatcggcgtcaagccggatggtatggagaggtgggaccatccgtcatctgtggtagatatgaaactgtggaggtgcaatttgttcttccaagttccaaccacgtgcactgccactatgggtttgctttgggcagctgcaagatctgtcagttacaggatgcaaagagcttgtctactggccagagaaagtattccaaagcttgatttcattgcggatgctatgcattaggtattgcaacaatctaattggatacgcagtggcaaatggtcctgaccaggcaacttcaggaaggaaccagcttttgccccatctagagtctctagagatagacacgtgtgaaagtctggtagaggtattcaacctctcccctgctctcaagaggatggaagttgaaggatgttgtaagcttgagtccctatatggaaagcaagagttggatgaagaggctagtagaagcgatgacatgacggcatctgcacctgttgaggagaagttgtcaccttcggtggccccagataagccccttccatcatctctagaatatctatcaatatgggattgccacgggttgtcagaggttgtcaatcttccttcgtctctgagggtaataaatattaaacgttgctccagactacgagccatgtcagggcagctgggtgcactcaagagcttactaattgtcaactgcccggagttgcgatcactagaaacatgcatcgtagatctcccatcactggaaatcctctttctgtctgtatggttgtgaaagcttggtatccttgcccagggcgcgggcaggaggaccacaagaatactcatctcttcgtgaacttacaattaggaggtgcccaggtgtaaaatggctgccttcagctctgcagcagcgactggacaacggcctcatggataaaacggatctagatttccgtctttgtcaagatcgatctccacgtctgcttgggcgtttctgctcccagctttaatttctcaagagccaaatgtcgccttcgtggaacggcttcgtcagtgattaatattacggcagcaactcatctgcaggggcattgggcaagcaacagacgaagcagaacatcatagcagaacgaatcgagaacagccgaacatcataaaaatttaagcataaaaatcttatctagtaaactagttaagctcaaatttgaacggtctacgtattcccaagaaagcgggtgatcttatatctagaagtagggacgtatgatccgatacgcctctatccaaagcctgtacagagacaagtgggttggttgtcatgagaaccctatctagcttctcatgggagctatcttacaaatttgaaaggagcttgtcgcacttt

SEQ ID NO: 117672 - DNA, 315 bp, Zea Mays
ccatttggttggttgtcaggccgcagttaaggcctccatatatgattgtcgtcgggcccataacagcatctcctccaccagtttattgtaagaataaattaagtagagatatttgtcgtcgggcagaagaaacttggacaagaagaagaagcaagctaggccaatttcttgccggcaacaggaagatagtggcctctagtttatatatcggcgtgatgatgatgctcctagctagaaatgagagaagaaaaacggacgcgtgtttggtgtgtgtcaatggcgtccatccttccatcagatcagaacgatgaaaaa

SEQ ID NO: 117673 - DNA, 1024 bp, Zea Mays
aataaggacaggcaaagtattacttataaataaagaataaagctaggacgaactggattactaaatcgaaatggacgtaatattccaggcaagaataattcttcgatcaggagacaagtggggcattggaccggttcttgcaagcaagagcctatggcgtggtgccacggcgcgttgcccatacatcatgcctccatcgatgatccatcctcacttgctataaaaagaggtgtccatggtgctcaagctcagccaagcaaataagacgacttgtttcattgattcttgaagagatcgagcttcttttgcaccacaaggtcgaggatgtcttgcaactgcggatcaagctgcggctgcggctcaagctgcaagtgcgggtaatatatatgataatatataagtgcaccgtgcatgattaatttctccagccttcttcttgtctagttaatttccatttatttattttttccattgcaaaacaaacaaacaaacagacaagaacaaagttaatttggatcgagtagttcaatccatttgcgcgctgtccttttcagcaagaagtaccctgacctggaggagacgagcaccgccgcgcaggccaccgtcgtcctcggcgtggccccggagaagaaggccgcgcccgagttcgtcgaggccgcggcggagtccggcgaggccgcccacggctgcagctgcggtggcaactgcaagtgcgacccctgcaactgctgatcacatcgatcgacgaccatggatatgattattatctatctagcttgtggtggtggttgaacaataataagcgaggccgagctggctgccatacataggtattgtgtggtgtgtgtgagagagagagaaacagagttcttcagtttgctatctctctctgcatgtttggcgtcagtctttgtgctcatgtacgtacgtgtgtctacctgcatgttggttgatccgattgcatctgctgtaaccatatattaattggtccacgatgatatgatttgatactatatatatacta

SEQ ID NO: 117674 - DNA, 731 bp, Zea Mays
aataaggacaggcaaagtattacttataaataaagaataaagctaggacgaactggattactaaatcgaaatggacgtaatattccaggcaagaataattcttcgatcaggagacaagtggggcattggaccggttcttgcaagcaagagcctatggcgtggtgccacggcgcgttgcccatacatcatgcctccatcgatgatccatcctcacttgctataaaaagaggtgtccatggtgctcaagctcagccaagcaaataagacgacttgtttcattgattcttgaagagatcgagcttcttttgcaccacaaggtcgaggatgtcttgcaactgcggatcaagctgcggctgcggctcaagcggagtccggcgaggccgcccacggctgcagctgcggtggcaactgcaagtgcgacccctgcaactgctgatcacatcgatcgacgaccatggatatgattattatctatctagcttgtggtggtggttgaacaataataagcgaggccgagctggctgccatacataggtattgtgtggtgtgtgtgagagagagagaaacagagttcttcagtttgctatctctctctgcatgtttggcgtcagtctttgtgctcatgtacgtacgtgtgtctacctgcatgttggttgatccgattgcatctgctgtaaccatatattaattggtccacgatgatatgatttgatactatatatatactaaaa

SEQ ID NO: 117675 - DNA, 1122 bp, Zea Mays
aataaggacaggcaaagtattacttataaataaagaataaagctaggacgaactggattactaaatcgaaatggacgtaatattccaggcaagaataattcttcgatcaggagacaagtggggcattggaccggttcttgcaagcaagagcctatggcgtggtgccacggcgcgttgcccatacatcatgcctccatcgatgatccatcctcacttgctataaaaagaggtgtccatggtgctcaagctcagccaagcaaataagacgacttgtttcattgattcttgaagagatcgagcttcttttgcaccacaaggtcgaggatgtcttgcaactgcggatcaagctgcggctgcggctcaagctgcaagtgcggcaagaagtaccctgacctggaggagacgagcaccgccgcgcaggccaccgtcgtcctcggcgtggccccggagaagaaggccgcgcccgagttcgtcgaggccgcggcggagtccggcgaggccgcccacggctgcagctgcggtggcaactgcaagtgcgacccctgcaactgctgatcacatcgatcgacgaccatggatatgattattatctatctagcttgtggtggtggttgaacaataataagcgaggccgagctggctgccatacataggtattgtgtggtgtgtgtgagagagagagaaacagagttcttcagtttgctatctctctctgcatgtttggcgtcagtctttgtgctcatgtacgtacgtgtgtctacctgcatgttggttgatccgattgcatctgctgtaaccatatattaattggtccacgatgatatgatttgatactatatatatactaaaaccggacttcttattataatacttgtagtatataagtttcttacgccgcaattgatcgattcagaaggagttctagctagctaaaacatgcagattcagaatatcagatttttaggactactggagatccagaaccttcgtgtccttgtacccgtgattttggatcccctttctccccactacaatcgttggcgcaatcttgttctgctcgcctagaatggtacgccctcaccgaccatgtcctcgccgatgcctaccccgccacgccatctg

SEQ ID NO: 117676 - DNA, 1118 bp, Zea Mays
aataaggacaggcaaagtattacttataaataaagaataaagctaggacgaactggattactaaatcgaaatggacgtaatattccaggcaagaataattcttcgatcaggagacaagtggggcattggaccggttcttgcaagcaagagcctatggcgtggtgccacggcgcgttgcccatacatcatgcctccatcgatgatccatcctcacttgctataaaaagaggtgtccatggtgctcaagctcagccaagcaaataagacgacttgtttcattgattcttgaagagatcgagcttcttttgcaccacaaggtcgaggatgtcttgcaactgcggatcaagctgcggctgcggctcaagctgcaagtgcggaagtaccctgacctggaggagacgagcaccgccgcgcaggccaccgtcgtcctcggcgtggccccggagaagaaggccgcgcccgagttcgtcgaggccgcggcggagtccggcgaggccgcccacggctgcagctgcggtggcaactgcaagtgcgacccctgcaactgctgatcacatcgatcgacgaccatggatatgattattatctatctagcttgtggtggtggttgaacaataataagcgaggccgagctggctgccatacataggtattgtgtggtgtgtgtgagagagagagaaacagagttcttcagtttgctatctctctctgcatgtttggcgtcagtctttgtgctcatgtacgtacgtgtgtctacctgcatgttggttgatccgattgcatctgctgtaaccatatattaattggtccacgatgatatgatttgatactatatatatactaaaaccggacttcttattataatacttgtagtatataagtttcttacgccgcaattgatcgattcagaaggagttctagctagctaaaacatgcagattcagaatatcagatttttaggactactggagatccagaaccttcgtgtccttgtacccgtgattttggatcccctttctccccactacaatcgttggcgcaatcttgttctgctcgcctagaatggtacgccctcaccgaccatgtcctcgccgatgcctaccccgccacgccatctg

SEQ ID NO: 117677 - DNA, 1778 bp, Zea Mays
aataaggacaggcaaagtattacttataaataaagaataaagctaggacgaactggattactaaatcgaaatggacgtaatattccaggcaagaataattcttcgatcaggagacaagtggggcattggaccggttcttgcaagcaagagcctatggcgtggtgccacggcgcgttgcccatacatcatgcctccatcgatgatccatcctcacttgctataaaaagaggtgtccatggtgctcaagctcagccaagcaaataagacgacttgtttcattgattcttgaagagatcgagcttcttttgcaccacaaggtcgaggatgtcttgcaactgcggatcaagctgcggctgcggctcaagctgcaacaagaagtaccctgacctggaggagacgagcaccgccgcgcaggccaccgtcgtcctcggcgtggccccggagaagaaggccgcgcccgagttcgtcgaggccgcggcggagtccggcgaggccgcccacggctgcagctgcggtggcaactgcaagtgcgacccctgcaactgctgatcacatcgatcgacgaccatggatatgattattatctatctagcttgtggtggtggttgaacaataataagcgaggccgagctggctgccatacataggtattgtgtggtgtgtgtgagagagagagaaacagagttcttcagtttgctatctctctctgcatgtttggcgtcagtctttgtgctcatgtacgtacgtgtgtctacctgcatgttggttgatccgattgcatctgctgtaaccatatattaattggtccacgatgatatgatttgatactatatatatactaaaaccggacttcttattataatacttgtagtatataagtttcttacgccgcaattgatcgattcagaaggagttctagctagctaaaacatgcagattcagaatatcagatttttaggactactggagatccagaaccttcgtgtccttgtacccgtgattttggatcccctttctccccactacaatcgttggcgcaatcttgttctgctcgcctagaatggtacgccctcaccgaccatgtcctcgccgatgcctaccccgccacgccatctggatggtgcatgaatgtcgtcgttttgtcctggatgctaggcacactctcccccgagttgatggagcctcctcgcacctctggtggcactgcgccgcgcctggcttgccatcgaggagcaattcctcggcaatcgcgaagctcgcacacttcgtctcgacgccgagttccatgtcttcatgtaggcgatctcttcgtcagcgactattgtctattgacgcaagatgaaggggatggacgaggcccttggtgatcttggtgaggtcatccatgaccgtacccttgtcctaaacgtgttgtgtggtctgaatgagaggtttgcccacataaaggtccacttcaagcactcgaatccgttcccctccttcaccgacgtttgtaatgatctcatccttgaggagatcgactccagcgcgcctcctccgcctccgaccaccgccctcatcgtcggcaccaatgcttccttcaccgccccttctcctcgaagtgtcacggcgcccgatggtggtaccaaccgacccacgagcaacacccatggctggggctcctctgctactaagcgtcaccccaacaatagtggaggaggcaaggcttagtcgccttggccttcgttgtacaatccatggatcgagaaaatcacgatttgacccggcccactggacag

SEQ ID NO: 117678 - DNA, 366 bp, Zea Mays
atgtttccgtctaagcaagtagccgctctcctagtccttgtagtggtttcttctcccagtcccagcctcctcgtgagtggtaagccatcagtgagcaaagaacagaaggacaagatcctagaggaatgcgaccggttcatccgtctcggctaccccatctatgttgtgtcccggcatagcccctgctgcgatgctgttagggcggttgagaacagagacatggactatgttgtcctcctgctcacaaacgacgagaaggacaagtacagcatctctaagatcctggcgcttcatggcctctgtgaacttcctcctgcttctcttcatcaccaccagcaggtcatgggccgaagggcactgatgtga

SEQ ID NO: 117679 - DNA, 110 bp, Zea Mays
gttgcactctacattccaatttataagtcacataagctttgccttaagtcggtcatatttctctaactttaataaattttgtagaaatatattgtaacgtccacaatact

SEQ ID NO: 117680 - DNA, 98 bp, Zea Mays
agaaccaagagagtataaattagagggtattagggtacacatgcaccaacggaaacttgcaaaaccgatgatttacactaaacttttactatatatac

SEQ ID NO: 117681 - DNA, 1528 bp, Zea Mays
aaagccctcccagtggtggtggagccgcagctagcacctagatagctagccatggcggccacgccgtcgccgttgccgcggtgggcgccgacgccgagcccctcgcggccgctatggcgctggggcgctcgccatcatcagcctggcggcggcggcggcgcgggcaccagctggtggtctcgtattgcgagcggcgtcttcgcgtggggtggccgcgggcgtcaccgtggcgcggcgccgtcggacgaagcagcagcagcggtcgccggacgacgatcggggtgcgagctgcaggtggtggtgccatcgtcggcgccagcggccgtggctgcggaggacgccgccggcgacggcgacccccgggcgttcctgacgtgggaggacgtgcgcgtgacggtggccggcggcccgcgcggggcgccggacgtgaggatcctggacgggatcaccgggcacgcgcgccccggtgaggtgctggccatcatgggcccgtccggcggcggcaagacgacgctgctggacaccctcgcaggaaggttaggacccggcatgaataaaacaggtctgattttgatcaatggccggcaggagaagcttgcctatggaacctcggcatacgtgacccaagacaacgtgctgatgtcgacgctgtcggtgcgggaggccgtgtactactcagcgcagctgcagctgcccgacacgacgccggcggcggagaagcgggcgcacgcggagcgggtgatccgggagatggggctcgcggacgccatggacacgcgcatcggcggccgcgtcaccaagggcatcagcggcgggcagcggaagcggctcagcatctgcatcgagatgctgacgcggccgcgcctgctcttcctggacgagcccaccagcggcctcgacagcgccgcgtcctaccacgtcatgagccacatcgcgcgcgtcgccgcccgcgacggcatgaccgtcgtagccgccgtgcaccagcccagcggcgacgtcttggagctcttccacggcctatgcctgctcgcagccggaaggacggtgttcttcgggaccatctctgacgccaccgaggtacgtacttcttgatcatcatgcatcagagagaagttaagaggaccaggaccatgcatatatatatctctgacttgtgttaattagctcgatcgatcgttcctccttgcatatatatatatgcatgcagttcttctctctgaacggcttcccatgcccacgcctgagaagcccgtcagaccacttcctcagaacaatcaacaaagactttgacgaggaaaccgtggtggagagctctgacaaagctaaaaggaaaacagcagctgatgaggcaatagaaatcctggcgactgcatacagatcatccatttacttggacaaaaccacagaccaaattgtcgaaatgaaaagcatggtaataaacctgagttttatttacctggatagagctgtgcatggtaattgtggaaatgaaattccctactggctgcaggatggagcttcatttcgg

SEQ ID NO: 117682 - DNA, 2366 bp, Zea Mays
ggtggtggagccgcagctagcacctagatagctagccatggcggccacgccgtcgccgttgccgcggtgggcgccgacgccgagcccctcgcggccgctatggcgctggggcgctcgccatcatcagcctggcggcggcggcggcgcgggcaccagctggtggtctcgtattgcgagcggcgtcttcgcgtggggtggccgcgggcgtcaccgtggcgcggcgccgtcggacgaagcagcagcagcggtcgccggacgacgatcggggtgcgagctgcaggtggtggtgccatcgtcggcgccagcggccgtggctgcggaggacgccgccggcgacggcgacccccgggcgttcctgacgtgggaggacgtgcgcgtgacggtggccggcggcccgcgcggggcgccggacgtgaggatcctggacgggatcaccgggcacgcgcgccccggtgaggtgctggccatcatgggcccgtccggcggcggcaagacgacgctgctggacaccctcgcaggaaggttaggacccggcatgaataaaacaggtctgattttgatcaatggccggcaggagaagcttgcctatggaacctcggcatacgtgacccaagacaacgtgctgatgtcgacgctgtcggtgcgggaggccgtgtactactcagcgcagctgcagctgcccgacacgacgccggcggcggagaagcgggcgcacgcggagcgggtgatccgggagatggggctcgcggacgccatggacacgcgcatcggcggccgcgtcaccaagggcatcagcggcgggcagcggaagcggctcagcatctgcatcgagatgctgacgcggccgcgcctgctcttcctggacgagcccaccagcggcctcgacagcgccgcgtcctaccacgtcatgagccacatcgcgcgcgtcgccgcccgcgacggcatgaccgtcgtagccgccgtgcaccagcccagcggcgacgtcttggagctcttccacggcctatgcctgctcgcagccggaaggacggtgttcttcgggaccatctctgacgccaccgagttcttctctctgaacggcttcccatgcccacgcctgagaagcccgtcagaccacttcctcagaacaatcaacaaagactttgacgaggaaaccgtggtggagagctctgacaaagctaaaaggaaaacagcagctgatgaggcaatagaaatcctggcgactgcatacagatcatccatttacttggacaaaaccacagaccaaattgtcgaaatgaaaagcatggatggagcttcatttcggcggagagaacacgcaagctttggcaccaagctccttgtgctgacgaggagatcgttcctgaacatgcacagggacgtagggtactactggatgcgtctggccatctacatgggcattggcgtgtgcctaggcactatcttctaccaacttggctacagcacctacagctctatccagagtcgatgtgaagtaatcatgtacaccatcgcactcctaactttcatgtccatcggaggatttccatccttcgtagaagacgtcaaggtgttcagaaaggagaggctgagcggccactacggcgtgtcggagttcgtcatctccaacaccatctccgccactccgtacctgtccgtcgtttccctactgcccggcgcgatgctgtactacctcacgggcctgtccaaaggcgccgaccacttcgtctacttcgtcatggtgctctgcgtctgctgcctcctggtcgagagcatgatgatggtcatcgccgccgtcgtcccggacttcctgatggggatcatcgtcggcgccggggtgcagggggtcatgatgctcaacggcggcttcttccgcctccccaacgagctgcccaagcccgtctggaagtacccctgctactacctgtccttccacaagtacgccgtgcaggggctctacaagaacgagttcgtggggctgtcgttcccgagcgaccagctcgtcgactccaatgtcaccgtcagtggcctccaggtcctcgagtacaagctgcaggtggagatggggtactccaagtgggtcaaccttgccatcctctgcgggatgatgctggtgtacaggatgattttcttcgctatcgtcaagatctccgaggaagttcggcagaaaaggggtggcaaaagaggatgtgttagatagtacgtagccggctcttcttcatatatgtatgtgtgtatctctttcctctcccccattattcttccaaattgtataagctgctgacaccatgggtcggatagacaaccgaccacaattctccacctcaacgacaattaaactataagccaacagaagttcaatcttc

SEQ ID NO: 117683 - DNA, 447 bp, Zea Mays
aaggggtcttcctcatttttctcgtctgaaaaagaagagagcacaacaggcatccctcttctaacctcctgatgatggcactcaacggcggttggagaaagaccttcgtgtccatcctgacgacatgctttcttgtggtggttgtaattgtttccctatcctgcgaagcaaaaggcggcgtcgtccccaggttgcggccaccattctgctttccatacgatcgtgaatactgcacgccatttcactgcggcaaagtttgccaagagtacaacttccctgctaagaatggcggctactgcgataaacgtggtgacccatggaagtgctgctgtccatattgaaacgtacaaaatgcatgcatccatccgtgctgctacctgatcgatatacatgtcaatcatcatcaatatatataatgaatgaataaaatgcatgtgttggaaaata

SEQ ID NO: 117684 - DNA, 89 bp, Zea Mays
catttcttatcgatgcacccataatgatatacaaaagacggtaatgagtgacacaatgatagtcaggagcttaggaagatccatcattc

SEQ ID NO: 117685 - DNA, 1103 bp, Zea Mays
atggtgactgtgagagaggagatgcgtaaggggccatggacagagcaggaggacattcagctggtatgcactgtccgcctgtttggtgaccatcgttgggacttcattgctcaagtctcaggtttgaggggttggagaactacaacttaggtagctattttgctatccttagcgcaaagtcgcaaacacgaatgtcttcctgtctaaccagccttcttcatactatacattctctatgttcatgcaggcctcaacaggacaggaaagagctgccgcctgcgctgggtgaactatcttcaccctggcctcaagcatggccgcatgtcaccacaagaagagcgcattatcattgagctccatgctcggtgggggaacaggtggtctaggatagcaaggaggctgccagggcgcacagacaatgagatcaagaactactggagaacacacatgagaaagaaggcacaggagaggaagatgggcatgccatcaccttcatcctcatcctcctcactgacataccaaacctgccttcttgacaccattccagtcattgggatgggcagtggtgacactcacaatggtagctgtgtcaccagcaccctcgagaacacacagagtgtcatggatggatatcccatggatcagatatggaaggagattgaggcaccacatgcacctaacttgctgagtattgctgaagggaaagagaagacgtgcagcagtagcccctgtcatctaccatcacctgtaatgtgggactacaaatgccctgagatattctggaagatgggagatcaagaaatcatgatgtgatggaaaatgaaatcaagatgttggctgcacgatttggttatgggcttatggtaaataaggccatcgctattgaaggctgaaggaatacatctatattggtcaggccactcagctatctgcctagcagatttgcagtatttgtacttcctaactatgcttgcattagtatgcagtatttttaaatctagtgtaacactggtggtatgctcataatgtatgtatctatgtagtttgaaaaatagtttgtatcagtttgtgcaatagtgtggacgctctatatgcatgatata

SEQ ID NO: 117686 - DNA, 977 bp, Zea Mays
atggtgactgtgagagaggagatgcgtaaggggccatggacagagcaggaggacattcagctggtatgcactgtccgcctgtttggtgaccatcgttgggacttcattgctcaagtctcaggcctcaacaggacaggaaagagctgccgcctgcgctgggtgaactatcttcaccctggcctcaagcatggccgcatgtcaccacaagaagagcgcattatcattgagctccatgctcggtgggggaacaggtggtctaggatagcaaggaggctgccagggcgcacagacaatgagatcaagaactactggagaacacacatgagaaagaaggcacaggagaggaagatgggcatgccatcaccttcatcctcatcctcctcactgacataccaaacctgccttcttgacaccattccagtcattgggatgggcagtggtgacactcacaatggtagctgtgtcaccagcaccctcgagaacacacagagtgtcatggatggatatcccatggatcagatatggaaggagattgaggcaccacatgcacctaacttgctgagtattgctgaagggaaagagaagacgtgcagcagtagcccctgtcatctaccatcacctgtaatgtgggactacaaatgccctgagatattctggaagatgggagatcaagaaatcatgatgtgatggaaaatgaaatcaagatgttggctgcacgatttggttatgggcttatggtaaataaggccatcgctattgaaggctgaaggaatacatctatattggtcaggccactcagctatctgcctagcagatttgcagtatttgtacttcctaactatgcttgcattagtatgcagtatttttaaatctagtgtaacactggtggtatgctcataatgtatgtatctatgtagtttgaaaaatagtttgtatcagtttgtgcaatagtgtggacgctctatatgcatgatata

SEQ ID NO: 117687 - DNA, 326 bp, Zea Mays
tattctcttttccattcaactttgaattcaaatctattccaaatttgagttcaagtctaatgcacaaatggaaccccacataatgtgggatagttttattaccctatttaattaccttatttattatcattattttattttaggaaatgctttcaacatggattacttaccacatttatttccataacatattagtttgagtgtgtaattaatttaaaggtatattcatgagttcatattctttggttttgttagaaaatattttccaatcgacaaacttttattaaggtttgttttactaatgatattttattatgaccattttc

SEQ ID NO: 117688 - DNA, 1277 bp, Zea Mays
tggacgaagaagcgaagtacattacatagatgcattttgaaaacagatggaagcaagtaattaacatgcatggatctcgaggtacaaaagctgagtagtagctagataccccgtttatttaattgtacagtatcgtcctctcacagtcacatgacatcgatcatggatcatgggtagacctcgatgacaccacgagctccgattttcttgacaaccttgtagtcggagaagccagccttggtaaagatgtggcgccagtcgtcttcgccgcgctgcctgcccttggtgttcaccatcatgagcatgtccatcagcagctgggcctcgtacatgaccggccccatgtacgggcccaggagtatctcaatgatgatcaccttccctccttcttggcgggaagggatggccttcctgcacagctccaggatcttgacgcagtcgtcgtcgctccagaagtgcaggacgagcttgagcatgacagcctgcgcaggcgggatggtgatggtcttggtcgtcgtctcctcgacgaccctgggaaggttgagcacggtgcacttgatgtctgggaaggccttgacgatggcggccgcgctggcgttcccctgcctgccgcagcagtaggtgagcgagcggaggccgctgaagacgtcggcgccgcactcccgtatgacggtcccgatggccaggttgtcgtgcgcggccacgccttcctccacgaccctgtccagctcctcgtccagcagcttggtgctctcgtggacgaggggcaccccgtgcagggcctcgaacggcgacggcagctggcggtcctcgtcctcctccttcttgaaccagtcggccagggacatgccggcctccacgtagtggcgggagacggtgcccagcacgaagtacttctggtaggtgtggtcctccgactccacgccctccaccagcagccaggacagcgggttcagccggtactgcacgtcgtcggacgacgcgaagacgcccgacgtgaccagcagccgcatcacgcgcccgaggaacgggagcttggccgctggcagggacagcgcggccacgaggtccggcagcgtggcagacccgcctaggttgtggatggcggtcgggatgtggagctccaccgcgcacttgagcgccatggatgtcaggtagtagaggctgtggcgccacaggtcggcctgcgcctgcagcagctcggcgtccgtgggaactatggcggtggccattattgttgttaagtcgctgatctctcttcgttcttccttgtgcct

SEQ ID NO: 117689 - DNA, 275 bp, Zea Mays
gattctcccattatattctttggatccttgcagcccatatttgatttcaacggctaattgggttattggtcagcttgcgatatgcctaccagaggacatgagttctagtatttatgagtccttaatgaaggcgttgaccatggagtatgtggaggacataacttgttatccggtttgtgcctctgcttctggtgctattgcagaactcattgagaatagttatgttccacctgactggctcattcttctgcaagtggttctgaaaagaataagta

SEQ ID NO: 117690 - DNA, 842 bp, Zea Mays
gttttgcgatctgggcgtctgcattggcacaagtctcaagcagcttgttcaatcctggcctgtcatctgaatccgagatcaagttagctgtgctgacgctatctactgtgatcaaccatctcgtgtccctttccacgggtggcaccaaatttgttgcaagactgctatgcatcactgatggagtcttgcattcagctgaaggaagttcaggacgatggggacaatgacgatgatgatgatggtgctgaagatgttgatgacaacgatgaagaggaagacaccgaagatgatgatgaggattcggacgacgacgacgatgcgagagaagaaacagaagaggaatttctggaaagatatgcactagcggcggctgcgggcgagtcagtcgaggaaggagacattgatgaagagacccaagacatcgaattgggctctctggatgacgtggacatacagcaggtggttattcccctgatgcagaaacttcctgctctgcagcccgccggagcgtttccggacagcctggttgaaagaattgcagaaacattcccggaatacgaacagtttttgcaagcccttcgacgagcttagagtataggaaacatgtgcagatttttctctttttgttatatgtttatatttttttgtgtcatttttggtttgcttctaccttgagcgttgttccgagatgtgtttctttttgtcagatatggtgtttattttcccttgatgtgggtggcaagatatgggtgatgatgtacgtacgatggttacaagtatgttgtgagcataattgttatggcaacactatcctccgttcggctattttgcctatttttgtt

SEQ ID NO: 117691 - DNA, 138 bp, Zea Mays
gctgacaaatgcaccggcctccagggcttcctggtcttcaatgccgttggtggtggcactggctctggccttggttctctcctccttgagcgcctgtctgtggagtatggcaacaaatccaagctgggcttcactgtg

SEQ ID NO: 117692 - DNA, 123 bp, Zea Mays
ccccacgaagatagcgaacggcgcgcgcaccgtctgtaaattgttcttacctcaaacatacacgactcatgagtacaacctaaatcctaaattctaaatcctaaactcaaataataaaaaaaa

SEQ ID NO: 117693 - DNA, 2466 bp, Zea Mays
agatatttcattgtgatcgatgatttatgggctacatcagtgtgggatttcttgagccgtgcttttcccaaggataactgtggcagccgaatagtaataactactcaagttacagaagttgcatttgcttgctgtaacaaccacacagttgatatattcaatatgaaacctctggacgacgatcagtcactgcaattgttttacagtcgagtaaagcatataaatggttataatgctgaagaatgcaaggccatatcacatggaatcgtcagcaattgtggtaatctttcaccgctagctatcataaatatagctggcatgttagcaggctgggcggatttcaatatgaatgactgggagtacgtaagcaagtgttgtacatcaacagcaaatcttactaccgaggaggcgacggagagatttctgaaccttatgtacaacaagcttccagccaaattgaagacgtgcctgctctatctcagtatgtatccagagggctgtgtcatcggaaaggatgatttggtgagacaatgggcagctgaaggtattttcagtcaagtggtggaaccaaaaggtagagaacatgaagtgggttttatttattttgatgagctcctgaaaagaggattgatccagcctgtagatacagactacaatgatcaagtgttgtcatgtatagttcatcaagtggtactggaatttattacaaagaaatcaatgcaggaaaacttcatcactgtcgtggattatcgtgaaacagggacagtgcttgatgataataaggttcatcgactgtctgccaggtttgaaggtgccaaaagtgcacagataccgcggagcttcagagtacgccaagttcggtcctttatgttttctggattcattaaatctttaccttcccttctcaagtattgccttgtccgagttctgattcttcatgtttggagtgatgatcaaggcaagactgtggttctagacctttctccagttggtaatatgcttcatgtaaggtacctgaaggtggtaagcaacatgatagtcaaactcccactcattattcgaggcctgcgacacttagagacactcgaggtggatgcagaagaagtcgctgttccactggatgttttcatcttgaagagcctgttgcatctccgacttccgagcaaggcttatcagcctgattcagatattcaaaggattgatttaacaaatacatttcctttaagatttctgcccttcgtcagagcgttgtcaatgctagggcggtttctcctctcccatggccatcggattcgccatttgacatcacttcaaagtcttggctactttgacctaagcacttgctccagatatactgtgtggcaacttggcaagctgaccaatttgagggatcttcatctaacctgctctgcagttcgttccaggcatcgaattagcaacatccaatgccttgcctctgttctggggaaatgcaccagcctcgaatctctaactatccgtggcgaagcatcttcaaaccagagcatttcttttgatggcttaagcagcttgtcttctccaccgtacaacctcgtgagctttgtgctgtccccgaggattttcaaaatggcgaagctcccaaagtggattgggcaactcagcaggctcagtacgctaaagattgctgttggcgagctgtcaagtgaagatgttgacatcctcaaaggactctctgccctcactgctctttctctctacgttcggagaaaccctaagaaaggaagctggatcctattcagtaagggcttcgcagtgctcaagtattttaagttcacttgcactgcactgtgcgtgaaatttagtgaacaagctatgcctgctgtccaaaggctgattgtgtgcttcaatgctaacacaatgcagcagtacaggccggaagatgcaggaatttggtacctgtcaggccttcaagttatctctgccagaataggagctgccggtattgatcaagccagcagagaagccgcgaaatctaggttgctggacgccattcttagcaaccatccaaagcctcctcctatcagaaacgtgcaaatggtggactgggttattcatggcgacacagaggagtgttcaaccggtgtgatgatacgtaaagatgaaagcagccgtgagcatactaggtcatttttaagtcagttcccgttcagaagacgacccctgcttccctccatattcacaaggcgtggccaggatgatgagcaacataaaatcgaagaaaatgatgtgctacaagatagtattatcttaaggaaatcctcttcgctaatgcaaaaaccaggactcccctaccgctacaacggtgctccctaccgctgctacagtggtagcggccgatggtggggtataggggaaggatttagggggaaccgttgtacagggtggagatataggggggaagagaacactgacgtgacacgtgaatga

SEQ ID NO: 117694 - DNA, 280 bp, Zea Mays
ctttgtacactttttatattataaatttgtgatccttgtgaactttttatattgtgaacttgttatatcatgaattgtgaacttgtggtctttgtgatcttttgtcaactttgttgtattatgaagtttgatatatttaccgattgtattttagattccgaccgttacctatgtattttccgcaccaaactttcgtttccgatgtttccgaaataccgatatcgtttccgtttccggagttaccgttttcgattttgtttccgataaaaaatatgaaaac

SEQ ID NO: 117695 - DNA, 407 bp, Zea Mays
ggtggacttccggatcgttcttagggattttgcccgaacttcggtaaaggcacctgatctttgcattgggaaggaagggatgtagcagcacggccaccacacttttaaataaaggaataaatgattaataatgatgttaaacaggaagagtcaagtctagggaattattacattctaatctttcatggtagttgaactgtttagtttggtgggctgagatgtctatcttttgtctggtcatgaatgttcttttctaccgttgcattttgattatactatgtcaattatctttcttttatatcctgtataaactatatgcttcccttgttatgctactttcaagggaggtgctgccggattttgcaatactttctttctctatgtgttgcataagttttgtagaaagg

SEQ ID NO: 117696 - DNA, 407 bp, Zea Mays
ggtggacttccggatcgttcttagggattttgcccaaacttcggtaaaggcacctgatctttgcattgggaaggaagggatgtagcagcacggccaccacacttttaaataaaggaataaatgattaataatgatgttaaacaggaagagtcaagtctagggaattattacattctaatctttcatggtagttgaactgtttagtttggtgggctgagatgtctatcttttgtctggtcatgaatgttcttttctaccgttgcattttgattatactatgtcaattatctttcttttatatcctgtataaactatatgcttcccttgttatgctactttcaagggaggtgctgccggattttgcaatactttctttctctatgtgttgcataagttttgtagaaagg

SEQ ID NO: 117697 - DNA, 279 bp, Zea Mays
ttcaccgccgccgccctaaaccgccgccgtgcccacgcgccgcctcaccgccgcctcactgccgcccgcccacgcgccgcctcaccgccgccgtgcccactcgccgtgcccacgtgccgcctcaccgccgctcgcccacgcgccgcctcaccgcctcaccgccgcccgcgccccaccgtccgcccacccacgcgccgccgtccgcccgctcgccgccgtccgccagccgtccgcccgctcgccgccgtccgcgcctccagctgcgcctccggtacgtaa

SEQ ID NO: 117698 - DNA, 1862 bp, Zea Mays
gcatgatggttgatgaaagaatatatttatgatatactttacacaatatgtgactctctgtcctacatttgaattgctagaacattgaatctgccgggcctctacttgtgacacttaaccctcctcgtgttcccaatcatgtattgcttaaatgtcatattagccatccaattccttccattgctgctgcaaaggctaatcttcagctcaacagcattcaaggaaagaggggcatctggttctgtggctcatatcaaggctatggataccatgaggacagtgttaaggctgggaaagcagcagctttaggattgcttggaaggaaatgtgaccttttgtctaacccaaaaccgatggtctcatcgtggacagaggcgggcgcacgtcttcttgtagcaagaagcctagaccaatacataaccattggtaacttctgtatactcgaagaaggaggcactacattcagttttggtaaagcatgcgaaaaatgtcatgtaaaatctgcgatacgcgttcacgatccccagttctattggaaggctgcaacagaaggagaccttggctttgcatctgcctacatcaatggccaaatctcatttgttgatcaccgaaaaggccttgtgaaccttgtacggatcatactggctaatagaggtgagttcaagaggttgagcagcactgctaggaaagcctggtggtcgccgttgcttggaattactggagtctcatttgcaaaatactttttgcgtcatgccttgcggaagaatagtgtatccaaagctcgtaaaaatatatctgaacactacgatctgagtaatgatttcttcgctctttatctggatccatcaatgacgtactcttctggcatttttaaggtggcggaggagagcttagaaacagcccaactacgcaaacttgacagtctcattaacaaggctaaggtggagccagggcaccatgttcttgacattggttgtggttggggcactttagcaatacggttggtgaagcaaaccggttgcaagtacacaggaatcacattatctgaggagcaactgaaatacgcgaagagaaaggtgaaagaatctgggttagaggaccgcataactttgctcctttgcgattaccgtcaactaccggcaggcgataagtttgacaggattataagctgtgaaatgattgaacatgttgggcatgagtacatggatgatttcttcgggtgctgcgagtatcatttggcagagcatggcctacttgtcctccagtccatcgcgctcccagaagaattgtatgacaaaatgaggatgcggcccgagtttctcaagacatatatcttccccggtggctgcctaccttctctaggccggattgtgtctgccatgtctaatgcatcaaggctcaacattcagcaccttgagaatattggggaccactactacactaccctaatgaactggagggacaacttcgtggccaacagagaaaaagcttctgcgcttggatttgacgacaaattcatccgtacctgggagtattatttaagttacgctgcggctttgttcaaatcacgcacagctatagattaccagatagtgtttgctcggccaggcgattcaaagctaccaagctatgttgccattgcataaaataaagctgtgtggcttggatagatgcatgcgtgtggtatatagtactactagaagtctgcatgcatatgtctgctagcggtgctttcatttgcactcgagtcgctccacgtaagaggtgaaataatagtggttaaggcatctgatcgagtgcttggcaaaaacatgatgttaagttgacaacttgtaataatattacttaaatatgtagagaat

SEQ ID NO: 117699 - DNA, 303 bp, Zea Mays
atggaggccagtgctattgttctggttggttggaacttgaggaggtgcgcagaggtggtgggtctcgtactgaccgtgttatcagcaagtcggatatcatggacaggaggcactgatgcttgtaacttcttgttgggaaatgtgattccactcaagtttggttatgtaggtgttgtaaatcacaaccaagaggcttaccatggtcttgctcattgttgggttgtttctcaattggctaaagagctaaatatgtattttgaggacatatcctttgttccgtatagagaaactgtgtctttatag

SEQ ID NO: 117700 - DNA, 1665 bp, Zea Mays
ctccctttcactagctccgatctccttggatcgatctcctgctagctcctcctccgatccacttgtcgacacgatcgatcgtcgtcgtacgcctgcttggcgtacatactgctactaatggagacggcgctgcagcagagtgctgctactgctggcggcggcatgaggccggccggcgcggcgacgacggtgaagaaggcgaggcaggagctggagctggagcaggagcgggagttgcggtttccgcaggcggcggcggccgcggatcagggcggccttgacgaggagctccggcgcgggccgtggacggtggacgaggacctcacgctcatcaactacatcgccgaccacggcgagggccgctggaacgcgctcgctcgcgccgccgggctgaagcggacggggaagagctgccgtctgcggtggctgaactacctgcggccggacgtgaagcgcggcgacttcaccgccgacgagcagctcctcatcctcgacctccactcccgctggggcaaccgatggtccaagatcgcggcgcacctgccaggcaggacggacaacgagatcaagaactactggcggacgcgggtgcagaagcacgccaagcagctcaactgcgacgtgaacagcaagcgcttcaaggacgccatgcgcttcctctggatgccacgcctagccgagcgcgccgcaacagccgcccaccagccgcagccgcagcacgtcgctgccgcctgcaacaacgtgctggtggcggcggcggcggcggccaacagcagcagctgctgctggtcctccccacgcagcagcgccgtcaccacggccgcctgcagcggcagctcctcctgcagctcgctcacgtccgagtccgcgcacaacgacgacgatggcgcccggccgcacgccgccgccgtgctggcggcggcggcggcggcgacgggcgacgacgactactggggcgctgtcacgacgactatgcagcaaaatcatcatcagcagcagcagcagaacgagcagttcgacttctggtccacggcgtccgcgctgcagcacctgactaccgccgccgccgaccaggacctcaccggctgggtgcagggcttctccgacgacggcatcctgtccggctcctcgtcggacagcctctggagcctcgacgacatctggaggatgcagtgacagtgagacgtatagtacggcgcgctgttgtctgtcgtttacgtcaatttttgcccgcgtgttagttgcgggttcggattcaaattgggggacgtacagtacagtacgatacaggcaggggaggcgaccaaaaacccaagcgttctcctcatatatttttcgtgttcagttattacgctctgactttatcacatatatatatatatatatatatacatatatacactgtataatgtattagctagtatatatatattcacacactgtggaaagttgatttttcttcttctttcatccggtgttgacttcgtttttgtttgggtggcaaactaactacgtactccgttccgtcactgtcctcctgtcaagggtttttcttttcttttttatttttgtccaccttgtactgaatatgtatatggtaagagagtgagacatagacaacgaccaatgttattaaattacagaagacctctcaacttgagtgtg

SEQ ID NO: 117701 - DNA, 1369 bp, Zea Mays
actgccctcgcgcgctccccgtccttcggtaggtgcattgcttcggtggtccaccatggcgcagcgagcggtggccacgatgacgactaataagcccctcctcctcctcgccctggcgtccgcgctccttggtgcggcgccggccgccgcgaacgcgcccggcggggcgttcagcaactgggtggcgatgaaccagcagagctacgcgctgtacgcgcagaagtccgtcggggacgggggcaaggagcccctggacaagaagctgtcggaggcggagaagaagaaggtcacgtacgtggtggaccccagcggcaagggcgactacaccaacatcaccgcggcgctggaggatatcccggtgagcaacaccaagcgcgtgatcctggatctcaagcccggcgctcagttccgcgagaagctgttcctgaacatcagcaagccgttcatcacgttccggtcggaccccaagaagcccgccgtcgtggtctggaacgacactgcggccacgaacggcaaggacggcaagccggtgggcacggtggggagcgccacgctggcggtggagtcggactacttcacggcgtacggcgtggtgttccggaacgacgcgccgctggccaagcccggcgccaagggcggccaggcggtggcggtgcggctgttcgggaccaagacgcagatctacaactgcaccatcgacggcggacaggacacgctgtacgaccacaagggcctgcactacttcaagggctgcctcatccggggcagcgtcgacttcatcttcggcttcggccgcagcttctacgaggactgccgcatcgagtcggtggtcaaggaggtggcggtgctgacggcgcagcagcgttccaagtccatcgagggcgccatcgacaccggcttctcgttcaagaactgcagcatcggcggcgtcaagggcggccagatctacctgggccgcgcctggggggactcctcccgggtcgtctactcgtacacgaagatgggggaggaggtggtccccgtgggctgggacggctggcagatcgccaagccggagagcagcggcatctactacggcgagttcaagtgctttggccccggcgctgacgccaagaagaagaagagggtggggtgggcgctggacctcaccgaggcgcaggccaagccattcgtcggcacacactacgtcctcggcgacacgtggatccagccaccgcccaagtagcgacgcatgccacacgatatatctatttgagtacgaagcaaaagcgagagacacgaatctctaatctctttactgatgagatgttttgcttatatatatatatagacgagctaatgaaagctcagggttttcattagtaccggg

SEQ ID NO: 117702 - DNA, 823 bp, Zea Mays
gacgtcgatcaatactatactactatcacagtaggaagctaggaggaaaatcaaagcaacaaagttgccggccggccgagagaagcaaccatgagacctcaggcgtcgttactcgtcgtcacactggctgttatcgtcgtcgtccttgcagctctgccactcagcaaagggacggaggaggaaggaggaggggcggcagtcgccgccgtggacgccgccggaacgagctcgtggccatgctgcgacaagtgtggtttctgctacgtgtctgacccgccgcagtgccaatgcctggacttctcgacggtcgggtgccacccagagtgcaagcagtgcatcaggtacaccgccgacggtggcgtcgacatcccgcccgtgcacgcctaccgctgcgccgacatcctcttcaacttctgcgagcgccgctgcagtactcccgccgcagttgctgctagcaccaagtagacggatgcatatgcatgccatcgttgccgccgtgtgtgccgcttcagagaagaactaaataaatgttaccgcatgctcttgatgcgtgcatgcctctcctccttgaataaaccaatatttctataattattgtagtatgtccaactttcttaagtttgaaaaataaatggcgctgcttcatatgatgctggtgtccatgaattaacctgcatcatcgtcacttcacttcacttatggtctgctttgcatgaggttttcatgttacttttatgtccaagagaacttggattttcttctcgaacggtacggttgttgtccttacgatcaaccctccaaaaacccaaataattaaaagaaa

SEQ ID NO: 117703 - DNA, 444 bp, Zea Mays
atgatgccatcggtaatttctgtaaagaaaaaaaaaacagcgcctattcttgcaatacaaactgacaatggacacaaaaattacatgccagcttgttccttgactttaattcgtatcgacttctacttattgtttctgtctctatatgttggtcaccagcatcgtatgaagcaacacatttattttttcaaacttaagaaagttggacatacaataattattacagaaatattagtttatttaaggagaggcagcacgcatcaacagcggcaacatttatttgcttcttctcagaagcggcacccggcaatggcatgcagatcgacgaggatgcatggcatgcatgcatccttctacttggtgctagcgctacacatagaagcagctgcggcgggagtgcagcggcgctcgcagaagttgacgaggatgtcggcgcagcggtag

SEQ ID NO: 117704 - DNA, 657 bp, Zea Mays
atcgcacattcgcgctggcagcctggcgctaaccctaaccctcaccgcctggcgcctcacgaacacagccgcctgccgttgtgcccagccttccgccgtccgccgagctgtcgaggggagaccgagccttccgtcgctgccctctgtgcccaaccttccgcccttccgaccatgcgctgacgccgtccgcggtccgtcgttgtgccgagccgccgatgtgcccactgcctagtggccccagccgtccggccttctgtgctgagcccgcgagccgtcgttcgttgctcgtctgttgtacccaggcggccaggcgcccagccctccagccacgcgcccatgcgggccacgccacgcctgtgccttccgcggtccgccgctgtgcgcatgtgccttccgagctgtaacaagttgatatatttggaggattgttcaaagggcttcatcttcaaaatattaagaagacatttcaaaagaagaaggataggcaaatacaactgcctagaactccgagacatatatagcaaattctgagagacaggtgatggagacaggcggaggggaccggacgttaagctctggggacgagcactctcgagtccacctaagttaatctacacccacagcaatacaactcacactggagtacgggcggtaatc

SEQ ID NO: 117705 - DNA, 2246 bp, Zea Mays
gaacacttgatttaatcaagaatatttataaattaaaatcgtatttttatttcctcctacactgatgtagtagtattacaatcgttgactttgatgtgacagcctacagcagctaacctaaccgtatcttcagaactgagattttgtaatggacatctatcacaatcaaacaacaagcccgcccatgcgatgcgagcaactcctcctcctcgctctctagcttgtctcttctttcatggatataaatccttcccgatcgagcagcatgcattgcaaacacagaaatcagcaagcagccagcagcatcagcagtttagacgactgacatcgatccgcaccgcatgacgatgctgccccgcggcgccgcggataaaatcatcagccacaccctggcaggcgcgatgctctcaggcctcggcatatggcacctcttcaaccacatgaggctcttggtctccctcgccccgacggccccgtcgtcctcatcgtcgcgcgtcgccgtcctcgcgccggcagcatggttcccggcgccacgggtgcgccgcctcgagcccatcgccatgctggccgcgggagcgtacgggctggccacccagatgctcgcctactcgccgatgccgttccgcgccgacggctccatcccgcctgagcgcctgccgaaccacgagcacgccatcatctacgcctcgctcctcgtctacgccggctccgccatatacctggacgacgacgacgaccgcgccgggccgcgccacgcggcgccggcgccaacgacgctctgcatgctcctcctggcggcgctcttcgcgcaggagctgttcgtgttccacgtccactcctccaccgacgaccacgccggcgtcgaggcccgcctgcactggttcctgcaggcctccgccgccgcgtgcctcgccgccgcgctgctcggcgccgcccgcctccccgcggacctccagctcgccgccggcctcgtccgctccgcgtcgctcgcgttccagggcctctggtgcgtcgtcatcggcgtcgcgtgggtccccgggatgcttcccgccggatgctacctcgacgggagcggcgtccacctgcgctgccgcggcgaggacagcctgcgccacgccattgctgtcgtcaacctgcagttcggatggtgcatggtcctcgtcgtcgggatttacgtgtacgtgtgcaaaaggtatccggctggagcttggtctcatggggaggtatacggacggctgccggaagcagaagctgcagacgaggacgacgacagccaccaccacgacatgaagacgccaaactgtaagcagctggcggcgcacgatgacgtgcatgagttcacgtcactggagatcgacgtctaaattaagagtccataaagatgattgctcacgactcaaacagtggcttaataatgcgtattatatatataggtgatgattggcacgtacaacgactgagtattcagaccacagaaaaaccaaacactgaaactgaaatcgaaaaacaataatgcttgctcccaatttcgaccgagatgaagtaagagaacacatgacaaacagtcaaaccaacttgtgttttaatggcctagagatgtttctacgttgattacactgcagacgcactgcggctttaattcatcagcttctgttctcgttttttctgtaatcatcatcagctgcaaatggtcctgcatgatgcatgaacaatgacaactaaaccttgcttacaaatcagaccaggcattagagatggctgctgatgagcaccaggagctccaactgcatctgctttttgagttgtcgcaaggattctgcttccacccggtgcgcgcggcaatgagcgtatcaagtagatcatcccattctttcggattcacatcatgtcagaatcatcgacccatatatcatccaacaccaacaaataagcatttgtctttcagttatattttttgtcaactgtctttagacctttaagatgtctttcaactctttttgtcatattcagaaacatatatgccatatatgccaatcacagatatgtgtttcaactgtctttagacttcccatattcagaaacatattttgccagggtactttttccagaacctggaatgccatatatgccaatcacagaatatgatttactagtgctggagctggatgcagcagcagctggtccatcatgaagcatctggatgcatattacaatcccaggtcagttgtcgccgataaacatggaaa

SEQ ID NO: 117706 - DNA, 951 bp, Zea Mays
atggggctccccaggaggggcgcggcgggtggtagcgggttggtcccctcctctcccctctgcccggtcgcccgggcctgcagccattccctagatccagtagtctgcccggcggtgtccggctgtgtcagttcggcgttgtcagtgggtttggtttcaggcaaggattgcagcgagggggattgtgatcctgtggcagatcgtgtggagcagttcgcgcaggagaggatccccgcagctgagaagatgaaatggggacttgatgggtcactgggttctctgcaggacttcaatgcgccggattctctgcaggacttcattgtgcccggggatttgaaggcttgctgtgacttgtctcgtcggtatggggtgctcggcggcgtcctgacagcacagcagcctcggcttgctgtcccttccaaggtttgcagtgcagagcatttaggtttctcagatgttgtgttaagccaaaaatctattgagattgcatttcctaatcctgatacaatcctgaatcctttgcaaatcttagattcagctagagagacagcagccccaattttattaaatcaacagattgcatattctagtcctgatacatctctgagtgctttgcaaatcatagattcagttagggtgccagcagccccaaattcattaagtcagccactcgttgcagaatctcatgtgcctccacattcaaatattaatagtgcatctgtcatgccgtgcaatccagatttattcacctcttcgctgtcatacttccacaggcttcaacatggtatcggagccgaggttctcggaggcgattgtggtggcgacgagtcggtgtacttcgaggagaaggaccggctgatccagcagcgtgcggcggagcgggtggaccagtgcgtcgagaagtgcgtggaggggtgcgccggctcgtcctgcgtgcatcgccaggggtga

SEQ ID NO: 117707 - DNA, 1969 bp, Zea Mays
gaattcacgcggtgcagtcactactgtggcccctccacgtttagtaattggccgcgacgaggatcgcgtcaaggtcatatctatgcttcgtgagacacttgatgatggtcaacaggatcgcagcggtgctaaaccatactctacaattggcatttatggcattcctgggtctggtaaatctaccctcgcacagtatgtttgcgcccatgaggaagacaatatccactttgacattgtcatctgggtccatgtgtcgcagaaatttagtgtgcgagccgttttgagggagatgatcgagcagggttttgagggagaaagcatcgagaccgaggagagtttcagatgtatttttcccaggaggcattggctggaccctgagtatttagtcaggttgtgggtggcagaaggatttgtcaccagccgcaatacaggggaggaactggaggctgttggtcgaggctactttgatgagttagtgtcagcctcatttctgcaaccagtagatggtgacaaggaacgctatacgatccatgatctgttgcatgacttggtaagtaaagtagctggaagtgactgcttcagagctgacaatggctgggaaggagaatttcctcaggatgtccgtcatctttgggttgagaactgtaaactagacttgattgcccacaagattaccagactgaaaaagctacgcaccctgatcatttctgctggtgagaatgacacgccagttgaggaaaaagccttgttggaaaatattttcacgggtgtgacgacattgcgggtgctccagataacaccctggacagcaggaactctctcattcccagcatctgtcgggcggctaaagcatctacgctatctttctgtcggatctctgaatgtaccaaacataggcaggattgtgtcactccgaactcttcgatgcttcagggtaaagaagaaggcaggctacgagttgtggcagctgaagcacctcaacaagcttgagaagaagctagtgatccgcggccttcagaacgctggacgcaagggagaggctccagaagccaatctagctgccaaggaacggctcacaagcctagcccttgagtgggacagtgatgcgccgctgagctgcggcgcggacctccaagcagaggtactggagggcctctgccctccgttgcacctcgaaaaactgcggctctgttggtacggcggctcgaggtacccagactggattgttggtgtgcgatgcctttgtctctaccggtgcagccgactaggcgcctttcatggatgctccccccgtcttgtcaaactgaaaattttagagtgcggctgggatgccttgccagataacatggagcacctcgcctcactccggaagttggttattgacggctgcaaggatctacggtcgcttccagagctgcctcgctctctgctgcaccttaagatctccggctgcgatggcgaggtcatgaggtcatgcaaaacggttggacatcccaatcgcaaaaggatacagcacgttcgcacagtaatcatcggatgggaatcacttcccagagcagagctattagatcactttgagagcgagcctgtggtgccggagaaagagaaggagatcgccgcccttgttaaaaagttgctcgtgatgcttggccttctactactttgcatgttcagtgtgattgcaaggttgcttgtgggctctttcctgctcccagctccgctggtcgtcgtaattttgctgcttgtggtatggataattttgacactctagaggcctgtgaaatcggttatgcctggtgccgttaaacacggacactactctctatcaattttcttctcttctctatggatattatgtttgcttgcctatatctactcgaccagtctgagaaaagatactatgtagttgtttgtatggaaaaaatgttgtataagataaaaaacgaatataaagctatgaccttttttt

SEQ ID NO: 117708 - DNA, 1482 bp, Zea Mays
atgagttggagtcgcgggcgaggtggatccgacgagatccatggcggagggcgaggaggctccgatggatctatggctgggggcgaggtagctccgacgaggtacatggcgcgggtggaggcagctgcgattccgacgaggtccacgtcggagggcgaggaggccgtgactggatctatggcggggggcgagtgggctgctgcagggtccatggtggaggagaggaaggtccgacgggatccatggctgggggtggtggagctggctgcgacggtatctacggcggggggcgagggtgtcccgacaggatccattttcgctgtccggcgacagcaacctgttgtgaagcaggcgggtctggtgttccactgcgcgaagggcatcatttcctctcctatggttaagttgattgaaacttttgctgttttttgcaagtctcagagaactgcttatagggagaaggtgttaattgaagcagagaaacaatttctgcatgatttcacttttttcaaggaaaagttatcagttgattttggccaaatagtggatgtcgaatgcattgatagtacttgccaagttctgtgtgacaaggtcaggggttgttgttcaatttgcaagtcaaggtgtactgaagctatcatcgattctctaaaaattttggctgaagcaatgactattaagcatcagaagtttttgaattccaacaaccttctggcgaaagatatggatattaagtcagatgagaaagctaccaaaattgataccaatgtgcagccagttgatgttaagtcgaatgagaaaggggctggtgtggacattgttgaggcttctcatggaaaagctcatgtggtttttagctagatgatgctggggttatggttaatgaactactacttactactaattaccaggtgcaagtgtaacttctgatctgcttttcgtctactgtgtcactccactgtgtagcaatcagagcagtaaccttactagtatctctgttcaaacaaaggaagtgcaccatacaatctacagtttaatcaccctacctgtgccttgcatcagttttaaacgttggagctcattcctgtcagtttctctctccctctctgaatttttgacagctctacttggagcaggatctaccattttccctgtgcatctgaaaatcacgctgtgctatacatataaatactgccagtctccagagctggctctgcgtgctgtctgtctgtctgcctagctgtgactgtgagcgagcatccgggttatctgtctgcctagctgtgactgtgtctgtcatcctatgtggtctaatattacaatgactttatgaagttgttgtgtttctgttctctgtaactagacacaggagagattgttcatcttatatgctgaattgttatgttcatcctatgtggtctaatatgtctgttatcccaatgaatcaggatttccaggagaacaggttgttgatgtcatttg

SEQ ID NO: 117709 - DNA, 2743 bp, Zea Mays
gcattgcaacatggagatagatgtgcatcagagcgccgccgctgctggtgttggagtatactagtagtatatataaccacactccccgccccatctcgatctccacagccacagcacccggcagccggcagccatgcgaagccgccccctcctcctgctcctcctcctcgtcgcggcgacggcggcgcccacggcgtcgccgtcctcggcgttcgcgtgcgcgccgggcggccccgcggcgtcgctgccgttctgccggcagtcgctgccgctgcgggcgcgggcgcgggacctcgtgtccaggctgacccgcgccgagaaggtgcggctgctggtgaacaacgcggccggggtgccgcggctcggggtggccggctacgagtggtggtccgaggcgctgcacggcgtgtcggacacggggcccggggtgcggttcggcggcgccttcccgggcgccaccgcgttcccgcaggtcatcggcaccgccgcgtcgctcaacgccacgctctgggagctcgtcggacgggcggtgtccgacgaggcgcgcgccatgtacaacggcgggcgggcgggcctcaccttctggtccccgaacgtgaacatcttccgggacccgcggtggggccgcggccaggagacgcccggcgaggaccccgccgtctcggcgcgctacgccgccgcctacgtgcgcggcctccagcagccctacgccgccccgaacggcggccaccgcaaccgcctcaagctcgccgcctgctgcaagcacttcacggcgtacgacctggacaagtggggcggcacggaccggttccacttcaacgccgtggtggcggcgcaggacctggaggacaccttcaacgtccccttccgcgcctgcgtcgaggacggccgcgccgccagcgtcatgtgctcctacaaccaggtcaacggcgtgcccacgtgcgccgacgcggcgttcctgcgcggcaccatccgcgggcgctggggcctggacggctacatcgtctccgactgcgactccgtcgacgtcttcttccgcgaccagcactacacgcgcacccccgaggacgccgccgccgccacgctccgcgccggcctcgacctcgactgcgggccgttcctcgcgctctacgccggctccgccgtcgccgcgggcaaggtcgccgacgccgacgtcgacgccgcgctcctcaacaccgtcaccgtgcagatgcggctcggcatgttcgacggggaccccgcggccgggccgttcgggcgcctgggccccgcggacgtgtgcaccagggagcaccaggacctggcgctcgacgcggcgcgccagggcgtcgtgctcctcaagaaccggcgcggcgccaggcacaacagggacgtgctcccgctccgccccgccgcgcaccgcgtcgtcgccgtcgtcggcccgcacgccgacgccaccgtcgccatgatcgggaactacgcgggcaagccctgccgctacaccacgccgctgcagggcgtcgccgcgtacgccgcgcgggttgcgcaccaggccggctgcaccgacgtcgcgtgccgcgggaaccagcccatcgccgcggccgtcgaggcggcgcgccaagccgacgccaccgtcgtcgtcgcgggcctcgaccagagggtggaggccgagggcctggaccggaccacccttctcctccctgggcgacaggccgagctcatctccgccgtggccaaggcgtccaaggggccagtcatcctcgtgctcatgtctggcggtcccatcgacatcgcgttcgcgcagaacgaccccaggatcgatgggatcctgtgggtcggctaccccggccaggccggaggacaggcgattgccgacgtcatcttcggacaccataatccaggtgcgaagctgccggtgacatggtaccatcaagactacctgcagaaggtgccgatgacaaacatggcgatgcgcgcgaacccggcgcgcgggtaccccggccggacgtaccggttctacacgggcccgacgatctacccgttcgggcacgggctcagctacacccagttcacgcacacgctcgcgcacgcgccgacgcagctcaccgtgcgcctctccggcagcggccactccgccgcgtccgccgcctccctcctcaacgcgacgcttgcgcgccccgtccgcgccgtgcgggtggcgcacgcgcggtgcgagggcctcacggtcccggtgcacgtggacgtgagcaatgtcggcgaccgcgacggcgcgcacgccgtgctcgtgtaccacgcggcgccctcgccctcgcacgctgcccccggcgcggacgcgcccgcgcggcagctggtggcgttcgagaaggtgcacgtgcccgcgggcggcgtggcgcgcgtggagatgcgcatcggcgtgtgcgaccggctcagcgtcgcggaccggaacggcgtgcggcgggtccccgtcggcgagcacaggctgatgatcggcgagctcacgcactcggtctcgctcggcgtcgagcagctcggggtataaccggatgcttgaacggaaggtggaggatccagagtaataattgtgatgtgatgtgttgtttcgggtggggggtattattggcttctgattgccggggtgcttgctgctgtctctgcaaaggtggagatgggagatgtagaaggcaccggattactgaaaattgctggattgaaaacgaaaacgattgaaatggaaggaagacagaagaatgttgtttccctcctc

SEQ ID NO: 117710 - DNA, 2353 bp, Zea Mays
ccccacccacaccacacactctccgtctccgactacgaccatggtccatccatggcgatcaactcaaggctgacaaatccattcatccattattatattattatatactgatgatgactcgtgcaactgcaggcggtgtccgacgaggcgcgcgccatgtacaacggcgggcgggcgggcctcaccttctggtccccgaacgtgaacatcttccgggacccgcggtggggccgcggccaggagacgcccggcgaggaccccgccgtctcggcgcgctacgccgccgcctacgtgcgcggcctccagcagccctacgccgccccgaacggcggccaccgcaaccgcctcaagctcgccgcctgctgcaagcacttcacggcgtacgacctggacaagtggggcggcacggaccggttccacttcaacgccgtggtggcggcgcaggacctggaggacaccttcaacgtccccttccgcgcctgcgtcgaggacggccgcgccgccagcgtcatgtgctcctacaaccaggtcaacggcgtgcccacgtgcgccgacgcggcgttcctgcgcggcaccatccgcgggcgctggggcctggacggctacatcgtctccgactgcgactccgtcgacgtcttcttccgcgaccagcactacacgcgcacccccgaggacgccgccgccgccacgctccgcgccggcctcgacctcgactgcgggccgttcctcgcgctctacgccggctccgccgtcgccgcgggcaaggtcgccgacgccgacgtcgacgccgcgctcctcaacaccgtcaccgtgcagatgcggctcggcatgttcgacggggaccccgcggccgggccgttcgggcgcctgggccccgcggacgtgtgcaccagggagcaccaggacctggcgctcgacgcggcgcgccagggcgtcgtgctcctcaagaaccggcgcggcgccaggcacaacagggacgtgctcccgctccgccccgccgcgcaccgcgtcgtcgccgtcgtcggcccgcacgccgacgccaccgtcgccatgatcgggaactacgcgggcaagccctgccgctacaccacgccgctgcagggcgtcgccgcgtacgccgcgcgggttgcgcaccaggccggctgcaccgacgtcgcgtgccgcgggaaccagcccatcgccgcggccgtcgaggcggcgcgccaagccgacgccaccgtcgtcgtcgcgggcctcgaccagagggtggaggccgagggcctggaccggaccacccttctcctccctgggcgacaggccgagctcatctccgccgtggccaaggcgtccaaggggccagtcatcctcgtgctcatgtctggcggtcccatcgacatcgcgttcgcgcagaacgaccccaggatcgatgggatcctgtgggtcggctaccccggccaggccggaggacaggcgattgccgacgtcatcttcggacaccataatccaggtgcgaagctgccggtgacatggtaccatcaagactacctgcagaaggtgccgatgacaaacatggcgatgcgcgcgaacccggcgcgcgggtaccccggccggacgtaccggttctacacgggcccgacgatctacccgttcgggcacgggctcagctacacccagttcacgcacacgctcgcgcacgcgccgacgcagctcaccgtgcgcctctccggcagcggccactccgccgcgtccgccgcctccctcctcaacgcgacgcttgcgcgccccgtccgcgccgtgcgggtggcgcacgcgcggtgcgagggcctcacggtcccggtgcacgtggacgtgagcaatgtcggcgaccgcgacggcgcgcacgccgtgctcgtgtaccacgcggcgccctcgccctcgcacgctgcccccggcgcggacgcgcccgcgcggcagctggtggcgttcgagaaggtgcacgtgcccgcgggcggcgtggcgcgcgtggagatgcgcatcggcgtgtgcgaccggctcagcgtcgcggaccggaacggcgtgcggcgggtccccgtcggcgagcacaggctgatgatcggcgagctcacgcactcggtctcgctcggcgtcgagcagctcggggtataaccggatgcttgaacggaaggtggaggatccagagtaataattgtgatgtgatgtgttgtttcgggtggggggtattattggcttctgattgccggggtgcttgctgctgtctctgcaaaggtggagatgggagatgtagaaggcaccggattactgaaaattgctggattgaaaacgaaaacgattgaaatggaaggaagacagaagaatgttgtttccctcctcgata

SEQ ID NO: 117711 - DNA, 1551 bp, Zea Mays
atgccgctcgccgctggcgatccgtcgcctccgccgtccaccgcccacgccataaccaccccagacgggtggcacccgcgcacggcggagcgccatctgcttcacctcctccatcactgtcccctagctcgcggtcgcccgctcgagctcctcgcgttcgccgtccgccgcgcgctcccctactccccgccgtcaccgcaccaccacgccctcgcggcgctgctgctcctgtcctcccctccgccacccgctctgccaatcctccgcctcctccctcccgaacccacaccccctctcccgctcctcaacgccgccgtcaaggccctctccgcctcctccccgccggacgatgccttccgtctcctctccaccctccgccaattccacgcgcctgaccgcctaaccttcctgcccctcatcggctgcgcctcctccttgccgctcctctacgcgctgcactcgctcctcctccgcctcggcttcctatctcaccacgtcatctccctcgccctactcaagccctacccgctgccgcaggcccgggtcttgttcgacgatatgccccaaaagaacaagtgcaccgtcgcctacaacaccctcatcacggcgtgcctcagggtcagggacatccgtgcagcgcgccacctgttcgacgaaatgcagtggcacaggcggtccaggaggagcgtggtttcctggaaccttatgatcgccgggtgtgcacgctgcggacgagatgacatggcggtgtcctgtttcgagaggatgatcagggaaggagaggtggcgccagatgatggcaccttggtggcagtgctccctgcttgtggtaggacagggaatgttagggctgggaggtgggcacatgagtatgcgaggaagagtggcttgttggacggtacagtgcatgttgcaaatgcactgatggatatgtattgcaagagcggtgatgttaatagtgcacgggaggtgtttatgacgacgcggccgcgtagtgtggtgagctggaacaccttgatcgctggattctcattgaatggtcgcggagttgaggggattgatctgttccaggagatgaggaggcaagggatggagcctaatgctgtgacgttcttggcagtgcttggatgctgtgcgcatgctggggcagtggatattgggcgggagatcttccggagcatgctgtcggagcatgggactgaggcagcaattgagcactacgggtgtatggtggatttatttggaagatctggtctccttgaagaggcacacgtattgattcaggggatgccaatgaagcctaatgctgcgatatggggagcacttttaagtgcgtgtcgggctcatgctgggcttggccttgctgaggtggctctgaaagagcttatcaatcttgaaccatggaactcggggaactatgtgctgttggccaatctttatgtggaaacagagcggtgggatgaggcaggggaagtgaggagattgatgaggaggatgagtgtgaataaggctccagggcagagcttcatggaagaagctgagtttagttga

SEQ ID NO: 117712 - DNA, 2230 bp, Zea Mays
ccaagtcccaaccgtgccccaccgagccactcttccagtttcccccgcgcgccaacccgccaaaaaggagggaggggaacccgggaaggaggcccgcagccagagccgccgccgttccgtatccgtcccgtctccgccgcggcggcgctgacgctaggggttgccgcgcccagcgcggagatgcagcaacgtgcgcgggatggcgagcagcaccgcctgctcgacctcgcagtcgagtccggcttcgaccgcgacctcgccgccagctgcctcgcccgcctcctcgaggtctacggggaggatggtctggatatggttactgtcgacaactgtggcaatgatttccttgcatcactggctgatgccacacaacctactgatgactgggacgatctcaaagggattgagaccgaggcatgtggcaacttgaatgatatgatgatgaagaatgtacctgactgcaatggaggagttgctatagacagccgttatacatccagagagccaaattcgtcctctcaacgtgctccgaatcatcttgaagctttcaaatttgcctctgatgattcagattttgaaatggacaaccttcctgacaagtcttgtagtatgcaaaggcagacacaatcaagaaactctggaatgcagacccgaagctcagcaaaatccacagtgactagggaaaccagcagatatgagccaacgactcccacttcaaatagagagatgcctccagctgcatttcatcaaaggagagaacttctgagctacgagcaactttgttgcctcgatgatgtcaattttgccaatgctgtcatctttggcaacaaaggctttaggcccctgcagtacgaagcttgcagggctgcaatggataaccaagactgtttcatacttatgccaactggtggtgggaagagtttgtgttatcagctccctgcaacattgcacccaggtgtcactgttgtcgtaagtccgctgctgtcgctgatccaggatcagattgtggcattaacttacaggtttgcagtaccagcagcattcttaaattcccagcaaacttctgctcaggcatctgcagtaatccaggagctaagatgtgggaaaccagccttcaaacttctgtatgttactcctgaaagaattgtcacgaactattcatttatggagaccctaagaggcttagatcagaggggactgctagcaagatttgtgattgatgaagcacattgtgtaagtcaatggggacacgatttccgtccagattaccgtggtctaggttgcctcaagcagaacttccctagggtcccgatcatggctttaactgcgacagcaactgaatctgtccgtaaggacgtcctcggtgccttgaggatccccaacgctgtggtactgaagaggagcttcgacagactgaacctcaactacgaggtaatcggcaagacgaaaactttccagaagcagctgggcgatctcctgaaagagcgcttcatgaacgaatctggtatcgtgtactgtctctcgaagaacgagtgtgcagacactgccaagtttttgagggagaaatacaagatcaaatgcgcgcactaccacgctagcctggcagctcgtcagcgaaccagtgtccaggagaaatggcacagcggggaggttaaggtcatctgcgctaccatagccttcggcatggggatcgacaaacctgacgtgcgttttgttatccacaacacattgtccaagtcaatagaaagctactaccaggagtccgggagggcagggcgagatgagcttccggcacactgtatcgtcttgtaccagaagaaagacttcagccgtatcgtgtgcatgttgaggaacggtgagaacttcaggagcgagagcttcagggttgcgatggagcaagctaagaagatgcaggcatactgcgagctcaagaccgagtgccggagacaggcacttctgcagcacttcggcgaacagtacgacaggcgaaggtgccgagacgggcctagcccctgcgacaactgcctcaagacatagtttagggtaataaactaggcgataaaaaatgccatgacgcttggttatgctctgaacttgtgaggtgtgttccacttccacagtacattcgtctgtgtatatgtagcatccatagctcaaacaagtggccgcaactgcactgtgtgtaacgatggtctttgttttcagtggattgtgaggttcatgctttact

SEQ ID NO: 117713 - DNA, 2456 bp, Zea Mays
ccgcgagcgccactaccaccgtaccattccgtccgcagaggagagccctcccctccaccggcttccccgcccctcctcccagcgatcgcgcctccttccgggcgtcccagccttggtccggtcgccgggtgcggcgctggtcctggtttgggctctcccatggcatctctggagcaggaggtggtggtcgccatggcatctctggagcaggaggcggtggtcgccgcggccgtcgtggagaacgtgacgccgcagcagcagggcggaggttgtggcggcgcaggaggaggaggggataccgttagcgcctggaggaacgtcgacattgcctggctcaaggcgaaggaagcttcaataagaagatatgaggcagccaactggttgcgaaggtatgttggggtagtgtgtgcgaaggaccttgcagaagagccttccgaggacgaattccttgttggcctgagaaatggcattattctctgcactgcactcaataagattcaacctggtgcggtacctaaggttgtggaggtgccatcggattctactgcccctgccgatgctacagctctctgtgcatttcagtactttgagaatgtgagaaatttccttactggcctgcaaggtttaggtcttccaacatttgaggcatcagacctacaaaagggtggacaaggtgttcgagttgtagactgtgttctcgctctgaagtcattttgtgatgctaagcaagtgggaaaacaatcttcattcaaatttggtggcattgtaaagcctttgtcgggaaagtatgccactcgcaagaataatgaaccttctgtgaaggcgatgataaggagtcactcagctgaattacttcgggatggcgtatcactggagcaaataggtcttgatttttctccagaactcactgaaacaactgctccagattccatccggatgcttgttcaaacagttctctcagataagaaaccagaagaaattcaatcagttgtagaatcactcttgagcaaagtaattaatgaacttgagcaccgtattgcaagccagagtgaattggtgaaagaaactatggataccaacggctgtaactcagttttgagaatggagtctccctgtaacaccaatgacagtaaatcattatccagagtggaccctccacaagtggagttgacttcctgcagtgatctggagaaggtgaaagaaactatggataccaatggctgtaactcagttttgagaatggagtctccctgtaacaccaatgacagtaaatcattatccagagtggaccctccacaagtggagttgacttcctgcagtgatctggagaaggccactgaaaatattaagatggacgaagttgatgagaatgcgttgagtctgacagaagatgtaagcacattagtacatgcaccactaagcaatgataatgtaaataaaaatatgccaaagccagtgagaaattttgatcgagaggagaaacagatccaggatttgaaaagtaacatgtccacagttaagtgttgcatggagcagttaaaactgctgtactctgaagaccttaaaaagcttggtaatcagttgcgtattgtttctcatgcggcttctggatatcgtaagtttgttcaggaaaaccgcaagctttacaaccaaatacaagaccttacagccaagtcaaacgaggaaggaggtgaaggaggagaagaagttagagagctcaaagaacagattgcttgcctcagggcagcattagctaggaaagatggaggtcaagagagcattcgaagcactcaatcaagcccagacatatatagaatgagaacgggcaatggattacctgcgttgaggcacccaatagtagatggaagtatagagaacgactcggcattgggagatttcgctgagcactcgccattcgggagcagcaattcgctgccagagttgggaccagatggcacacaagatctagccttctaccaaagaagcagccctgaacagcaatggagctggtccgggtctgttgcaacagaggattccgatgacttcgaggttgcaacgaattgctcgtcagatctggattgcgtgagaccatctagtgccccaaaagcttctggtttaacaaacggagggggctcagctgcaagaaagtcccaactgaagggtgcaaaaagttcagacatcagaggagggaatcctgcaaaaaagtcatcgcccttacagaaaaagctgagtgctccctcaccaacggtaactaagaagagcggaactgaaggaaagaaaactccaaatggaaaaacaggagccaagaagtaagcaactcagttgaaacttcgttttgttgggaccaacttcaccatggccggggacagataaacatgttgatcctatctactgggtgatacattggtgttttgacacacggatatgtcagtcctattggttgagagagcatgctg

SEQ ID NO: 117714 - DNA, 207 bp, Zea Mays
atggcttctacaaggatacttgctcagcaactccaccagtctcttggaggtggagggggcggtggaggtggtggtggcggcggcggcggcggtggcggaggaggtggtggcggtgggggtgggggtggcggtggcggtaatggaggaggtggtggaggtggaggaaactagattgccttgctgctaccctcatcatagcccaggagg

SEQ ID NO: 117715 - DNA, 1145 bp, Zea Mays
gcaccctctcatgctaatctcttttacttattgcttttattagttagaggcttcggccttggtaagttgaagaattatcttgcgggggtgaaataattaattggatgaacttttttccacgcctagatagataacaaagagactatgatatatagttttcttattgaccaaacgaaccatgcacctcccctgctaaagccacaccttgcccaaagtcaccaacgccacttctctaatctagtcaagttattttaactatcagtcttcctagaatacattgaatttgtatattgcttatgatcctatacattgacttaacactataaatactcccctccccttatgatgatgaacaagtgtgtcgtattcaagaactttaagcaaatggcttcttcaaggatgcgtgctcagcaactctaccaggctcttggaggtggagtgggaggtggaagcgatggtggtaacggagggggtgacggtggcggtaatgggggtcgcggtggcggtggcggcactggaggtaatggcggtggcagcgatgggggtagtgaaggtggtggtggtggtaacagagggggaggcagtgggggtggcggcgctggaggtagtggcggtggcagcggtggtaatgaagggggcggtggtgggggtaatgggggtgacggtggtggtaacggaggaggaggcggtggtggtggaaacggaggaggcggtggtggtgggggtaatgggggtggcggtggtggcagtggacatagtggcggtggtggcggtgggggtagtgggggtggcggtggtggcagtggacgtagtggcggtggtagcggtgggggtagtgggggtggcggtgtttctaacggaggaggaggtagcggtgggggtaatgggggtggaggtggcggtggcggaggcggcggcggcggaggaggtagtggcggtggcaacgatgggggtagtggtggtggcggtggcagaggtaggggtagcgggggtggcggtggcggtactggaggaggtggtggaaaaaactaggttgccttgttatatgccttgttgctaccctcatcacaacctaggagtttggctctatttgaatcattatgggacaatggtgaggtagttgtatctatgttcatgtttatgac

SEQ ID NO: 117716 - DNA, 510 bp, Zea Mays
gcaagtgtgccatattccagctaggcaaatggcttcttcaaggatacttgctcagcaactccaccagtctctcggaggtggagggggcggtggaggtggaggtggaggaggaggaggaggaggcggcggcggcggaggtggcggcggtggaggcggtggtggtggtggtactggaggaggaggtgggggtggaggaaactagattgccttgttgctcatcacttgtctctgtttcaatcgtttcaatcattctgggatggtggaggtagccgtatctatgttcatgtttatggccaagccatgcatgtttatgcatgcatgtgtgtagtgcaaagatgaataaggacgtcgagctaaatctatgcaaccctcgacgtggtgtgattgtattttgtatttgaatcttgtgaagcatgtgtgtgtgtgtcatgtactcagttatattatgtggtgctctcacattacatatgatatgtcctcctgtgcttgggctgctggccgctacagata

SEQ ID NO: 117717 - DNA, 138 bp, Zea Mays
aaaagaaaaaaagcacaagaaagttattgtgcgctactagcgaaagcattttcagaggtggacaaatctaattttcattggcggcaaatagtagatgcccacctctagtaacagtttctagataacaaaaaaaaaaga

SEQ ID NO: 117718 - DNA, 2207 bp, Zea Mays
ttttttatttgtttgttatcagatcctaaaacgatttcgattttcgaatctgcttagaaaagtccggccgaaacgtccgatggattaccactatccaccagtacatatcaacggaccagaacgctgttagagaaggatgtagtccaaatccctcgccaagaaaccgcggctcggcggcatggcgtctggcggcggcgctgtctccaacaagaggtaccgacaggtcagcagctgcacgggccacgacgacgacagctgcgggacgagccgccgcggcaagacatgcgaagcagcccctagatccggccgcgaccacgacgacgacggagagagcgccgatggcgatggctctcgcgggcatgcccaggaaacggctgacgacggcagcagctccggcgacgaggattacatgttcgagtacgacgacgacgacgacgacgactgcgaaggaggagccgagcagacacaggccgacgccgcggcgtgcgacggggagcagaggtacgccgttctgaccgaggacgacgtccgcgcgcggcaagaggcggacaccgccagggtcgccgaggtgctgtccatcccgccgggcttcgcggccgtcctgctgcgccacttcaagtggcgcgtcgggcgggtccaggaggagtggttcgcggacgagcggcgcgtgcgcggcgccgccggccttcccccgggccagctcgtccccgcggcgcgcggcttgcggccgcgcgtctgcgccatctgcttcgacgagcagcccgcggggcagacggcgtccgcgggctgctcccactactactgcaacgggtgctggcgcgggtacgtccgcgcggcggtgggcgacggcccgcgctgcctgtcgctgcggtgcccggacccgcgctgctcggcgcccgtcgtccgggagctcgtggacgaggtgctggcggcggacgacgtgggccggtacgcgcggttctggctccggtcgtacgtggaggagagcggcgggagggtgcggtggtgcggcggccccgggtgcgcccgcgcgctggagtcgtcgggcggcggtgacgcggcggcggacgtgttctgcgtgtgcgggtacggagtctgctgggcctgcggcgaggaggcgcaccggccggtgtcgtgcgccacggtgcgcgcgtggctgctcaagaacagctccgactcggcggagacggccaactgggtgatggcgcacaccaagccgtgccccagatgcggccgccccatcgagaagaaccagggctgcaaccacatgcggtgctcgccgccgtgcggccaccgcttctgctggctctgcctgcagccggcgggaggggagaaccactacgcctgcaacgacctccgcccacatccgccggccgagacgggcgtcgccggcgccggcgccgaggagaaggaggcgaggcggttggccagggcgtcgctggagaggtacctgtaccactacgagcggtgggtgtcgaaccgcgcggcgctggagagcgtggccagggacacggcgacgctggagcgcggggagctggagtggatggcgagggcggcggacgtcccggccacggagctcgggttcgtggccgaggcctaccggcaggtggccgaagggcggcggatcctgcggtgggcgcacgcgtacggctacttcctggacccggagcgcgacgtcaccaagcgcgggctgttcgacgacctgcagaaccaggccaaccgctggctcgagtgcctgcacgcctccgccgagctggagaggaaggaactcttcggcgccggcggggaggccgcgcccgtcgacggcgatgcgttcagggcgtacaggcagaaggtggccaacctcaccggagtcacccgcaagttcatagggaacctcgtgagggctttcgagaccgacctgtcggaggtggtggcggtcattccggccaactagctagagatactagactgtattccggttaccatccatgttcgtgtttcttgcattgatcggaagaagaagaaccttgcatattgattgatctgaacaacatcgcaccagcctgccgattactttactagtatttataaaacttcataaatataaaattatctttactacattcatttattttgagactgattaaacaatgctcgtggacggagtttcctcagcgtatactccatgctgccaggcttccactggtgccagtgtcaggtctcgc

SEQ ID NO: 117719 - DNA, 2389 bp, Zea Mays
gctagccgaagctccgagtcggtcaatctatttccaccagtccccatccagtacaggccagcactgccgctgccgtgtcgccaccggcccccggctggctctccagcgactccgtcggcggcttgccttcccgcgccgcgccgggcccggatcgctcgccctttccgactgtcctgctcaacgccgccaccagcacgtcctttcccgcgccggaggtcccgctcgcctgccacagcggtgcggcgcaagctcccccaagcgtttctcaagtgacgagaagaagaaagagggggagaaggaggttggcgtcagtgggtcccgcggaccaatcagctagagagctgagtgatgtctcgcaagcgatgagcctcatgagatcggatcggaggccatcattccacgcactggtgatgaaaagctcgcttggtgcccctagctagctagtggcgaagcaaggaagctagccagccaagatcctgcttgtgagaaaaaaaagggagtagatccagtaattttaagaatctggtcaacatacctacggcaagatggctgatattgtaatccgcgacctggagagggtagtcaaagtcgcacttgcgatcaagaaggccgtggaaacagctaagcagaacaaggaggattgcgttaagatcggtgagcgtgcagctgaggtcagtactcatatgaagcggctgaaggagaatacaaaagcaatggaggaccctttgatgagcgatacgctcaagagtatggaagagacactccaacgcgctcttaagctcgtcaacgagtgccagaggaagcacgtcgtgctccattacttaaatgccggcggcatgtccaagaagctgcgccaggtgcaggaggatatatcatataaattgtggaatggggtcttggccaccgttgtcgacacaaggattgctttggaaaagcagatccaatctgctattgatgcccctctgcaccaacaccaacagcgtgcagggcaggtggaaacctcacaaagtagtcattcaagaactgatcaagctagcgagaaaggaaaggccatgttagcaagagtaaaaagggagcagtctgaacttttgtctggtgttcctcagttcagtttgtctcaactgaacgctgctacaaacgaattttcagagggctgtgtggttgaaagaggctactacaagggagtattacacgacggactagatgttgccatcaagaagttagcagtctctgatgatactcaagagaggcgcctgcaacttgagcttaatattcgtgcaaagcttgaacatggaaacatacttaaacttctgggatattgcctcgatgcccaagaaaaagaaaagctatactttctggtcgaagaatacataccgaatgttgaaagcttggagaaatttattaatgtctctcgactcgattggtcctcgtgtttcaagataattcaggggatagcaaagggcttacattgcttacataagcatcatattctctatatggatttgaatccagccaacatcctcgtccgttcagatatgaatcctgtggtcatcaattttggatcatcaatagtgctggatcgtgatgatgataaggtcaccggggatgccgtagcaggcacactgggttatgtcgctccagaaaaacttatggaagcttatgcatcaatgatgtctgatgtgttctcttttggaatcatcatcattgagatcattaccggcaggagagcttcacctttcgttgatttaccggaatggggttcagttgatgagatgattacatcagcgaaagggttatttgatccggcgctagctaacgagtctcagctgatgaagattaataggtgcagagaggtcggactgaagtgcattgagcgggatccgaaacgtcggcctaccatgggaaatgtccttgagatgctaagtagctagagtgacaggcaccgatttgaggtgttctcggttaggagtggattgaagcggattagagataatcaaatctcttgctagtcaaaactgaatagaaatgggtttactttccctcaatcccctcctacctatgcaaccaaacaaggccttatgggtttcaacaatttggtttgatgtattgtcacaaattgatcatttgtaacattcaagatttatgcgcaaatgtattggcgtgtggattagagagtttctatcttataggctggctcttgaatgatatggcaaacataagctagcaaaccagttcaactactgagggtgcacatgaacctcgtgtttactagcatttttttttcgtatgctatttcctagttcaagtttgcatctcaaacctttttcatgtatgtacatgtattgtaaatgtgtcaagtgttaattttattgaaacaattgaaatgtgt

SEQ ID NO: 117720 - DNA, 1700 bp, Zea Mays
ttttcttgtagcgcgctgagcaacgcaagtaagatggccggcaagcgccgccatcctgccatcgggatcgatctgggcacgacctactcctgcattggggtgtggcagaacgaccgcgtggagatcatcgccaacgaccaaggcaaccgaaccaccccatcctacgtcgccttcaccggctccaggcgcctcatcggggatgctgccaagaaccaggccgaaatgaaccccagcaacacaatcttcgattccaagcggctcattggtagaagatttagcgatgcttctgtacagagtgacattaagcactggcccttcaaggtcatttctggacctgatgacaagcctctgattgttgttcagtacaggggtgtggagcatcagtttgcagctgaagagatctcctcgatggttctcgtcaagatgcgggagactgctgaagcctatcttggcaccaccatcagggatgccgttgtcactgttcctgcctgctccacggacttgcagaggcaggccacctggaatgccggagtgcttgctagtctcaatgttatgcgcatcatccctgagcccactgctgctgctttggcttatggtcttgacaggaagtctgctcaggttcagggtttatacaatgttctcgtgtttgaccttggaggtggtacctttgatgtctctgttctcgacaaagtggagggtgtctttgaggtcttagccacagctggtgccgctcaccttggaggtgaggacttcgacaaccggatggtgaaccactttgttcaggaattcaagagaaagacgaaggaggacatcagtggcaaccccagggctctcaggagactaaggacggcctgcgagagggcgaagaggaccctctcctccactttagaggccaccattgagattgactgtttgtacgaggacatcaacttctactcaaccatcactcgcgccaggtttgaggagctcaacatggatctcttcaggaagtgcattgacattgtggaggactgcctcagcgatgctaaaatggacgtgggctcggttcatgatgttgtccttgttggtggctcctctagaattccaaaggtccagcagtttctccaagagctcttcaacgggaagaagcttttcaagagcatcaaccctgacgaggctgttgcttacggagctactatccaggctgcaatcatgagtggagaggatgagatacaggactacctcatgaacgatgctacgcctctttctcttgggttggccacggatgggggtgtgatgaccgtgctgattccgaagaacgcaaccatccccacaaggaaggaggtggtcttgtcaactgactccgacaaccagccttgtatccgtatccaggtgtacgaaggtgagggggccatggctcgcgacaacaacctgttgggtgagtttgagttctccattcctccagcccccaagggtgttccacagatcactattacatttcatatcgatgccgactgcatcctcgatgtcgcagctgaggacaaaactaccggcgagaagatgaggaaaaccatcaccaagaggttccgtttaaagcattaaattatttattatttatcaccatatgtaattaaaaagagatgaactctagaaattctgacagaaattagaaacatagcaattttctaattttagtttcatagacattaatgatcaacgcc

SEQ ID NO: 117721 - DNA, 258 bp, Zea Mays
agttcagaagttggattaggagtattgaaggttgcaacacaaaatgatgcttttgtcatgaaacatttgtacaaattctttaacaaatatgagcaaccttgggtttctttgatctggaataattattatagaaatgggagattgccgggtatgcagaaaaggggttccttttggtggacaagtattctgaagtgacttgacacatacaaaggtttagcttcagcacagattgagaatggtcaatccattcagtttttc

SEQ ID NO: 117722 - DNA, 1889 bp, Zea Mays
atcactccatggccgacaagcaagaacaccagcagcagccccacggccacggccaccatttcctggtggtggcctacggcatgcagagccacgtgaacccagggcgcgccctagcccaccgtctcgctcggctcagctgcatcgacggccgccccatcctcgccacgctctccgtgccggtcgccgcccaacgccgcctgttcccgtcgcccacgacgatggtggacaaggaggcctgcagcgacggcgtcatctcctacgtcccccactcggacggcttcgacgacggcgccagcgcgcccaagaccgccgaggactgggcccgccggcgccgcgcgaccgccgccagcctctccgccgtcgtcgcgcgcttcgccgccgccgggacgccggtcacgtgcatcgtggtcacgatggtggggcccgcgatggtggacgtggcgagggaccacggcatccccttcgccgtctactggatccagccggccgccgtcctcgccgccgagtaccactacttccacagctacgacgacgaccacgcccgcgcgcgcgaggtgagcctgcccgggctgcgccgtcctctcccggtccgggacttcccgtccttcctggtcgacacgacgggcagcgtgctggccaaggtcatcaccgaaatgttccgggaactgttcgagagcatggaccggtggcggcccaaggtgctcgtgaacacgctggaggagctggaggcgggcgtgctcgcggggatgaggcgccacctggacctggtcgccgtcggccccatgctcggggcctcggcggacgacgcgcggatccatctgttcgagcacgacgacgacgtcgacaagaagaggtacatggactggctccgggcccgcccggacagctcggtggtgtacgcgtcgttcgggagcgtgacgaaggtcaccaggcaccagatgggcgaggtcgccgcggggctgcggcagtgtgggcggccgtacttgctggtcgtacgcagggacgggctccaggacgacgacgacgagagcagcagcagcctccatgtcccgctgggctcggagagctgccagcaggggatggtcgtgggctggtgcgaccagctggaggtcctgtcgcacccagcggtcggctgcttcgtctcgcactgcggctggaactccaccatagaggccatggcgtccggcggcgtgcccatagtcggcgtgccggactcgtttgaccagccgacgaacgcgtacttggtggaggaagagtggggggttggcatcagaacggggcgaaacagcgacggcgtgttgtcagggacagagttggcaagatgcattgagctcgtcatgggcgacggtgcaagagcagtggcgataagggagaggatgaagggcttgaaaacgatggcgcaagcagcagccgacacaggcgggtctgtggagacaaaccttcgccactttgtcaaaacattccaagctcttgagccgtgacacattttgcagaagacggagtgtgtcaaaatcagtataatgaaatcctcttaaaaaggtgtttggacttcgaaaaaaaatcagctaaacttcttttggattaaaatctgtttggcttagcattcgactccagttccataaatgacagattttagggaaaatatccttctcttaaagaacccacatgtagatgaaccaactccattatttctctctcccatctcactcacccagtcatctctctccatggaacgacatgaggcatgaggtgacactgtgacagtcgactgtcaatttcctccaccttagcttaaatcatggagtcattggcatgctaccttcacttttcatccccaagtccatcttgtattgtatcatatcaataagaaaacacccttgttcaacttt

SEQ ID NO: 117723 - DNA, 3171 bp, Zea Mays
ctgctgcgaacgatacctgtcaacaaaatggctttgtctctgattctcatctcggtgcggaaatcgctcttgaagatcagagggatcacatcatcagggagcttaacgcttcaaccaacgtgcctccaagtagatgccaagcctttaaggatgggatgaaacaaggaattatcaatccaagtgatattgatgtcacctttgagaattttccttattatctcagtgagaatacaaagaatgtgctcttgtcatctgcgttcatacacttaaaaaagaaggagttcatcaagcaatttgttgagatctcatcaataaaccagcgaattttgttatctggtccagcaggttccgagatttatcaggaaacattggtaaaggcacttgccaaacattttagtgctagactccttgtggtggattcacttttgctgcctggggcaccttcaaaggatccagaattccagaaagatgttgggaaggctgataaatcaggggataaggcagctgccgagaagtttgcaatatatcagaagcatcgttcttcgttggcagacactgttcacttcaggaggccagctgcaccaacttctagtgtgaatgctgatattgtaggaacatccactctgcattctgcatctctaccaaaacaggaatcgtcaacagctacatccaagagttatacttttagagaaggtgatagggtgcgttatgtgggtccagctcaaccatgctcgttgtcacaaaggggaccaagttatggttatcgaggtagagtgatgcttgcttttgaagataatggatcctcaaaaattggagtccggtttgacaagcagatccctgatggtaatgatcttggtggtttgtgcgaggaagatcatggcttcttctgctctgctgaattactgcgcccagacttttctgctggtgaagaagttgagaggctagctatgaccgagttaatagaggtcatttcagaagagaacaaatctggacctctgatagtgttacttaaggatgtcgagaaatcattcacgggggttacagagtcactatcatctttgaggagcaaacttgaatcgcttccacctggtgttcttattataggatcccacacccagatggacagccgcaaagagaaggcacatcctggaggttttcttttcacgaagtttgccagtagtagccagactctttttgaccttttcccggatagctttggtagcaggttgcatgaaagaagcaaagaaagtccgaaaacaatgaaacatctaaataaacttttcccaaacaaaattttgatccagcttccacaggatgaagctctacttacagattggaagcagcagttggatcgtgatgttgaaacccttaaagccaaatcaaatattggtagcattcgcatgtttctgagccgcaatggaattgaatgcaatgatcttgaagaattattcatcaaagaccaatcattgagtaatgaaaatgtggacaagattgttgggtacgcagtaagttatcaccttaatcagaataaaattgaaacctctaaggatgccaaacttgtactcacaactgaaagccttaagcatgggctcaacatgctccaaagcatgcaaaatgataacaagagctccaaaaaatcactgaaggatgttgtcacagagaatgagtttgagaaaaggcttttggcagatgttatacctccaaatgacattggagttacctttgatgatattggagccttggagaatgtaaaggacacgttaaaggagctggtgatgctccctttgcaaagacctgagttgttctgcaaagggcagttaacaaagccttgcaaggggatattgcttttcggacctcctggcactggaaaaactatgcttgccaaagcagtagcaactgaagcaggcgctaatttcatcaatatatcaatgtcgagcattacatcgaagtggtttggtgaaggggagaagtatgtaaaggctgttttctcactagcaagtaaaatagcacccagtgttatatttattgatgaggtcgatagtatgctaggaaggagagaaaatccaggggagcatgaagcgatgcgcaagatgaagaatgaatttatggtaaattgggatgggttgcgcactaaagataaggagcgtgtgcttgttcttggtgctacaaataggccttttgacctcgacgaggctgtgattaggaggttcccccgcaggttaatggtaaacttgcccgatgcatcaaatagggagaaaattctaaaagtaattttggcaaaagaagagctgggatctgatgttgatatggactcgcttgccaatatgactgatggttattcaggaagcgacctgaagaatctgtgtgtgaccgcggcgcattaccccatccgagaaattctggagaaggaaaagaaggagaagaatttggctaaaacagaaggtaggccggagcctgcattatatggaagcgaggacatccgccctcttagcatagatgacttcaaatctgcccatgagcaggtttgtgcgagcgtttcgtccgactcggcgaacatgaacgagctccttcaatggaacgacctgtacggcgaaggcgggtcaaggaagaagaaagcgctgagctacttcatgtgatggggtgagagcatagaatccagaaggatcacagccgtggcataagatcagaaggaacacagagcggccatagtaccacacccactatggccctaaatccagtcaagttttcgctccttccccctccctcagtagccgccgccgccccgccgccgcctggtgtaattagaactgtgtacggagtcgagttggtttgccagctgtttcaaggttacagagttgagatttggaattacaatggcgccattgccctcctccaacccccccccccccccccccccccccccgttttcttcctcccataagttgcggtcactgtccttcttggactctctggcctttgttcttgtaaatgcgaaatgaagggatgtgaaataagaacatcttcgtcctgttgttgacagtatggtacacatatttaatttttgtacttgaccggcgatgataaattggatcggtgccaacataagaattatggaaaggtgcctttcctgcccgccgaaatctgtgtgtatgtcgagtgggctgggtattg

SEQ ID NO: 117724 - DNA, 2009 bp, Zea Mays
ccttgatttgcactgttttaatttaatatgatttttgaaaatgcaggatagctttggtagcaggttgcatgaaagaagcaaagaaagtccgaaaacaatgaaacatctaaataaacttttcccaaacaaaattttgatccagcttccacaggatgaagctctacttacagattggaagcagcagttggatcgtgatgttgaaacccttaaagccaaatcaaatattggtagcattcgcatgtttctgagccgcaatggaattgaatgcaatgatcttgaagaattattcatcaaagaccaatcattgagtaatgaaaatgtggacaagattgttgggtacgcagtaagttatcaccttaatcagaataaaattgaaacctctaaggatgccaaacttgtactcacaactgaaagccttaagcatgggctcaacatgctccaaagcatgcaaaatgataacaagagctccaaaaaatcactgaaggatgttgtcacagagaatgagtttgagaaaaggcttttggcagatgttatacctccaaatgacattggagttacctttgatgatattggagccttggagaatgtaaaggacacgttaaaggagctggtgatgctccctttgcaaagacctgagttgttctgcaaagggcagttaacaaagccttgcaaggggatattgcttttcggacctcctggcactggaaaaactatgcttgccaaagcagtagcaactgaagcaggcgctaatttcatcaatatatcaatgtcgagcattacatcgaagtggtttggtgaaggggagaagtatgtaaaggctgttttctcactagcaagtaaaatagcacccagtgttatatttattgatgaggtcgatagtatgctaggaaggagagaaaatccaggggagcatgaagcgatgcgcaagatgaagaatgaatttatggtaaattgggatgggttgcgcactaaagataaggagcgtgtgcttgttcttggtgctacaaataggccttttgacctcgacgaggctgtgattaggaggttcccccgcaggttaatggtaaacttgcccgatgcatcaaatagggagaaaattctaaaagtaattttggcaaaagaagagctgggatctgatgttgatatggactcgcttgccaatatgactgatggttattcaggaagcgacctgaagaatctgtgtgtgaccgcggcgcattaccccatccgagaaattctggagaaggaaaagaaggagaagaatttggctaaaacagaaggtaggccggagcctgcattatatggaagcgaggacatccgccctcttagcatagatgacttcaaatctgcccatgagcaggtttgtgcgagcgtttcgtccgactcggcgaacatgaacgagctccttcaatggaacgacctgtacggcgaaggcgggtcaaggaagaagaaagcgctgagctacttcatgtgatggggtgagagcatagaatccagaaggatcacagccgtggcataagatcagaaggaacacagagcggccatagtaccacacccactatggccctaaatccagtcaagttttcgctccttccccctccctcagtagccgccgccgccccgccgccgcctggtgtaattagaactgtgtacggagtcgagttggtttgccagctgtttcaaggttacagagttgagatttggaattacaatggcgccattgccctcctccaacccccccccccccccccccccccccccgttttcttcctcccataagttgcggtcactgtccttcttggactctctggcctttgttcttgtaaatgcgaaatgaagggatgtgaaataagaacatcttcgtcctgttgttgacagtatggtacacatatttaatttttgtacttgaccggcgatgataaattggatcggtgccaacataagaattatggaaaggtgcctttcctgcccgccgaaatctgtgtgtatgtcgagtgggctgggtattg

SEQ ID NO: 117725 - DNA, 1767 bp, Zea Mays
cccatttgtcttttgtcatcctttcgtctttgccaaagattttgtcacgacctacgttacatatctgatggactgatggtgcaaagcgttcgggcaagcaagctagacgcaatggcagctcctcttctcctcatcgtcgtcctcgtcgccaccaccgccgcggtctctgctgcaggctcggacaccaccatattccccacagaagcgctaccgaccaagtccggctacctcccgatccccgcggccaacgcttccatgtactacgccttctacgaggccacccacccgctgaccccgccggccgccacgccgctcctggtctggctcgagggcgggcccggcctgtcctccttcgccagcaacttcctccagatcggcccctacgtcttctcctcctcgcccgccgactccgacaccgactcctccgacgcgtcttccttggcgcccccctcgctgcgcttgcgccccaacccctacgcgtggaaccgccgcttcgggctcctcttcctcgagagcccgctcggcaccggctacagcgcggcgccgtcgccctccgccatcccgacgacgcagcccgccgtggcggagcacgtcctcgccgcgctccagtccttcctctcgtcgcagccggacgacgccaccttccgcgcccgcccgctcttcctcaccggcgagagctacgccggcaagaccatccccacggtcgccgcgctcatcctggccagcaccagcaccaccagcaccaacccggctctccccgagcacctgtccacgaggatgaggatcaacctgcgcggcgtggccatcggcaacggcttcgtgcacccggcggcgcaggtgaccacgcacgccgacgtcctctacttcgcgggcctcatcggcgcggagcagcggcgcgaggcggcggccatgcaggcggaggcggcggcgctggccgcggcggggcggtggcgcgaggcggtggacgcgtggttccgcgcgctgtcgtggctgcgcgacgccacggggctcccgtcgctgttcgacgtggcggcagcggacgacgcgtcgtcgccgctgcaggccctgacggccgccggcgcccgagccgcggggttcatgaacgacgccggggtgagggcggcgctgggcgcgcgacgcgacgcgccggcgccgccgtgggagctcgtcagcgccgcggtcgtggcggcgctgcacgacgacgtgatgaagagcgccaagccggacctggaggcgctgctgcgggggccgccggcgccggcgccgtccccgcgcgtgctactgtacgagggggtccgtgacgcgcaggtcggcgtggtgtccgtggaggcgctgctgcgggagctggactgggatgggctcgccgcgttccgggacgccccgcgcgccgtgtggcgccaaggaagcggcggcggcggcgaggccggacagcgagggaggctcgccgggtacgtccagaagcatggcgcgctcgtgcacgtcgccgtgtacgcggccgggcacatggtgccggcggaccaggggcgggcggcgcaggagatgatcgagaactgggtgttcgacgagggcttgttcagcagcgacggcggaaagcaatacgatgaggcgtcttgtgggggccatgcgagtatctatcagtagcagtagcccatgacgcggtcttcatgaatttaatttagatgttttctgtattacacgtatagcaaataaagccagttgagtattggaaaataaataaacaaatagatggtattgatgtgtcgtcgt

SEQ ID NO: 117726 - DNA, 794 bp, Zea Mays
taacacgaaataaactctttccttgcaatttaacacctcgactactgtgctgcgtacaacaattcttccaaccaccatgcccgaattcaaatctctggtcggtacaacagaggcatttgcaacggtttataaggaaacaaaaacctacgagtaatcgtacagggagacgctcttgtcatccgacgcgctagccagacgccctgctcggactccggcaccgcctggtggcctgaaggccacggcccacacctgatcggagtggttgctcatggtctgcaccgaggtcctcatgttgaggtcccagagccggacggtgcggtcgctcgaccccgtggccaccgccaggccgtcggggctcgcgtcgatgctcagcacccagctcgcgtggcccgacatggccccgacgaggcccttctccctggcgtcgtagatgtggacgtggcagtcgtcgcaggccgtgaaaagcacgtgcgggtccaccggggagaacaccatggaccgcaccggcatgtggtggccctccaggtggtgcaggaacttcatgcggaccgcgtcgtagacggcgatcgtgccgtccatggacccgcatgctaggagccttccgtcggggctccaggcgactgacaggacgaacttgccgctgcctgtcttgtcggggcgagctccctccgggcgtgggacggcgaggctggtgatcgccttccacttctccgtgtcccacagcttcactgatccactgccaccaccggctgcggccagagcattaccctggaaagaaagtgaactcccaaatc

SEQ ID NO: 117727 - DNA, 2128 bp, Zea Mays
ctagcttccgtcaccgctcccccagtaggccagtaccaccaaatctctagcgaggccgcccgcaaccgtgtcccggggttgaggatctgcgcggggccgtcctcgcgcgcgccgccgcatccccgccgtcccactccggcgaggctggctgcgttccgtcgtcgtcccccgcaccgccgctgactcctggaacaggaaccagcttcttcgcccccaccatctcacgtccagcgtcgcgaactcgcgatggcgggcgccgccactcctcctccgtcgtcgtcgtcgtcggcgtcgtgtggcacggacgctgcctacctgctgttccgcggggagacgctgctccccgacggcgtccacgcctccctctacgccgtcgctctcgcgtactgcttcgtggggctgtccgcggtcacggcccgcttcttcaaatccatggagcagatcatgaggcactcccgggaggtggtggtcggcgtggacccgcgcaccggggcgcccgtcgtgaggcgcgacaaggtgtggaactacaccgtcgcggacattgctctcctcgccttcggcaccagcttccctcagatctccctcgccaccatcgacgccatccgtaacctcggtcaactcacagcaggaggtctaggtccaggcacacttgtcggctctgcggcgtttgatctgtttccgatccacgctgtctgtgtgcttatgccaagggcgggatcaaagaagaagatctcggacctgggcgtttggttagtcgagctcttctggtctttctgggcatatatctggctctatgtcatcttagaggtgtggacgcctagagtgatcaccctctgggaggcatcgctgacagtcctgcagtatgggctgcttctactccatgcgtatgcgcaggataaacgatgtccatttgtgtcgatcccgtttgcgagaggtgagaggcctgaagattgggttccaccagaagatgtttctgctgtttattacgccaaatgtgatggcattgacgagacactccctatgggtgctgacgggaacgatgggattgtagacatcttctctgcacattcctactacgatgcagcagagtacagtcaacttgcagaagaggatatggaaggatcgtcaacaatggatcaagttgtaaagaacacacaagataacatgtcctggctttctatttggtggcaacaatttgttgatgcttcaatgttggagagccctgagtcaatgaagatggattctgtctgcctgaggtacaccagaatattttggaacttgatcattgcgccttggaagtttttgtttgcttttgtgcccccataccacattgcacatggctggattgcttttatatgctcactgatcttcataagtggtattgcttatggtgttactaagcttacagatcagataagctgcgtcacaggagtaagtccatatgttattgcattcacagcactggccgctggaacctcatggccagatctagttgctagcaagatagctgctgagcgtcaagtcaccgcggactctgcaatagccaacatcacttgcagtaactcggtgaacatatatgttggcattggtgttccatggttgattgatacagtgtacaacttcttcgtttaccgggaaccattgtacatagataatgctgccggtctcagcttctcccttctagtcttcttcgcgacatcatttggatgcataacggttttggttctgcgtcgtattatactcggtgctgagcttggaggccctaggctatgggcttgggttacatcagtctacttcatgatcctttgggttgtttttgttgtgttttcctctttaagagtatctggagtaatatagacaggaattaaaaaaaaaaggtagtgggggcttcgattttccataaattttgttgcaattggttttcatatccacaaagaaaacaactattgcgggtgaaaattagggtctgtgaattagggattatagatacaagtgcttgttctatataatgattactgatgaagccaacaatatattgtgtagtataattgaagttattgtatcagaaagaagggagaacagttggatagctcttaaattttttattcaatcagagtgttgcattatc

SEQ ID NO: 117728 - DNA, 621 bp, Zea Mays
aagaggtgtatgcaatatggttgaacactcaaaccttacatacttaacctttttcatcgttttacccaatttggcatgtttgaggtcaatgttggactctaaaccatcaagtcaacttgacttgatctagattgacgtatctaagctccaactcccttattcacttctcgagcttgatcttgagccttatgaattacaccacataattgtagatgttacctcattggttgtaagtcatgtccttatgtagtggtcctcgatgcaccataactcttcttaactcgatcaaccttgactttgcaagtcttcttcttcacccctggctttgggttcctggtctccttgaccttctcctatgcactcggtacctcaaagcttttcttgcctccatccttgcttgatcggttgtctctgagttacgcacaccgagtctcacttaagcaatgtccatcttacttgttcacttgtattgaaccctgttagctttgcattaagcacctgtcaacactagcacacttgttagtcctttaattgggttgtcatccaaacaccaaaacccacaagagagcattcaatctccccctttttggtgattgatggcaacacaattaaagcttacac

SEQ ID NO: 117729 - DNA, 317 bp, Zea Mays
aaacacagtcagaattttgtgcagataaactttcaattcttgaaagcatctcctcccagaggcggcatcttctgaagtttagagatacagagtaggacaccatgttgcatctcgactgtgaggatgccgagattccagtagaggaccacgttgtccatctgccagcagcccggcatcgacaacaccgcatcggtgaggacgtgatcgtcgagagcgtagcagtggagcttgaacaagacctggtcacgccagcgagagtactgctgggacgagtcaagatgaggacgacggaggcgaggccccggatgcgtcgggtg

SEQ ID NO: 117730 - DNA, 2065 bp, Zea Mays
cccctcccctccgccacccataacttccatcgccatcgctccaccaaagctggggacgcctccccgcccgaccagcgccgacgccgacgacgagcatcccatccgccagtgaccgaaatttcacaccaggcgctgcaagcgactgcaatggctatgtaccagcgctccaagcgggcagccgggaactagctcatcagtcattactgacggcgtaatcttcatccgagtggtcagtggcgtctacagtcgcagcagcttgtgcgcgcatggctagcaacatgtacggcaccacggtggcctgtaggatgtgctacagagaccagtacaggccgccgccgcgcgacttcacttgcgaggccaggaaatcggaggccaggaggtggggaaacgggtaccacctcatccccaggctctgccagtggaagcccagaggcagcaagtctgatggctcactgctcggcgacggccacggtggccgcgatgctcgctgccactcttgtggttcccataacagctgcgagtgcgaaactagagactgcgatgctatggaagatgctgctgcgagctcttaccgagatttcaagcaacattcaaggggaaatcctcaattttcagatgatcaagtttcatcgaagaataagtcagcctatgctagtcaagggttggctgaagcctgcaaatttgtttacaatgatgctaagtttgtaaatgaaagggctcaaaatgacattctattactttcacgtggcataacaaggctgaacaaacgcgcatgccaggatgctgctgttttgggcctggggtttctcaaacttgatgctcgtgcacggaaggatactcaaaagattgaccacacagtgaaggagagagcagcgcttcttaaccattttgccagagcatttaaggagcgagctcagtcagacttgaagaaagctgcagacaaacattggagtgatggtgccttggaggcagacctgcgacgagctgacttggttgttaaacgacgtgccatggaagacgctttcatggcattgaagtttgttcaggatatccatgacatgatggtgaacagattatatgagcagcttccgaaggacggttcatcttctcgtacaaattcaacagggtttattacgcttgagaagaacgggaaggctcttgaactgtttcctggtgaagtttctgctgatcagatttatgccatagaggaagcataccagagtatggcatctgccttttctgaagctgatggtattgactacacagatcctgaggagcttgaattgttggtagcaactctaattgacctggatgccatggatgggaaaaggagtgtttccttgattgctgaatgttcaagctctccagatgttaatactaggaaagccctagctaatgcattggctacagctccatctatgtggactcttgggaatgctggcatgggtgcattgcagaggctggctcaagatcccaactacgccgtagctagggctgcatcaagagccattgatgaactcaagaagcagtgggaacttgaagaaggtgacagtctgaggtttgtgatgaaccagaatctggcctccagggatactgaggatgacaattcaccagcggatgatgccgcatgagtcataaacaagatgaaagattccagtttcagtggcaatggatcaaagcacaaggaaccaccatgggcagcacataagcattcccattttacgtttaggactgaaaatcagatagatgtgttctagttgaggggggggggggggggggggatgtgttctggaacttgggtaaatgggggaattatgaaaacagtgtaaatagaagtctgctccctttggatattgttcatgcatgaagcaaaatgttatatctgaaaagcgcgtaccttgtaccagagtatctagtcttaggtgctccttgtttttatatatagtactgtaatatggcaaaaattatgtatctggataacacatgtagcttggttttgtcggcactgcatattgaggattgagtatgacttgtaccagcaattaataagtacctttattcgggt

SEQ ID NO: 117731 - DNA, 2373 bp, Zea Mays
ccctcccattctctcagtctctctccatccaccacccgacccgatagtgtcctagacgccgctaccgccgccaaccaaccactcttctcctacgccgccgccgccgccgatcccgtcgcgatgagccacgacaccggcgccggcgtggagtccctctcgctggacctgctggcccacgcgctggcggccgtgcgcgacccgcgggaccgcaagtcgtgccgcctcgccagccgcgccttcgcgcgcgccgaggccgcgtcccgccgcgccgcgcgggtgctgcgccgggacgcgctgccgcgggcgctgcgcgccttcccggcgctgtcctcgctcgacctctccgcgtgcgcggggctcgacgacgcctccctcgccgccgcgctgcccgaggagccgctgcccgtccgccgggtgcgcctcgcgcgggccagcggcgtcggctggcgcggcctcgacgcgctcgtggcggcgtgcccgagcctcgaggccgtcgacctctcgcactgcgtcgccgccggcgacagggagatggccgcgctcgccgccgccgccgggctcagggacctcgtcatggacaagtgcctcggcgtcaccgacgtcgggctcgccaaggtcgccgtcggatgcccgggcctccagagcctcagcctcaagtggtgccgcgagatctccgacatcggcgtcgacctgctcgccaagaagtgcccccaactgcgcagcctcgatatctcctacctcaaggtgaccaatgaatcccttagatcactctccacccttgagaagctagaggacatagcaatggtcagctgcttgtttgtagacgatgatggcctacagatgctaagtatgtgcagctcgctgcagagtattgatgtagccaggtgccaccatgtgtcttctttgggcttagcttcactcatggatggtcaaagatctctccggaaaataaatgtcgcacacagtttgcatgagatagaggcttgtgttctgagcaagttatcaacaataggagaaaccttgactgttttaagactcgacggcctcgaaatcttcgcctcgaatctccaggcaattggttctacctgcaagaatctggtcgagattgggcttagcaaatgcaatggcgttacggatgatggtatcgtttcgctagttgctcgttgccgcgacttaaggactatcgacgtgacgtgctgccatcttcttacaaatgctgcccttgctgcaatcgccgagaactgtagaaagattgaatgccttcggcttgaatcctgccctttcgtaagcgagaagggactagagtcgatcgcaactctctgttccgaccttaaggagattgacctcaccgattgtcgtattaatgacgcagctttgcagcagttggcaagttgctcggaactgctgatcttgaagcttggcctatgctctagcatttccgacgaaggccttgtttacatcagtgcaaactgcggaaagcttgtagagctcgacctataccgctgcagcgctgtaactgatgacgggctggcagccgtagcgagcgggtgcaagaagatgaggatgctgaacctatgctactgcacccaaatcacggacggcggtctgaagcacgtaggcggtctggaagagctggcgaacctagagctgaggtgcctggtgcgcgtcacgggcgtcgggatcacgtccatcgccgtgggttgcagtagcctggtagagctggacctcaaacgctgttactccgtggatgatgccggcctgtgggctctctcaagatactcccagaaccttagacagcttactgtgtcctactgccaagtgactgggctggggctgtgccatctgctggggtcgctgaggtgcctccaggacgtgaagatggtgcacctctcctgggtctccatcgaagggttcgagatggcgctgcgggccgcgtgtgggaggctgaagaagctgaagctgctgggcgggctgaggtccgtgctctccaccgagctgctcctgacgctgcaggcctgcggctgccgcgtccgctgggtcgacaagccgctggtctacaagggatgagcatgagcatgagcttgagcgggcctctggccaatcaaggagactgagacatgcatcattgagagagcagagggaagacgacgctggtcattagcggtgtgccctgcttcctttcttgcgacagtacgtagaagagtagctgcgatgcgagtctgtctgtctgtaacagtaacacctgtccttcagtgcaattactgtctaaactttcggagtttccgcaatatgatgactgcccatcttgtaagctcatttcttgagtggatagcagacacagcacggtctattccaataaactatagatagatc

SEQ ID NO: 117732 - DNA, 2091 bp, Zea Mays
gtacagagcattgtaaacgcatcccctcccctgcccctgcccctgccctgccgccgcagcttcggcttctcccgctcagctgcagcggcagcaggcggccgtctgttccgctcccctccgcctccgtttcttctcccggggtacctcagccgactcttccggaaacaaacaaaacaccctcccaccctttgcgctgcccgttgcggcctgtctgtctccccgtgacgtctcccggcggctcctggcatcggcgctctgccccgcctctcctcctgcggcggcggagagaggagggcgacggacggcatcatgaagcgcctagtagtcgtcctggcattggtgctggccgccgcgctcggcccggccacggccccggccccggcgcgcgcccagctgcggcgggaccaccaggcgccgccgggcccgcgcccgcacagcgtcaccatcaccgagttcggcgccgtcggggacggcaggacgctcaacacggtccccttccagaacgccgtcttctacgtccgctccttcgccgacaagggcggcgcgcagctgtacgtgcccaggggccgctggctcaccggcagcttcaacctcaccagccacctcaccctctacctggaggaaggcgccgtcatcgtcggcgcaaaggactcatcacaatggctgatcgttgaacctttgccatcttatggccaagggctagaccttcctggtcctagacatcaaagcttgatcagcggatacaacttaactgatgttgtcataactgggaacaatggagttattgatggccagggcttggtatggtggcagtggttgcgctcccatgagctgaaccatagccgacccaaccttctggagttcctgtattctgaagatattgtcatctcaaacttgacattcttaaattcaccagcctggagcatacacccggtgtactgcagtaatgtaaaggtccacaatgtgacgattaagacctcattggacgctccactgactgatggcatagttccagattcatgttcaaacttatgcattgaggacagcaccataagtgtcagccatgaagccatctccctgaaaagcgggtgggacaggtatggcatttccttcgggaggcctacctccgacattcgcatcagcagagtggacctgctatcatcttccggagccgctcttgcattcgggagtgagatgtctggtggtatctcagacattcatgttaaccacctccggatccacgactcctccaaaggtatttctttcaagacctcacccggccgtgggggttacatcgaggacgtggtcatctcggaggtacagatggaaaatgtgcatgtcggcatcgagttcaccggcaactgctcgacccacccagatgacagcttcgatccgtccgacctcccggcgatcgaccatgtcaccatgaagaacatggccggcacgaacatctcggtcgccggagttttgtcgggaatcgaaggagccccattcacagccatctgcctttccaaccttaacttctctatggctgccggttctggtccgagttcctggtcttgctccgacgtttccggctactccgaggcggtctttcctgaaccctgcacagagctccgtgatccgtcctccagctcttccgtctgctattccctggccagctacagcgccattgaaacagcataaatgtccatccatccttccatccatttcttgttctccccttgagcctgcatcgccgccatcttttgtctcagttcttttttttccaatacacacagacagaccaggaaaaagaacaacatcactactctcatggccctgaggctcggatcataagctgcatgaatgatgacctagcttgaaggggaagaagaatcaagtggggggttgtggacagctaggtgcttgcttgtacagctacatttctttattcaatctgtaagaaggaaggatttttttttggtttggtaggtgttgagcgcagaacagttgcttcatactattggcatgtgggtataaattatcaaacagcatgattaaattatacgtgtatattccatcccccctgttgaatgattgattgagaag

SEQ ID NO: 117733 - DNA, 2217 bp, Zea Mays
gtacagagcattgtaaacgcatcccctcccctgcccctgcccctgccctgccgccgcagcttcggcttctcccgctcagctgcagcggcagcaggcggccgtctgttccgctcccctccgcctccgtttcttctcccggggtacctcagccgactcttccggaaacaaacaaaacaccctcccaccctttgcgctgcccgttgcggcctgtctgtctccccgtgacgtctcccggcggctcctggcatcggcgctctgccccgcctctcctcctgcggcggcggagagaggagggcgacggacggcatcatgaagcgcctagtagggcagggctcggtgattccagcgcctggcggcccggccgtgccggacttcgggatcttggtcagggaatgaatggcgggcgggccctgatcgccaccgctggagatcttgtggtgacggacggtggtcgtcctggcattggtgctggccgccgcgctcggcccggccacggccccggccccggcgcgcgcccagctgcggcgggaccaccaggcgccgccgggcccgcgcccgcacagcgtcaccatcaccgagttcggcgccgtcggggacggcaggacgctcaacacggtccccttccagaacgccgtcttctacgtccgctccttcgccgacaagggcggcgcgcagctgtacgtgcccaggggccgctggctcaccggcagcttcaacctcaccagccacctcaccctctacctggaggaaggcgccgtcatcgtcggcgcaaaggactcatcacaatggctgatcgttgaacctttgccatcttatggccaagggctagaccttcctggtcctagacatcaaagcttgatcagcggatacaacttaactgatgttgtcataactgggaacaatggagttattgatggccagggcttggtatggtggcagtggttgcgctcccatgagctgaaccatagccgacccaaccttctggagttcctgtattctgaagatattgtcatctcaaacttgacattcttaaattcaccagcctggagcatacacccggtgtactgcagtaatgtaaaggtccacaatgtgacgattaagacctcattggacgctccactgactgatggcatagttccagattcatgttcaaacttatgcattgaggacagcaccataagtgtcagccatgaagccatctccctgaaaagcgggtgggacaggtatggcatttccttcgggaggcctacctccgacattcgcatcagcagagtggacctgctatcatcttccggagccgctcttgcattcgggagtgagatgtctggtggtatctcagacattcatgttaaccacctccggatccacgactcctccaaaggtatttctttcaagacctcacccggccgtgggggttacatcgaggacgtggtcatctcggaggtacagatggaaaatgtgcatgtcggcatcgagttcaccggcaactgctcgacccacccagatgacagcttcgatccgtccgacctcccggcgatcgaccatgtcaccatgaagaacatggccggcacgaacatctcggtcgccggagttttgtcgggaatcgaaggagccccattcacagccatctgcctttccaaccttaacttctctatggctgccggttctggtccgagttcctggtcttgctccgacgtttccggctactccgaggcggtctttcctgaaccctgcacagagctccgtgatccgtcctccagctcttccgtctgctattccctggccagctacagcgccattgaaacagcataaatgtccatccatccttccatccatttcttgttctccccttgagcctgcatcgccgccatcttttgtctcagttcttttttttccaatacacacagacagaccaggaaaaagaacaacatcactactctcatggccctgaggctcggatcataagctgcatgaatgatgacctagcttgaaggggaagaagaatcaagtggggggttgtggacagctaggtgcttgcttgtacagctacatttctttattcaatctgtaagaaggaaggatttttttttggtttggtaggtgttgagcgcagaacagttgcttcatactattggcatgtgggtataaattatcaaacagcatgattaaattatacgtgtatattccatcccccctgttgaatgattgattgagaag

SEQ ID NO: 117734 - DNA, 1403 bp, Zea Mays
ttattttgtatccgttttacataaaaaaaatagttgagttgtgacgcggcggaccgctcggatccaccccacgtacgcgcccatcgagccgctcgcaaccctaatctgaaccgccgtcattgtctccagatcgccatccgccctcatcccctcacgcccaaactaaaccctagtagatcgccgtcgtcccctcccgaatcgccatccgtgtattcctccccaccgcaagaccttcctctccctcccatctaccgatccattcctcccctccgccttccagccacaagagctccacctccacccgggctcgccgccggcggaggaccacatctgggagatgcaaagtggagcacgctgcgccactcaacatcgagatccgcttcttgggtcgacccttcgacagcgcccccctggcagacccgggcaacaacattgtgcttcgtggtgctgcagtggccgctggagacccgtcgacggggagccccccaagaccctctatcagctccaccgatgccatgagagcgcaagaaggctgaccccctatggctgcgaatagggccatggttgctgctggcactcgagcaagccgacgccgactatgaccatgtccccatgagtcaacagactggtgactacgccgctgggagcacctcgccaggaacatgcatacctccctcccgtgtctccttcaacccgccatgaatttcttggtttcactcgctggctgatcgactaacagagaaaaaattgcagcagggcagtggagttgaggctccgtgcctctgccatgcttgtatgtaggtgtagatcctatatctctgataatagcacatattgcagctttggaatgtttgccaccggagggtgtgatagatttgtgaatgtgtgggatgacattaataagaaaatactatatcaaaacacagctgcggcgagctgggatggatcaagcacttgggtgagagttcttcgcgcagggctggagtgctacttccagtattgcttgcagctcgaggagttgatgagatgcaacggcggaatgccaagttggggtgagggctatgctggtcaggaacatgatgcaaattagggtgtcccttcattctataaggaatcataaaagcatacggaggaactatgtataagctacaaaagaagcactacaaaagaagcataaaaaagaatttttatagcataagccaagtgtttctgatgattttgttttttcaaattgtattttctgttattggttcagcatgcacatatattgacatgatttatggcatggcatctgtcatctttgttatatttatgacatcattcttgattgatgtgtgcgacatgaaatgatggatctttttaacatcctgaccatcattgtgtcgctcaattatcgttatttt

SEQ ID NO: 117735 - DNA, 1396 bp, Zea Mays
ttattttgtatccgttttacataaaaaaaatagttgagttgtgacgcggcggaccgctcggatccaccccacgtacgcgcccatcgagccgctcgcaaccctaatctgaaccgccgtcattgtctccagatcgccatccgccctcatcccctcacgcccaaactaaaccctagtagatcgccgtcgtcccctcccgaatcgccatccgtgtattcctccccaccgcaagaccttcctctccctcccatctaccgatccattcctcccctccgccttccagccacaagagctccacctccacccgggctcgccgccggcggaggaccacatctgggagatgcaaagtggagcacgctgcgccactcaacatcgagatccgcttcttgggtcgacccttcgacagcgcccccctggcagacccgggcaacaacattgtgcttcgtggtgctgcagtggccgctggagacccgtcgacggggagccccccaagaccctctatcagctccaccgatgccatgagagcgcaagaaggctgaccccctatggctgcgaatagggccatggttgctgctggcactcgagcaagccgacgccgactatgaccatgtccccatgagtcaacagactggtgactacgccgctgggagcacctcgccaggaacatgcatacctccctcccgtgtctccttcaacccgccatgaatttcttggtttcactcgctggctgatcgactaacagagaaaaaattgcagcagggcagtggagttgaggctccgtgcctctgccatgcttgtatgtaggtgtagatcctatatctctgataatagcacatattgcagctttggaatgtttgccaccggagggtgtgatagatttgtgaatgtgtgggatgacattaataagaaaatactatatcaactgcggcgagctgggatggatcaagcacttgggtgagagttcttcgcgcagggctggagtgctacttccagtattgcttgcagctcgaggagttgatgagatgcaacggcggaatgccaagttggggtgagggctatgctggtcaggaacatgatgcaaattagggtgtcccttcattctataaggaatcataaaagcatacggaggaactatgtataagctacaaaagaagcactacaaaagaagcataaaaaagaatttttatagcataagccaagtgtttctgatgattttgttttttcaaattgtattttctgttattggttcagcatgcacatatattgacatgatttatggcatggcatctgtcatctttgttatatttatgacatcattcttgattgatgtgtgcgacatgaaatgatggatctttttaacatcctgaccatcattgtgtcgctcaattatcgttatttt

SEQ ID NO: 117736 - DNA, 1521 bp, Zea Mays
ttattttgtatccgttttacataaaaaaaatagttgagttgtgacgcggcggaccgctcggatccaccccacgtacgcgcccatcgagccgctcgcaaccctaatctgaaccgccgtcattgtctccagatcgccatccgccctcatcccctcacgcccaaactaaaccctagtagatcgccgtcgtcccctcccgaatcgccatccgtgtattcctccccaccgcaagaccttcctctccctcccatctaccgatccattcctcccctccgccttccagccacaagagctccacctccacccgggctcgccgccggcggaggaccacatctgggagatgcaaagtggagcacgctgcgccactcaacatcgagatccgcttcttgggtcgacccttcgacagcgcccccctggcagacccgggcaacaacattgtgcttcgtggtgctgcagtggccgctggagacccgtcgacggggagccccccaagaccctctatcagctccaccgatgccatgagagcgcaagaaggctgaccccctatggctgcgaatagggccatggttgctgctggcactcgagcaagccgacgccgactatgaccatgtccccatgagtcaacagactggtgactacgccgctgggagcacctcgccaggaacatgcatacctccctcccgtgtctccttcaacccgccatgaatttcttggtttcactcgctggctgatcgactaacagagaaaaaattgcagcagggcagtggagttgaggctccgtgcctctgccatgcttgtatgtaggtgtagatcctatatctctgataatagcacatattgcagctttggaatgtttgccaccggagggtgtgatagatttgtgaatgtgtgggatgacattaataagaaaatactatatcaagtaaagcaattgaagagttttgcttcattgggatgcttcattggaaaatacattaacacgcctcttattgaagaacacagctgcggcgagctgggatggatcaagcacttgggtgagagttcttcgcgcagggctggagtgctacttccagtattgcttgcagctcgaggagttgatgagatgcaacggcggaatgccaagttggggtgagggctatgctggtcaggaacatgatgcaaattagggtgtcccttcattctataaggaatcataaaagcatacggaggaactatgtataagctacaaaagaagcactacaaaagaagcataaaaaagaatttttatagcataagccaagtgtttctgatgattttgttttttcaaattgtattttctgttattggttcagcatgcacatatattgacatgatttatggcatggcatctgtcatctttgttatatttatgacatcattcttgattgatgtgtgcgacatgaaatgatggatctttttaacatcctgaccatcattgtgtcgctcaattatcgttattttgtatatcatttatagggttcacagatatgaaacgatagatttctt

SEQ ID NO: 117737 - DNA, 1603 bp, Zea Mays
gccgtcattgtctccagatcgccatccgccctcatcccctcacgcccaaactaaaccctagtagatcgccgtcgtcccctcccgaatcgccatccgtgtattcctccccaccgcaagaccttcctctccctcccatctaccgatccattcctcccctccgccttccagccacaagagctccacctccacccgggctcgccgccggcggaggaccacatctgggagatgcaaagtggagcacgctgcgccactcaacatcgagatccgcttcttgggtcgacccttcgacagcgcccccctggcagacccgggcaacaacattgtgcttcgtggtgctgcagtggccgctggagacccgtcgacggggagccccccaagaccctctatcagctccaccgatgccatgagagcgcaagaaggctgaccccctatggctgcgaatagggccatggttgctgctggcactcgagcaagccgacgccgactatgaccatgtccccatgagtcaacagactggtgactacgccgctgggagcacctcgccaggaacatgcatacctccctcccgtgtctccttcaacccgccatgaatttcttggtttcactcgctggctgatcgactaacagagaaaaaattgcagcagggcagtggagttgaggctccgtgcctctgccatgcttgtatgtaggtgtagatcctatatctctgataatagcacatattgcaggttagctattcttattgggtcgattcattttgtgtgtgcattgtagctgctgacacgcctctgcatatattccctaatatgcatatatgttcagagtggaggatgcaattgagatcctggagcacagtgcaacgtcacttattattagtaattctcattttgttatccttgtgcagctttggaatgtttgccaccggagggtgtgatagatttgtgaatgtgtgggatgacattaataagaaaatactatatcaagtaaagcaattgaagagttttgcttcattgggatgcttcattggaaaatacattaacacgcctcttattgaagaacacagctgcggcgagctgggatggatcaagcacttgggtgagagttcttcgcgcagggctggagtgctacttccagtattgcttgcagctcgaggagttgatgagatgcaacggcggaatgccaagttggggtgagggctatgctggtcaggaacatgatgcaaattagggtgtcccttcattctataaggaatcataaaagcatacggaggaactatgtataagctacaaaagaagcactacaaaagaagcataaaaaagaatttttatagcataagccaagtgtttctgatgattttgttttttcaaattgtattttctgttattggttcagcatgcacatatattgacatgatttatggcatggcatctgtcatctttgttatatttatgacatcattcttgattgatgtgtgcgacatgaaatgatggatctttttaacatcctgaccatcattgtgtcgctcaattatcgttattttgtatatcatttatagggttcacagatatgaaacgatagatttcttatttttgagatctgaaac

SEQ ID NO: 117738 - DNA, 1528 bp, Zea Mays
ctccagatcgccatccgccctcatcccctcacgcccaaactaaaccctagtagatcgccgtcgtcccctcccgaatcgccatccgtgtattcctccccaccgcaagaccttcctctccctcccatctaccgatccattcctcccctccgccttccagccacaagagctccacctccacccgggctcgccgccggcggaggaccacatctgggagatgcaaagtggagcacgctgcgccactcaacatcgagatccgcttcttgggtcgacccttcgacagcgcccccctggcagacccgggcaacaacattgtgcttcgtggtgctgcagtggccgctggagacccgtcgacggggagccccccaagaccctctatcagctccaccgatgccatgagagcgcaagaaggctgaccccctatggctgcgaatagggccatggttgctgctggcactcgagcaagccgacgccgactatgaccatgtccccatgagtcaacagactggtgactacgccgctgggagcacctcgccaggaacatgcatacctccctcccgtgtctccttcaacccgccatgaatttcttggtttcactcgctggctgatcgactaacagagaaaaaattgcagcagggcagtggagttgaggctccgtgcctctgccatgcttgtatgtaggtgtagatcctatatctctgataatagcacatattgcaggttagctattcttattgggtcgattcattttgtgtgtgcattgtagctgctgacacgcctctgcatatattccctaatatgcatatatgttcagagtggaggatgcaattgagatcctggagcacagtgcaacgtcacttattattagtaattctcattttgttatccttgtgcagctttggaatgtttgccaccggagggtgtgatagatttgtgaatgtgtgggatgacattaataagaaaatactatatcaagtaaagcaattgaagagttttgcttcattgggatgcttcattggaaaatacattaacacgcctcttattgaagaacacagctgcggcgagctgggatggatcaagcacttgggtgagagttcttcgcgcagggctggagtgctacttccagtattgcttgcagctcgaggagttgatgagatgcaacggcggaatgccaaggaatcataaaagcatacggaggaactatgtataagctacaaaagaagcactacaaaagaagcataaaaaagaatttttatagcataagccaagtgtttctgatgattttgttttttcaaattgtattttctgttattggttcagcatgcacatatattgacatgatttatggcatggcatctgtcatctttgttatatttatgacatcattcttgattgatgtgtgcgacatgaaatgatggatctttttaacatcctgaccatcattgtgtcgctcaattatcgttattttgtatatcatttatagggttcacagatatgaaacgatagatttcttatttttgagatctgaaac

SEQ ID NO: 117739 - DNA, 1519 bp, Zea Mays
ctccagatcgccatccgccctcatcccctcacgcccaaactaaaccctagtagatcgccgtcgtcccctcccgaatcgccatccgtgtattcctccccaccgcaagaccttcctctccctcccatctaccgatccattcctcccctccgccttccagccacaagagctccacctccacccgggctcgccgccggcggaggaccacatctgggagatgcaaagtggagcacgctgcgccactcaacatcgagatccgcttcttgggtcgacccttcgacagcgcccccctggcagacccgggcaacaacattgtgcttcgtggtgctgcagtggccgctggagacccgtcgacggggagccccccaagaccctctatcagctccaccgatgccatgagagcgcaagaaggctgaccccctatggctgcgaatagggccatggttgctgctggcactcgagcaagccgacgccgactatgaccatgtccccatgagtcaacagactggtgactacgccgctgggagcacctcgccaggaacatgcatacctccctcccgtgtctccttcaacccgccatgaatttcttggtttcactcgctggctgatcgactaacagagaaaaaattgcagcagggcagtggagttgaggctccgtgcctctgccatgcttgtatgtaggtgtagatcctatatctctgataatagcacatattgcaggttagctattcttattgggtcgattcattttgtgtgtgcattgtagctgctgacacgcctctgcatatattccctaatatgcatatatgttcagagtggaggatgcaattgagatcctggagcacagtgcaacgtcacttattattagtaattctcattttgttatccttgtgcagctttggaatgtttgccaccggagggtgtgatagatttgtgaatgtgtgggatgacattaataagaaaatactatatcaaaacacagctgcggcgagctgggatggatcaagcacttgggtgagagttcttcgcgcagggctggagtgctacttccagtattgcttgcagctcgaggagttgatgagatgcaacggcggaatgccaagttggggtgagggctatgctggtcaggaacatgatgcaaattagggtgtcccttcattctataaggaatcataaaagcatacggaggaactatgtataagctacaaaagaagcactacaaaagaagcataaaaaagaatttttatagcataagccaagtgtttctgatgattttgttttttcaaattgtattttctgttattggttcagcatgcacatatattgacatgatttatggcatggcatctgtcatctttgttatatttatgacatcattcttgattgatgtgtgcgacatgaaatgatggatctttttaacatcctgaccatcattgtgtcgctcaattatcgttattttgtatatcatttatagggttcacagatatgaaacgatagatttcttatttttgagatctgaaac

SEQ ID NO: 117740 - DNA, 345 bp, Zea Mays
atgtggtcctgggtgcgcaggacggcgtcggcggcgctgggcgaggacacgaacagggtgggcacggcgccgatgcggaggagcagcaggccgttgcgcccgtgcttggcgtccaggtcccggatcgagatgtgggtctcggcgccgatgaggtggaggtggccgatgatgggcagcttgcccgggggcgaaggcgggagcggaagccgctgttgctgcttacgtttgttggctgaggttgtgccggttcgccttgcggatactaggcggatgacgaggaagataagtacgccgaggagcagtgcgtgtgtggcggtgccatggtcgccggcgagctgcaggtag

SEQ ID NO: 117741 - DNA, 1901 bp, Zea Mays
gacactcatttgggaattctaggaacaaggtaaagtttctgcgtccggcgaagcgtcatcccgaactgatcggacatgtccaccttggccccggtgcgctccatctcggcgggcatctcccagtcgaaatggtagatgaggttcgcgagcatgatctcgacggtggcgatggcgaacgtggcccccgcgcagatcctgcgcccagccccgaacggcacgaaccggatgtccttgccgtacatgtcgacctcggcgtcgcggccttgttccaggaagcgctccgggaagaactcctcggccttgtcccagcacgtcgggtccctggcgagcgcccacgcgttgacgatgacgcgcgtgccggcggggatggtgtagccgttgatctcgcagtcgtgggtggagaagtgcggcaggaggaacggcgccggcgggtggatgcgcatggactccttgatggtggccttcaggtatggcatccggctcaggtcctcctccatcaccatgcggccgtcgggcgtcgccgtcctcacctccttctggagcttggccaggacgtggcggttgttcatcagctcgctcatggagtactccagcaccaggaatgatgtctcgatggctgcttcgaacatgttctgtaaaaccaaagacactgagaagagagaagagagacagacagacagacatgacagctagtagtagcatatattaccacaagtatgcccttgatgttatccgtggtgagaccgtagtctttctgcagcgacagcaagaggtgcacgaagtcttcagagttgtggtcgccctgcttgccgccggagagcgcgtactcggacagcagctcgttgaagaggctgtcccaccgcttgctgacgcccttggccttggcgcagatgatccggaggaacaggtccacgtccgccagcttcgggaagtagtcctccacgttgaacccgcccaggagggcggcgctggtctccgtcagctcccggaacagcttgttccggccctgcttccggtgggactcgccgagcacggcgcggcacacgaagtcgctggcgtagccgcccagcagctccgtcatgtcgagcgccgtccccggggacgcctcggcggcgtcgcggatccgggccaccaccaggcgcacctcctcctcccgctcccgccgcttggagaagaccatcttggcgctgagcaggtgcgtgttgaccaccttccgcgccgtgcgccagtactcgccgtacggcgcgaaggccacgtccgtcgagttgtagcggatgatgtcggcgacggggttccgcgggcgggacgccagcacgtggtcgtgcgtgcggagcacggcctcggcggcctgcggcgtggacaccacgatggtgggcacggcgccgacctgcaccagcatcagcccgttgtggccgtacttggcgtggaggtcgcggaaggagacgtgcgggtgggagccgatgaggtggaggtgcccgatgatggggagcttccccggaggcgtcggcggcagcctgtgctgcttccatttgggggacgtcgcggacgagctcctcgccgccgcggctagccggatggcgaggaggaggaggacgccgaggactgctgctgcttgtgtgggcgtgcactggacgacggcgacgtgcaggtagtcgtacgctgcttcgagagccatgccgtccttgctgatcttggtcggagacgactgatgagcgcaagaagctagcgctgcgagcaatgccggcaatgggcggctgggttgcttgctggggttcctgacggccgctatatgaaggcgcgtccggctacaatcccatatcaggccaactagagatgtaattattcatcatcagctgaacacggtggattgctaatattaaaatttattcgtggttataaaa

SEQ ID NO: 117742 - DNA, 107 bp, Zea Mays
cctttgcagttttgtgctgatgggggttaccagctgagatttaggagtcttgagggtacccctaattatggttcccgacaatatgtatctacatatttagtgagatt

SEQ ID NO: 117743 - DNA, 98 bp, Zea Mays
agctaggcgggggaatgagaaagacagacagctaggttctcagacagctaggaatgggaatgagctttgcagtgaggacggaatgggaatggcagaac

SEQ ID NO: 117744 - DNA, 2356 bp, Zea Mays
aagcatagatccctttcaaattccatcgtcaccaaaccaaaccagttttgggtgagtggtcagggaacgagcgaagtttgatgtattgagttcaaatgcgggtgactgcgaggcgcaacgtttttcatgtgacttgtagttgtctattgggttttctcgggtattatttttttcctgttcttttggcatgattttgggtgttctaaaaacctccttagcgccagctctcattctacctcttaaaaaatcggcagtgatgagcccacccacggtgtacaagcgagttgatgcaccaactaacgagttgaactgaatactcctacttgcatagtagttctcaatcacaaagccatgggcgaaaattaattaaattaacaactcggtaaaactcaaattgtcttgccactgtaaatggttcggatatgaatcgcatgatgcgtgagcccgtacgtgctgatattatatatacagagaagtaggaaggatcccaagcatccctcccgatcagatccctcgacaatggcactccaggcagcctacgagtacctgcagcaggccgtcggccatggcgcgtggtcgtccacgcagacgctgacgctgctgctcatcgccgtacccaccgtactactgctgctagcgtccctcgccaagagcacgtcgtcgtccggtaggggcaagccgccgctccctccctcgccgccgggcaccctccccatcgtggggcacctacaccacatcgggccccagacccacatctcgctccaggagctggtggccaagtacgggcacaacgggttcctgttcctccgcgccggcgccgtgcccaccctgatcgtgtcgtcgcccagcgccgccgaggccgtgatgcgcacccacgaccacatcttcgcgtcccggccgtggtccatggcctcccacatcctccgctacaacacctgcgacgtggccttctcgccgctcggcgaatactggcagcagaccaggaagctgatgaacacgcacctgctcagcaacaagaaggtctactccttccgccatggccgcgaggaagaggtgtgcctcgtcgtggacaacctccgcgaggcggccgccaagtcgccgtcgacggccgtggacatgagcgaggtgctggcggcgtacaccaacgacgtggtgagccggtcggtgctgggctcgacgcaccggaagaaaggccggaacacgctgttcagggagatgaccatgaccaacgtggacctcctggtggggttcaacctggagtactacatcccgcggtggccgctgacggacctgctcttcaggctcgtgtgctggaaggtcacgcgccacctcaagcgctgggacgccctgctggaggaggtgatccacgagcacgtggagatgaggaagctgtccggcgacaaggagaaggagtcggacgacttcatcgacatcttcctctccagatacgaggagtacggcttcaccatggataacgtcaagtccctcctcatgaacgtgttcgaggcagccatcgagacctcatatctggtgctggagtccgccatggccgagctcatgaaccacaggcgcgtcatgaagaagctgcaagcggaggtacgggcgtacggagcggagaagaagctggacatgatcagggaggacgacctgagcagcctgccgtacctaaaggcgtccatgaaggaagcgctgcggctgcacccaccggggcccctgctgctgccgcactactccaccgccgactgccagatcgacgggtaccacatccccgccaacacgcgcgtcctcgtgaacggctgggccatcggcagagacccggcggtctgggagaagcccgaggagttcatgccggagaggttcatgcgggacggctgggacaagtccaacagctacagcggccaggacttcaggtacctgccgttcgggtctgggcgccggatctgccccggggccaacttcgcgctcgcgaccatggagatcatgctcgccaacctcatgtaccatttcgactgggaggtccccaatgagaaggaagacggtggcgggaaggtgagcatggacgagacgttcgggctgatgcttcgcaggaacgagccgctctaccttgttcctagggccgtctagctagctagttactgtgccgccgccgcctcctatccaagaatgcatgagtcttagacgtgtggcagtaataattgcgtggggtgtagtaaaataataagcacgtttgttgagttgtaatggattcacattatgtgcattcgagacaggtccaaggaattgtatctctaaagtgaaaatttcctttttcaccacgatgaatgcatgtcatactctctcaccggtatacacagaa

SEQ ID NO: 117745 - DNA, 495 bp, Zea Mays
atgaggttgggccggaccacccacacgaaggggcggccggcgtcggccagcccccacgccagctccacgaactcgtgcgggtccatggccgccatgctcccgaagctcacgtacagcacggagcgcgcccgctgcgcgtccagccagcgcaggcagccccggtccgcctgcacctcgccgtgcaggctggccgtggccgccggcaccagcttgttgagcggcgccacggcgtacaccggcaccgacatgtcgtcccggatctcgcccagcgtgccggcctcgatgaaggggaacgtgtggaagatgagccccgaggacagccgcgccgccgcgaccacgcggcccagcaggtccgcgaactcctccaggtcgcacgtctcgtgccgcagcaggtccttcacgcggtacgggggtagctcggcgaccgcgtcgtccttgcgctcctctctcaccggcaggtatcccttgtcgaccaaggtgcggtacgccatgtag

SEQ ID NO: 117746 - DNA, 257 bp, Zea Mays
ggactcttctagagcctccgcatcgcaactcacaggctcgactcttccagcctccgactccgcatccgcctccccggcggagcctctcgccaccgcacagcctagatccgcccagaggagctcaatctccccctcgaggccccaaaacgagatcctctgcattcctgcatagatgcagacggctgcttcgtttgggtatgcggcgggacggggacctcggaagcgagctacaacgacgtcccccccccccccccccc

SEQ ID NO: 117747 - DNA, 1487 bp, Zea Mays
caactcacaggctcgactcttccagcctccgactccgcatccgcctccccggcggagcctctcgccaccgcacagcctagatccgcccagaggagctcaatctccccctcgaggccccaaaacgagatcctctgcattcctgcataggcgcctcatcgttcctggcctagcacagatgcagacggctgcttcgtttgggtatgcggcgggacggggacctcggaagcgagctacaacgacgtccccccccccccccccccccccccccccccccgcaccgatcgccgccgtggccctggctcgggtggccaccaggagatctgtcctccctccctcaaacgacgcctccatctcctcgcatttccttctccttttccccttttcaaacattcaggagccgaaggtgccagccaccctttgctcggcgcgtgtcccggcgtagctcacgacgcatcctcacctgcctgcaccgagccaaggagagtcgttggctatgcgcgttagctccgctgctgggtggtcaccatcgtccgagcacaacacagtgggtaccatcctctcactgaattacttataggaagcctcatcatgtagtttgtgcgctactagggcgagatccacctgttgtgatgatgctctatggcgcacatgtttcttttttatgggaacctcttcttagtaagtgggatggagagctttggtggagtttagcaggtggtcatctgatgattaggcgacgataaggaagtttttgatgagttgctaactgctaggtttgggagtttctctcatttcaggatgcagacagattgaggattctttgtttgtagaacgccatggatgagaggctgctcatgtttgatgtggttgatgacgtgtggacagtgctaacatgattgttcgagttggatgcacacgagagccttaggtggtttggacatgtcttcgagccaagagttgaaatcttgatgggattatgttggggcagatcttaactggaatacatatacggaacccggttggcagcagaggtagtgccccggtgcgccgcgcgcaggggcacgcgacagctacaaatattcggtggaggactggcttaggaaccttggatgcaagtagcactacaactagcaatgtatggatgaattgaaggaagtaaaagaaggcagacaatcttatagaaactctgcatattgaaaccgccatgattggcaaagaagttggatgcatctttgcattggtgtgttcttatcaccaagcagtaatgtgaagcaagttcatttgttgactaagaacggatcaacacaaattagtgaagattttgttcacaagagatgcaggatggagaggtggtagatttcaatatggctttgatactattttttccacttacaatattttgtatggaacaagaaaaaacaatgtatgtggttactattgtaattcaagaatttatttctaaataataaatatatttgtttatattt

SEQ ID NO: 117748 - DNA, 2071 bp, Zea Mays
caactcacaggctcgactcttccagcctccgactccgcatccgcctccccggcggagcctctcgccaccgcacagcctagatccgcccagaggagctcaatctccccctcgaggccccaaaacgagatcctctgcattcctgcataggcgcctcatcgttcctggcctagcacagatgcagacggctgcttcgtttgggtatgcggcgggacggggacctcggaagcgagctacaacgacgtccccccccccccccccccccccccccccccccgcaccgatcgccgccgtggccctggctcgggtggccaccaggagatctgtcctccctccctcaaacgacgcctccatctcctcgcatttccttctccttttccccttttcaaacattcaggagccgaaggtgccagccaccctttgctcggcgcgtgtcccggcgtagctcacgacgcatcctcacctgcctgcaccgagccaaggagagtcgttggctatgcgcgttagctccgctgctgggtggtcaccatcgtccgagcacaacacagtgggtaccatcctctcactgaattacttataggaagcctcatcatgtagtttgtgcgctactagggcgagatccacctgttgtgatgatgctctatggcgcacatgtttcttttttatgggaacctcttcttagtaagtgggatggagagctttggtggagtttagcaggtggtcatctgatgattaggcgacgataaggaagtttttgatgagttgctaactgctaggtttgggagtttctctcatttcaggatgcagacagattgaggattctttgtttgtagaacgccatggatgagaggctgctcatgtttgatgtggttgatgacgtgtggacagtgctaacatgattgttcgagttggatgcacacgagagccttaggtggtttggacatgtcttcgagccaagagttgaaatcttgatgggattatgttggggcagatcttaactggaatacatatacggaacccggttggcagcagaggtagtgccccggtgcgccgcgcgcaggggcacgcgacagctacaaatattcggtggaggactggcttaggaaccttggatgcaaggtgattggaaggaaatttgttgaggtggagatggactagaccaaggctaatatcaaggggtacctgtgagggaacaggactacactggatttggctcccgtctcaagagtaaagtgtgtttcagcaacctgctagccggccaccaaaggaccaattatctatttttgttgatgttaatatattaaaatctggttatagtaaatatacataatatgctgtcatctagatcaatacacatatatgcctttgagacataaatatgtgtcatgattcaactttcatgaatagtttttctcaacgactcgcatactaatgatattagcaaattatttaaaataataaccatgatatacaacttatataaattattatgttatatttgtacattttagctaaactatttgacatctaatataattgtaagttcataagcgtagatatattttctagatatgagcttagcggtaggtaattttgcttatctattaccgtaataagcttgatgactgaggtagacatctgatttatatttaatctaactgtttctctatgtgaatggatacatatattaactcaggtagcactacaactagcaatgtatggatgaattgaaggaagtaaaagaaggcagacaatcttatagaaactctgcatattgaaaccgccatgattggcaaagaagttggatgcatctttgcattggtgtgttcttatcaccaagcagtaatgtgaagcaagttcatttgttgactaagaacggatcaacacaaattagtgaagattttgttcacaagagatgcaggatggagaggtggtagatttcaatatggctttgatactattttttccacttacaatattttgtatggaacaagaaaaaacaatgtatgtggttactattgtaattcaagaatttatttctaaataataaatatatttgtttatattttgttta

SEQ ID NO: 117749 - DNA, 1727 bp, Zea Mays
tcatcagcctcatcaacctcgacgaaggaggaacgaacggacaggttgttgcacagaagcgacatggctttcgcgcccaaaacgtcctcctcctcctcgctctcctcggcgttgcaggcagctcagtcgccgccgctgctcctgaggcggatgtcgtcgaccgcaacaccgagacggaggtacgacgcggccgtcgtcgtcactaccaccaccactgctagagctgctgcggctgctgtcacggttcccgccgccccgccgcaggcgccggcgccggcgccggtgccgccaaagcaagcggcggcacccgccgagaggaggagccgtccggtgtcggacaccatggcggcgctcatggccaagggcaagacggcgttcatcccgtacatcaccgcgggcgaccccgacctagcgacgacggccgaggcgctgcggctgctggacggctgtggcgccgacgtcatcgagctgggcgtgccctgctcggacccctacatcgacgggcccatcatccaggcgtcggtggcgcgggctctggccagcggcaccaccatggacgccgtgctggagatgctcagggaggtgacgccggagctgtcgtgccccgtggtgctcctctcctactacaagcccatcatgtctcgcagcttggccgagatgaaagaggcgggggtccacggtcttatagtgcctgatctcccgtacgtggccgcgcactcgctgtggagtgaagccaagaacaacaacctggagctggtgctgctgacaacaccagccataccagaagacaggatgaaggagatcaccaaggcttcagaaggcttcgtctacctggtgagcgtgaacggagtgacaggtcctcgcgcaaacgtgaacccgcgagtggagtcactcatccaggaggttaagaaggtgactaacaagcccgttgctgttggcttcggcatatccaagccagagcacgtgaagcagattgcgcagtggggcgctgacggggtgatcatcggcagcgccatggtgaggcagctgggcgaagcggcttctcccaagcaaggcctgaggaggctggaggagtatgccaggggcatgaagaacgcgctgccatgagtccatgacaaagtaaaacgtacagagacacttgataatatctatctatcatctcggagaagacgaccgaccaataaaaataagccaagtggaagtgaagcttagctgtatatacaccgtacgtcgtcgtcgtcgttccggatcgatctcggccggctagctagcagaacgtgtacgtagtagtatgtaatgcatggagtgtggagctactagctagctggccgttcattcgattataattcttcgctctgctgtggtagcagatgtacctagtcgatcttgtacgacgaagaagctggctagctagccgtctcgatcgtatatgtactgattaatctgcagattgaataaaaactacagtacgcatatgatgcgtacgtacgtgtgtatagtttgtgctcatatatgctcctcatcacctgcctgatctgcccatcgatctctctcgtactccttcctgttaaatgccttctttgacagacacaccaccaccagcagcagtgacgctctgcacgccgccgctttaagacatgtaagatattttaagaggtataagataccaaggagcacaaatctggagcactgggatattgcaaagacaaaaaaaaaacaaaattaaa

SEQ ID NO: 117750 - DNA, 1745 bp, Zea Mays
atcagcctcatcaacctcgacgaaggaggaacgaacggacaggttgttgcacagaagcgacatggctttcgcgcccaaaacgtcctcctcctcctcgctctcctcggcgttgcaggcagctcagtcgccgccgctgctcctgaggcggatgtcgtcgaccgcaacaccgagacggaggtacgacgcggccgtcgtcgtcactaccaccaccactgctagagctgctgcggctgctgtcacggttcccgccgccccgccgcaggcgccggcgccggcgccggtgccgccaaagcaagcggcggcacccgccgagaggaggagccgtccggtgtcggacaccatggcggcgctcatggccaagggcaagacggcgttcatcccgtacatcaccgcgggcgaccccgacctagcgacgacggccgaggcgctgcggctgctggacggctgtggcgccgacgtcatcgagctgggcgtgccctgctcggacccctacatcgacgggcccatcatccaggcgtcggtggcgcgggctctggccagcggcaccaccatggacgccgtgctggagatgctcagggaggtgacgccggagctgtcgtgccccgtggtgctcctctcctactacaagcccatcatgtctcgcagcttggccgagatgaaagaggcgggggtccacggtcttatagtgcctgatctcccgtacgtggccgcgcactcgctgtggagtgaagccaagaacaacaacctggagctggtgctgctgacaacaccagccataccagaagacaggatgaaggagatcaccaaggcttcagaaggcttcgtctacctggtgagcgtgaacggagtgacaggtcctcgcgcaaacgtgaacccgcgagtggagtcactcatccaggaggttaagaaggtgactaacaagcccgttgctgttggcttcggcatatccaagccagagcacgtgaagcagtgacacacacacacacacagattgcgcagtggggcgctgacggggtgatcatcggcagcgccatggtgaggcagctgggcgaagcggcttctcccaagcaaggcctgaggaggctggaggagtatgccaggggcatgaagaacgcgctgccatgagtccatgacaaagtaaaacgtacagagacacttgataatatctatctatcatctcggagaagacgaccgaccaataaaaataagccaagtggaagtgaagcttagctgtatatacaccgtacgtcgtcgtcgtcgttccggatcgatctcggccggctagctagcagaacgtgtacgtagtagtatgtaatgcatggagtgtggagctactagctagctggccgttcattcgattataattcttcgctctgctgtggtagcagatgtacctagtcgatcttgtacgacgaagaagctggctagctagccgtctcgatcgtatatgtactgattaatctgcagattgaataaaaactacagtacgcatatgatgcgtacgtacgtgtgtatagtttgtgctcatatatgctcctcatcacctgcctgatctgcccatcgatctctctcgtactccttcctgttaaatgccttctttgacagacacaccaccaccagcagcagtgacgctctgcacgccgccgctttaagacatgtaagatattttaagaggtataagataccaaggagcacaaatctggagcactgggatattgcaaagacaaaaaaaaaacaaaattaaa

SEQ ID NO: 117751 - DNA, 1450 bp, Zea Mays
agcgacatggctttcgcgcccaaaacgtcctcctcctcctcgctctcctcggcgttgcaggcagctcagtcgccgccgctgctcctgaggcggatgtcgtcgaccgcaacaccgagacggaggtacgacgcggccgtcgtcgtcactaccaccaccactgctagagctgctgcggctgctgtcacggttcccgccgccccgccgcaggcgccggcgccggcgccggtgccgccaaagcaagcggcggcacccgccgagaggaggagccgtccggtgtcggacaccatggcggcgctcatggccaagggcaagacggcgttcatcccgtacatcaccgcgggcgaccccgacctagcgacgacggccgaggcgctgcggctgctggacggctgtggcgccgacgtcatcgagctgggcgtgccctgctcggacccctacatcgacgggcccatcatccaggcgtcggtggcgcgggctctggccagcggcaccaccatggacgccgtgctggagatgctcagggaggtgacgccggagctgtcgtgccccgtggtgctcctctcctactacaagcccatcatgtctcgcagcttggccgagatgaaagaggcgggggtccacggtcttatagtgcctgatctcccgtacgtggccgcgcactcgctgtggagtgaagccaagaacaacaacctggagctggagcatatgcaggtgctgctgacaacaccagccataccagaagacaggatgaaggagatcaccaaggcttcagaaggcttcgtctacctggtgagcgtgaacggagtgacaggtcctcgcgcaaacgtgaacccgcgagtggagtcactcatccaggaggttaagaaggtgactaacaagcccgttgctgttggcttcggcatatccaagccagagcacgtgaagcagattgcgcagtggggcgctgacggggtgatcatcggcagcgccatggtgaggcagctgggcgaagcggcttctcccaagcaaggcctgaggaggctggaggagtatgccaggggcatgaagaacgcgctgccatgagtccatgacaaagtaaaacgtacagagacacttgataatatctatctatcatctcggagaagacgaccgaccaataaaaataagccaagtggaagtgaagcttagctgtatatacaccgtacgtcgtcgtcgtcgttccggatcgatctcggccggctagctagcagaacgtgtacgtagtagtatgtaatgcatggagtgtggagctactagctagctggccgttcattcgattataattcttcgctctgctgtggtagcagatgtacctagtcgatcttgtacgacgaagaagctggctagctagccgtctcgatcgtatatgtactgattaatctgcagattgaataaaaactacagtacgcatatgatgcgtacgtacgtgtgt

SEQ ID NO: 117752 - DNA, 2059 bp, Zea Mays
gcagcaaaagctgctcatcaccgatggccacggctaacacaagcaagcaagcaagtcactgagtagctagcagtatataccaccataaaaacaacacacacacacgtgcgctaataagctaagcttaaggtagctcctctctatctccggctagctcggacggacgacgttgccatggctgctcaactgcatcacgcactatacgagctgctgcacgaagcagcagcagcgcaacgagcgctgctgctcgcgatccccttctccctgctgctcctgccgctcctgctccgctacctcgcggcgtcggcgtcggcgtcggcgtcggcgacaaagaacgacggagcggcggcggtggcggccagcgaccccgacaagctcttgagcctgctgccgtcgccgcccatgaagctccccatcatcgggcacctgcacctgatgggggacatcccctacgtgtccctcgccgcgctcgccaccaggtacggcccggacctgatgctgctccgcctcggcgccgtgccgaccgtggtggtctcgtcgccgcgcgtcgccgaggccgtgctccgcacctacgaccacgtcttctcctcccgcccgcgctccctggtgtccgacatcatcatgtacggcgccaccgactcgtgcttcgcgccctacggcgaccacttccgcaaggcgcggaagctggtcaccgtgcacctgctcaacgccagcaaggtgcggtcgcagcggcccgcgcgggaggaggaggtgcgcggcgcgctcgacagggtgcgccgcgccgccgccgcgcgggaggccctggacatgagcgagctcctgcactccttcgtcaacaacctcgtctgccgcgccgtctcgggcaagttctccatggaggaaggccgcaacaggctgttccgggagctcaccgacatcaacgcgggactcctcggagggttccacatccaggactacttccctagcctgggccggatcgagctcgtcaggaaggtggcgtgcgccaagaccaggcgcgtcaggaagcgctgggacgacctcctcgacaagctcatcgacgaccatgcggccaggatggcaacccatcaggacgaggacgacgataaggacttcatatacgtcttgctgtctcttcagaaggagtatggcctcaccagagaccatatcaaggctatcttgatagacatgttcgaggccggaaccgacacctcgtacatgacgttggagttcgccatgacggagctcatacggaagccacacctgatgaagaagctgcaggaagaagtgcggcggaacgtgccggcggggcaggagatggtcaccgaggacaacctccccggcatgacctacctcaaggccgtcatcaaggagacgctccgcctgcacccgccggtcccgctcctcctcccgcactactccctggacgcctgcgaggtcgccggctacaccatcccggccaacacccgcgtcgtcgtcaacgcctgggcgctcggccgccacagcggctactgggagcgcgagaacgagttcgtcccggagaggttcctcagcggggacgtggccggcggcgtcgacctcaagcccaacgagttccagttcctggcgttcgggtccggccggaggatgtgccccggggtccactcggcgtccgcgaccatcgaggcgatgctgtccaacctcatgtaccggttcgactggcagctgccggcggggatgaaggcggaggacgtggacatgaccgaggtgtttgggatcacggtctcgaggaaggagaagctgctcctagtcccacaggctgcgtgaggatgatgatgatactagtgcaatgcgatacagggttttaaattagtaacaccaaaggctgtgttactggaccttaattaataattaataaatgtgctactactatatagccaggcttcacagtgacacatacttctattgcccatgctacatatatgtgttcttatttacatccccaataagtgttattgtgttgtatcacatttacctatatatatcaaatggaacatttctccaagtgctacaataacgaaga

SEQ ID NO: 117753 - DNA, 1657 bp, Zea Mays
ggctaacacaagcaagcaagcaagtcactgagtagctagcagtatataccaccataaaaacaacacacacacacgtgcgctaataagctaagcttaaggtagctcctctctatctccggctagctcggacggacgacgttgccatggctgctcaactgcatcacgcactatacgagctgctgcacgaagcagcagcagcgcaacgagcgctgctgctcgcgatccccttctccctgctgctcctgccgctcctgctccgctacctcgcggcgtcgccgaggccgtgctccgcacctacgaccacgtcttctcctcccgcccgcgctccctggtgtccgacatcatcatgtacggcgccaccgactcgtgcttcgcgccctacggcgaccacttccgcaaggcgcggaagctggtcaccgtgcacctgctcaacgccagcaaggtgcggtcgcagcggcccgcgcgggaggaggaggtgcgcggcgcgctcgacagggtgcgccgcgccgccgccgcgcgggaggccctggacatgagcgagctcctgcactccttcgtcaacaacctcgtctgccgcgccgtctcgggcaagttctccatggaggaaggccgcaacaggctgttccgggagctcaccgacatcaacgcgggactcctcggagggttccacatccaggactacttccctagcctgggccggatcgagctcgtcaggaaggtggcgtgcgccaagaccaggcgcgtcaggaagcgctgggacgacctcctcgacaagctcatcgacgaccatgcggccaggatggcaacccatcaggacgaggacgacgataaggacttcatatacgtcttgctgtctcttcagaaggagtatggcctcaccagagaccatatcaaggctatcttgatagacatgttcgaggccggaaccgacacctcgtacatgacgttggagttcgccatgacggagctcatacggaagccacacctgatgaagaagctgcaggaagaagtgcggcggaacgtgccggcggggcaggagatggtcaccgaggacaacctccccggcatgacctacctcaaggccgtcatcaaggagacgctccgcctgcacccgccggtcccgctcctcctcccgcactactccctggacgcctgcgaggtcgccggctacaccatcccggccaacacccgcgtcgtcgtcaacgcctgggcgctcggccgccacagcggctactgggagcgcgagaacgagttcgtcccggagaggttcctcagcggggacgtggccggcggcgtcgacctcaagcccaacgagttccagttcctggcgttcgggtccggccggaggatgtgccccggggtccactcggcgtccgcgaccatcgaggcgatgctgtccaacctcatgtaccggttcgactggcagctgccggcggggatgaaggcggaggacgtggacatgaccgaggtgtttgggatcacggtctcgaggaaggagaagctgctcctagtcccacaggctgcgtgaggatgatgatgatactagtgcaatgcgatacagggttttaaattagtaacaccaaaggctgtgttactggaccttaattaataattaataaatgtgctactactatatagccaggcttcacagtgacac

SEQ ID NO: 117754 - DNA, 1459 bp, Zea Mays
ggtggcgccgccgtcgcgaaggccctcggccgcggccttctgcagctcctccaccttggcccgcaccgcggcgcccttgccctccgcggtcatcagctcccgcaccaccgcggcgatgtcttccctccccttggccccgggcactcgtagcgcggcccctaccccgtcgcacagcagcaccgcgttctgcctctggtcggcgaacagcggccacgccagcatgggcacgccgtgcaccaggctctccagcgtcgagttccagccgcagtgcgtgaggaagccgccggtggactggtgcgccagcaccttgggctgcggcgcccacgacggcaccacgaggccgacgtccttggtccgctccaggaacccttggggcaggtaggagaaggggtccttcttgctcgccgagtcgtagtagttgtcgttgccgacgccgccctcgctggggctccgcactacccacaggaaccgctgcccgctgagctccagccctagtgcgagctcccgcatctcctcggcgggcagcgtgccgccggagccgaaggacacgaagatgaccgacttggccggctgccggtccagccactccacgcacgggcacggcgcgtcgtccttgctgcctccaccgtcctctgcgcgcacgagcgggccgatggtgcgcaccggcggtcgcccgggctccggctggcgcaggacctcggcgggccccggctcgacggcgtcgaaggagttgacgaggatggcggttgcctcgcggaacttggcgccgtggtgcaccatccatctgtagctggggttggacttgtcctgcagcggcttcatggtctcggtgcccggcagcggcacgcacccgggcaggcggagcggctcggcgaggtcccggaactcgccggggatcgaggcgtcgagctccggcaggtggagcatcagcgtgagcgcggttagattggtcgggaagaagaggtacctccgctggacccccgccgcgcgcgccgcgtcgaacgcgtccgcgccgaagaggtcggtgacgaacgccacgagacggccggtcgtggtgggccgctgcttgaggctcaggagcgcctcggtgagcgccggcacggcgcgcacgcactcttcggacatgagcgtctcgatggcggcgtcgcgcgggaggtcggacatgtccaccggcggcagcgccatggacgcgacggcgggcggcatcgaggcgaggaacgcgcgctgcgtggcggacgccgtggacgcgaacgtgatgagcgtggacgtgacgccgtggcgctgggccaggcgcttcgccagctccgccagcgggatcaggtggcccatcccgggcgtcgcaagcatcgccacgtgcggcggtggcgtctgggtgccgtcgccgttgcggcaagaggaggcgttggcgttctccattggtgcgtgcggtgcggtattttcccactgccgcttatcagcc

SEQ ID NO: 117755 - DNA, 771 bp, Zea Mays
ccaaacacggatctttcggtggagttcgggaagagtactggcacgcacgccaatgttgcatctccgccgtccaccacgaagcgcacgcgaacccgacgccttccaccatcccgccagccgggcggcttctgggaccaccccgaggacggccaccgctcgggcgacgcgaccttcaagggagctcgacatgttcgacggggacccgcggccgggccgttcgggcgcctgggccccgtggacgtgtgctccagggagcaccaggacctggcgctcgacgcggcgcgccagggcgtcgacgccgcgcgcgcctacgactgcgccgcgttccgcatgcgcggggccaaggccatcctcaacttccccaacgaggtgggctcccgcggcgcggacttcctcgcgccgccgccgcccgtcgcggccgcgaccacgtcgtcgtcccagaacaaacggaagatgcgcgacgccgaggccacagccggtggggccgccgagccagcagcagccaataagtccgtcaaggtggctgaggcgtccggatcgccggcgccgccgtcgctgtcccccgcgacaacgacaacgataacgaccaccacggcctcgacggtgacgacgtgctgctctccctcgtcggggtctgctgcagcagcacacgagatgtttcccatgacgccgtcgagctggacgtgggagcagctggagggcgtgttcgagagcctgtcgccgctctcgacgacatacccgtagctcggcttcccggaggtcactgttaat

SEQ ID NO: 117756 - DNA, 752 bp, Zea Mays
gagatccttatcttcctggttggcctcatcttcaagctgccattctcagccgatctctatcctctaccactctctctccctcagctcgcggagctctctcctcctagcgagcgcgtctgcgccctgctcggcctccagctctggcgcccggccgagtttctccccgagctccctgccatggccgccgtgccctctgttcctccagctccagcgtcgcggcccttcccccagctcccttgtctccatggccgctcgtcctagctgcgaccccgtcgtggagctctgcacgccgagcttctccctggtctcccatggcgcccagctcagatctcgccctgttcctcagcgcgcagctccctgacgcgttttcctccctatgccgcacgctctgctcgcccggggtcagaattcgtcgactgctctctgttcctcgcttcggtggctgcactcatctccatccatggatgtcgccatctctgcgccctgctccatgcttgctgctcgccgattttccctgcgcgaccagccggagctcgttccatgggcgcggcttccagctcgccggcgttcggaccgcgctcctccctccagctcgtcgagcttctccctgcatccatggccactgcgcgcgccctctgctccatcgcggtggttttctcctgccggtgcccagcccagccaagcccctccacgcggccgtcgatcagcctccctgctcctcccatcgtggacatcaccgaccatggacatct

SEQ ID NO: 117757 - DNA, 509 bp, Zea Mays
ggggtgttgtggatgaagccttgggtgcaacgcagagtctccggggacgaaatctgcctcggggtgttggtgcttctaatgttggtaccttctctgagcctaggacctatgttaggacggctaggaagcgaccaagaaatgcatctatcaaagatttacaacaagaagatgacagtgataatgaagatgatgacccaaacccaccttaggctgaagatccaacacctgctgaatcagcaagagcaatggaggaggaatctcaatcatttggagggacaactgatgatgtatttcatttagatgaagatctactgcattaggtcactagtaagtttgtatttaattttgcttattaaatggttgtcttggttggttcctgttccaacaaccattatccagtatctgactatcggagtatcaattgtgcactgtccattttccagtattagtaatttagtattccagtttcaattccaaatttctaattgaaactctctggttctactaga

SEQ ID NO: 117758 - DNA, 648 bp, Zea Mays
ctgcacggaggcgctggacgaccccaaggtcacggtcgtggccgggatcgacctcaacggcgccgacatcgcggggtacctgccgcccgagctcggcctgctcaccgacctcgccttcttccacatcaacaccaaccgcttctgcggcatcatccccaagagcatgtcgcggctgtcgctgctgcacgagttcgacgtgagcaacaaccgcttcgtcggcgtcttcccctacgtctgcctcgagatggtgtcgctcaagtacctcgacctccgcttcaacgactttgagggcgagctgccgccagcgctcttcgacaaggacctggacgccatcttcgtcaacaccaaccgattcgtgggctatatcccggagaacctcggcaactccacggcgtccgtcatcgttttcgccaacaacgccttcgtcggatgcatccccaagagcatcggccgcatggtgaagacgctggacgaaatcatcttcctcaacaacaaactcgacgggtgcctgccgctggagatgggcctgctggtcaacaccaccgtcatcgacgtcagcgggaacatgctcgtgggcaccatccccgagcagctctccaacatcgccaagctggagcagctcgacgtgtcccggaacgtcttcaccgg

SEQ ID NO: 117759 - DNA, 2921 bp, Zea Mays
accgccggcggacgaatacattccaacgccacctgtacccgcgaagtcaccgccagcgacctcgccaccggcatcacgtggtgctccaccgcctcaggcacaacctccagctgcctcctccccgcctgcaacacctgtgaaatcgtctcctccgccagcagcagttgttttaccaccacctgcgaagactccttctcctccggcccctgttgcttcaccaccaccagaagcaccagtgagctctccacagcctcaagtaaaatcacctcctccaccagcaccggtggcctcaccaccaccacccatgaagtcgcctcccccaccagcgcgagtggcatcacctccgccgctgatgaaatcacctccaccaccagcaccagtggcctctccaccccaaccgttgaaatctccaccaccgccagtactggtggcctctccacctccatcggtgaaatctccaccaccgccggtaccagtggcctctccacctccaccggtgaaatctccaccaccgctggctccagtgagctcaccttctcctccggtgaagttgccaccactaccagctcctgggaaatcaaccccacctccagaagaggaaaaaccaacaccacctactccagtaaagtcatcgccgcctccagagaagtctctacctccacccactctgactacctctccaccaccacaagagaagcctactcctccatcaactccatccaaaccaccaccatctccagttgagacactacctcctccatcaaagtcttctccaccggaagaaccagttagctcaccacctcaagcaccaaagtcgtcatctccaccagctcctgtaagctcaccacctccactgaagtcttctccgcctccagtaccagagagctcaccaccaccgacacctaagtcatcacctccactggctccagtgagctcaccacctcaagtggagaagacttctccaccaccagcaccagtcagctcaccaccaccgacacctaagtcatcacctccactagctccagtgagctcaccacctcaagtagagaagacttctccaccaccagcaccagtcagctcaccaccaccaacacctaagtcatcacctccactagctccagtgagctcaccacctcaagtagagaagacttctccaccaccagcaccagtcagctcaccaccattggagcctaagccatcatctccacctagttctgtgagctctccacctacgacggtgaagtcttctccaccaccagcaccacttagctcgccaccaatgacgcctaagtcatcaagcccacctgcacacgtgagctcgcctcctgaagcagagaagtcatccccgccactggcaccgatcagctcaccgccatcagagcccaagtcaccgtcgtcacctccaatggtagagaaaacttctccaccaccggcaacggttagctcaccaccacctacgcctaagtcgtcacctccacctgctcctgtgagctcaccacctccagtggtgaagtcttctccaccaccggcaccagtcagctcaccaccaccgacacctaagccattacctccacctgctcctgtgagctcaccacctccggtggtgaagtcttctccaccgccgacaccagtcagctcaccaccaccgacacctaagccattgcctccacctgctcctgtgagctcaccacctccagtggtgaaatcttctccaccaccggcaccagtcagcttaccaccaccgacgcctaagccatctccaccacctactcctgtgagctcaccacctccagtagtaaagtcttctccaccaccaacactagtcagctcaccaccaccagcacctaagtcattacctccacctactcccgtgagctcgccgcctccagaagtgaagtcctctcctccaccaaccccagttagctcaccaccaccagcgccgaagtcgtcacctccacctactccagtgagctcgccacctccagaactgaagtcctctccaccaccagccccagttagctcaccaccatcagcgccaaagtcgtcacctccacctgctcctgtaagcttgccacctcctgaagtaaagtcttccccaccaccagcaccgattagctctccaccacctccggccaagtcaccacctccaccggcccctatgagctcacttcctccccctgtgaagtctccacctccaccagcgccggtcagttcgccaccacctccaatgaagtccccaccgccgccagcaccaattagctctccgccaccagcaccagtgaagccaccatcgctaccaccaccagccccggtaagctcacctcctcctgcggtcacctctgccccaccaaagaaagaagaagattcaacggcaccaccggcagaagccctacctccaccttcattcaacgacatcatccttccacctatcatggccaacaaatacgcatctccgcctcctcctctattccaaggatattaagctctatggagagatggtcgaccaagaatgaattgaacaacaatatataaggtcgcatgcgcaaccaaacagctacatgtacattgcaggcgtgtgtgaaattgtttatttattttttgcatgtgcacgcgtgagtatttgcttctccgtacatactctatgtatgaacgtgtgcatgtgtgaactaactacatgagacgacaaggtgcaagagacatgtctggggcgtcatttgtatggctttaattttttttattatatatagataaggaaatattttccttaaaaatggagtacaagggattgttgagaactgcttttgttcatgatattaatatatatgatgaatatttcttgcaatttccttttgtggtccatgtgaattgagttctgacatagtgcatgtgctttgaatcatttttcctgaaagtaattatgc

SEQ ID NO: 117760 - DNA, 2661 bp, Zea Mays
gcgaagactccttctcctccggcccctgttgcttcaccaccaccagaagcaccagtgagctctccacagcctcaagtaaaatcacctcctccaccagcaccggtggcctcaccaccaccacccatgaagtcgcctcccccaccagcgcgagtggcatcacctccgccgctgatgaaatcacctccaccaccagcaccagtggcctctccaccccaaccgttgaaatctccaccaccgccagtactggtggcctctccacctccatcggtgaaatctccaccaccgccggtaccagtggcctctccacctccaccggtgaaatctccaccaccgctggctccagtgagctcaccttctcctccggtgaagttgccaccactaccagctcctgggaaatcaaccccacctccagaagaggaaaaaccaacaccacctactccagtaaagtcatcgccgcctccagagaagtctctacctccacccactctgactacctctccaccaccacaagagaagcctactcctccatcaactccatccaaaccaccaccatctccagttgagacactacctcctccatcaaagtcttctccaccggaagaaccagttagctcaccacctcaagcaccaaagtcgtcatctccaccagctcctgtaagctcaccacctccactgaagtcttctccgcctccagtaccagagagctcaccaccaccgacacctaagtcatcacctccactggctccagtgagctcaccacctcaagtggagaagacttctccaccaccagcaccagtcagctcaccaccaccgacacctaagtcatcacctccactagctccagtgagctcaccacctcaagtagagaagacttctccaccaccagcaccagtcagctcaccaccaccaacacctaagtcatcacctccactagctccagtgagctcaccacctcaagtagagaagacttctccaccaccagcaccagtcagctcaccaccattggagcctaagccatcatctccacctagttctgtgagctctccacctacgacggtgaagtcttctccaccaccagcaccacttagctcgccaccaatgacgcctaagtcatcaagcccacctgcacacgtgagctcgcctcctgaagcagagaagtcatccccgccactggcaccgatcagctcaccgccatcagagcccaagtcaccgtcgtcacctccaatggtagagaaaacttctccaccaccggcaacggttagctcaccaccacctacgcctaagtcgtcacctccacctgctcctgtgagctcaccacctccagtggtgaagtcttctccaccaccggcaccagtcagctcaccaccaccgacacctaagccattacctccacctgctcctgtgagctcaccacctccggtggtgaagtcttctccaccgccgacaccagtcagctcaccaccaccgacacctaagccattgcctccacctgctcctgtgagctcaccacctccagtggtgaaatcttctccaccaccggcaccagtcagcttaccaccaccgacgcctaagccatctccaccacctactcctgtgagctcaccacctccagtagtaaagtcttctccaccaccaacactagtcagctcaccaccaccagcacctaagtcattacctccacctactcccgtgagctcgccgcctccagaagtgaagtcctctcctccaccaaccccagttagctcaccaccaccagcgccgaagtcgtcacctccacctactccagtgagctcgccacctccagaactgaagtcctctccaccaccagccccagttagctcaccaccatcagcgccaaagtcgtcacctccacctgctcctgtaagcttgccacctcctgaagtaaagtcttccccaccaccagcaccgattagctctccaccacctccggccaagtcaccacctccaccggcccctatgagctcacttcctccccctgtgaagtctccacctccaccagcgccggtcagttcgccaccacctccaatgaagtccccaccgccgccagcaccaattagctctccgccaccagcaccagtgaagccaccatcgctaccaccaccagccccggtaagctcacctcctcctgcggtcacctctgccccaccaaagaaagaagaagattcaacggcaccaccggcagaagccctacctccaccttcattcaacgacatcatccttccacctatcatggccaacaaatacgcatctccgcctcctcctctattccaaggatattaagctctatggagagatggtcgaccaagaatgaattgaacaacaatatataaggtcgcatgcgcaaccaaacagctacatgtacattgcaggcgtgtgtgaaattgtttatttattttttgcatgtgcacgcgtgagtatttgcttctccgtacatactctatgtatgaacgtgtgcatgtgtgaactaactacatgagacgacaaggtgcaagagacatgtctggggcgtcatttgtatggctttaattttttttattatatatagataaggaaatattttccttaaaaatggagtacaagggattgttgagaactgcttttgttcatgatattaatatatatgatgaatatttcttgcaa

SEQ ID NO: 117761 - DNA, 407 bp, Zea Mays
atcttgcatatatagtcgaccgcaactcattctacacaattacgtacgtcccagttgcgaaatacgtttgcatcgcatcgcgtcgaataatattacaaattacagtagctccggcacctactacagttacattacatcactgaatgaatctacagcagatctatcgctcaaaaactctacacgcctgcaccctaccctacgcattctgaggctttcttggtgctgcgggtgacctcccttccatcgtctgcaggcgctgcttcagatgaaagacttcaacctggcagagcccaaggcatgaacaaaaaaaagaaagaaagaaagtctagcatgataaggtcttacctgaagctggaatgcccgtgcgcgttctcctgcaagaactccgcgagtcgagtgcagttcct

SEQ ID NO: 117762 - DNA, 863 bp, Zea Mays
ctcggtttccccctcccctaacactgtagccgctccttcaacggcgtcctcctcctcctcctctcccttcctgattctttctctctcccgctaaatcgatgggcacgctacgccgtattccttccccgcagccccgcagccgcttcttcgcccgcgcgctcggaatactccgcaccaatcctagctgcgggcaggggttccagccgcttcttcgcccacacgcccgctcgctcggaatactccgcaccaatccgtgtcggaccggtacgtgtgcgagatctgcgggcaggggttccagcgcgaccagaacctgcagatgcaccggcggcggcacaaggtgccgtggaagctgctgaagcgggaggccggggaggcggcgcggaagcgcgtgttcctgtgcccggagccgagctgcctgcaccacgacccctcgcacgcgctgggcgacctcgtcggcatcaagaagcacttccgccgcaagcacagcggccaccgccagtgggcctgcgtcttctcccgcattgtgtggggatcaattgcttggcttatctagatggttccatatttagtacaagtgatcatcttttttgcgggagccgtgatggtaccttgaaaagatgggaattaaataatggggatgcaagcttctcaggaacttttgagtctcatgttgattgggtatgcttttttctgtttttaattaagtaggcttactgtttcatcaatcagtgctttaaatagacattatgtttataaattagttatgtttatgtttaacatggtgtctgtggtctattatttggatccaaagcttagcacatttctagtgtccatatattttagcatcaacattctaattgaca

SEQ ID NO: 117763 - DNA, 816 bp, Zea Mays
atggtggctgccggcaggaacagggcggagcggtggaacctcgccggcgcgacggcgctcgtcaccggcggcagcaagggcattgggtacatacatacatacatacagcacgcgatcgtcgaggagctcgccgggttcggcgcccgggtgcacacgtgctcgcgcaacgcggcggagctggaggagtgccggcggagatgggacgagaaggggctgcaggtgaccgtgtccgcctgcgacgtgtcggcgcgcgccgaccgcgagcgcctcgtggccaccgtgggggccaccttcggcggcaggctcgatatcctcgtgaacaacgcggggcagtccctgttcaagcggacggccgagtgcaccggcgaggactactcccggatcatggcgaccaacctggagtcgtgcttccacctcagccagctcgcgcacccgctcctccgcctcgccagcggcggcgggggcggcagcgtcgtgcacgtctcctccgtcgctggcttcgtcgggctcccggcgctcgccgtctactccatgtccaagggcgccctgaaccagctcacgcgcagcctcgccgccgagtgggccggcgacggcatccgcgtcaactgcgtcgcgccggggggcatcagaaccgacatcagcagcgataagacgatagacccagagctggcgaagagggagatggcgcgggtgcccatggggaggatcggcgagccggaggaggtggcgtccatggtggccttcctctgcatgccggcggcgtcctacatgaccggccaagtcatctgcatcgatggcggccgcaccatagcttag

SEQ ID NO: 117764 - DNA, 603 bp, Zea Mays
tgtgtattattctcaattcattcccattttattatagcgaaaagataaagatgatatcaaattacaagtgtaccttcagcttgtaagagggtaaaagtacaagtgtgacgcaaaaaccaatgccaaatcagcgtgcccagtacaaggatactgttcacctatttataggcacggatcgcagcccatggaaaattacaataatgccctttacatttattaataactctatgataactctttgaggtctaatctggtttttcatctttaagtcggtttctttttccgccgctactccgaagctcttctacacacagcttcggcactgcgccaacctttgtgcttctttgtaccgtggctctgatccgagtccgaaggtgcctgttaatgtactttgctccagaaacattgttaaattatgtttttgaggaccttcggaagccgaaggcccccaacaccattcctcaaataggattgctattccaacctaagaactggaaattgtcatggtgtcatggacgaagaatatagtagtacaaacattattactatatgcatgatatagcaacaaacagtgtcgtataaattgcagttatttaatttgcc

SEQ ID NO: 117765 - DNA, 815 bp, Zea Mays
ccggccggacgatggcagcagcagagcgcgaccgcgagcgatggatcctgcccggcgcgacggcgctggtcaccggcgggagcaaggggatcgggcacgcgatcgtggaggagctggcggcgctgggcgcgcgcgtgcacacgtgctcccgcaacgccgcggagctggaggagtgccgccggaggtgggcagagaagggcggcggcctgctgcagcaggtgaccgtctccgtctgcgacgtcgccgtgcgcgccgacagggaggcgctcatggccaccgtcagggatgtcttcggcggcaagctggacatcctcgtgaataacgcggcgcaggtggtcttcaagccggcggtggagtgcaccggggaggagtacacgcggatcatggcgaccaacctggagtcctgcttccacctcagccagctcgcgcacccgctgctccgcgacgcctccctcgccggcggcgggagcgtcgtgcacatctcctccaccgcgggcctcctcggctttcgaggggcggtgctttacagcactgcgaaaggaggagtgaaccagctcacgaggagcctggctgctgagtgggcctgtgacaagattcgtgtcaactcggtcgcgccaggaatcgtcatgactgacatggttaagaacgcagcaagctcggaggccgtcgagcaagaaacttcacggattccgctgcggcgggccggcgagccggcagaggtggcgtccgtggtgtcgtttctgtgcatgccggcggccgcctacgtcaccggccaagtcatctacgttgacggtggccgaaccataagagcttga

SEQ ID NO: 117766 - DNA, 810 bp, Zea Mays
atgtgcgaggagaagaagtcagggggcggcagcgccaataagtggcggcaccctgtgagcctcgtcttccgtatcgccggcatcgcgatggccgtggcggcggcagcggtcatggcggcggcgagccagtgcacggtctacgccgactacgactacggcgcgcgcccgagcaccgtcacgtacagcgacttccctgccttcgtgtacctggtggcggcgacctccatcgcggcgccactggaggcggtggcgctgttcctcagcgttagcaagaagggcaagaagggcctcctcagggtgctcatgccgctcctcggcgccgccgcgccggcgctgctctactcgtctgccggcgcggcgttcgccgccggctgggacgtctactactactcggagtcggagcccagcgccggcggcgggcggcgcttcagcgtctgccgcagtagcgccggcgcccgcttctgcgggcaggtgcacgtgtccatgtggctcgcgctcggcgccgccgtggccgtgtccgtcgctgagtgcctcaccacgttgctgtggtccgccagctccgactctgactcggccgactctgactcggacgactctgtttgtgggcatgggtgccattgcaagcattaggctatagctgcgccattttgtttgcttctaaatttgttgataaatcaacgaatgtatgcttgcttgtgtggttcatatatggaatatgattcaaatattggcatgtagccttttttccgtttaaaagaaaacaaatattaatatgtttgagttggaaagaaagaaaaatgattcaaagtg

SEQ ID NO: 117767 - DNA, 643 bp, Zea Mays
cgtacgcgtacgtatatgtccaccatgcacgacgacgaggagaagaaggaatccaagaccgcgacggcgatcagcatcgccggccgcatcgcgggcatgggcctggcggtggcggcggcggtgctgatggccacggcgagccagtgcaccgtgtacgcggcgtacggcgcgcggccgcgcaccgtgacctacaccgacttcccgcccctggtcttcctcgtgggcgccgcctccatcgcggcgttcctcgaggccatcgccatcttcctctgcgtgtggaagaagggcaaggacaagaaggccaaggtgctcatgccgctgctgggcgccgccgtgccggcgctgctgtacgcggccaccggcgcggcgttcgcggccagctccaacatgtcctactgctcagcctacggcaggcgcctcaacgtctgcaccgccgacgggggcggcagcggcagcaacttctgcagacaggtgcatatctccgtctacctcgcgctcgccgcggccatcgccgtgtccgtcgccgaggtggtcaggggcattggaggaacggcgtccggcggaggctcggactcggactcagactccagctccgacggctgtgaccatagctgccgccacaagcattagctaggttgtgcgt

SEQ ID NO: 117768 - DNA, 612 bp, Zea Mays
atggctgctgctggtgatggtggcggcaagtccgacgggtcgtcgtcaaatgcggcctgcctcgccctccgcatcgccaccgtagctctgtcggtggcgtcggcggtcatgatggcgtccgcctcgcagcgctcctgcaccggctgctctccggcgacggcgagccagcagccggtctcctacagagactacagctcccttagttattccctagtcgccaatgtggtatcggcggcgctacaggcgttggcggcgtggctgacggcgtccggcaaggcggacaagggcaaggtcttcaagtctctgtccgagctcgtcgacaccgccgcgcaggtgctgctctactcgtcctcggcgctgtccttctcggtggacgacttcggcacctgcggccgcagggtggccggcgtctgcaaggccgccggcgagttctgccagcgggcccgcgcgtcgggggccgtctccattgccgcggccgtcgccctggccgcgtccaactacctgaaggacgtgcccgtctccacatggttcagagcaggtgacgatggacccaagggaaagcccgccgggtgtggccgcggcggctgccattgccgccaccaccaccattag

SEQ ID NO: 117769 - DNA, 101 bp, Zea Mays
cacgcaccaaaactttacttcatctgcggtactcacataagcacttccaccaatggccaacactatcatggccccagttaaaagccttcccagccataatg

SEQ ID NO: 117770 - DNA, 2106 bp, Zea Mays
atggaggggcatgtgccattgccattgccattgctcccggacggagaaactgcggtgggctacagcaaggacgacgcctcctcgcctctgcaagaggagatttcgagcctgcggtcaaggcagcggcgtgttgacaggagacggcgggaggcgctcgacaggctcgttgaactgaaaggaagcgttagggtcttctgccgggtccggccgctggctcacacgaacagcttgcatgcccagtcatcacctgttaccgtcgagcaggagaggatcacggtcaagcagccgggatcaagagggagttcggcgctgatagggttttcggccaggagtccacgcaaggaaggaaccggcggtaataagctcggcgtcgtgcctcgggctatccaggagctgttctctcgcgcttcggaggacggctcatgcgcctactctttctccatgagcatgcttgaggtctacctggggagtctcagggacttgctggcagcaccgaggcagcctctcttcaggcgaacagagtgcaaagcagcggcgtgtagtagtagcctcagcatactggcaacgaaaggtggcgccgtggaagtggaggggctgacggacgtctcgacgccggacctcaagaacgccagccagtggtaccgcagagggcggcgagcccggtcgacggcctggacgaacgtcaacgacgcctccagccggtcgcactgcctgacgaggatcaccataaggagaaggatgaggcatggaggaggaggaggagtcagcaagctctggctcgtcgacctcggcggcagcgagcggctgctcaagaccggcgcgtccgggctcaccatggacgagggcaaggccatcaacctctccctgtcggcgctcggagacgtcattgctgcgctcaggaggaagaggccccatgttccttatagaaacagcaagcttacccagattctcagcgactcgctcggcgatggttcgaaagttgtaatggtggtgcacgtcagcctatccgaggacgacgtcggcgagacggtctgctcgctgaacctggcgaaacgagccagatcgatcgagccgaacagagaaatcccacaggatctgaaaacgctgaagcagaagagggtcgcagagctggacagggagatccgcgccgccgaggaagagctgaagcgtctcgacgagcagataaggagagcggaggagaaggagatctcactcgaggaggaggaggaggaggaggaggagaagaagctcttcgcctcgtcggtctgccaggctctcagcgacgacgagaaggggtcgccgaggagcactctggtggtggtggggcacaccgatgccgcggagagcccgcgcgcgacgacggagaaggcgaagggcaggaggccgccgccggctcgtggccatggtggctcagcagctccccacttcatgtcctccacggtgtgcagccggcagagacggtgcgcgggaggctaccattctgtcggtaacggtaagccgaggctgacggcggtgtcggtgaacaggtacccgccgccggctgctgagctgagtgggagccagaacgcggcggccagggctagcaggtcggcgtcagtggcactctcgtccggtgtgcacaagttgaggtgcttgcgtgtcaacaagtccgatcaggtcaacgtaataagcaacagcagcgtcgactcgaccgctgcgtcggcaccgccgccgcggcggagggaaagctgcttcggctccaggccggttctacaaagagcggcagcgcccctgcatctgcacaggaggaggatgtctagcctgacatgaacaccgattgcacagttatgatttttcttaacttaattgtttttattagtggtgaaagggttctgaaagatgtttgtgtatgtatggttgttagcttcgtagttcttgactgctgtaactattggttggaggccccttgggcttttgttttttttttgggtttggcttggaaggggcaaaatgatgcgaggaataattgttgatacatggaataatggaatttacctgtggttctggttgcgatggattttgaatggaatttgcgaggtagcaaaacaatctaacaagttacgtagg

SEQ ID NO: 117771 - DNA, 2422 bp, Zea Mays
ggcagggcagcagcaaccaaccgcccaccgatcgtctttttctgtttgtttgtttatacctatctcctcctcctcgcctacgactacgagttcgccgtggcgcgccacccgccaccagtcagtcccgccgcgccgataaaccctccctccccgaatcggagaaccgcatctctgagattcccctccgacacccgccgtccgcgctgggatctcccatccggacccgtcttccatcattgcccctcgaatttctcctccacagactcagtttcgtcatccgcgcttggtttcgtcagttccggcgggcctagcagattcgtggctcttcctcgtacacaatccgggctgggtgagtggggccccttttccgcctagcgggttgcgtgcggccggcggtgttgcttggaaggcaaatcgagtgtttagggggccgcgtgcgggggcggtggtaaataaagctaccagggttggtggggtcattagcggagctgtgactctgtgaggcgacgatggggctgggggctgcgatggcgctggcgctgggcgacccgccagcggactacgcctccatcgcggcggtggggctgttcgtggcgctcatgtgcgtctgcatcgtcgtcgggcacctcctcgaggagaaccgctggatgaacgagtccatcaccgcgctcttcatcgggctgggaactggagcggtcatcctgttcgcgtcgagcgggaagcattcgcgcgtgctggtgttcagcgaggacctcttctttatttacctgctgccgccgatcatattcaatgcagggttccaagtgaagaagaaacagttctttcgaaacttcattactattacactgtttggtgcagttggcaccttgatctcttttactgtaatatcccttggcgctctaggactaatatcaaggcttaatatcggcgcacttgaactgggagactatcttgcacttggggcaatattctcggccacagactcggtttgcaccttgcaggtgttaagccaagatgagacaccattcttgtacagcctcgtgtttggtgaaggtgttgtcaatgacgcaacttctgttgtgttgttcaatgcaatccagaactttgatcctggaaatatcagcagtgccaaattactgaacttcattggcagtttcctttatctgttcggctccagcaccattcttggagtagcttctggacttcttagtgcttataccattaagaagttgtacttcggcaggcattcaaccgatcgtgaagtttccattatgatgctaatggcttatttatcttacatgctagctgaattgctcgatttgagtggcattctcactgtgtttttctgcggtatcgtaaatgtcacactatacttggcacaatgtaacagaaaagttcgagggtcacaaccaagcatgcctttgcaacattgtcgtttatctccgagacttttctgtttctttatgttggtatggatgcattggatatagagaagtggaagattgtcggtcaaacttatagcccggtaaagtctatcgctttgagcagcaccattttagccttggtgctggtttcaagagctgcttttgttttcccactatcctttgtatcaaatttgaccaaaaaaactccaaatggaaagatatcttttaggcagcaggttattgtttggtgggcgggtctcatgagaggtgctgtgtctattgcgttggcttacaataagttcacaagatcaggccatactcaacaacctagcaatgctatcatgatcacaagcacaatcagcgttgttcttttcagcacaattgtctttgggctgctgacgaagccactgatcaggctcttgatcccgtcaaggcacctatccagggaaccaagcgccctttctgaaccttccagcccgaagtctttctttgagcagctggccgccaacagccctggacacccggatcttgagaatggcataagcctacgacgcccggcgagcctccgttttctcctagtaagcccggcacggtccgtccaccattactggcgcaagttcgatgacagtttcatgcggccggtgtttggtggccgtggcttcgttcccttcgtccctggttcacccactgagagcagcttgccattgcttcctggcaatgagaactgaaaccagcgtatcgaggggctttaattcagcagaagttttgtaaattggcttcgcttatggttataatatttggtgtaaatctaggtttgtagattcaacttggtagcatgtacatgttgatgtaggctagttaactgaccagcgaccaaacggctgtgcatattgatatctcgtcgctatcaatgagttcgtatttataaaatactctgtacatcggatcactatatatgtatcgtctccaacttaataaatactcatccgttctaaaat

SEQ ID NO: 117772 - DNA, 2064 bp, Zea Mays
ccgggctgggtgagtggggccccttttccgcctagcgggttgcgtgcggccggcggtgttgcttggaaggcaaatcgagtgtttagggggccgcgtgcgggggcggtggtaaataaagctaccagggttggtggggtcattagcggagctgtgactctgtgaggcgacgatggggctgggggctgcgatggcgctggcgctgggcgacccgccagcggactacgcctccatcgcggcggtggggctgttcgtggcgctcatgtgcgtctgcatcgtcgtcgggcacctcctcgaggagaaccgctggatgaacgagtccatcaccgcgctcttcatcgggctgggaactggagcggtcatcctgttcgcgtcgagcgggaagcattcgcgcgtgctggtgttcagcgaggacctcttctttatttacctgctgccgccgatcatattcaatgcagggttccaagtgaagaagaaacagttctttcgaaacttcattactattacactgtttggtgcagttggcaccttgatctcttttactgtaatatcccttggcgctctaggactaatatcaaggcttaatatcggcgcacttgaactgggagactatcttgcacttggggcaatattctcggccacagactcggtttgcaccttgcaggtgttaagccaagatgagacaccattcttgtacagcctcgtgtttggtgaaggtgttgtcaatgacgcaacttctgttgtgttgttcaatgcaatccagaactttgatcctggaaatatcagcagtgccaaattactgaacttcattggcagtttcctttatctgttcggctccagcaccattcttggagtagcttctggacttcttagtgcttataccattaagaagttgtacttcggcaggcattcaaccgatcgtgaagtttccattatgatgctaatggcttatttatcttacatgctagctgaattgctcgatttgagtggcattctcactgtgtttttctgcggtatcgtaaatgtcacactatacttggcacaatgtaacagaaaagttcgagggtcacaaccaagcatgcctttgcaacattgtcgtttatctccgagacttttctgtttctttatgttggtatggatgcattggatatagagaagtggaagattgtcggtcaaacttatagcccggtaaagtctatcgctttgagcagcaccattttagccttggtgctggtttcaagagctgcttttgttttcccactatcctttgtatcaaatttgaccaaaaaaactccaaatggaaagatatcttttaggcagcaggttattgtttggtgggcgggtctcatgagaggtgctgtgtctattgcgttggcttacaataagttcacaagatcaggccatactcaacaacctagcaatgctatcatgatcacaagcacaatcagcgttgttcttttcagcacaattgtctttgggctgctgacgaagccactgatcaggctcttgatcccgtcaaggcacctatccagggaaccaagcgccctttctgaaccttccagcccgaagtctttctttgagcagctggccgccaacagccctggacacccggatcttgagaatggcataagcctacgacgcccggcgagcctccgttttctcctagtaagcccggcacggtccgtccaccattactggcgcaagttcgatgacagtttcatgcggccggtgtttggtggccgtggcttcgttcccttcgtccctggttcacccactgagagcagcttgccattgcttcctggcaatgagaactgaaaccagcgtatcgaggggctttaattcagcagaagttttgtaaattggcttcgcttatggttataatatttggtgtaaatctaggtttgtagattcaacttggtagcatgtacatgttgatgtaggctagttaactgaccagcgaccaaacggctgtgcatattgatatctcgtcgctatcaatgagttcgtatttataaaatactctgtacatcggatcactatatatgtatcgtctccaacttaataaat

SEQ ID NO: 117773 - DNA, 2887 bp, Zea Mays
atgggccccccactcgtcatattctttgggctgatgatagacatggtgtctgctgttgaagagcttagtgggttaagctctaaagaacttaatgagatgctgaaggagtcagacaactttgttttgcagtccaaggcagaaggcggaggtccaaagcagacacttgtggacatggaaaaactcgtgtcctcgcttcctcttcatctcattgctgtatgtttggagcttcggcaaggccccgatttgacatatgtgcttcgtggcatgcgctttttgcatagtttgtctgacctagcatcccgccatactagactggagcaggttcttcttgatgatgtcaaattatctgaacaagtcatggatctgatattcttcttactttctattcttgctgaacagaagaaggagaataatgttggcgcttctccgcttgtgcatgcgtcacttgtagcagctagtcttcatctgctaacaagttacttctcttcccagtggcatgaacttgtccatattctgcttgcacatccaaaggttgatatctttgtggatgtggcctttgatagtttgcatgaagatgaactctctagaaatggaggcatactgtcactttctcacactatactgaagttagctgtccctgaatgtttgaagcaatcaaccgatcttgttgcttctatttccaggctcaaggcaaagatactttctattctgctgcaactttgtgaggctgaaagtgtctcttacctcgatgaagttgccactaattcaaacagcatgcggctagggcaaaccttggctctagaggttcttaatttgctgaagattgcatttggaaagaaaaaatacattacttctgattctcatgataaggttaagatttaccccatgggatctatgcttatcagtgcattgcgtcttgttgacgtcttctctgatgattcaaacttcagatcatcctttttgactaacactgttccgtttttaacccagattctagcaactcctcacggtgaatttgtttctagttggtgctctgtcaacttaccagcaattgaggaagatgcaagtctagattatgatccttttgttgcatctgaggtggcactgttagcttctaataatgtgttgactgaagctaaagctgactattcatgcccttttcgccctagcctgccttcagtggcatatgcacagacaagaacatcatgcgtagtgaaaataatagcaaatttgcatgtttttattccaaacatatgtgaagagcaagaaagggatctttttcttcagaactttcaaaagtacttggtgtctgggagttctaaactgtcagcagaccagccagcttctagtgattttgatgccactaaagtctgtagaaacttaggatctttgtctgattatgctaaaacattggttcctaatttgttaaatggggaagacttgttgttattaagtgatttttctgataagctacaatcttggtgtaaatcacaagttgcagtaaaggtggtacaaaatgatattccaccagaaagcatggaggacatgcacccaatgcagcagcccttgccaacacgggcaagcactccggactccaaaatgaataactttccaaaggatgtgcagaacatggaagtgtctgcaccaatacccccaataaatcgggaaggaaatgataaggatgagactccaaagaacacagtctctagaaatggtggtttcctacagaatgcagttggtcaagacctagtccatcttggcgttgcaagaacagccagtggtggctcttcggccgtcacttccgttgttagcactggacaccagcgcagcaaaatggatcttgatccagcttccggtagcgtggacaatttcaaaacaccagaactcacaaaagaaaatggtctccagggggatgacaaaggagaaagtagtgtgtatgatgagaggcaacctaagagaaggaagcggaacattatgaatagtgagcaaatagatgaattagagaaggctctagtagatgagcctgagatgcacaggaaccctgttctattgcagggttggtcagagaagctaagtctgcagggcccagagatcacatcatcacaacttaaaaactggctgaacaatcggaaagctaagcttgctcgcattgcaaaagaaagagggacatttgagggagataatgctgataagccatctacccctcatcccggcgagtcttccgaaagtgctggggaggacaactatataccccctgcaagggtgatgactgctccatccaaaggcagactggtgagcccggacggcaatgagaaaacatcgcaggcagagctatcccccaacacgatgctgatccgcccattcacgagatccttctcactggagcccggtcggctcgtttcactagttgacagcgacgggaaggaggttggcaggggcaagatattccaagcgccagggaagagcccagccccagtggagagccgcatctgcacggttgatgtcaccgagctcaggaccgagaagtggagggagctcccacacccttctgaggcatctgggaggaccttccaggaggcggaggcgaggaatggtggaatcatgagggtctcttgggactccggcaggctgttgcctgtagtgtagcaaggcagaaacttttcgtcaggttgctgtataccgctaggcacaaggtgagcagagggagcctttggtttagggcgagagactggatcatgggattcttgggggcctaagtaacactgttaaaacctgtggttaactgtggtgtatccatcaactaattgtctcaagcaatgcaggtacggagtagttactaattttactgctggtgtttggtgtcacctgcaacgtgacgtggtaaacc

SEQ ID NO: 117774 - DNA, 1763 bp, Zea Mays
gttggggacaggacagcctaccgaaatctctctgctcggtcttccttcactctctctcatagtctcatgcatgcatggctcccactgcccatcatcaggcagcgcgggacgatgagctggagaagagccgccgcaagcccggcggcggcggcaaggcggcggcggtccggtgccacccggtcctggcggaggagcgcaaggcgtccatcaggggcgtggtgggcgacctgctggccatggcgggcggcggccggaggagcctcatctcgctcggcgtcggcgacgcgtcctcccacgcatgcttccgccgcggcggggagttcgccgccgaggccgtcgcccacgccgccttgtccggcgccttcgactgctatgcgccgtccttcggcttccccgacgcccgccgcgcggtcgccgcccacctgtcgaccggcgcggtgcaccgcacgcacgaggccgacgtgttcatgacggcgggcggcacgggcgcgatcaccgccatcgccacggtgctcggcggcgcgccgggggccaacgtcctgctgccgcgcccgggcttcgcgccgtacgaggccgcctgcgaggtggccggcgccgagccccggttctacgacctgctgccgcggcgcggctgggaggccgacctcgccggcgtgcgcgcgctggccgacgccgccacggccgccctcgtcgtcatcaaccccaacaacccgtgcggcgccgtctactccgctcaccacctccgccagcttgctgaaaccgcaagagagttggggattcccatcgtagcagacgaggtgtacgcacacatggtcttcggcggcagcaggttcgtgcccatggcctccttggcgcacatcgcgccggtcgtcagcatcggagctctgtccaagaggttcatgctgccaggatggcgtctcggttggctggccttctgtgatcccaacggcgcgctcaagcatgtcagggctgcgaccgagatgctgctcaacgtgacttctggccctgcctccatagtccaggcggcggttcccaagatcctttcagctgaacaccatgagttccataggaatgttgttcacctgctcgagtctgcagctgatgctctgtacagaagagtgaaccaaatcgaagccctgcggtgctactccaagcctgaaggctcaatgtttatgatggttgagatcaacacttcaattctacatggcgtcgccaacgacatggactttgctcgtgagttgatcaaagaagaatgtgtcctggttctacctggttctgtcattgggttgaagaactgggttaggatatttttcggagcacctgttagtttaatactagaagcttgcgacaggattgagatgttctgccgaaggaggacgctcaagcaaaacaactgaagagctgaaaatgttttgaaaccaggaagtagggtttttgttagcccagtaacatatatatacagcttcgatttattttccaatgcacattctgaggtttgcatatagaaaactgagaacagatgcttgtctatagttaaaatatatgttatacataattccaggaaatggtgtaaacatttatcatttctttacttgtgccttctacttcacagatgcattaaggttattgtctttttattgaacagacagcaagcaaaagaagcaagctaacgctaaattcatatactgacagttttttatctgttcaatgcccctcaacttcaaacttcagaatagcacaagctccaaatgacatttgttgaa

SEQ ID NO: 117775 - DNA, 1784 bp, Zea Mays
cacgcaccaccagcacgcgacgcatgcacgcaaatgggatgggatcatcacatgcgccaccactgctcgtcacggctaagccgccgccgccgcgcgtttatctgcttcacctgctgcaggcagcgcgggacgatgagctggagaagagccgccgcaagcccggcggcggcggcaaggcggcggcggtccggtgccacccggtcctggcggaggagcgcaaggcgtccatcaggggcgtggtgggcgacctgctggccatggcgggcggcggccggaggagcctcatctcgctcggcgtcggcgacgcgtcctcccacgcatgcttccgccgcggcggggagttcgccgccgaggccgtcgcccacgccgccttgtccggcgccttcgactgctatgcgccgtccttcggcttccccgacgcccgccgcgcggtcgccgcccacctgtcgaccggcgcggtgcaccgcacgcacgaggccgacgtgttcatgacggcgggcggcacgggcgcgatcaccgccatcgccacggtgctcggcggcgcgccgggggccaacgtcctgctgccgcgcccgggcttcgcgccgtacgaggccgcctgcgaggtggccggcgccgagccccggttctacgacctgctgccgcggcgcggctgggaggccgacctcgccggcgtgcgcgcgctggccgacgccgccacggccgccctcgtcgtcatcaaccccaacaacccgtgcggcgccgtctactccgctcaccacctccgccagcttgctgaaaccgcaagagagttggggattcccatcgtagcagacgaggtgtacgcacacatggtcttcggcggcagcaggttcgtgcccatggcctccttggcgcacatcgcgccggtcgtcagcatcggagctctgtccaagaggttcatgctgccaggatggcgtctcggttggctggccttctgtgatcccaacggcgcgctcaagcatgtcagggctgcgaccgagatgctgctcaacgtgacttctggccctgcctccatagtccaggcggcggttcccaagatcctttcagctgaacaccatgagttccataggaatgttgttcacctgctcgagtctgcagctgatgctctgtacagaagagtgaaccaaatcgaagccctgcggtgctactccaagcctgaaggctcaatgtttatgatggttgagatcaacacttcaattctacatggcgtcgccaacgacatggactttgctcgtgagttgatcaaagaagaatgtgtcctggttctacctggttctgtcattgggttgaagaactgggttaggatatttttcggagcacctgttagtttaatactagaagcttgcgacaggattgagatgttctgccgaaggaggacgctcaagcaaaacaactgaagagctgaaaatgttttgaaaccaggaagtagggtttttgttagcccagtaacatatatatacagcttcgatttattttccaatgcacattctgaggtttgcatatagaaaactgagaacagatgcttgtctatagttaaaatatatgttatacataattccaggaaatggtgtaaacatttatcatttctttacttgtgccttctacttcacagatgcattaaggttattgtctttttattgaacagacagcaagcaaaagaagcaagctaacgctaaattcatatactgacagttttttatctgttcaatgcccctcaacttcaaacttcagaatagcacaagctccaaatgacatttgttgaa

SEQ ID NO: 117776 - DNA, 83 bp, Zea Mays
cgaaataggtttggattagagatgaggggactagattctatatgtgcatcatgtgcacaattccttcatgtacactggatatg

SEQ ID NO: 117777 - DNA, 182 bp, Zea Mays
cctcgctgtttgttctcttattatgcaggccccatggtagtgattgtggtatagtgaatgtgaacatacctactaatggtgctgaaattggtggagcatttggtggagaaaaagcagctggtggtggacgagaagcagggagtgattcctggaagcagtacatgaggagggcgacttggtaa

SEQ ID NO: 117778 - DNA, 1884 bp, Zea Mays
cgaaaataagaaaaaaaaatatttgcatctcttctctgaggattcagagaattgtgactcctgtgtggagaattcattgctagatcgcaacgcaccgtcgtcttgttttaatcgcatgaggagatcgaagcgatgatgtcgcgtacgaacaccggcggcacgtcggcgcgacagaacagcgacgagtctgtctccccgaggtgcgtcctcgacgacggcggctataggatgagcaccagcaacgccggcagtagcaccacgaccaccatggccagcggcagcagtaccccagcaacgacgagcgcgtcgtctccagctacaacggtggcggtgacgacgtacaccgacccatccgcgctactgaaggcggccgggcggcgcgacgggtcggcggcgccgccgtggaaggccgtggccgaggcgtggcggtccagggccaagcgccagctctctgtccgcatcccgtcgttagggcccacgatgtcgtcgacactgcggcgtctgagcagccgccggacggacaacatcgaggtgcacgagttctgcgtcctcaagccgaccctccgcactttctccctcgccgagctcaagaaggccacccgcaacttcagcaaagagaacgtggtgggcaggggagggttcgccaaggtgtatcgaggcagcctccccggcggcgagctggtggcggtgaagaagctgacggcaacgcagggggccgaacggatggagggcttcctgtcggagctggggcacgtggtgaacgtgagccaccccaacatcgccaggctcgtgggcgtgggcgtcgacggcggcgagcacctcgtgttccccttctcccgcctcggctgcctctccgggatgctccacagcaacagcggcgcagagcccatgccgtgggaggcgaggtacagggtggcgctgggcactgcgcgcgggctagaatacttgcacgagaggtgcgcccggagaatcgtgcatagggacatcaagcccgccaacatcctcctcatggacaactatgaacccctgatctgcgatttcgggctggcgaggtggctgccggcgaagctgacgcacctgcaggtgagcgtgttcgagggcaccttcggctacgtgccgcccgagtacacgacgcacggcgtgttcagcgagaagacggacgtgttcgctctcggcgtcgtgctgctcgagctcctcaccggccgccgcgccgtcgacaccgccaagctcagcctcgtcgcatgggcaaagcagtacctcgaagtcgacgacgacgacgaggacgagaccctcaagatggccgacccagcgctgggcggccggtacgacgccgagcagctccggaacatggcgtgggcggccaagctctgcgtccacgcctccccgcaccagcgcccacagatgagcgaggtggtgcagatactagcaggagagggggcgcatctacgtggcggcaggggggcccacggggtcgacgacgagctgctgccggagacggacggctacgacggcgacgcggcgcctgggtacgtggatgatctgagccgccataaggcgctcgccttcgccgtcgacgtcgacgtggactcggacgaggattccacgccaccagtgcgacacgcacccgccaccacgtttgttcgtgaagtgtagctgggcacggtcgcacgggcgggcggcaacgacatcctcttttttttgtcgtgcctgtgatgatgtgtatattttgcatatgtatatacaaaattaaagggaaagaattgtcagattgcggcattgtgtatggtgcgagtgaggaagaagctgaggaaatcaaaggggtaattgaaaattggcatattgagtcaccgaactgccaaaaccagtaaaacgagtcttgactct

SEQ ID NO: 117779 - DNA, 1759 bp, Zea Mays
caaagacctctctccccccaagctcagcacagcagcagcaggtagcagccaccagtccaccaccaccccactccgccagtgcgccgcgcagtgagctgctgcctgctgtctgactgtcaccgctgccgccgccacgcccacgcctcatcaagcgaggcaatggcgtcgcggctcctgccgttggtcgcggcgctcctcctcctcctcctcctgacggcggcgtcgtccgaggcgacgctgcacccggtggactacctggcgctgcaggcggtgcggcgggcgctgtcggacctgccgggctcccgcttcttcgcgtcgtgggacttcacgggcgacccctgctcgttcgcgggcgtgtcgtgcacggccgacggcgcccgcgtggagacgctggcgctgggcgacccgcgcgcgggcgcgccgggcctcgggggcgcgttcccgtccgcggccgtcgccaggctgccggcgctgacgtcgctgtccctcgtgccggggcgcgtcacgggcggcctccccgccgccgtggccgcgctcccggcgctccgcttcctcgcgctcgccgggaacctgctctccggcgacctcccgcgcgcgttcgcgccggcgctgcgcaccgtcgacctcagcaagaacgggttcacggggacggtaccggcgccgctcctccagctgcggggcctgcgcacgctcgtgctctcgcacaacgccctctcgggcgagatcccgcggtcggtgcgggcgccgctgctccacctcgacctgcgcgggaaccggctgtcgggcggggtgccgccgctgccgggcacgctggcgtacctgtcgctggcggggaaccgtctgtcgggccccgtcggcggcgtgctgcggcgcctgccgaggctgacgttcctcgacctcggccggaactggctgtcgggcgaggtcccgggcgaggtgttcgcgttccggcgcatcgcgtacctgcagctgcggaagaacgccttctcgggcgagctccggcccgcggggcgcgtgccggcgggcgccacggtggacctgagccacaacgcgctgtcggggcgcgtgccgcccgagctggccaccgccggcgccgtttacctgaacgggaaccggctcgcgggcgaggtgccgcgcgaggtggcggcggcggcggaggccgggcggatgcgcgtgctgtttctgcaggacaacttcctgacgggggtcggcgtgggcggcgcgctgccggccagcgccgccgtgtgcgcgcactggaactgcgtcgcgccgccgccggctgtggtggccgcgtgccccgccaagggcggcaggggacgccgccggccgcaggcgcagtgccgcggccggacggggtgagttgcttgtttcttctgttattcacacccaatcgagatcgaggaggaggaggaggagggggtttagtgggtgggtttagtgatgaatgatgatgatggtcaggacaggacgtcgtctcattgctcatgagatgaagacccacaagtgattagcaataatttttggtgtacattttttagttcgcggttaatcctgggatgattttgtcggctggacacatgatgtcgatgtcggagatcactactactgcactgcatagggaaaagtttgtgtaaaggaaaagctaggattcttgttggttggtctcactctcactctcatctccgagaacttgtactttttttttgttgtcatttgatttgcaccatatatatctaatgcatttctgtctgtcgatggt

SEQ ID NO: 117780 - DNA, 118 bp, Zea Mays
gtccgtcgtccagctttcgctttgctcgtctttccctcctccccaagtcctccgcttttggaagaggctgggaactgacagggaacgaacggatctcgtgtcagtccagtcacagtcg

SEQ ID NO: 117781 - DNA, 1558 bp, Zea Mays
aaatcgttaaaagttattcgatatacattttcacagttccatctaaaagtcactaaaaacaggtctagtggtgctttcaattttgcactgcgagaaagtcagttttttgaaaaaagctgctttcttgatccagtcctttgatttagcttttgacttttaggggataaaagtcaaaaccaaaagtcaaaccaaacacactcttaatctttgtgagtacgaatgatctatatctatatgatataggtacgctcaggagtgacagacgagagactattttttttggtgtgtgtatgatatgcgatatagccggtggcggtggggttgccatctctatctcggcgtgcagtcagtcagtcacagactccagcgagcgagggaccaaaaccctagctgaaccctcccggcccgcgcagcaactgcgtccatggaggtggacccctcgccgtcgtcgcgctcgcccaggccgccgcctccgccgctggcggcgatgccgagctacttcgacccggagtcgtccggccgtcgggaggagtaccgccgctacaggaagaggttgtcttcttcaaatgtctctcctctgctgggaagatcactctccaagacctctggaccaaggctgttatatgatggagaaagcatcccaagacagcctaatgccggtttactccttgaagacataaagcaggaagctgccgattattccaacgtagaaagcttggatggattgagactgttcggttcgccgaaaaggacatctctcgatggcggttctgcatcaggcgcagcttacagttcgggcaggcaagcagtgaggcagacgctgaagccagtcaaactggaggacgatatgtatgtgccacatgaaggagaaacgccttctacaatgtttgcaactctccttgattctgggatccaaggtttgatgcacttccctgatgtaattcaacaatttgagaggacatgtcgaaatgcttcggagtcaatcagatctgctgcaactggaaagcttcgtgtggtggaagagaaacttatgcagcaaaatgctcaacttttactggacgaagctgcttcctggtcacttctttggcacatatatggcaaagaacatgaggagctttctggagagctgttggtgccgccaattacatctcatcaggaggcttgccgctttgttgcagcagacattacagcacaactgtgtctgcggatcatactttggcttgaaggtcttgcttctgaagctcttgatttggagaagaaggtgagaggacctcatgttggttcgtacctaccaagttctggtgtttggcaccgtacacagaggtacctaaaaaggaacaatgctgattctactatagtgaagcatgtggattttgatgctccaactcgtgaaggggcccaacttcttcctgatgacaaggtaggctattgccagccattaccaatatagcgtgaagatcctctcagagggcccaaggcttttatggtgcatataatcttttatgctgatgctagaaatgtgcattgcagttggttccatttgacctttcttggaccg

SEQ ID NO: 117782 - DNA, 8474 bp, Zea Mays
tctatctcggcgtgcagtcagtcagtcacagactccagcgagcgagggaccaaaaccctagctgaaccctcccggcccgcgcagcaactgcgtccatggaggtggacccctcgccgtcgtcgcgctcgcccaggccgccgcctccgccgctggcggcgatgccgagctacttcgacccggagtcgtccggccgtcgggaggagtaccgccgctacaggaagaggttgtcttcttcaaatgtctctcctctgctgggaagatcactctccaagacctctggaccaaggctgttatatgatggagaaagcatcccaagacagcctaatgccggtttactccttgaagacataaagcaggaagctgccgattattccaacgtagaaagcttggatggattgagactgttcggttcgccgaaaaggacatctctcgatggcggttctgcatcaggcgcagcttacagttcgggcaggcaagcagtgaggcagacgctgaagccagtcaaactggaggacgatatgtatgtgccacatgaaggagaaacgccttctacaatgtttgcaactctccttgattctgggatccaaggtttgatgcacttccctgatgtaattcaacaatttgagaggacatgtcgaaatgcttcggagtcaatcagatctgctgcaactggaaagcttcgtgtggtggaagagaaacttatgcagcaaaatgctcaacttttactggacgaagctgcttcctggtcacttctttggcacatatatggcaaagaacatgaggagctttctggagagctgttggtgccgccaattacatctcatcaggaggcttgccgctttgttgcagcagacattacagcacaactgtgtctgcggatcatactttggcttgaaggtcttgcttctgaagctcttgatttggagaagaaggtgagaggacctcatgttggttcgtacctaccaagttctggtgtttggcaccgtacacagaggtacctaaaaaggaacaatgctgattctactatagtgaagcatgtggattttgatgctccaactcgtgaaggggcccaacttcttcctgatgacaagaagcaagatgaattgcttctagaagatatatggactcttttaagagcaggaagattagaagaggcatctgacttgtgccgttctgctggccaggcatggagagttgccactctttgtccttttggcggcataaatatgttcccttccctgaatgcattgcacaaaaatggaaagtacagaacactacaagccatggaattagaaagtggtgttgggcggcagtggcgtctttggaaatgggcatcatattgtgcttcagagaaaatcgctgagcaagatggaggccgttatgagatggctgtatatgctttacaatgcagtaacttaaagcgtgtcttgccaatctgtactgactgggagtcagcttgttgggcaatggcaagatcctggctagatgttcaagtggatctagaattatctcagtaccaaacaagtagaccagaaaagcaacttgatgacgacatgaatggagcccaaagttcagttggtccagaaagttggccataccatgttcttgatcagcaacctcatgatttaactgctcttctgcagaaactccactcaagtgaccttgttcatgaaactgtctctcgagcatgccgagagcagcatcgacaaattcagatgaatctcatgagtggaaatatatctcatcttcttgaccttctatggtcatggttatcacctgctgaagagaaccataataatactgcaaggccccttgatgaccctgagatgatacggttcggggcgcatattgttcttgtgctgaggcaccttttcagtgatgggatggatgatgagttagatgaaaaactggttactgtcggtgatctcatcatcaacatgtacgtgaggtatttgttctcagaggatcaagaggagttggttggaatatatgcctcacagcttcaacatgacctttgcattactttgtttgtagaaatgatggaactaaggttaaatagcagtttgcatactatgtacaagctcttcctttctgctgtggagtatctgccattctcatctgataatgtatccaaggcttgttttgaagagatcatcgagagggtgctttcaagatctcggcaaacaaaacccactaagtatgatggggatttctctgatgttgcgcatcaacatcacctgcaatcacttcaaaaggctatggttattcagtggctttgcttcacaccaccatcctcgattccagactttcaaatgatcagttggaagcttctgatacgggcattgacacatagcaatacactgttcagggagttttctctgatatcaatgaggagagtccctgagctaccagcagggccacacaagttgcttgccattttagctgaaccgttaaagcaaaaagaaaatttaatttcacgggaagatccggaggtatctgataacttgccggagtttgaagattggcatgaatattactcccttgacgcgacttaccgcagttggcttaaaattgagatgatgaatgccgctgtttctcctgagatgctttcggcagaggaaaagggtcaagctgttgctgcagctaaagaaacactgaacttggcatgttcgttactacgcacaaaatcaggggatggaagaccatggctgtatgctgtcgagagcagtccatttgaatcccccgatgttattttccttgagctgcatgcttctgcaatgctctgcctaccttctggagaatgtatgttaccagatgcaacatcatgcacagctttgacaagtgcactatattcaactgtcagtgaagatgatgtgctgcatcgcctgttgaaggtggatgtccaggtctcttctagagacccctgctgtattgaagtcgctcttcgctgcttagcagcagaaggtgatggatatgggcttcatgaagccaacgatggaggtcttcttgctgcagtcatggctgctggctttaaaggtgaactcagtcggttccaacctggagtttcgatggcaatttcacggcttgatgcttggtattctgaccggagtggttccgtggagagcaccgctgcttacataattcgagggctgtgtcggaggtgctgccttcctgaaacaattctaagatctatgcaggcatgtatcgcactctccgcggctggtgatgatctagattactctctagataaatgtgacgaacttgttgagttagttggttcagccgagtctggaatgatgcatttgttcagccagcagcagttgcaggagttcctgattttcgagagggaatatctcatatgtacaatggagtttgaggaggaccggttgccttgtgatggctaagctttttccccacttgctgactaatccatgagacatgaccggcatgtgcattttgtggcgccgtgacccaagaacctgctgtgatgtatcgctacaccatttcaaagcgaaaagatggaatttagtgcgtaacgtggttctgcccgtttgtgcacgagaattggcccgttttggagagtcaatataagattattcaagtcgaaatccaagatttttgttcatgataaaaacaatgttcggcaagcctttttgtcccgcccgtgctacgcgcactccgcctcggctgcttttgcatcgatccgatctgccgtccctggacacgctgcagctgacaagggtcaccggcagttccatcccaaaggctgcgaaggcgcacacaagccaagttctactcaacatcgttccctaatcatggtagtaagcacactctgcagccgcttgccacttctacccaacatcatcgtcctcctcttgttcacaaccatttccgactccacgaacagcaacagcgatctcaatgcactcttgtcattcaaatccctcataacaaaggacccaatgggtgcactgtcatcttgggatggggacgcttctaacaggagcgctcctcatttctgccggtggaacggcgtgacgtgcagcagcgaccagcacggcagccatgtcactgccttgcgcctgcgagccttcggtctggaaggcaacatctcccagtcgcttgggaatcttagccacctccaaaccctggatctgtcgaacaacaacctagagggcgagataccttccagtatcggtaacttgtttgctctccattttctcaacctaagtgttaaccacctgtccgggaacgttcctcagtccatcggccgtctttccgaactcgaaattctgaatttccgcgacaatgacatcgtaggaagcatcccttcttcagtgctgaaccttacaggactcacaatgcttagtgccaccgaaaactacatgacagggaggattccagattggttggggaacttgacagatctgacagatttgaacttggcatggaataacttcagtggacagatcccacaagctttaggtaagctacctaaccttgctagattgactatgcaaggtaatcaattggaaggtttaatctctcctacactgtttaacatttcatctcttgagaatttaaatctcggctataacaagctttcaggttctctacctccagatattggatttacacttccaaatattgtagcatttagtgtatgctataacaaatttgagggtccagttccatcctccctgtccaatatttctgtgctccaacagctcatcctccacgggaacagatttcatggccgaattccacctaatattggtgtccacggcagcttaactaatcttgaattaggcaacaatcagcttcaagtcgtggatactaaagattgggattttctaacccctttggtcaattgcagtcatctgaaatatcttaatcttgagctaaataacatttctggcattttgccaaatgctgtttctaatctctcctatgagctggaagcgttactgatgggtggaaaccaaataaccgggaccgtaccttcggggataggtaggcttcaaaagctccaaatactagatctgtcagataacctgtttacaggcgccgtaccttcgagtataggtaaactctccagcctagacagccttgtgctattcagtaataaatttgacggggagatcccttcatcacttggaaatcttacaaaactaaccgagctagttttacattccaatgacctgcatgggagcatgcctccaagccttggtaatatgacaatcttagaatccatcgatctttcatataaccgcctcagtggccaaattccccaagagatcttaagcatgtattcccttacaaaatttctaaatctctccaacaattttttcagcggacccatttcccaacagatcaggctcttgatcagtcttggtacaatggatctctcaagcaataatttatctggtgagactccacatactcttggtagctgtgttacactgcagttcctgtatttgcaaggaaacctcctacaaggtcaaataccagtggaactgaatgcactaagaggcttagaaatctccatccttatttgtgcactgactggcaatccaaatttagggagtttgatgcacttccctgatgtaattcaacaatttgagaggacatgtcgaaatgcttcggagtcaatcagatctgctgcaactggaaagcttcgtgtggtggaagagaaacttatgcagcaaaatgctcaacttttactggacgaagctgcttcctggtcactttggcacatatatggcaaagaacatgaggagctttctggagagctgttggtgccgccaattacatctcatcaggaggcttgccgctttgttgcagcagacattacagcacaactgtgtctgcggatcatactttggcttgaaggtcttgcttctgaagctcttgatttggagaagaaggtgagaggacctcatgttggttcgtacctaccaagttctggtgtttggcaccgtacacagaggtacctaaaaaggaacaatgctgattctactatagtgaagcatgtggattttgatgctccaactcgtgaaggggcccaacttcttcctgatgacaagacgtgctcaccattgccgacgcattgggctgctgcgctttgtccttgcattgggagcggcgcactgcacagatggatgttcctgccgaacattgtgactggaaacgacgccatcaccgctggaatcctcctggacatcaagccggtacaggcggtgcaacacccccagcgatggtggaattgggtcagacagctcgttccccatgaggaacagcaacctcagccccgtgagtggcgaaagaagcaagatgaattgcttctagaagatatatggactcttttaagagcaggaagattagaagaggcatctgacttgtgccgttctgctggccaggcatggagagttgccactctttgtccttttggcggcataaatatgttcccttccctgaatgcattgcacaaaaatggaaagtacagaacactacaagccatggaattagaaagtggtgttgggcggcagtggcgtctttggaaatgggcatcatattgtgcttcagagaaaatcgctgagcaagatggaggccgttatgagatggctgtatatgctttacaatgcagtaacttaaagcgtgtcttgccaatctgtactgactgggagtcagcttgttgggcaatggcaagatcctggctagatgttcaagtggatctagaattatctcagtaccaaacaagtagaccagaaaagcaacttgatgacgacatgaatggagcccaaagttcagttggtccagaaagttggccataccatgttcttgatcagcaacctcatgatttaactgctcttctgcagaaactccactcaagtgaccttgttcatgaaactgtctctcgagcatgccgagagcagcatcgacaaattcagatgaatctcatgagtggaaatatatctcatcttcttgaccttctatggtcatggttatcacctgctgaagagaaccataataatactgcaaggccccttgatgaccctgagatgatacggttcggggcgcatattgttcttgtgctgaggcaccttttcagtgatgggatggatgatgagttagatgaaaaactggttactgtcggtgatctcatcatcaacatgtacgtgaggtatttgttctcagaggatcaagaggagttggttggaatatatgcctcacagcttcaacatgacctttgcattactttgtttgtagaaatgatggaactaaggttaaatagcagtttgcatactatgtacaagctcttcctttctgctgtggagtatctgccattctcatctgataatgtatccaaggcttgttttgaagagatcatcgagagggtgctttcaagatctcggcaaacaaaacccactaagtatgatggggatttctctgatgttgcgcatcaacatcacctgcaatcacttcaaaaggctatggttattcagtggctttgcttcacaccaccatcctcgattccagactttcaaatgatcagttggaagcttctgatacgggcattgacacatagcaatacactgttcagggagttttctctgatatcaatgaggagagtccctgagctaccagcagggccacacaagttgcttgccattttagctgaaccgttaaagcaaaaagaaaatttaatttcacgggaagatccggagcatgaatattactcccttgacgcgacttaccgcagttggcttaaaattgagatgatgaatgccgctgtttctcctgagatgctttcggcagaggaaaagggtcaagctgttgctgcagctaaagaaacactgaacttggcatgttcgttactacgcaatgcaacatcatgcacagctttgacaagtgcactatattcaactgtcagtgaagatgatgtgctgcatcgcctgttgaaggtggatgtccaggtctcttctagagacccctgctgtattgaagttgctcttcgctgcttagcagcagaaggtgatggatatgggcttcatgaagccaacgatggaggtcttcttgctgcagtcatggctgctggctttaaaggtgaactcagtcggttccaacctggagtttcgatggcaatttcacggcttgatgcttggtattctgaccggagtggttccgtggagagcaccgctgcttacataattcgagggctgtgtcggaggtgctgccttcctgaaacaattctaagatctatgcaggcatgtatcgcactctccgcggctggtgatgatctagattactctctagataaatgtgacgaacttgttgagttagttggttcagccgagtctggaatgatgcatttgttcagccagcagcagttgcaggagttcctgattttcgagagggaatatctcatatgtacaatggagtttgaggaggaccggttgccttgtgatggctaa

SEQ ID NO: 117783 - DNA, 167 bp, Zea Mays
atctgccgtccctggacacgctgcacctgacaattgtcaccggtagcctcgtcgacttgatactcgaatctaaccgcgctctccgtccacggaaacatttgaacgctattatgtggatctaaccgcgctgttcaatggacatatcatctgatgaatttgataatctt

SEQ ID NO: 117784 - DNA, 3182 bp, Zea Mays
gctgcgaaggcgcacacaagccaagttctactcaacatcgttccctaatcatggtagtaagcacactctgcagcagcttgccacttctacccaacatcatcgtcctcctcttgttcacaaccatttccgactccacgaacagcaacagcgatctcaatgcactcttgtcattcaaatccctcataacaaaggacccaatgggtgcactgtcatcttgggatggggacgcttctaacaggagcgctcctcatttctgccggtggaacggcgtgacgtgcagcagccaccagcacggcagccatgtcactgccttgcgcctgcgagccttcggtctggaaggcaacatctcccagtcgcttgggaatcttagccacctccaaaccctggatctgtcgaacaacaacctagaaggcgagataccttccagtatcggtaacttgtttgctctccattttctcaacctaagtgttaaccacctgtccgggaacgttcctcagtccatcggccgtctttccgaactcgaaattctgaatttccgcgacaatgacatcgtaggaagcattccttcttcagtgctcaaccttacaggactcacaatgcttagtgccaccgaaaattacatgacagggaggattccagattggttgggaaacttgacggatctgacagatttgaacttggcatggaataacttcagtggacagatcccacaagctttaggtaagctacctaaccttgctagattgactatgcaaggtaatcaattggaaggtttaatctctcctacactgtttaacatttcatcccttgagaatttaaatctcggctataacaagctttcaggttctctacctccaaatattggatttacacttccaaatattgtagcatttagtgtatgctataacaaatttgagggtccagttccatcctccctgtccaatatttctgtgctccaacagctcatcctccacgggaacagatttcatggccgaattccacctaatattggtgtccacggcagcttaactaatcttgaattaggcaacaatcagcttcaagtcgtggatactaaagattgggattttctaacccctttggtgaattgcagtcatcttaaatatcttaatcttgagctaaataacatttctggcattttgccaaatgctgtttctaatctctcctatgagctggaagcgttactgatgggtggaaaccaaataaccgggaccgtaccttcagggataggtaggcttcaaaagctccaaatacttgatctgtcagataacctgttttcaggcgccgtaccttcgagtataggtaaactctccagcctagacagccttgtgctattcagtaataaatttgacggggagatcccttcatcacttggaaatcttacaaaactaaccgagctagttttacattccaatgacctgcatgggagcatgcctccaagccttggtaatatgacaatcttagaatccatcgacctttcatataaccgcctcagtggccaaattccccaagagatcttaagcatgtattcccttacaaaatttctaaatctctccaacaattttttcagcggacccatttcccaacagatcaggctcttgatcagtcttggtacaatggatctctcaagcaataatttatctggtgagattccacatacccttggtagctgtgttacactgcagttcctgtatttgcaaggaaacctcctacaaggtcaaataccagtggaactgaatgcactaagaggcttagaagttttggatatctcaagcaacaacctgtcaggacccattcctgattttcttggtgacttccaagttctcaagaagctgaacctatcattcaataacctatctggtccggtgcttgatcgaggtatcttccacaataatgccacctctgtttcactttctggtaatgccatgctttgtggagggcctggtttctttcaacttccaccatgctcaactcaagcaacctatggccgttccaatcatcaacgaatgcatgtcttggccttttcctttactggagctttagtagtctttgtgtgcatcactgtatgctacttcatgaaaagggcatctgacaaagcaagtgatgctgagcatgggttagttacgcttcctagaaacaaatacaagaggatatcatatgctgagttatatgaagctacagattcattttccgattcaaatctggttggtcgtggaagatttggtactgtatataaaggaattctacatgatgacagtaatacagaaactgtagcagtaaaggtactcgatcttaagcaacaaggagctagtaggaccttctttactgagtgtgatgccctcaaaagaattaaacatcgtaaactggtcaaggttataactgtgtgcgacagcttggataacaacggtgatgaattcaaggcgcttgtgctggaattcattcccaatggaaccttggatgaatggttgcacccaagtgcacttgtcaccaacagagcaactgggagtctaagcatcattcagaggttaaacatcgctcttgatgtggcagaagcattggcatatcttcatcaccacagcaatccatcaattgtccactgcgatattaaaccaagcaacattctacttgatgaaaatatgactgcacatgttggtgactttggtttagcaagaattctaaacatggatgcatgtgaacataattctggtggaagtagctcggctggaattcgaggcacaattgggtaccttgcaccagagcatgccatgggactcagagttggtgtagaggccgaggtatacagctatggagtgctgctgatggagatacttactaaactaagaccaacagatcatatgtcttttgatggggccacaagccttgtaaagcatgtcgagatggcatacccttacaggctgctggaaatactggatgatataatgctacaaggaagcacaagtcacagcacacaagagacgatggatatggtcatcattcctgtcgtgagaataggactagcttgttgcaggactgctgcaagccagcgaattaggatggacgaggtggtgaaagaactcaatgacattaagaagacatgggaagaccatttcgcagaaatcaccggggcaaccggcagagcggcggatggacgagcaatccattga

SEQ ID NO: 117785 - DNA, 2210 bp, Zea Mays
atccgatccgtagtggtatggtagcctacctgctgagcaaaccgaacggtagttggaaagccagcatgaaggtctgggtgggactccctgctgctgcagctgtcgtcgtcgtcttcctcatcttcgccggcgtggcggctctaccagcggccatggcagccgtcgtcgagcacaccttcgttgtgagccaagtaaatctgacgcgcttgtgcaaggagacgctggtcaccgtggtgaacgggcagctcccggggccggcgatcgaggtcacggagggagactcggtggtcgtccatgtcgtcaacaggtcgccgtacaacatgacgatccactggcatggagtgaagcagcggctcaactgctgggccgacggcgtgccgatggtcacccagtgccccatcttgccaggccgcagcttcacctaccggttcaacgtcgccggacaggaaggcaccttgtggtggcacgcccacgtcccctgcctgcgcgcaaccctgcacggggctctcatcatcaggcccagacactcgccgtatccctttgctccaaagcctgacagggagatccccgtcgtcataggtgaatggtgggatatggaccttgcgcagttggacaggaacacgatggacggtttccttgtcgacgtcccaaccggaagcacgatcaacggcaagcttggagacctctacagctgctccggcgccgcgcaagacgggttcgtgctggaggtggagcccggcaagacgtacctgctgcggctgatgaacgccgccctcttctccgagtactacctcaaggtcgccggccacaggatgacggtggtcgcctccgacgccaactacgtcaggccctacaccacggacgtcgtcgccatcgcgcccggcgagaccatggacgtcctgctgccggccgacgcgcctccgggcaggtcctactacatggccgcgctggccatacaggcgcccgagcccgacgtgcaggtcccgccgaccatcacgcgcgggatagtccagtaccgcagcagcagcagcgacgtcgccgtcgatggtgtcgtcgtccctgcagcagatcccgcagtcgtcatgcccgacatgcctgaccagcacgacacgaccatcagcttccacttccacggcaacctctcgagcctgcgccgccgccaccgggtgccgccggcgcgcgccgacgaccacatgctcgtcacgctcagcctgggctccgtgtgccgcgacggcgggcgggcgtgcgccaggagcgacagcgacgagtccatcatcgtgggcaccatgaacgacgtctcgttccgggcgcccacggccgcggcgatgccgctgctggaggcgcactactacggccgcggcgacatggcgatggcggccgccgccggcgtggagctccgcgcgctcccggacgcgccgctgcgcgtgttcaacttcaccgacccggcctacatcccgtacgggcccaaggaggccccgctggagccgacggagaagcagaccacggtgcggcggttccgccacggcgccgtcgtggaggtggtgttccaggacacggccgtcatgcagagcgactccaaccccatgcacctgcacggccacgacatgttcgtgctcgcgcacgggctcggcaactacgacgccgcgagggacgtggccacctacaacctgctggatccgccgctcaagaacaccgtcgtcgtccccaggctcggctgggtcgccgttcgatttgtcgccgataatccaggaacatggtacatccattgccacttcgatttccatttgtccatgggcatggtagccgttttcatcgtagaggacggatcatcggcggacacctaccttcctccacctcccgcagatttaccaaaatgtggatctaacaaaggaggcctttatttgccagaggaattctacctccaaaaatgaagagagtcacaagagacagtgccaagagcaagcgaaggaacctatgagaggacatgttggttaatagcactagtagtatacaaagtatatttagaaatgattaggtttttatgaggcgtggttttcataatcgcccctacctatgctagtaccctcctcccgaaggtcctctacagtgaatcacatatcactccctgaatcagtatatccatgtcccaccgtgtaatgtgttgtataagccatgtatgacatcttttcaaagttaacatcatcctcata

SEQ ID NO: 117786 - DNA, 2286 bp, Zea Mays
atccgatccgtagtggtatggtagcctacctgctgagcaaaccgaacggtagttggaaagccagcatgaaggtctgggtgggactccctgctgctgcagctgtcgtcgtcgtcttcctcatcttcgccggcgtggcggctctaccagcggccatggcagccgtcgtcgagcacaccttcgttgtgagccaagtaaatctgacgcgcttgtgcaaggagacgctggtcaccgtggtgaacgggcagctcccggggccggcgatcgaggtcacggagggagactcggtggtcgtccatgtcgtcaacaggtcgccgtacaacatgacgatccactggcatggagtgaagcagcggctcaactgctgggccgacggcgtgccgatggtcacccagtgccccatcttgccaggccgcagcttcacctaccggttcaacgtcgccggacaggaaggcaccttgtggtggcacgcccacgtcccctgcctgcgcgcaaccctgcacggggctctcatcatcaggcccagacactcgccgtatccctttgctccaaagcctgacagggagatccccgtcgtcataggtaggtagaagcatttcgtcagttgatttatatcttttcttttctgatgagctactgtgccacaacatcacaccaggtgaatggtgggatatggaccttgcgcagttggacaggaacacgatggacggtttccttgtcgacgtcccaaccggaagcacgatcaacggcaagcttggagacctctacagctgctccggcgccgcgcaagacgggttcgtgctggaggtggagcccggcaagacgtacctgctgcggctgatgaacgccgccctcttctccgagtactacctcaaggtcgccggccacaggatgacggtggtcgcctccgacgccaactacgtcaggccctacaccacggacgtcgtcgccatcgcgcccggcgagaccatggacgtcctgctgccggccgacgcgcctccgggcaggtcctactacatggccgcgctggccatacaggcgcccgagcccgacgtgcaggtcccgccgaccatcacgcgcgggatagtccagtaccgcagcagcagcagcgacgtcgccgtcgatggtgtcgtcgtccctgcagcagatcccgcagtcgtcatgcccgacatgcctgaccagcacgacacgaccatcagcttccacttccacggcaacctctcgagcctgcgccgccgccaccgggtgccgccggcgcgcgccgacgaccacatgctcgtcacgctcagcctgggctccgtgtgccgcgacggcgggcgggcgtgcgccaggagcgacagcgacgagtccatcatcgtgggcaccatgaacgacgtctcgttccgggcgcccacggccgcggcgatgccgctgctggaggcgcactactacggccgcggcgacatggcgatggcggccgccgccggcgtggagctccgcgcgctcccggacgcgccgctgcgcgtgttcaacttcaccgacccggcctacatcccgtacgggcccaaggaggccccgctggagccgacggagaagcagaccacggtgcggcggttccgccacggcgccgtcgtggaggtggtgttccaggacacggccgtcatgcagagcgactccaaccccatgcacctgcacggccacgacatgttcgtgctcgcgcacgggctcggcaactacgacgccgcgagggacgtggccacctacaacctgctggatccgccgctcaagaacaccgtcgtcgtccccaggctcggctgggtcgccgttcgatttgtcgccgataatccaggaacatggtacatccattgccacttcgatttccatttgtccatgggcatggtagccgttttcatcgtagaggacggatcatcggcggacacctaccttcctccacctcccgcagatttaccaaaatgtggatctaacaaaggaggcctttatttgccagaggaattctacctccaaaaatgaagagagtcacaagagacagtgccaagagcaagcgaaggaacctatgagaggacatgttggttaatagcactagtagtatacaaagtatatttagaaatgattaggtttttatgaggcgtggttttcataatcgcccctacctatgctagtaccctcctcccgaaggtcctctacagtgaatcacatatcactccctgaatcagtatatccatgtcccaccgtgtaatgtgttgtataagccatgtatgacatcttttcaaagttaacatcatcctcata

SEQ ID NO: 117787 - DNA, 792 bp, Zea Mays
caagcaatcgtaataagagtaagatctgcacatttgtttactgttgagatgcttaaggttggtgtggtactgtggtgtatattattattcctaagatatatggggttctacttccactgctgttgacccgatctggatccggtgcgcaatccgtccgatccattcagcatggccggcgggggcagctccggcgagtggagcgcgtggaaggcggccagcatcgtgttccgcatcgcgacggtggccctgtcgctggcttcagcgatcatgacagcgacctcgacgcagtgcttgtaccgggaggatggcagccccgacggcaccatctcctacagcgactacggctccttgaagtactcggcgttcgccaacctgccgacggcggtgctccagggcgtggccatctacctggaggtgacagggcacgagaaagcggccaagaccgtggagctcatcgacaagctagtgctggccctcacgtccacgtcggcgccgctgctgttcgccgtcgacgacatcacgtcctgtggcgggccacctcgcgccggcggccgggcccgagggcagccgtccaaaggattcacgaagaagatccagacggcgtcgttcgctagcctcggcacgctggcctcggccgccggcgctgcgtacaccgcgcgagtcgagaggatcgtcgcggcagcgcccacgctgccaacaccgacactgccgtctccggacttagatgtcaacattttatataaaaataatattatggctggtttgcccgagtggttaagggggaagacttaa

SEQ ID NO: 117788 - DNA, 2644 bp, Zea Mays
cacctctcggccacctgccccccaagccctgaccgacgccaagatgccggccacggcgagcggcggcgcgcggccggaggaggaggaggaggaggtgtctcccgcgccatcgccgtcgacttccgcgtcggcctgcatggggacaagggcggaggagctgacggcgaggctggcggccacggggccccgcccgggcgcgggccgcggcgccgccgccgctggcggagaggaggtggagcacgagcgtgtccgcgcgctgcgcgagatcaagaaccagatcatcgggaaccgcaccaagaagctcctgtacctccgcctgggcgccgtgccgtcggtcgtggcggcgctggcggagcccggagcctcgccggcggcgctcgtgcaggcggcggccgcggcggggagcttcgcgtgcggcgtggacgatggcgcgcgcgccgtgctggccgccggcgctgtcggccacctcactcgcctcctcgctcaccccgacgagaaggttgtggatgcaagcgcacgtgctcttagaatgatatatcaatcaagattagctccaaagtttgatgttaatagtggggaaaacgtggattttgttctttcccttttggacagtgagaacgagaatgtcacagagctggctgctgctattgtatctcactcttgtgagagtagtgcagaacaattgtcgctatgcagtgctggagttccacagaaacttgttagtctttttggatgttctatgaatctacgagatgcttgtttaggttctatcattgcagttattcaaaataaccaagatgttgcttcaagatttgcatcaacggaccatggaaaaggttttcgttcagtagttgggttaatacatgatcggagtccacgcacaagattacttgcttgcctctgcttgattgcacttgggcatgcttctcctgatcattttcaggacaatcagattaagaccaagttgattatggttttacttgagctaattgaagaacctggtcatgtaggagatgaagctcccttggcattaaccaccctgattaaagacagcttcgaactgcagagacaagctcttacaacgaacgcagttgagaagctcagcagccatctactagcaaatccattggggacaaggcgagcagtgaccatattacttgcgctatctgaactttgctcaaaacttgaagagtcaagatctcaactgatgtcggttgaggtatcaaccttactccttgaggcattgaaacatgattgggctgatatccgtgttgcagcatgttcatgtctgaagaatatctccaggtcaccaaagatactcagtggaggtcgattatcctgcgatacagttatcggtcccctggtccagcttttaaatgactcatctacttcagtccaggttgctgcccttggtgccatttgcaatattgccattaatttgacacccaggaaatcagttcttcttcactccggggttgtctcacaacttgttcatttgtcaaagtccatggatccaatgttgaggctaaaatctgtatgtgctctcaggaatattatgttccttcttagtcctaaggataaagacttcattgttaaggagttgaccttatctactctttcaagcctcatatgtgattctgaacattttgttcaagaacaaacattggcacttgtgcacaatcttgttgatggatatgtggtctctgctaattatgtcattggtgaagatggaatggttatggatgctattgcaagacaactgaacaatgcatctgctccgggagtatgcattcagggtatgtatgtgcttgcaaacattgctgcgggaaacgagtggaacaaggaagctgtgatgaatgttcttctgcctcacagagcagatcgcatcaaaccgtcgtttgcagtgaactttctgaaaagcaaggatagacagttgcgagttgccacactgtggtgcgttctaaacttgatatacccaaaatgtgaagcctcatctggtagagccgtcagactacaaagtgctggagtgatcctacaagtgaaaagaatgataaatgacccctgcttggattgcaagcttagagttcgtatggtgcttgaccactgcttggacaacgctgatgattgtttcatgtgaacaacctgtatttcaccgtggcaacccaagtttacggaactatattcagatcaggaaagaggaaaccagtgtgcttcagatccaaatatatgccactgaacagtggacatgagcacctgcagaaagcttttgctgatctctgcgggtcttcaagaaccagctgccttttttgcaccatgagaacctgacaaccggcatctgttgtgcatattgtccattaccttgttgtgaccgaagttgtctagtgaacttgggctgcctgctcgcagtctgaaaggctttaggcgctatggatccagaaatcccatttttcccagtgcctgccgaacctggtgcatgcttttgaagttgagtctgtaaatgagtgactgctgtaactgttgtacaaaatttgtatttctgttccaataaggccgtatttaacatgcacctatgggttagatgttgtccatggattcccatgttctatgaaaataaagaagatgcaagtttctatgcatgttttgc

SEQ ID NO: 117789 - DNA, 900 bp, Zea Mays
accaccggctgccatctctaaatatatagccacgatatgacaaggttctattgccatccgccccgctttgcgtctgctcgccatcctccttccacccctcgcctcatcgtcgctcacagcttcttctagaagatgtcgtcccgagagctggagggggcgcagttggatgtacccgaggtgcgccctaggctcgtctgggggcgccgcgctcgtgcgaacggaggacgccgccgcccgcgcggcaggcacggattctataaatataaggcgacgttctcccgcggctcgtatcccctcccgacgaagccccgcctcgtaggaccgaagctagaagagtttcatgtgattccagtcaatacattcccaccaacggggaatgctgttgtagatgaaaagcgctacaggatctctcaggtgtatggtctaattgcaagaattcgtatgctcatatgtgctcgttcggatatggggatgacatttgggatctatcttgcggacacacgtcggtattggaaaagacacgatcatcttctggaatttgctgaagccttgcgcaagaagctgttaggtgagcaccaagtcgaagccccacctgttccagtccatttctatcacaagttctgattgatggagtacatctgttcatagctactacgtaccctgctaaaaaggtttttgcgaacagtagttgtatgcagaaaggttcttgctactctgcttaatccaaactatggcccctgttgtacggaatccaataaaatgtggtgaaatcgtgggattcctcctaatgcaaatgcgatcgtcaacagctagtattcggtttttgtttggtttgttaactgatattgtgaacagtattcggtggttgactgttcatctgagaaatgagatcgttaacaa

SEQ ID NO: 117790 - DNA, 614 bp, Zea Mays
ctttgcgtctgctcgccatcctccttccacccctcgcctcatcgtcgctcacagcttcttctagaagatgtcgtcccgagagctggagggggcgcagttggatgtacccgaggtgcgccctaggctcgtctgggggcgccgcgctcgtgcgaacggaggacgccgccgcccgcgcggcaggcacggattctataaatataaggcgacgttctcccgcggctcgtatcccctcccgacgaagccccgcctcgtaggaccgaagctagaagagtttcatgtgattccagtcaatacattcccaccaacggggaatgctgttgtagatgaaaagcgctacaggatctctcaggtgtatggtctaattgcaagaattcgtatgctcatatgtgctcgttcggatatggggatgacatttgggatctatcttgcggacacacgtcggtattggaaaagacacgatcatcttctggaatttgctgaagccttgcgcaagaagctgttagctactacgtaccctgctaaaaaggtttttgcgaacagtagttgtatgcagaaaggttcttgctactctgcttaatccaaactatggcccctgttgtacggaatccaataaa

SEQ ID NO: 117791 - DNA, 480 bp, Zea Mays
atggcttctcctggcttcacgcacggtgagtctgttgcgacttgcgagagcaccggatgtcaagacaagagaactctgtcggggcacctttgcaaatatggctacatgcctgactatgaagtctgggtgtatcacggcgaggactttccctgtgaaaattcgccggaagccaacaacactgacgacgatgaacctgaagatgaggaagagacagaggagtggagacaagtggaagatgttgaggatgtccaggggagagaggtggagacagggtggggtgaatggcccaatgatggagggtcaggagttgggggagctagtgggtcaagggaaggggaagctggtgtttcaggaggaggttctggaagcgagggagttggagggtcttcacgggtccggaagccgcggaagactagttgggtcccccctcctaaagaaccagttaacaaggttgagataatcccgagtggagatgggtaa

SEQ ID NO: 117792 - DNA, 1661 bp, Zea Mays
ccgccaccccgacctccctgcaataataattacggagtataataataataataaaaaactccgaatccgccgcgcgcgccccgtcctcgtcgccggcggaggcgcccgccaccgcccacagcagcctatcgccggagaaggaacgccgcggggagcttttccactgccatctcccgtctgacccctccgagatcggaagcggcggccatggcgatcccgctcgtgctcgtcgtgctcccgctcggcctcctcttcctcctgtccggcctcatcgtcaacaccatccaggccatcctatttgtgacaataaggcccttttccaagagcttgtatcgccggatcaacaggttcttggccgagctgctgtggctccagcttgtctgggtggtggactggtgggcaggcgttaaggtacaactacatgcggatgaggaaacttaccgatcaatgggtaaagagcatgcactcgtcatatcaaatcatcgaagtgatattgattggcttattggatggatattggcccagcgctcagggtgccttggaagtacgctcgctgtcatgaagaagtcatccaagttccttccagtcattggctggtcaatgtggtttgcagagtacctctttttggagaggagctgggccaaggatgaaaagacactaaagtggggtctccaaaggttgaaagacttccctagaccattttggctagctctttttgttgagggtactcgctttactccagcaaagcttctcgcagctcaggagtatgcggcttcccagggcttaccagctcctagaaatgtacttattccacgtaccaagggatttgtatctgccgtaagtattatgcgagattttgttccagccatttacgatacaactgtaatagttcctaaagattcccctcaaccaacaatgctgcggattttgaaagggcaatcatcagtgatacatgtccgcatgaaacgtcatgcaatgagtgagatgccaaaatcagatgatgacgtttcaaaatggtgtaaagacatttttgtggcaaaggatgccttactggacaaacatttggcaacaggcactttcgatgaggagattagacctatcggccgcccagtgaaatcattgctggtgaccctgttttggtcgtgcctcctgttgtttggtgccatcgagttcttcaagtggacgcagctcctatcgacatggagaggagtggcattcactgccgcagggatggcgctcgtgacagggctcatgcacgtcttcatcatgttctcccaggctgagcggtcgagctcagccaaggcggcacggaaccgggtcaagaaggaatgaaaacggagggtggaaatgtgattctgggctctatttatgggcagctttcaaaatgactcgattcatattaatgtatacagcaccaaattccagacagaaacaggatgctctgctcctcttgtatttgtgtgcaggaaagaattttagggagttcatttttgcccccctcttttgggcagaggaactgtaggacatgaacttgatgttggtacatttgccctgtagacattctggaagcctttcagtagttcatttatcagtaaagcttgcatctttcatccatgtagttgtgcaccttgtctgtcactcatcacaatgttgttgtgttc

SEQ ID NO: 117793 - DNA, 1391 bp, Zea Mays
gcgcgtggaggaggggagcggttgcatcgagtggacgtaccaagggagaaacttccgttttatattagtagagatgtttatgaagcaagcattgattttttccttcctgatcccagaataacttcagcttatgctctgcaggtacaactacatgcggatgaggaaacttaccgatcaatgggtaaagagcatgcactcgtcatatcaaatcatcgaagtgatattgattggcttattggatggatattggcccagcgctcagggtgccttggaagtacgctcgctgtcatgaagaagtcatccaagttccttccagtcattggctggtcaatgtggtttgcagagtacctctttttggagaggagctgggccaaggatgaaaagacactaaagtggggtctccaaaggttgaaagacttccctagaccattttggctagctctttttgttgagggtactcgctttactccagcaaagcttctcgcagctcaggagtatgcggcttcccagggcttaccagctcctagaaatgtacttattccacgtaccaagggatttgtatctgccgtaagtattatgcgagattttgttccagccatttacgatacaactgtaatagttcctaaagattcccctcaaccaacaatgctgcggattttgaaagggcaatcatcagtgatacatgtccgcatgaaacgtcatgcaatgagtgagatgccaaaatcagatgatgacgtttcaaaatggtgtaaagacatttttgtggcaaaggatgccttactggacaaacatttggcaacaggcactttcgatgaggagattagacctatcggccgcccagtgaaatcattgctggtgaccctgttttggtcgtgcctcctgttgtttggtgccatcgagttcttcaagtggacgcagctcctatcgacatggagaggagtggcattcactgccgcagggatggcgctcgtgacagggctcatgcacgtcttcatcatgttctcccaggctgagcggtcgagctcagccaaggcggcacggaaccgggtcaagaaggaatgaaaacggagggtggaaatgtgattctgggctctatttatgggcagctttcaaaatgactcgattcatattaatgtatacagcaccaaattccagacagaaacaggatgctctgctcctcttgtatttgtgtgcaggaaagaattttagggagttcatttttgcccccctcttttgggcagaggaactgtaggacatgaacttgatgttggtacatttgccctgtagacattctggaagcctttcagtagttcatttatcagtaaagcttgcatctttcatccatgtagttgtgcaccttgtctgtcactcatcacaatgttgttgtgttc

SEQ ID NO: 117794 - DNA, 628 bp, Zea Mays
cccgaattcgggcacggaacacatccatccctcgctctctctcgcgcgcgcgctcgtgctccttcgtgctgctcgccccgcccccgccgccctgccctccccaccgtcgtcaccggcgtggggggaacgacatgactacttccaggcgccttgcggacaggaagacagccaagttccagaagaacatcacgaggcggggttccgtgccggaaaccgccgtcaagaaggggaaggggaacggctacgctgccggccccgtagtgctcggcttcttcgtcttcgtcgtcattgggtcatcgttgttccagatcatcaggaccgcgaccagtggcggcatggcttgagaacccgtccccggtgcagagcagagagatctgtttgtcgtttgtacatgcatgcgtccagctagaatcgagtttaatttcgaactgaaccgtaatgcagaaccatgtatgtaaataaagtgctattaaatgggtaactggatatagtgctatatatatacagtgttggaatacaaatacctttttttccccttacgcgcggcctgtacgtgtgccagttttgctcgactgtgtttggcttgtgatgacgacgacggctgaagtttcatatgggatttgagtcg

SEQ ID NO: 117795 - DNA, 1629 bp, Zea Mays
cgagttatagaaagttgcatttgtgtgcatcccacgccagccaaacactgccgacgagcaaagaaagcaaatataataaagtcatggcggacgagacagagacagcggcgccgctgctccgctcagctcccctcgtcgccgacgcgccacgccggaacaggttcgccttcgtctgcgccacgctcgcctccatgaccaccatcctgatgggttacaatctcgcgctgatgagcggcgcgcagctgttcatccggcaggacctgggcctctccgacgtgcaggtcgaggtgctcacggggtccatgaacctgttcatgctcgtgtccatcctcggcgccggatgggcggccgaccttctgggccgccgtggcacgctcgtgctcgccaatgcattcctcatggccggagcgctcgccatgtcggctggcggcagctacgccgcgctcgtggccgcgcgcttcgtcaccagcgtcggggtcgggttcgcccgcgtcgtcgcgccggtgtacaacgccgagatctcgccggcgtccacgcgcggcgtcctgtcgtctttgctagatatgtttatcaacgtcggcatcttgcttagctacgtgtcgaactacgcgttcgccggcctgccagtgcacaccggctggcgcgtcatgttcgccgtcggcgcgctgccaccggtgttcctggccgcgggggtacttgccatgccagagtcgccgcggtggctggtgatgcgcgggcgctacggggaagcgcgcgccgtgctcttgcgcaccaccccagctgaggccgacctccgactccaggagatcaaggaagccgtcgaggcgccgcgggcacctgctgacagcggcggcggcggcggcgttggcgtgtggaaggagatgctgtggcggccgacgaaaacggtgcgccggatcctcgtctgcgcgatcggcgtgctgttcttccagcaagcctccggcatcgacgccatcgtgctgtacagcccgctggtgttccagaagtccggcatgtcgtcgaacagcgccatcctcggggcaaccgtcgccgtgggagtggtgaagacatgcttcatcctcgtggcgacgctcctgtccgactgcgtcggccggcgccccctcctcctcgccagcgccgccggctctgcggcgacgctggcctctgtggccctgacgctctgcgtcggcagcacgtccacggtaagcactgcggcgtgcgtcgcgtcggtgctggccttcgtggccgcgttctcggttgggttcgggccgctggcgccgacgtacagctcggagatcattccgctgcggctgcgcgcgcagggcaccggccttggcacggcagtgaaccggctgacgtgtgcattggtgaccatgactttcatctcgctcgccgactggctcaccatgccggggtgcttcttcctgtatgctggtgtggcagcagccgcgttcgtgttcgtgtacttggagctgccagagactagtgggcggagcttggaggatatgcacgagctcttcgccgccaagtgatcatagtccccctctctctctctctctgcctaaattggacagtgaactgaactgaggtcttgtgtttattaattgatttgaggtatgattattcaacttc

SEQ ID NO: 117796 - DNA, 1567 bp, Zea Mays
agccaaacactgccgacgagcaaagaaagcaaatataataaagtcatggcggacgagacagagacagcggcgccgctgctccgctcagctcccctcgtcgccgacgcgccacgccggaacaggttcgccttcgtctgcgccacgctcgcctccatgaccaccatcctgatgggttacaatctcgcgctgatgagcggcgcgcagctgttcatccggcaggacctgggcctctccgacgtgcaggtcgaggtgctcacggggtccatgaacctgttcatgctcgtgtccatcctcggcgccggatgggcggccgaccttctgggccgccgtggcacgctcgtgctcgccaatgcattcctcatggccggagcgctcgccatgtcggctggcggcagctacgccgcgctcgtggccgcgcgcttcgtcaccagcgtcggggtcgggttcgcccgcgtcgtcgcgccggtgtacaacgccgagatctcgccggcgtccacgcgcggcgtcctgtcgtctttgctagatctgcctttatttgtggccgatgcacgtccgtatgccggccatcttgcagatgtttatcaacgtcggcatcttgcttagctacgtgtcgaactacgcgttcgccggcctgccagtgcacaccggctggcgcgtcatgttcgccgtcggcgcgctgccaccggtgttcctggccgcgggggtacttgccatgccagagtcgccgcggtggctggtgatgcgcgggcgctacggggaagcgcgcgccgtgctcttgcgcaccaccccagctgaggccgacctccgactccaggagatcaaggaagccgtcgaggcgccgcgggcacctgctgacagcggcggcggcggcggcgttggcgtgtggaaggagatgctgtggcggccgacgaaaacggtgcgccggatcctcgtctgcgcgatcggcgtgctgttcttccagcaagcctccggcatcgacgccatcgtgctgtacagcccgctggtgttccagaagtccggcatgtcgtcgaacagcgccatcctcggggcaaccgtcgccgtgggagtggtgaagacatgcttcatcctcgtggcgacgctcctgtccgactgcgtcggccggcgccccctcctcctcgccagcgccgccggctctgcggcgacgctggcctctgtggccctgacgctctgcgtcggcagcacgtccacggtaagcactgcggcgtgcgtcgcgtcggtgctggccttcgtggccgcgttctcggttgggttcgggccgctggcgccgacgtacagctcggagatcattccgctgcggctgcgcgcgcagggcaccggccttggcacggcagtgaaccggctgacgtgtgcattggtgaccatgactttcatctcgctcgccgactggctcaccatgccggggtgcttcttcctgtatgctggtgtggcagcagccgcgttcgtgttcgtgtacttggagctgccagagactagtgggcggagcttggaggatatgcacgagctcttcgccgccaagtgatcatagtccccctctctctctctctct

SEQ ID NO: 117797 - DNA, 2466 bp, Zea Mays
atggcgggcagcgagtcgtcaatggagtaccagctgaagaagtacctactgctgctggccacgctggttgcgacggtgacctacgcggcgggactgaacccgccggggggctcgtggctggaggacgacagagcggcgggagagctggccggcgactccatcctccgggacactaactacgtgcgctacatcatcttctactgcttcaacgccgtctccttcgccgcgtcgctcgtggtcagcctgctcctcctgctgctgcacagggacgccgcggcgagcctgctcaagctcacgcgggcggtgatggtcgtcgacctgctcgccctcatgggcgcctacgccgccggcaccagccacgaccggttcaccaccgtctgcgcctccgtcctcgtcatcgccaccgccgtctacgtgatcgtcgccgtcccgaggttcagcatcagcaccagcgccagcgcccaaacggaacagccgcagccaccgtcgcccggcgacctggagaagcacgagatcctgatggtgctcgccgtcttcgtcgccaccgtcgcctacgtcgccgggctcaacccgcccgggggattctggcggaccaccctgctggacgccaacggccgactccgccacaccgccggcgacccggtgctccaggcgctccaccccatccgctacaagttcttcttcttcagcaactccaccgccttcatcgcgtccctgctggccatcaccttcaccgtgcactacgagaagctcaagctcaagtccatcagggtccccctctatggcctcgtcgtcgtggccatcttgggcatcgggggcgcctacgccgccggcagctgcagggacagcaagcacaccatctacgttctctgcctagtcgtcgcagtccttctctgcatcttcctccagtggtttcttgtgggctccgctttccagcttccttgctatggcactggtccaactaccaggaagggtagtggcaaaggtatagacgacgacgatgatctggacaagattcgtgaattcattcagctgcttgtcattcttgcggcgaccgttgcctaccaagccggtgtcgatccgccagggggcgtctgggcagagaacggggaaggccacagcgcaggggacccaatattcctgacgacgcatccagggcggttcaaggtcttcttctacttcaactcggcggccttcgtggcatccctggtcatcatggtgatgctgcagaacgagttcctcgtcaggcgccacgcgctggaggcggtgatgatactggatctgttttgcctcataggcgcgtacgctgccgggagctgcagggacaccagcacctccatctacatgctcgccatggctggcggtgtccttgtctacgtggtcatccacatcgtcttcttcacgctagaccccaacagagaaaaggataacaacaaggccgatgatgaaggaaacgccacgaacagtgagcaagagaagaagagaaagaaggatcggctagagaagaagcgtgaggtgctgctgctccttgcgatcctggctgcgacactgacctaccaggccgggctgaccccgcccggcggcttgtgggagaacgacaggtttgggcaccgcgccggcttccccgtcctccaggacaagtaccctcgccgctacaaggcattcctctactgcaacacggcgagcttcatggcatccgtggccctcatcgtgctccttctcaaccctaacctgtacgggccaggcatcaattgctacgcgctctttgtctgcatggtggcgggcatgttcagcctcatcggcgcctacgctgctggaagctccctgcacctgcggacctccatcgtcctcttactgctggttcttgcggtttttgcggccgtgttatacgtgaccatcaagcaccgtcgtcacgccagggaaaacaaagattcatcatcacctgctgatcgtcaagaacaaaaacccaggaaaccctcgggagcggcggccatgtacctgatgctggtaggaatactggccgcgagcgtcacctacctgacgggcctgaagccgcccggtggcctgtggatggaggacgacggcgacgggcactccgctgggaacccggtgctctacgacatcgacaagcaccggtacaacgccttcttctacaacaactccgtctctttcatggcctccgtcactgtcatcgtgctgctgcttccgaggatgctgcgcgacaatgacgacgagaggaacaagcggcccctttggccgatgcacactgccatgttcctcggcatgctcgcgctcctcggagcctacgcggctggcagcgctcgggactggtgcacgtccaagaacgtcatcctgctcctcctgcctatagtgggcttcgttgcactcctcttcttctggaagaaagggaaagcaagtgagggcacccagcatggccagagtgcacgcctacctagcagtacatga

SEQ ID NO: 117798 - DNA, 204 bp, Zea Mays
agcgaccagcgtcaagccaagaaacccaagccatgggcactacggagcaccatggcgccgccgatgtcatcgccgagccgctcctaccctcgcccgccgtggagatggagccttcatctgcgccaccgcccctgccacgccggaacatgttcgccttcatctgcgccacgctcgcctcaatgaccaccatcctcatgggctaca

SEQ ID NO: 117799 - DNA, 1589 bp, Zea Mays
aatctttcttgtaccactaagctagtggccacaactcgttggcaacgaggaagcagcaagccgagaagctacgccgcgccgccgccatatatggcacaggctgccggcaccgccgatgccactgatgaggctccactgctgctggcctcgtcggcggcggggtcgacgccgtcgccgccaggttcagcaccgcgccggaacaggttcgccttcgtctgcgccacgctcgcctccgtcaccaccatgctacatggctacaacctgacgctgatgagcggcgcggagctgttcatgcgggaggacgtggggctcaccgacggcgaggtcgaggtgctggcggggtccatgaacgtgttcatgctcgcgtccatcctcgccgccggctgggtggccgaccacctgggccgccgccgcaccctcgtgctcgccaacgccttcctcatggccggcgcgctcgccatgtcgctcggcaccagcttcgccgcgctcatggcggcgcgcttcgtcaccagcgtcggctccgggttcgcgcgcgtcgtcgcccccgtgtacaacgccgagatatcgcaggcggccacgcgtggcgtcctctcatccatgctcgacatattcatcaacgtcggcatcctgctcagctacgtgtccaactacgcgttcgcgggcctcccggtgcacatcgggtggcgtctcatgtacgccatcggcgtcatcccgcccgtgctcatcgccgccggggtgctcgtcatcatgccagagtcaccgcggtggctcgcgatgcagggccgccacgccgacgcgcgcgcggtgctgttgcgcacgtcggacagcccggcagacgccgacttccggctcggggagatcaagcgagccgccgacgcgccgtcgcccgctgctgcggcgcgccacggtggcggcggtgtctggagggagctcttcgtccggccatccaccacaaccacgagcgtgcggcgcgtcctcggctgcgtcctcgggctgcagttcttcgtgcaggcgtccggcgtcgacgccatcctcctctacagcccgctggtcttcaaggcggtcggcgtggcgtccacctccgccgtgctcggcgccaccgtgtccatcggagccgtcaagacgtgcttcgtcctcgtcgccatgctcttcaccgaccgcctcggccggcgcccgctcctcctcgccagcaccgccggcgtcgccgtgaccgcgaccgccctcgccgtgacgctgtgcgtgggcacggcgtcgccggcgacggccgcggcgtgcctggcgtccgtgctggccttcgtggccgcgtactccatcggctacgggtccgtggtgtcgacgtacagcgcggaggtcttgccgctacggctgcgcgcgcagggctccagcctgggcgtggccgtgaacaggctcacgtgcggccgtgcggggtggtcagcatgacgttcatctcgctcgccgacgccatcaccatgcccgggtgcttcttcctctacgctgcggtgacggcggctgcgtttgtgttcgtgtacacgcggctgccggagaccaagggccggagcctagaagacatggaagtgctcttccgcaag

SEQ ID NO: 117800 - DNA, 1545 bp, Zea Mays
cggccgccacgggctacgcaccgagaagaaccaacggcgtacgccatggcacacgccgacggcactgccgatgatggtgctacggcgccgctgctcgcgtcgtccacgaagtccggcaagccgccgcgccggaacatgtacgccttcgcctgcgccacgctcgcgtccatgaccaccatcctcatgggctacaatctcgcgctgatgagcggcgcgcagctgttcatccgggaggacctgggcctgtcggacgcgcagatcgaggtgctcgcgggctccatcaacgtgttcatgctcatgtccatcctcgctgccggctgggcagccgacctgctcggccgccgcggcactctcgtgctggccaacgtcttcctcatggccggcgcgctcgccatgtcgctgggcgccagctaccctgcgctcatggccgcgcgatgcatcaccagcgtcggctccggcttctccatcgttgtcacctcggtttacaacgccgagatatcgccggcgtccatgcgcggctttctatcgtcgtttcttgacatgttcgtcagcctcggcttacttctgagctacgtgtccaactacgccttcgccggcttgccggtgcaccttggctggcgcaccatgtatgcggtgggcgtgcttccgccggtgctgctcgccgtgggcgtgctcgccatgccagagtcgccgcggtggctcgcgatgcgcgggcgccacgcggatgcgcgcgcggtgctcgtgcgcacctcggacaccccggccgaggccgacctgcgcctcgaggagatcaagcaggccgtcaaagaggagccacagccacagggtagcagcgatagtgacggaggcaacgcctggaaggagctgctcgtccggccgtcggcgagcgtgcgccggatcctcgtctgcgtcgtcggcgtgcacttcttccagcaagcctccggcatcgacgccatcgtgctctacagcccgctggtgttccgcaaggccggtatgtcgtccaacaaggccatcctcggcgccaccatcggcgtcggcgtcgtcaagatgtgcttcgtcctggtggccaccctcttctcggaccgcctcggacggcgaccgctcctcctcgcgagcacggccggcgtggccgcgtccatggcgtcgctgggcgtgacgctctgcatcggcgtggcgtcggccgcgagcatggcggccagcgtcttgtcggtgctggccttcatggcagcgttttcgattgggttcggaccgctagcgggcacgtacagcgccgagatcatgccgctgcgcctacgtgcgcagggcgccagcttgggcatggcggtgaaccggctaacgtgcgcgctggtcagcatgacgttcatctcgctcgcggacgcgatcaccatgcccggatgcttcttcctgtacgccgtcgtgggggcggccgcatgcgtgttcgtgtatgcgcggatgccggagaccaaaggccggagtctcgaggacatggacgtgctcttcgccaaatgaaaatctatccaaaggatgatgacttcatcaccagtg

SEQ ID NO: 117801 - DNA, 2417 bp, Zea Mays
atcgccttcaccgccacacgctgccacgcgccatatataaccagccgttccctcctctcatgctcccctttccaaatccgtctccgccctcacgcacgcggcccaactagcctaacaaaccctagctagatttagaaaaaaaatttgtccccaatccgaaccgacgaggagctcgccgccgtgagatgtccgagtacgacgagcgctaccagggcaacggcgacatgcccgcagccgaaggcggctatccgcaggccgagtacgccgccgccgccgcgcctgccgccgggggttcgccgcccgcagacagcaagccctccgggttctccgaccacgccgacggccgctcctcccagcaccagcacgagacacaatcacatgacagtggttcctcgaaatctcgagaaagggaccgagaacgcgataagggcaaggatagggagcgtgacagggatcgtggccgagaaaaggggagggaccgagacagggataaggatcgtgaaagaagtgacagagatcgcgatcgccaccacagggaccatcgagagcgcagcgagaaaagggaacaccgtgatcgttctgatgatcgtgaccgtcaccgtgatggtcgtgaccgccaccgtgatgatcgtgattctgagaggagaagagatcgtgacagagatggtcatcgtaggcatcgctcccgctccccttctaagagtcgtgaccgtgaccgcagatctagatctcgttcacgctctcgatcaaagagcaagcgcgtgagtggttttgaccaagcacctccacaacatgcacttcctattgttgctgctggtgctatccctggtcagcttcctggtatcactgctcctattcccggggttggggtgcttccgaacttgtataatttggctgcaggacagttcaacccccttgttattcagccacaagccatgacacaacaggctacccggcatgctcggcgtgtctatgtgggtggacttcctccaacagctaatgagcagaccgttgccatattcttcaatggagttatggctgctattggaggaaacacagctggtccaggtgatgctgttcttaatgtctatataaaccatgacaagaaatttgcttttgtggagatgagatctgtggaggaagcaagcaatgcaatggctttagatggcataatgtttgagggagcaccagtgaaggttagaagaccaacggactataatccttccctagcagctgctcttggcccgagccagccaaatccaaatctcaatcttgctgctgttggcttaacacctggctctgctggaggattagaaggtccagaccggatctttgtaggtggtctaccatattatttcactgaggctcaagtgcgggagttgctcgagtccttcggacctctgcgtggattcgatcttgtgaaggatagagaaactggtaactcgaagggatatgccttctgtgtttaccaggatcttaatgtcaccgacattgcctgtgctgcccttaatggcatcaagatgggggacaagactcttactgttaggagggcaaaccaaggagcttctcagcctaggccagagcaagagagcatcctgctgcaggcacagcagcaggtgcaaatgcagaaactcgtataccaagtcggaggtgccctgccgacaaaagttgtctgcctgacacaggtagtgacagcagatgaactgagagacgatgaggaatacaatgacattgtggaggacatgagggaagaaggacgcaaatatgtcccacataatgccattgcagagtgttttatagtccgaccctatgcaatattggcaatcgggctttaacccacagaagacactattcttttgagtttgattaatcattatatcattagcctcttgcctatatatctctactcactaacacttggacaggtaacttggtgaaagttgtaattccacgacctgaccccagcgatgctccagttgctggtgttggaaaggtgtttttggaatatgcagatgtcgagggctcgaccaaagcaaagacggggatgcatgggcggaaatttggcgggaaccaggtggtggccgtgttctatcccgaggacaagttcgctgctgagcagtatgactgaaagttgtagaacctgttctagagttgcaacacacaatgtgtgtgttttttttaaaatctttgagggtaccgttttctcttgaatttgaatcttatctagttataagtttggtgcaggaccagtcgataagcgataagtttgtgcaggaccattaggctttgtttgggtaattagtattgatcccaatccaaatctatatatgttaatgccttgttcagttattcttattccatatggattggagtgtatcggaatgagttttgacttgctatagatttaaacaaactca

SEQ ID NO: 117802 - DNA, 2259 bp, Zea Mays
atcgccttcaccgccacacgctgccacgcgccatatataaccagccgttccctcctctcatgctcccctttccaaatccgtctccgccctcacgcacgcggcccaactagcctaacaaaccctagctagatttagaaaaaaaatttgtccccaatccgaaccgacgaggagctcgccgccgtgagatgtccgagtacgacgagcgctaccagggcaacggcgacatgcccgcagccgaaggcggctatccgcaggccgagtacgccgccgccgccgcgcctgccgccgggggttcgccgcccgcagacagcaagccctccgggttctccgaccacgccgacggccgctcctcccagcaccagcacgagacacaatcacatgacagtggttcctcgaaatctcgagaaagggaccgagaacgcgataagggcaaggatagggagcgtgacagggatcgtggccgagaaaaggggagggaccgagacagggataaggatcgtgaaagaagtgacagagatcgcgatcgccaccacagggaccatcgagagcgcagcgagaaaagggaacaccgtgatcgttctgatgatcgtgaccgtcaccgtgatggtcgtgaccgccaccgtgatgatcgtgattctgagaggagaagagatcgtgacagagatggtcatcgtaggcatcgctcccgctccccttctaagagtcgtgaccgtgaccgcagatctagatctcgttcacgctctcgatcaaagagcaagcgcgtgagtggttttgaccaagcacctccacaacatgcacttcctattgttgctgctggtgctatccctggtcagcttcctggtatcactgctcctattcccggggttggggtgcttccgaacttgtataatttggctgcaggacagttcaacccccttgttattcagccacaagccatgacacaacaggctacccggcatgctcggcgtgtctatgtgggtggacttcctccaacagctaatgagcagaccgttgccatattcttcaatggagttatggctgctattggaggaaacacagctggtccaggtgatgctgttcttaatgtctatataaaccatgacaagaaatttgcttttgtggagatgagatctgtggaggaagcaagcaatgcaatggctttagatggcataatgtttgagggagcaccagtgaaggttagaagaccaacggactataatccttccctagcagctgctcttggcccgagccagccaaatccaaatctcaatcttgctgctgttggcttaacacctggctctgctggaggattagaaggtccagaccggatctttgtaggtggtctaccatattatttcactgaggctcaagtgcgggagttgctcgagtccttcggacctctgcgtggattcgatcttgtgaaggatagagaaactggtaactcgaagggatatgccttctgtgtttaccaggatcttaatgtcaccgacattgcctgtgctgcccttaatggcatcaagatgggggacaagactcttactgttaggagggcaaaccaaggagcttctcagcctaggccagagcaagagagcatcctgctgcaggcacagcagcaggtgcaaatgcagaaactcgtataccaagtcggaggtgccctgccgacaaaagttgtctgcctgacacaggtagtgacagcagatgaactgagagacgatgaggaatacaatgacattgtggaggacatgagggaagaaggacgcaaatatggtaacttggtgaaagttgtaattccacgacctgaccccagcgatgctccagttgctggtgttggaaaggtgtttttggaatatgcagatgtcgagggctcgaccaaagcaaagacggggatgcatgggcggaaatttggcgggaaccaggtggtggccgtgttctatcccgaggacaagttcgctgctgagcagtatgactgaaagttgtagaacctgttctagagttgcaacacacaatgtgtgtgttttttttaaaatctttgagggtaccgttttctcttgaatttgaatcttatctagttataagtttggtgcaggaccagtcgataagcgataagtttgtgcaggaccattaggctttgtttgggtaattagtattgatcccaatccaaatctatatatgttaatgccttgttcagttattcttattccatatggattggagtgtatcggaatgagttttgacttgctatagatttaaacaaactca

SEQ ID NO: 117803 - DNA, 790 bp, Zea Mays
gcacgaggcccatcgagttctcttataccttctttgttttaaaagctcttacattcagctgttatgattatgattgcctaccctcagttactgaattggtttccttttgtgtttttgtcttttgtgtgtcttttttgtagtcccacataatgccattgcagagtgttttatagtccgaccctatgcaatattggcaatcgggctttaacccacagaagacactattcttttgagtttgattaatcattatatcattagcctcttgcctatatatctctactcactaacacttggacaggtaacttggtgaaagttgtaattccacgacctgaccccagcgatgctccagttgctggtgttggaaaggtgtttttggaatatgcagatgtcgagggctcgaccaaagcaaagacggggatgcatgggcggaaatttggcgggaaccaggtggtggccgtgttctatcccgaggacaagttcgctgctgagcagtatgactgaaagttgtagaacctgttctagagttgcaacacacaatgtgtgtgttttttttaaaatctttgagggtaccgttttctcttgaatttgaatcttatctagttataagtttggtgcaggaccagtcgataagcgataagtttgtgcaggaccattaggctttgtttgggtaattagtattgatcccaatccaaatctatatatgttaatgccttgttcagttattcttattccatatggattggagtgtatcggaatgagttttgacttgctatagatttaaacaaactca

SEQ ID NO: 117804 - DNA, 1409 bp, Zea Mays
atggccatgcagggtttcactcagaaaattgtgggaatgatgaagagcgaaaacctctttgcatcccaaggtgtcccaattatcctctctcagattgagaatgaatacgggccagaaggcagggagtttcgtcccgcaggtcaggcatatatcaacaaggcagcaaagatggcagtcggattgggtactggtgtgccgtgggtgatgtggaaggaggaggatgcacctgatccagtgatcaatgcatgcaatggtttctactgtgatgcattttctcctaacaaaccttacaagcccacaatgtggactgaagcttggagtggctagttcacggaatttgttgggaccatccgccaacggccggttgaagatcttgcatttgctcgatttgtacaaaagggtggttcttttatcaattactacatgtaccatggaggaacaaattttgggcgcactgctgggggtcccttcatcacaacaagctatgattatgatgctccaattgatgaatatggactttttagagaaccaaagcacagtcatcttaaagaactccacagagctgttaagttatgcgagcaggctttggtttctgttgacccagcaattactacccttgtaccatgcaagagctttccttgcaaactacaattctaactcctatgcgaatgttgtattcaacaatgagcaatacagcctaccacattggtcgattagcatccttcctgattgcaaaaatgttgtttttaacagtgtcacagttggtgttcagacatctcagatgcaaatgtgtggagatgatgcctcatcaatgacgtggaagaggtatgatgaggaggtttattctctggcagctgctccattgctcaccacgactagtttgcttgagcagcttaatgtcacgagagacaacagtgattatttgtggtacatcaccagtgttgacataagctcatctgaaaactttctacaaggtggcggcaagcctctgtctctcagtgtgcagtctgctggtcatgccttgcatgtctttgtcaatggacagcttcaaggttctgcatatggtactagggaagattgaagaatcaaatacaatggcaatgctaaccttcgagccggcactaacaaaatttccatgctaagtgttgcctgtggattgccgaatgttggagtgcattatgagacgtggaacactggtgttggtggtcctgttgtgcttcataggctggatgaaggttcacgagaccttacttggcagacttggtcctatcaggtcgcccgagtgctacttgtgctaccgagtgctgctgtgcagcctatgctacctggtgtgtgactgcgtggtgactgcttggtgcttggctgcttgctgccgagtgtaagacgccaggaccaggaggcaggaccgc

SEQ ID NO: 117805 - DNA, 1602 bp, Zea Mays
atgtcctgggcggcagggaggggaggctcgaccaacgaccatggatgggaggcagctaggagcaggggagagcgggctgggcagcgactgggagaagggtcgaatgcggcggctagagaagggtcgacgtgggcggctgggaggagggccgaggtggagagatgctcggctgggaggagggccaccgagacaacgaatttcggagtgatggtcctccctcccgtggaggttatgagagcgacacaggaggccaaggatatgaacagaaccgtgagcctcgccagtgctgccctaggacctccaccacaaccgggcgaggccgtccgcccccaagccccgagacagccctcgagcgtcccccaccccggagacaccgtcgtcctgccccgcccgtcgtgctcgcctgccccgaggacagctcgtcctcctcttcgtccacccctgctccagcttcgccagtgctgccctaggacctccaccacaaccgccgcaactcccttgacgctcggaccaccggatctgctgccgaccgtcgacttccaacaaaatcgtccccaagccaagccaccatcagaagctgttgataaagctgtaagtgctaagtttgaagagatgcaacttaagcttgagaaccttattgtggagaaaaagaaagttgcatatgttaatgatgctattgagatgcttgagagaatggctcaccgtggtgcctgcagctgcgagaagaatacaggagatggtgccggcatcatggtcgctctaccacatgacttcttcaaagaggtcgcaaaggatgctgggtttgagctacccccaccaggcgagtatgatgttggaatgttttttatgccaacagatgaaaagcgtcgtgagaaaggcaaagctgagtttaagaaggttgcagaatcactgggacatgtaatactcgggtggcgtctggttccgactgacaactcagacttgggtgaatctgcactcgagactgagccagtcattgagcaggttttcgttaccaagagctcaagatcagaggctgagtttgagcaacagctatatatccttaggagactctcaatcatctctgttcgagcctctctgaacattaagcgtggtggagagagggatttctacatgtgctctctatcttctaggactattgtttacaagggccagcttaaaccgtcccagcttaaggggtactactatgcagacctaggtcatgaaaacttcatgagttatatggctctggaaggaattctggctaggttatggttactggaacatttacttgtttcttccataacactcatggggtattatggagtaatactcctggatctggcgaccgactccatcacccaccgtcacctgcagcctctacggcacctcccccacacccaccatcgccgtgtcgccatctctcttgttgtggaagaagacgttgatgatctgttcaacatgacccatcagctcatactggattgcatctacctgagagatggacaaggagtgactgatggcttcgatgaaaacataggtatagatgttggtaaggttcttcctcatttgaacggtaggatgttgcatgatgttgatgcctga

SEQ ID NO: 117806 - DNA, 375 bp, Zea Mays
atggaaaatagggtgccgatgggaacatggacggcggggagggtcgcgcagccaggttcctacaggagaggatcgtgcaacaggaggcatcctgtacgacggcggtggcctgaggtgagacggtcgtgcccgtgccacggtggaagaagctggtgcccatggggtgacgccgggaaggagcccacgccctgttgcgcccgccccgtgcaaggtggcagcggcgatatcctgggtggcaccgaggagaagagactcatgcccgaccgcacctgtgttgaaggagacgacgccgacgaggggggcggggccacggccgcgccatgcgtggtggcgttggtctcctgggcacggataggggcattcgaggcggattaa

SEQ ID NO: 117807 - DNA, 108 bp, Zea Mays
ggagttacgtcccctcatcatggctcaccgtcccatcatggctcaacatctattagataaactccaaattttttgggtgtcctagtaatatagcaaaaatatccttct

SEQ ID NO: 117808 - DNA, 1144 bp, Zea Mays
atgaacaccaggtgcgtcgcctctcacggtggcagcagccgcgccgctgccgctgaagggcggtgcaaggaaccccgtccagggcgtttgctgtgtcattgggttactgatgctctagctcaagcaggacttgaatcatcaaatcttattgttggcattgatttcacaaagagcaacgagtggacaggcaaattctctttccatggacgcagtctatatcacattagcaacacaccaaatccgtatgaacaagccatctcgattattgggcgaacactatcgaaattcgatgaagataatctgattccatgtttcggatttggagatgcatcaacacatgatcaagatgtcttctatttctctcctgacgagaaaccttgtaatggatttgaagaagctctcgatcgatatagggaacttgtaccacatttgcgcttagctggaccaacatcctttgcaccaattattgagatggctatgaccattgtggagcaaagtggtgggcaataccacgtcctattgataattgcagatgggcaggttacgaggagtgtagatactgcatctggacagctgagttcgcaagagcaaaaaactgttgatgccattgtgaaggccagtgaattgcctttgtccattgtgttagtaggagttggtgatggcccctgggacatgatgaaggaatttgatgacaacattcctgctcgagcttttgacaatttccaattattttcctcgagcgggtcgtccgacggcggtgcggggccggcgctgaggaggagcagtagcgtgagctcgaaggtggagaaccccgtccaggggctcatcgcctactgcaagaggtcccagcagctggccttcgtccggaagagcgccagcgacgccggcttccgcttcctgtcgtcgtccgcgtccaggatcgccgccgagtccgagtccgacgacctcgacgagctcaccgagatctgcagaggatgacgatacgatagtgctccacgaacgatgaatcccgatcattatacaatgatgcaaatgcgttccggagattttgtgaaggaaaaaaaactgaaacttgtggcgttgaccgcgcaccctgtgtcaagtgtcatgatgatatcgttcaaatgaatggcatctgaatttg

SEQ ID NO: 117809 - DNA, 585 bp, Zea Mays
atgagattacacagccttggcaatgccgctccggctgctgctacatatatacacatcagacgcatcgatcgcattccatgtctagtcctggaggaaaccattcgtctcaaggtacgacacaacgtgaccagccatcgattcaggcgaagggcagtcgccgactttacactggatcactatctcacagtccgacggcggttcgtaaggatcgtcgatgccggtgaaccctttgattttgccggcgcgtgcgagcttgtagaggcctttggggtccctggcttcgcacacttgaagcggcacgtccaggaacacctcgataaacgagtgcttgggcagcagatcgcgacacgcgcttcggtcgcttctgtagggcgatatgaggctggcgatgcagacgaggccagcgtcggcgaacagcttcgctacttcccctactctgcggatgttctcggcgcggtcctctgctccgaagctgaggtccctgttcagcccgtgcctgaggttgtcgccgtcgaggacgtacgtgaggtggcctctgccgtgcagctcgcggctcagcgcgcacgcgagcgtgcttttccctga

SEQ ID NO: 117810 - DNA, 91 bp, Zea Mays
caccatcgtagtgctgatagcacttgtcctgaccatgggagctatcgatacacagcagcttcgtcgtacgtgcaaaaagcaactgtggttc

SEQ ID NO: 117811 - DNA, 406 bp, Zea Mays
ctcattttctcctcaccctcacttaacactttcccctccccgaaccctctcttcctccatcccatcccaaatccggcgagagtgagggagagagcatggcagagtggtggcgcggcccacacgacatctcatcggtgcagacacacttatgagggtgggcgcactactatcaagcagtctcgtggtggtgtcctaaagacccgtgggggcatgcacccgcgagaccggtagccacaccgcctctttccatggtcgtcaacgtgctcgacaatcaaaataatgtcattgagcctcttcatttgtttgcttgggtgagtgcggtttgaggatcttagggctaggatttggggattcgagggaatttgagatttctgacttgagggtaaaatttgggttggaatttatt

SEQ ID NO: 117812 - DNA, 663 bp, Zea Mays
atgggggattgcgcgcgagaaggggggaaacatcggcttgaaccttcaccgacaacaggtactaaccgaggcatggacagggagcagatgaggatggccatcctgaaccaagaacggatcttcagacaacaggtacacgagctgcaccggctgtaccacgcccagaagcagctgatgatgcagcaggcgcagacggctcctgctccggcggtcgtcgacgccgagccgagaccgagaccgccgcagctggatatctggtgcggcgagagggcgacagcaagtcctcagcagcacatcatcagcttccacgaggccgcagcacctgcggctgcgctggccaaggaatgcaaccttgagctgacactggcgaccggccgggcaagcagcagcagcagcagcgacgcggaaaggcgacagggaataataaagcggctcaaggcggcgccgtccaactcggactccggcgcgaccgcggtgtcgtccacgtcgaccgactccgagctggcgccgttccgggaggtggtggaggacgtggcgacgccggtgaggtttcgcggcgaggttagcgggaggaggaggatggacgaggtggggcagggtccgtggttgtaccagcctcagcctgagtacggcgtgatgacgatgctgtactctacgtcgtag

SEQ ID NO: 117813 - DNA, 859 bp, Zea Mays
ccttcctcctccactgcctcgctcgctagatagatagatagatagatagatagatagatataacaggccatgccggccggctagcctcccagtcccagcagagaccagagcttcttcttcttggccttctctgcttcgctgttcttgttcttgagatcgcgctttctgaccggggagtgccgtgccggagatcctgaaaagagattgcgcgcgagaaggggggaaacatcggcttgaaccttcaccgacaacaggtactaaccgaggcatggacagggagcagatgaggatggccatcctgaaccaagaacggatcttcagacaacaggtacacgagctgcaccggctgtaccacgcccagaagcagctgatgatgcagcaggcgcagacggctcctgctccggcggtcgtcgacgccgagccgagaccgagaccgccgcagctggatatctggtgcggcgagagggcgacagcaagtcctcagcagcacatcatcagcttccacgaggccgcagcacctgcggctgcgctggccaaggaatgcaaccttgagctgacactggcgaccggccgggcaagcagcagcagcagcagcgacgcggaaaggcgacagggaataataaagcggctcaaggcggcgccgtccaactcggactccggcgcgaccgcggtgtcgtccacgtcgaccgactccgagctggcgccgttccgggaggtggtggaggacgtggcgacgccggtgaggtttcgcggcgaggttagcgggaggaggaggatggacgaggtggggcagggtccgtggttgtaccagcctcagcctgagtacggcgtgatgacgatgctgtactctacgtcgtag

SEQ ID NO: 117814 - DNA, 1160 bp, Zea Mays
aacagaattgaaacccattaatattacagatttgaccaaggaagagaagtgcaaaactcacttacctctctgtcactatatataccgtgtacaatctgcgagttattatttcaatgtgatgattagtactacacaacaggtactatgcccagtctgctataatttatgaatagaaaccggtttataccttttctttatgtaatcacctagctgattaatttggctttgttttcaatggtacatttacaataaggtgtgtgcaactgcaacaagctgtgaggccggtgaatacacgaagaaatgtactggaggaatttcttcaatagaaagagaagagagatgacgaagaaatggagattgtttaaaagtggtttgatggaaatccttctcatgagcggacacacccatatatacacacttccatcctttcaggaaaaaaaacatgttgaagaaatttcccaaggtcataagatacgagctaggcgagaatttcacatggagaaggttgtaggaatggttgggctaggtgtacttatttttgtccgcgatcatctacaacaaatttgttctcggttttgcatgacttctctgaaagcttctatagtgtttccctacccttaaacaatattacgtatcgagtataaagaaataaactattttaccaatgagcagaacacgtgattaaataaaattgaagagacaaaggatgggcttgatcataccattgtaaatctcatgcaactcatcataattaaggaaggagttgttcttacattttttgcaaattttctgggaagttcagaccataaaccatcgatagtggtcaccatcttcagaacattgtctcaaccaaatccactctttgacaggatggtcttcactgcattgtaatccttctttggcctttgctccatgtccttcaattgtgacacaacaaaatttgccttcagtggctagaagcttgcgatggatggaggtctggtagcccggtgcgcagcttgcaggtggaggatgccagtacatttggattggagaggaaagggagaagaaagaaggatgtagcagatttggttttcttcactcctcctcgcatctcggatggagacgacatcgctggcgacgacgacagtagagacaagattggtccgtgaataaggaat

SEQ ID NO: 117815 - DNA, 2344 bp, Zea Mays
gcaaccaaactttttgtggtgtgttcctacactatgtagacctacatgtatcatttgtggacaattttaacagagttttcaatcgttagtagatttagttcgtttatttgaatttcttcggaaaatttagatttgaactgtaggtcagtcgaaacttgaaaaaccgtgcatgcaaaaatgatattcatgttacttagcataagttacgaccgattccaggagcggaccggaaacttcgagcaacatgctcactaaacatgaccgtgaacttgccatacacatgtttaaaaattgtataaaacacaaacaaagtcagaaaatcctgaaacttgtccacttgtcatgatatcatatgtacaggctgtgataaaaattttagaatgtttggagaaagttgtgggacactatgtgtagaaacctaagagaactacattgaaactctaaacatgaccgaaacaaggctaatttacaaaaaaaaaaaaaaaagttggtgctgagcagacgctggctgcacgggcgctcgctgttgacaggcacggcgctggggcgggaggcggaagggccgttacggcctagtatggcccgcgccatacctcctcgacccggcccaagagaggtgccctagcttccctcccaatcccaccaggccgccgccaccacatcgcgccctcgcccgcttgccgccgaccctgaccggctgagcccctgaccagctcgtccaggcggacagcggcctgcggcaggccagcgcccagccaacagcgactgcctgactggtgagagctccgccttctccccaacccaaatttgatcccctcgcgccgtcatcttcactgccggcgccggcacgggcacggaattgagacgaggacggtacgataattccggaggggagtattgtgggcccacacctgttccctagcgcccagtaggtgaattgagagactgttctctgggaccaacgcgggtaggtgtggccgtgcgagtgggtgcgtgggtcccgggcaacaacaacagctgacggcacaaagttgccaccaccagcgcttggtctgggtctgggatttccacgagcagcgcaacggcgttcgttccttcgattcttctaatctcctaacccaggtgcgcatggtatggccggcctgatcagcttgcgcgccggtccgaggagttcaccgtcacttgcccggtcgtcgtccgcctgggcatcaccaccggcttcacatgtggcggttcgtttgccaagcccactgtttcgctgtgccaaacttcgtaggagccgtagtctactggcagcagcactggagatctctaaggacggttccgccgcggttctggccaacagcctgccttcccaaggggctatcgagacgttgcggaatgccgatgcagtgtgtttcgacgttgatagcaccgtcatcctggacgagggcattgacgagcttgctgatttctgcggggcggggaaagctgttgctgaatggactgcaaaggccatgacagggactgttccgtttgaggaggcgctggcagccaggctgtctttaatcaagccatctctctcccaggtggaggagtgcctggagaagaggccaccaaggatttctcctggaatggctgatttggttaagaagctaaaatccaataatattgatgtgttccttgtgtcaggaggcttccgacacatgatcaaaccagtggcatttgagcttggcattcctcctgaaaacatcactgcaaaccaattgttatttggcacattgggggagtacgccggatttgatcccacagagcccacttcacgcagtgggggtaaagcaaaagcagtgcagcaaataaaacaggaccatggctacaagacagttgttatgattggtgatggcgcaactgatctggaggctcggcaacctggcggagcagacttgttcatctgttacgccggggttcagatgagagagccagtcgcagcacaagctgactgggtggtttttgattttcaagagctgatcactaagttgccatgaattcattacctaccgcaatttatgaacctttgcattgtcggctaaataattgcggccgcattttaaagctgtagatttcactagcaattcttggagataaactgaattattacccggctgtaaagtattttttttatttgttttcccgcattatttgtatgatcctgaaccatgaatgcggaggttgtgttccgacgttgtcagtgaaattgtcctctaagcaaatgttgagtatgtgagtgattaatgaatcacatcacagtttattaagcgccggattcgaaccgtcgtttatgcaagtattattgttggattgagcc

SEQ ID NO: 117816 - DNA, 1490 bp, Zea Mays
cacgggcgctcgctgttgacaggcacggcgctggggcgggaggcggaagggccgttacggcctagtatggcccgcgccatacctcctcgacccggcccaagagaggtgccctagcttccctcccaatcccaccaggccgccgccaccacatcgcgccctcgcccgcttgccgccgaccctgaccggctgagcccctgaccagctcgtccaggcggacagcggcctgcggcaggccagcgcccagccaacagcgactgcctgactggtgagaggtgcgcatggtatggccggcctgatcagcttgcgcgccggtccgaggagttcaccgtcacttgcccggtcgtcgtccgcctgggcatcaccaccggcttcacatgtggcggttcgtttgccaagcccactgtttcgctgtgccaaacttcgtaggagccgtagtctactggcagcagcactggagatctctaaggacggttccgccgcggttctggccaacagcctgccttcccaaggggctatcgagacgttgcggaatgccgatgcagtgtgtttcgacgttgatagcaccgtcatcctggacgagggcattgacgagcttgctgatttctgcggggcggggaaagctgttgctgaatggactgcaaaggccatgacagggactgttccgtttgaggaggcgctggcagccaggctgtctttaatcaagccatctctctcccaggtggaggagtgcctggagaagaggccaccaaggatttctcctggaatggctgatttggttaagaagctaaaatccaataatattgatgtgttccttgtgtcaggaggcttccgacacatgatcaaatggcatttgagcttggcattcctcctgaaaacatcactgcaaaccaattgttatttggcacattgggggagtacgccggatttgatcccacagagcccacttcacgcagtgggggtaaagcaaaagcagtgcagcaaataaaacaggaccatggctacaagacagttgttatgattggtgatggcgcaactgatctggaggctcggcaacctggcggagcagacttgttcatctgttacgccggggttcagatgagagagccagtcgcagcacaagctgactgggtggtttttgattttcaagagctgatcactaagttgccatgaattcattacctaccgcaatttatgaacctttgcattgtcggctaaataattgcggccgcattttaaagctgtagatttcactagcaattcttggagataaactgaattattacccggctgtaaagtattttttttatttgttttcccgcattatttgtatgatcctgaaccatgaatgcggaggttgtgttccgacgttgtcagtgaaattgtcctctaagcaaatgttgagtatgtgagtgattaatgaatcacatcacagtttattaagcgccggattcgaaccgtcgtttatgcaagtattattgttggattgagcc

SEQ ID NO: 117817 - DNA, 949 bp, Zea Mays
atttggacaattttcctcatgccttttgttgtagtgccctaagatttcttgaagtacagtttaaaaaccaagagagaactcactcaacattgttttccccacactgcaatagagttaactattgtgcttctactcacaaaccagcgtcgaacaatttcttggtccactcacaagattatcaacagaactctcttttggtttgcaggatttctcctggaatggctgatttggttaagaagctaaaatccaataatattgatgtgttccttgtgtcaggaggcttccgacacatgatcaaaccagtggcatttgagcttggcattcctcctgaaaacatcactgcaaaccaattgttatttggcacattgggggagtacgccggatttgatcccacagagcccacttcacgcagtgggggtaaagcaaaagcagtgcagcaaataaaacaggaccatggctacaagacagttgttatgattggtgatggcgcaactgatctggaggctcggcaacctggcggagcagacttgttcatctgttacgccggggttcagatgagagagccagtcgcagcacaagctgactgggtggtttttgattttcaagagctgatcactaagttgccatgaattcattacctaccgcaatttatgaacctttgcattgtcggctaaataattgcggccgcattttaaagctgtagatttcactagcaattcttggagataaactgaattattacccggctgtaaagtattttttttatttgttttcccgcattatttgtatgatcctgaaccatgaatgcggaggttgtgttccgacgttgtcagtgaaattgtcctctaagcaaatgttgagtatgtgagtgattaatgaatcacatcacagtttattaagcgccggattcgaaccgtcgtttatgcaagtattattgttggattgagcc

SEQ ID NO: 117818 - DNA, 171 bp, Zea Mays
tttttttttttttttttgagggagagagagagagagcgcgctaggagtagcagatggcacgtcgctttccccaacctgtggtctccgatgctttcaccaaccacacaagctatcagccaccaattgtggcctttcaacctcatcagctttgcacctgccgtatcaaactat

SEQ ID NO: 117819 - DNA, 1007 bp, Zea Mays
atggcgacgcgccgccaaccgcatctgtaattttggaaccgccgcctgcgcgggccccaccaaccccgcaccgacgccgacgcgggtcctcgccgtccgatccgcgagcgccccgagaccgacggccgcgatgcgggtgcgcccgccccggtggtcgcgcggcgtgccgctattaatagcgacgcctgcctccggcgacccaaggtggcactgcaagcgcaaagcagcttcctttcgcctgctggactagtcgagcggcgagcgaggaggcggaggatgggccgcggccggggcgtgagctacgggggcgggcagagctcgctgagctacctcttcggcggcggcggcggcgacgaggccgccgcggcgcccgccaagccggctgcggcggcgcctgcgcctgcgccggtgccggcggcagcagacggcgagaagctcaaggggatcccggccggcgtccgcggcaaccagagccagaccaacaactacttccgggcgcaggggcagaactgcggcaacttcctcacggtaagccagccagacagccagtcgccggccacctattcttcctcttccccttttgtctctgcgctcctgacatcgttgccttcctctgccacggcgtggcccacaggaccgcccgtcgaccaaggtgcacgccgcgccgggcggcggctcgtcgctcggctacctcttcggcggcggacctcccgggagcaagtgatgtgatgggcaccttctccgcccagacttttcggagcaccgcctgcttgggaagcttgatttttactaagtccatcgtgacctgctggatgtgaagttaatttccatgaagaaatgtatgttcatgtgtacctctgtaatctagaaatgtttatgtgtatctctgcaatttcgttggggtcggtcgtctcatcagtgcctgtatgtgtgtgtgtcatcaactgactttgtcctgcatgttgttcatcagaagttgagaacatgtgttaagttgttcacatgct

SEQ ID NO: 117820 - DNA, 974 bp, Zea Mays
atggcgacgcgccgccaaccgcatctgtaattttggaaccgccgcctgcgcgggccccaccaaccccgcaccgacgccgacgcgggtcctcgccgtccgatccgcgagcgccccgagaccgacggccgcgatgcgggtgcgcccgccccggtggtcgcgcggcgtgccgctattaatagcgacgcctgcctccggcgacccaaggtggcactgcaagcgcaaagcagcttcctttcgcctgctggactagtcgagcggcgagcgaggaggcggaggatgggccgcggccggggcgtgagctacgggggcgggcagagctcgctgagctacctcttcggcggcggcggcggcgacgaggccgccgcggcgcccgccaagccggctgcggcggcgcctgcgcctgcgccggtgccggcggcagcagacggcgagaagctcaaggggatcccggccggcgtccgcggcaaccagagccagaccaacaactacttccgggcgcaggggcagaactgcggcaacttcctcacggaccgcccgtcgaccaaggtgcacgccgcgccgggcggcggctcgtcgctcggctacctcttcggcggcggacctcccgggagcaagtgatgtgatgggcaccttctccgcccagacttttcggagcaccgcctgcttgggaagcttgatttttactaagtccatcgtgacctgctggatgtgaagttaatttccatgaagaaatgtatgttcatgtgtacctctgtaatctagaaatgtttatgtgtatctctgcaatttcgttggggtcggtcgtctcatcagtgcctgtatgtgtgtgtgtcatcaactgactttgtcctgcatgttgttcatcagaagttgagaacatgtgttaagttgttcacatgctaataatggtccagattctgtttacgcttgaaattcagcacgtgtgtccactacaaattcaggtttacgcttga

SEQ ID NO: 117821 - DNA, 429 bp, Zea Mays
atggctggatctagcgggagcaacgaggtttggggggggggaggaggtagtaccaggatcgagggtacagcgggattcgtcgccatagaaggaagcctccgcgggcgggatttgtcgctgcagctgcgggcgagagctgcgggcgggaatcgtcgctgcagggctgcagctgcgggcgggattcgcgggattcgtcgctgcggggctgcagccgcgaggatggaagggagcgttggggatccgcggaagggagcgcggagggagcgcgggagggcagcgggatgcggggctgccggcggggatgcgtggcggatgcagggggtgcgcgcccggcagaacgtgcaccatggggttgtgaacgcctacattagtcacataatagtagtagagatttctactttcgctgtgcatgacatgtcaatcgcatag

SEQ ID NO: 117822 - DNA, 1261 bp, Zea Mays
atataaattacagactttattagctgaagaatccgatcccatttgtcttgaacagcactgaacactcatatagtaactagctatggccaatcacacgttgacagcaagaacatatgctccgatccgtgcagagcagtcatggagagacacgaacaatggacagcaaaacgcaaccccctgcctaatgaacacatttatttattcgttccaagagtatagttcaccatgcatgttcctgtcaaatccaaagcaacaccaccaccattcttcacatgacgctacacgccgccgacgggtcgtcgtcgctgaacgtccggcagcccctgtaggccccgcacggcgctggcaacgggcggacggtcgtgccgtacagcctgccgcagcagtagcacctgcagccttcgtagtagccctggtagcacggcgcgcagcacgggcacccgcacggccccacgggcggcgccgccggccacgacgggatctccaccgtcgggatcacgcactccgccggcatcagcatcggcatcggcggcggcggcggtctctcgttcccaggcatcggcattggcattggcggcggcgggtggtgctggtgctgcggcgacggcggcaggtccatggggggcctcatctccttgggcggcgggggagacatgggtggctgaggctccagctccgctctgggcggcctctcctccacgtactgcggctgaggcaccaccgccgccatcccgcggtcaggcggaggaggcgggtggtggtggacgtggaccggggacggcggcatcatcgcctcgggcggcggaggtcccggcgctgtctccggcggcggcggcggcggaggcgacggaggccgctcggtcggcggcggctgctgctgctgctgctgcttgttcttgttcttgttcttgctcttcccgccgctcctcactggcgccggcgccggcgcgggtggcccgtcgtccggcacgttctgtggaggaggaggcttgccgccgccgccgccgccgccgttggcgtcgacgatgtagacgtcccgcaccaccttgccgcccttgcagcggagcttgcacgcgagccgctgcgggtcgaacgggcccaccatggtgaccgtcttgctcttgtcgtcgaaggagatggtgcggatcctctcatggtctgcataatccacacgagtgaaacaggatgactgagactgagatcgagcgctcgtagaggatatatcatcgtcccatcccatgcagcttgttgctcgtgctcg

SEQ ID NO: 117823 - DNA, 799 bp, Zea Mays
ggatagggtgtctcgcagctccagacggccacgtcggccagccgtcggccactcgcttcgactggcaggctcctacccttgcagacaaaaaacgcaaacacgaggacgaggacgaaggttcgttcagttcaagaccagacgaggaggaagagaggcgcgcaagcggtccggtctcatggcgcccttccccgccctccgctcatcgtcgccggtggccgccgccgcggcgccgtcgctcggtcgcgtgtccggccacgcatctgcggcgcccagcaagaggcgcgtcgtctcctgcagggccgtcagcagcaggtcgctgtccatcatcaggtgcgagcagagcgcgaagaagggcggcgggccggacacatggctgggccgcgcggccatggtcggcttcgcctccgcgatcgccgtcgaggtggccaccggcaagggcttccttcaggtaggaccgtacgtaacatcgacagaagcgaggaacgaacgcgtgtgtaacaacatataacaagagtttgttgtgggtggcgtgcagaacttgggcgtgggtactccggcgccgacgctggcgctggccgtgtcggggctcgtcgtcggcctcgccgtcttcttcctgctgcagtcgggaggaggcacgcgagactgacgactgatggaacccatgagctgagctgagcacgcgtcgaacatcgtctccccactcgacatcagtcgttgctgtaatggttggtgaagcgaagatgaaaacccaggacatatatcagcatcatgtcatgtgtaacaaagacgacaactctca

SEQ ID NO: 117824 - DNA, 839 bp, Zea Mays
ggatagggtgtctcgcagctccagacggccacgtcggccagccgtcggccactcgcttcgactggcaggctcctacccttgcagacaaaaaacgcaaacacgaggacgaggacgaaggttcgttcagttcaagaccagacgaggaggaagagaggcgcgcaagcggtccggtctcatggcgcccttccccgccctccgctcatcgtcgccggtggccgccgccgcggcgccgtcgctcggtcgcgtgtccggccacgcatctgcggcgcccagcaagaggcgcgtcgtctcctgcagggccgtcagcagcaggtcgctgtccatcatcaggtgcgagcagagcgcgaagaagggcggcgggccggacacatggctgggccgcgcggccatggtcggcttcgcctccgcgatcgccgtcgaggtggccaccggcaagggcttccttcagaacttgggcgtgggtactccggcgccgacgctggcgctggccgtgtcggggctcgtcgtcggcctcgccgtcttcttcctgctgcagtcgggaggaggcacgcgagactgacgactgatggaacccatgagctgagctgagcacgcgtcgaacatcgtctccccactcgacatcagtcgttgctgtaatggttggtgaagcgaagatgaaaacccaggacatatatcagcatcatgtcatgtgtaacaaagacgacaactctcatgtgttggtgttgtctgctgctgttgtacgacatccgccgctcgcttgtacgaccgtactgcacttcatctgccggccgggcgagcacagccgttctttaataacatgacgggcgcatgcacacgcc

SEQ ID NO: 117825 - DNA, 1012 bp, Zea Mays
ggatagggtgtctcgcagctccagacggccacgtcggccagccgtcggccactcgcttcgactggcaggctcctacccttgcagacaaaaaacgcaaacacgaggacgaggacgaaggttcgttcagttcaagaccagacgaggaggaagagaggcgcgcaagcggtccggtctcatggcgcccttccccgccctccgctcatcgtcgccggtggccgccgccgcggcgccgtcgctcggtcgcgtgtccggccacggtacgtatcggcagctcggctctctgcgctcgaatccatctcggtagttgtatacgtacgcggcagcgtggatgtgaatctaagctgcagaatttattcagttcaggcgttctgtctatgtcttatattcacttgtgagtgagtgagttccgtcgtcgaaactcgaaacgcagcatctgcggcgcccagcaagaggcgcgtcgtctcctgcagggccgtcagcagcaggtcgctgtccatcatcaggtgcgagcagagcgcgaagaagggcggcgggccggacacatggctgggccgcgcggccatggtcggcttcgcctccgcgatcgccgtcgaggtggccaccggcaagggcttccttcagaacttgggcgtgggtactccggcgccgacgctggcgctggccgtgtcggggctcgtcgtcggcctcgccgtcttcttcctgctgcagtcgggaggaggcacgcgagactgacgactgatggaacccatgagctgagctgagcacgcgtcgaacatcgtctccccactcgacatcagtcgttgctgtaatggttggtgaagcgaagatgaaaacccaggacatatatcagcatcatgtcatgtgtaacaaagacgacaactctcatgtgttggtgttgtctgctgctgttgtacgacatccgccgctcgcttgtacgaccgtactgcacttcatctgccggccgggcgagcacagccgttctttaataacatgacgggcgcatgcacacgcc

SEQ ID NO: 117826 - DNA, 3647 bp, Zea Mays
gtgcggtgccataagtgacagccacctcagtctctgtctgtggagctctctctcgcgcgcgttgccatctcgcaggttcttcatctcgtcgctctgttcaggcgcaggcggcgacaggagatggacggggagcaggcggcgcggtgggcggcggcgcaggagggggttcccgtcggggcggaccttgtcgcggcggcgctgcggcagctgcgcttcctcgcggcggtggaccgccgccggtggctctacgacgagggcccgctgctcgaccgggccatacgcaggtacaaagcatgctggcttccgcttcttgacaagcacactaagggtgtggttgtagatggtccattggttgttcctcttgattgtgagtggatatggcactgccatcgccttaacccggttcagtacataagggactgcaagaaagtgtatggcagaatactgaacaataacaacgttgagtcgtccactcaaacaaagtcgacacttgagtcagaaaaagtttggaaagagctgtatcctgaggagcccttcgaattgttgttcacaagaacctttgacactgccgtggatgtcaaccctgcaggtgcagaggaggacattacctatgatctggtctcggctgttaagagacaatcctctttctattatcaggttggaacaccaacaatgcatgatccacggtttctccaagaagctctagctcgatacaaggcgtttctttacctgatcaagatgaatcaagaaaaaggattgcagcgcttccgtgtaccaacctatgatgtggatctgttgtggcacactcaccagctgcatcctattacctaccgcaacgacatggtgaagcttcttggaaaagttctggagcatgatgacaccgatgctgatcgatctgaagggaagaaactcgatgttggatttaccgagactactgaacagttcgagagtacctttggtgtaagatactggaaggctggatgtatgtaccgtggcaacgtgccatctcctgtgacatccactcctcagacattcagtgctgaggttggtactgggtcttacatctgcaaagcccagaaagatcttaatgcccttgatgtaacagttgtagagttatatttacaaattgtagacatcaagaatttaccatctgctgttcaaaaagaaaatgtgtatgtacggttcgccaagaatcaatcagatatgttcatcagtgacggcggcaggttggatatctcaacagttacagggaagaacaccggagtttgtttacagtgtgaacctaccggagaactcattcttgcagtaatggttgatcaattatcaaagaaaccagaaccgatagggaaggtttctttcccactgcacgatttgacagggcctgattctaagctctccttcgagaagtggtttgaactgaaagctcatggtgggcatgccgcttcacctcctgttagtcttcgtgttgcagcttctgctactgtcccaagcagcgctcagaaggtgttcaccatggtcaggatggagccattctctctcaagtcatgtcttttgccacattccatcaaggatcagaacacgggcagctggactcgtttcgtaaatgattgtggtaccgagcttatccgtctccagataagagagcacaaggcgaagaatagcatggccgtcgttcgagaattggttggagtattgaagtcaacaaaaaagcaaattcaacttgcagaattcaaggaaaacaagtggaccctaaaagactccaacttgccaataagtcatggcactgatggcagtctactcgatctcaaaggtgacaaccatctgatcaagctttatcggggaaggaaactggaatacgagcgcaaatgttgcagcgctcactctgaggacgtatcagctgttactgctgtaaagttctgtgctgaacatccatatggcaaagccgttgccttgctagacactgaagctcagcttatcatggtgaacgaggattggctcctacttccatggatctccatatcagtcctgtttatggacggcgatggcggtacgaaacttggcggcggtgccatggttcagaaaggtacagtgtttggatccgacactagcatggtgctagagacacagaccgtcggagcagggagcgtggcatccaatctagcacaatgtggcacttgcagcgccgtgttcggtggtgatgataaagaaatggcgaactgcaaggttgagcatgcgagctctggcgcttctcgcacggttgttgcaagtggtgagaatgggcacactgagactgctggctgtggaggcggctgtggtagcaattgtggacccatgatggctgaagaccccaaggccggcaatgccaagtccggaggctgtggttcggggtgtggtggtggctgcggtggcgcgggaggttgtgggaccatggccaacgaaggccaatccaggtccggaggtgttggcaccttgttgagctccaacgccatgggtggtgagggccagcaggcccattcagctggctgtggctccggctgtggtggtggctgcggcagcggcatggtcatcgaaggctccaaggttaacaacgttaacgccatgtccggcggctgtggctctggttgtggtggtggttgcggcagtggcatggtcatcgaaggctccaaggccaacaacgccatgtccggtggctgtggctctggttgcggtggtggatgcggcagcggcatgctcatcgaaggctccaaggccaacaaagccatgtccggcggctgtggctctggttgtggtggtggttgcggcagcggcatggtcatcgaatgctccaaggccaacaacaccatgtccggcggctgtggctctggttgcggtggtggttgcggcagtggcatggtcatcgaaggctccaaggccaacaacgccatgtccggcggctgtggctctggttgtggtggtggttgcggcagtggcatggtcaacgaaggctccaaggccgccaacaccatgtccggcggctgtggctccggttgcggtggtggttgcggtgccctgttcaacgctagcactgctgccggagagggcctgcacaataagtcggctgggtgcggcggcggcgggtgcggctccgggtgcggcggtggcggcggctgtggtagcggcatggctatcgaaggcttcaaggccaaccacgccaagtctggtggctgcggctctggctgcggtggtggtggctgcggcaccctgttcagctccagcgctgcggccagccaaggccagtccagatccggcggctgcggctctggctgcggtggtggaggctgtggcactggcagcatggtcgctgaaggctccaacggcgggaacgccaagtccggcggctgtggcggcggttgcggtggcggaggtggctgcggcggcggaggctgtggcgggggttgcggcgccgtgttcaacgcatgatctcggtggagtggaggcatttgtgcagacatgcagtcgtcgtcgtctactgctagataccacatgctacagcatactgtgtattgctgtgcataatctactaaataaaaggaatgaataaacaatggatggatcggctgcctccgtggcgtttctgcaaacgaaaaatctcggtgttgttgggtgca

SEQ ID NO: 117827 - DNA, 1742 bp, Zea Mays
gacaaatccacgtccgtccatctagagcgagcgagagagagaggaagcttctctgattccgcggttcggctcgcccggccatgatagagataaagcaatgattcgctccggctagcatcgcatctgatcgatcactctcaatcccctgcagctcccgcccacccacccacaggcgtcgctctcgccggagctgcagcggcgacgcgggcctcggcgcagcgggatctcccaccctccgcccaccgtcgccgcctcgccggccgacccaggcagcgcagcgcaacgatcggtcacaaacaagaacgaccaaggcgcgcccctcaagcggcgtcgtcgtcctcgtcctcgtcccccccgagaccccgagcgcggaggaaaaagtcaacccggatccatccacgagaagagatggggtcgttcaaggggcacgtgctcccgggcacgctgttcctggcggtggggctgtggcgggtgtggtcgtcggcggcgcggcacgccgcggacccgtcgtcgttccgggtgcgcgcgtggagccccgcgccggcgcccgggccggcgcggctgctggagctctacgtcgtggcgggcggcgcgctggcggacatgtgcgtggaggtgctctactccacgcacctccggatattcgccggcggcgaggtcaacccggcgcacctcaacgacctcgagcacggcggcatgctgctcatgttcttcctcttcggcgcgctcgctctcgcgtcccagctctggcccaggcacttcccgctgacggacggagcgctgtgcctggtggcggcgacggcgttcacggcggagctggtgctcttctacttccactccacgacgcacatgggggctggagggctactaccactacctgctggtgctgctggtgggcctgtgcgtggccgccgccgtcctcggcgcgctcctgccggacagcttcccggccgacctggcctcgggcgtcctcgtcgcgctgcaggggctctggttctaccagacggcgctggcgctgtacgggcccatgctgcccgcgggctgcgcccgcgacgccgacgcccacgtcgagtgccgctcgcgcgccgcgcaggagcgcgccgagcagctcgccatctcccagctcttcgccctcgtgctcctcgccttcctctacgcgctcgggtgctacgccgtcgctgccgccaggtacgggcaacccccggagctggccgtggttcgtcataggcacgccgcggccgtggagctggagtgccggcagggtgatgacgctggcgcgctggaggagtgcgcgatctagtggccaggccagtggtgatggctgctctggatggagtctgctggactctgccttttgggtttggtgtagtagccgtataggaaattcagatttcatagtacatgcgtgggcagaagtagcttgcagcttgttcgctgcggcttgctgcggctgcaatccggctgcggctgcggcttctacagtatttttctctctatggattgcagctgcagcagtccaaacagctgcaacagtgtcggcttgtagccagccgaacacacccttggagttttcaggctttcgatatcagggagggcagggcaggcagggagtgtacatgttcggattaactatcaccaaagcttttgggtttcatttcacgagttgcttaacttatgctgtaactgttactcatgtcagaggagcgatacatagaatgaaaggaatatacttgttcgtaaaa

SEQ ID NO: 117828 - DNA, 1069 bp, Zea Mays
tcagtagttaattcatcgcccataatattttgagcattcagaaacacacaaagggaagtgcactagcaacttcctaacaacaatggctaccaagatattagccctccttgcgctcctttcccttttagtgagcgcaacaactgcattcattattccacaatgctcacttgctcctaatgccattattccatagttcctcccatcaattacatcaatgggcatcgaacaccctgttgtgcaagcctataggctacaacaagcgcttgcggcgaacgtcttacaacaaccgtttgcccaattacaacaacaatccttggcacatctaaccatacaaaacatcgcaatgcaacaacaacaacattttgtgccagcactgagccaactagccacggtgaaccctgccgcctacttgcaacagcaactgcttgcatccaacccacttgctctggcaaacatagctgcttaccagcaacaactacagttgcaacagtttctgccagctctcagtcaactagccatggtgaaccctgccacatacctgcaacagcaacaactgctttcatctagcccactcgctgtgggcaatgtggctacatacctgcaacaacagctgctacaacagatcgtaccagctctcagtcagctagctgtggcgaaccctgctgcctacttgcagtagcttcttccattcaaccaactagctgtggaaaacactgctgtatacctgcaacaacgacaacaactacttagtccactagtagtggctaacccattggtcgcagccttcctgcaacaacaacaatttctgccataaaaccagatctctttgatgaaccctgccttgtcatggcatcaaccgatcgttggaggtgccatcttttagattacaaatgagatgtacttgataacattgccctcataccggcatgtgcaacttcctataaataatcaatatattgattgagatttatcttgatcttttcttaactatgttcatcatttaaataattgaaacatcaaatcaaaattatatacgcatgattggtcaatacatagacaatacaatatt

SEQ ID NO: 117829 - DNA, 1077 bp, Zea Mays
ctcccaaatcagtagttaatccatcgcccataatattttgagcattcaaaaacacacaaagggaagtgcactagcaacttcctaacaacaatggctaccaagatattagccctccttgcgctcctttccctttcagtgagcgcaacaactgcattcattattccacaatgctcacttgctcctaatgccattattccacagttcctcccatcagttacatcaatgggcatcgaacaccctattgtgcaagcctataggctacaacaagcgcttgcggcgagcgtcttacaacaaccgtttgcccaattacaacaacaatccttggcacatctaaccatacaaaccatcgcaacacaactagagcaacagtttgtgcccgcattgagccaactagccgcagtgaaccctgtctcctacttgcaacagcaactgcttgcatccaacccacttgctctggcgaacacagccgcataccagcaacaactacagttgcaacagtttctaccagctcttagtcaactagccatggtgaaccctgccacatacctgcaacagcaacaactgctttcatctagcccactcgctgtgggcaatgcggctacatacctgcaacagcagctgctacaacagatcgtaccggctcttagtcagctagttgtggcgaaccctactgcctacttacaacagcttcttccattcaaccaactagatgtggcaaactctgctgcgtacctacaacagcggcagcaactacttaatccacttgcagcggctaacccattggtcgccgccttcctgcaacagcaacaatttctgccatacaaccaaatctctttgatgaaccttgccttgtcaaggcagcaaccgatcgttggaggtgccatcttttagattacaaatgagatgtacttgataacattgccctcataccggcatgtgcaacttcctataaataatcaatatattgattgagatttatcttgatcttttcttaattatgttaatcatataaataattgaaacatcaaatcgtaattatatacacatgattggtcaaaacataggcaatacaatatt

SEQ ID NO: 117830 - DNA, 819 bp, Zea Mays
aaatcagtaattaatccgtcacctataatattttgagcattcagaaacacacctagcgaagcgcactagcaacgacctaacaacaatggctaccaagatattatccctccttgcgattcttgcccttttagtgagcgcaacaaatgcgttcattattccacaatgctcacttgctcctagtgccattattccacagttcctcccaccagttacttcaatgggcttcgaacacccagttgtgcaagcctacaggctacaacaagcgcttgcggcgagcgtcttacaacaaccaattgcccaattacaacaacaatccttggcacatctaacaatacaaaccatcgcaacgcaacagcaacaacagttcctaccaacactgagccacctagccatggtgaaccctgccgcctacttgcaacaacaactgcttgcatccaacccaattgctctggcaaatgtagttgcaaaccagcaacaacaacaactgcaatagtttctgccagtgctcagtcaactagccatggtgaaccctgccgcctacctacaacagcaacaactgctttcatctagcccgctcgctatggccaatgcacctacatacctgcaacaacaattgttgcaacatattgtaccagctctgactcagctagctatggcaaaccctgctgtctacttgcaacagctgcttccattcaaccaactgactgtgtcgaactctgctacgtacctacaacatcgacaacacttacttaatccattggcagtggctaacccattggtcgttgccttccaacagcagcaacaattgctgccatacaa

SEQ ID NO: 117831 - DNA, 957 bp, Zea Mays
ctgttgtttggaaaaaagacaaaatccaaaaaaatatatatgagatctcacttgtataaatagctcccaaatcagtagttaatccatcacctataatattttgagcattcagaaacacacctagggaagcgcactagcaacgacctaacaacaatggctaccaagatattatccctccttgcgcttcttgccctttttgtgagcgcaacaaatgtgttcattattccacaatgctcacttgctcctagtgccattattccaaagttcctcccaccagttacttcaatgggcttcgaacacccagctgtgcaagcctacaggctacaacaagcgcttgcggcgagcgtcttacaacaaccaattgcccaattacaacaacaatccttggcacatctaacaatacaaaccatcgcaacgcaacagcaacaacagttcctaccagcactgagccacctagccatggtgaaccctgccgcctacttgcaacaacaactgcttgcatccaacgcacttgctctggcaaacgtagttgcaaaccagcaacaacaatagctgcaactatttctgccagcgctcagtcaactagccatggtgaaccctgccgcctacctacaacagcaacaactgctttcatctagcccgcttgctgtggccaatgcacctacatacctacaacaacaattgttgcaacatattgtaccagctctgactcagctagttgtggcaaaccctgctgcctacttgcaacagctgcttccattcaaccaactgactgtgtcgaactctgctgcgtacctacaacagcgacaacagttacttaatccacttgcagtggctaacccattggtcgctgccttcctacatgtcacacccggttttaaaaaggcaaaccgaatgcgaaccatgtacgtgccaggatcagttattcacgtacacagcagttacataatatggaca

SEQ ID NO: 117832 - DNA, 850 bp, Zea Mays
gctcccaaattagtagttaaccatcacccataatattttgaacattcagaaacacacctagcgaagcgcactagcaacgacctaacaacaatggctaccaagatattatccctccttgcgcttcttgccctttttgtgagcgcaacaaatgcgttcattattccacaatattagttatactcttaatgtcacgatgtatatgtttgattaaattgtttaatagatataatcaaagataaataacttgcatggctccgtaggatattatgtgtatcttgttcatgatcactaatggtcctcataggcaccatttgatttgctgctcccattgtctcaatttccattgtattgtcatcgttgacccccgacgctcgaaattctgcaggtggtgttacaatatgtctccgtggactcgtagcacagtttggagatttaagtcttagggtgagcgctgttggtagaccactgtatgtgtctgcacgacggccaccatatttgactttttattttataaaccgatgtatttatacaaatattaatgtacctgatgcagctctgtgcatgatgcagaagaaacatcaccagtttcttcttctccaccgtcaaccatgggtcaacaatgcagcgacgccgccagttccctttcttatatgcaccgctctgtctagtctcgggtagccatgtttacgctattttttgtggtcatttacggtctataaagtttgttcctgcatgcatggagatattatcggagacgtgacaactacccgatagattttatctcggtttgttgaaacaattttgtatttactcaactaaatgaaaccagttacgcaattttctgtatata

SEQ ID NO: 117833 - DNA, 926 bp, Zea Mays
acgcttgcgcgtacatttcattttttccatcaattcagccgaaaccgccaccttaaattaggatatattattttcccccaaaacaaaccctaaccggtcggcccaattctcacgcgctcgccacagatctagccctgcctacagcgctctcgctgctgcacgtcccgttcacgtcgtcgtccgcccctggcccttgcctcaccgactcgtggccgtcggcagctccacgtgggacacggccacgcctgacgcctccacctccacgactcagctgacggctcctctccatgggacggtgcatgacgacgccatggcggttcaccggctccaaccttccccctccggcctacagtcctccaccgtccggtcgccagtggtcctccatgggccatggctgacgggtgcacgcaccgtttcgccttttccagtggtaatacttgacagagaaatcctgaaccaagcgcaaaccttctgcaagacctggtaacttattttaggggctagaaataggcgacgacagttcaggccttgttttttacaccaatccaaccctggattagcaatgatttttatgcagctcttgtttgttacgactactcatggcaccatttatgcatacatctgaactatttatgctgttgatatgtttctagtgtggcaatgatttttttacatatagatgcttaccaaaagttcaaaatctttccggtcggtagcagtagaagcagcacacccaatttgtcatacactctgtaatttttatttcctaaatatgtctttttatgctaatttgaatacgctattacgcccaattactagatcgcgcgtatgctccattttgtaaacacgtagaccaccaaattgtacattttttatgttctttttatgcttttattctgagttgaattggtcctcacatgatcatg

SEQ ID NO: 117834 - DNA, 869 bp, Zea Mays
atgtggagaggaagtgattggaaatcatctcttcctccattagaaaatagttatgaagtgacaaaggtgcaagaaagttttagtggcaaagaatctaatgaaaagaactggaacttggatgaaggtcaagaaaaatttaaagattccactgacagtgatatggtactgaattctgcaaaggatgttcctgcattgttccattctacaggtatatctagaactgaaccctcagcagacattgcattggaatattccccattaaatccagtatgtgatattatggatccatccctgaactgccgaagtatcccaacaaacaaatgtgaaagtagagctctggtagagaagtcagaacattgtccgaatgattataatttggaaatgaaggggaaaagaaacgatggtacaaaatgtacagttgttctaaatagcggttctaaagtagagggattgttatgtcttttggagcaagccattcacagtggcagggcacttgttctgagtgaagatgaacttgctgattcagatctggtctatgaaaagtctgttgcttttagaaagtcaattctgcgaagactggtttttgagaatactcgaaggaagtccagtgccaggagaaatgtgccagacaatcatgcaagaactaaaacacatattatagcaaataaaatgttgagcagtcctgttgaaaataaatttatcgttaatggaggatctgcaatgcagacaattgaccatggacaagagtgtctttctggtgttgttcatcaaggtaccttaagagtagatgaactagcaaagttactagcttgagaggtgattgctcttttatcaaccacatagaccagtatcaacatcctttgaaacat

SEQ ID NO: 117835 - DNA, 1034 bp, Zea Mays
tagttaatccatcacctataatattttgagcattcagaaacacaccaagcgaagcacattagcaacaacctaacaacaatggctaccaagatattatccctccttgcgcttcttgcgctttttgcgagcgcaacaaatgcgttcattattccacaatgctcacttgctccaagttccattattacacagttcctcccaccagttacttcaatgggcttcgaacacccagctgtgcaagcctataggctacaacaagcaattgcggcgagcgtcttacaacaaccaatttcccagttgcaacaacaatccttggcacatctaacaatacaaaccatcgcaacgcaacagcaacaacaattcctaccagcactgagccacctagccatggtgaaccctgccgcctacttgcaacagcagttgcttgcatcaaacccacttgctctggcaaacgtagttgcaaaccagccacaacaacagctgcaacagtttctgccagcgctcagtcaactagccatggtgaaccctgccgcctacctacaacagcaacaactgctttcatctagcccgctcgctgtggccaatgcacctacatacctgcaacaacaattgttgcaacagattgtaccagctctgactcagctagttgtggcaaaccctgctgcctacttgcaacagctgcttccattcaaccaactgactatgtcgaactctgctgcgtacctacaacagcgacaacagttacttaatccactagcagtggctaacccattggtcgctgccttcctacagcagcaacaattgctgccatacaaccagttctctttgataaaccctgtcttgtcgaggcagcaacccatcgttggaggtgccatcttttagattacatatgagatgtactcgataatggtgccctcattccggcatgtgtttcctagaaataatcaatatattgattgagatttatctcaatatatttctgaactatgttcatcatataaataattgaaaacatcaaatcgtaattataaactcat

SEQ ID NO: 117836 - DNA, 1031 bp, Zea Mays
aatagctcccaaatcagcagttaaccatcacccataatattttgaacatttagaaacacacacctagcgaagcgcactagcaacgacctaacaacaatggctaccaagatattagcccttcttgcgcttcttgccctttttgtgagcgcaacaaatgcgttcattatttcacaatgctcacttgctcctagtgccattattccacaattcctcccaccagttacttcaatgggcttcgaacacccagctgtgcatgcctacaggctacaacaagcgcttgcggcgagcgtcttacaacaaccaattgcccaattacagcaacaatccttggcacatctaacaatacaaaccatcgcaacgcaacagcaacaacagttcctaccagcactgagccacctagccatggtgaaccctgccgcctacttgcaacagcaactgcttgcatccaacccacttgctctggcaaacgtagttgcacaccagcaacaacaacagctgcaacagtttctgccagcgctcagtcaactagccatggtgaaccctgccgcctacctacaacagcaacaactgctttcatctaccccgctcgttctggccaatgcacctacatacctgcaacaacaattgttgcaatagaatctaccagctctgactcagctagctatggcaaaccctgctgcctacttgcaacagctgcttccattcaaccaactgattgtgtcgaactctgttgcgtacctacaacaacgacaatagttacttaatccactagcagtggctaccccattggtcgctgccttcctacagcagcaacaattgctgccatacaaccagttctctttgatgaaccctgtcttgtcgaggcagcaacccatcgttggaggtgccatcttttagattacatatgagatgtacttgataatggcgccctcataccggcatgtgtttcctagaaataatcaatatattcattgagatttatctcgatatatttctgaactatgttcattatataaataattgaaaacatc

SEQ ID NO: 117837 - DNA, 729 bp, Zea Mays
atggctactaagatattatccctccttgcgcttcttgccctttttgttagcgcaacaaatgcgttcattattccacaatgctcacttgctcctagtgccattattccacagttcctcccaccagttagttcaatgggcttcgaacatccagctgtgcaagcctacaggctacaacaagcgcttgcggcgagcgtcttacaacaaccaattgcccaattacaacaacaatccttggcacatctaacaatacaaaccatcgcaatgcaacagcaacagcaacaacagttcctactagcactgagccacctagccatgcaacaacaacagctgcaacagtttctgccagcgctcagtcaactagccatggtgaaccctgccgccgacctacaacagcaacaactgctttcatctagctcgctcgctgtggccaatgcacctacatacctgcaacaacaattgttgcaacagattgtaccagctctgactcagctagctgtggcaaaccctgctgcctacttgcaacagctgcttccattcaaccaactgactgtgtcgaactctgctgcgtacctacaacagcgacagcagttacttaatccactggcagtggctaacccattggtcgttgccgtcctacagcagcaacatttgctgccatacaaccagttctctttgatgaaccctgtcttgtcgaggcagcaacccatcgttggaggtgccatcttttag

SEQ ID NO: 117838 - DNA, 1074 bp, Zea Mays
gctcccaaattagtagttaaccatcacccataatattttgagcattcagaaacacacctagcgaagcgcactagcaacgacctaacaacaatggcttccaagacattatccctccttgcgcttcttgccctttttgtgagtgcaacaaatgcgttcattattccacaatgctcacttgctccgagtgccattattccacagttcctccctccagttacttcaatgggcttcgaacacccagctgtgcaagcctataggctacaacaagcgcttgcggcgagcgtcttagaacaaccaattgcccaattacaacaacaatccttagcacatctaaccatacaaaccatcgcaacgcagcagcaacaagcactgagccacctagccgtggtgaaccctatcgcctacttgcaacaacagctgcttgcatccaacccacttgctttggcaaacgtagctgcataccaacaacaacaacagttgcaacagtttctgccagcgctcagtcaactagccatggtgaaccctatcgcctacctacaacagcaacaacttctttcatctagcccgctcgctatgggcaatgcacctacatacctgcaacaacagttgttgcaacaacagttgctgcaacaaattgtaccagctcttactcagctagctgtggcaaaccctgctgcctacttgcaacaactacttccattcaaccaactgactgtgtcgaactctgctgcgtacctacaacagcgacaacagttacttaatccactagcggtggctaacccattggtcgctgccttcctacagcagcaacaattgctgccatacaaccagttctctttgatgaaccctgccttgtcgtggcagcaacccatcgttggtggtgccatcttttagattacatatgagatgtactcgataatggtgccctcatagcggcatgtgtttcctaaaaataatcaatatattgattgagatttatctcgatatatttctgaactatgttcatcatataaataattgaaaacatcatatcataattataaacttatgcttggtcaatacatagacaataca

SEQ ID NO: 117839 - DNA, 1079 bp, Zea Mays
gctcccaaatcagtagttaaccatcacccataatattttgagcattcagaaacacacctagcgaagcgcactagcaacgacctaacaacaatggctaccaagatattatccctctttgcgcttcttgccctttttgtgagcgcaacaaatgcgttcattattccacaatgctcacttgctcctagtgccattattccacagttcctccctccagttacttcaatgggcttcgaacacccagctgtgcaagcctacaggctacaacaagcgcttgcggcgagcgtcttacaacaaccaattgcccaattacaacaacaatccttggcacatctaaccatacaaaccatcgcaacgcaacagcaacaacaatttctaccagcactgagccaactagctgtggtgaaccctgtcgcctacttgcaacagcagttgcttgcatccaacccacttgctctggcaaacatagttgcataccaacaacaacaacaattgcaacagtttctaccagcgctcagtcaactagccatggtgaaccctgccgcctacctacaacagcaacaactgatttcatctagccctctcgctgtggttaatgcacctacatacctgcaacaacagttgctgcaacagattgtaccagctctgactcagctagctgtggcaaaccctgctgcctacttgcaacagctgcttccattcaaccaactgactgtgtcgaactctgctgcgtacctacaacagcgacaacagttacttaatccactagcggtggctaacccattggtcgttgccttcctacagcagcaacaattgctgccatacaaccagttctctttgatgaaccctgccttgttgtggcagcaacccatcgttggaggtgccatcttttagattacatatgagatgtactcgataatggtgccctcatagcggcatgtgtttcctagaaataatcaatatattgattgagatttatctcgatatatttctaaactatgttcatcatataaataattgataattgaaaacatcaaatcgtaattataaacttatgcttggtcgatacataaacaataaaa

SEQ ID NO: 117840 - DNA, 984 bp, Zea Mays
atggctaccaagatattatccctctttgcgcttcttgccctttttgtgagcgcaacaaatgcgttcattattccacaatgctcacttgctcctagtgccattattccacagttcctccctccagttacttcaatgggcttcgaacacccagctgtgcaagcctacaggctacaacaagcgcttgcggcgagcgtcttacaacaaccaattgcccaattacaacaacaatccttggcacatctaaccatacaaaccatcgcaacgcaacagcaacaacaatttctaccagcactgagccaactagctgtggtgaaccctgtcgcctacttgcaacagcagttgcttgcatccaacccacttgctctggcaaacatagttgcataccaacaacaacaacaattgcaacagtttctaccagcgctcagtcaactagccatggtgaaccctgccgcctacctacaacagcaacaactgatttcatctagccctctcgctgtggttaatgcacctacatacctgcaacaacagttgctgcaacagattgtaccagctctgactcagctagctgtggcaaaccctgctgcctacttgcaacagctgcttccattcaaccaactgactgtgtcgaactctgctgcgtacctacaacagcgacaacagttacttaatccactagcggtggctaacccattggtcgttgccttcctacagcagcaacaattgctgccatacaaccagttctctttgatgaaccctgccttgttgtggcagcaacccatcctgcttccattcaaccaactgactgtgtcgaactctgctgcgtacctacaacagcgacaaccattacttaatccactggcagtggctaatccattggtcgttgccttcctacagcagcaacaattgctgccatacaaccagttctctttgatgaaccctgccttatcgtggcagcaacccatcgttggaggtgccatcttttag

SEQ ID NO: 117841 - DNA, 1138 bp, Zea Mays
aaaaaaagacaaaatccaacaaaaatattcgagacctcacctatataaatagctcccatatcagtagttaatccatcacccataatattttgagcattcagaaacacaccaagcgaagctcactagcaacgacctaacaacaatggctaccaagatattagccctccttgcgcttcttgccctttttgtgagcgcaacaaatgcgttcattattccacaatgctcacttgctcctagtgccattattccacagttcctcccaccagttacttcaatgggcttcgaacacctagctgtgcaagcctacatgctacaacaagcgcttgcggcgagcgtcttacaacaaccaattgaccaattgcaacaacaatccttggcacatctaaccatacaaaccatcgcaacgcaacagcaacaacagttcctaccagcactgagccaactagctgtggtgaaccctatcgcctacttgcaatagcagatgcttgcatccaacccacttgctctggcaaatgtagctacataccaacaacaacaattgcaacagtttctaccagcgcttagtcaactagccatggtgaaccctgccgcctacctacaacagcaacaactgctttcatctagccctctcgctatggttaatgcacctacatacctgcaacaacagttgttgcaacagattgtaccagctctgactcagctagctgtggcaaaccctgctgcctacttgcaacagctgcttccattcaaccaactgactgtgtcgaactctgctgcgtacctacaacagcgacaaccattacttaatccactggcagtggctaatccattggtcgttgccttcctacagcagcaacaattgctgccatacaaccagttctctttgatgaaccctgccttatcgtggcagcaacccatcgttggaggtgccatcttttagattacatatgaaatgtacttgataatggtgccctcataccggcatgtgtttcctagaaataatcaatatattgattgagatttatctggatatatttttgaactatgttcatcatataaataattgaaaacatcaaatcgtaattataaactcatggttggtcaatacatagacaatacaatattacttcatcatccc

SEQ ID NO: 117842 - DNA, 1853 bp, Zea Mays
gcccaacaccccgccaactacccccaagtttgatcgagctctctccacgcaccaccagcatacttgcaatggctttcatcgtgctccttgctgctgcagcagcggcaatagccttggttctccaccacctcctcagtgcccaaaaaaagcgcagcagcaggtctgcaggctcgacgtcctacagcctaccgcccggcgacctcggcgtccccgtcatcggccagaccttctccctcctccacgcgctgcgcagcaacacggacgaccagtggttcagggcgcggatcaagaggtacggcccggtgtccaagatgtcggtgctgggctcgccgacggtgctgctggccgggacggaggccaaccacttcatattcaccaaccagggcctcatcctcacgcagacgcgcgcgctccgctccctcctccgccgctccatcctcacgctcaccggcgacgacctgaagcaggtgcgcagcgcgctgcagggctacttgcggcctgagatggtccgggggtacgtggggaagatggacgccgaggtcaggaggcagctcaagctcaactgggttggtcgcagcactgtcaacgtcctgccgatggcgaggagccttacactaggggtcatctgctccgtcgtcttcggcgaggaagcagccgccatagtagacgccctagctaccgacttccagcagctaggtgacgcgatcctgtcgttcccagtcaacatccccttcaccaggttcggcaagggcatgcggtcgagcgccaagatcagggaggccatcacgaagttcgccaggaagaaggaggaggagtactccttgctgctgtcgcaggacgaagggtgcaccaccgccactgctactgctacgacttcagccgccaccgacttcgtcacctacatgctcctcctgcgctccaggggcgcgcactccctctcgctggcggacatcgtcgacaacgtgatgggcatcgtcatcggcgcgcacggcaccacctcgacgctcatcaccttcatggtgcgccacctcgccaacgagccagacgtcctcgccaagatcacccaagaacaagatgagatcgctggtagaaacggaagagacggtgctctaacatgggaagacgtttcgagcatgaagtacacatggagggcggcgctggagacgctgcgcacggtgccgccggtgttcgggagcttcaggactgccaccaaggacatcgaataccagggctacctcatccccaagggctggaaagtcttcgcatcccaaagcatcacgcacatggatcccaggttcttcgccgaacccaccaagttcgatccgtcccgcttcgagaagcgctcgtcgatcccgccgtacagcttcctgccgttcgggggagggccaaggatgtgccctggaaccgagttctccagggtggaaaccatggtggccatgcactatctagtgacgcggttcaggtggaagctgcgcttcgaagacgaagcctacaacaaggatcccaaacctacgcctgttttcggatgtccagtggaactggagctgagaaaaacccctgcaatataatagctgatggtgcttgaaatgatgctttaatattgtacgcccattgattgtaaaatgtacaggctgcttgtttggctgtggccaaaccattgttgtccgtccagcaatacttggcctaagaagagtgcatggatatgtttgggtgtgcagttttcatgtgtagatgtatatacactgaagaagtagatatatatataggtgtcacttgtaattagtttaggtttctatatatgttgtgattgtgtaatgtcaatggcataatattaggcagatcatcaaaactta

SEQ ID NO: 117843 - DNA, 1919 bp, Zea Mays
aacgcctccgctttcattcttctcttcccctcggcttcgagggttatttttatttctttctttccttttttcgtttttattttctttttattttcttttttcttccttttctcgttcccccgttggggttttgagctccgacgaaccctaataatcgccggggaccggcggccgatcgcccgccggcatgcaccatcagcagcggatgaagcaggcggcggcggccgcggccgcggcgcagcagcagcagctgatgcagcaggcactgctcctgcagcagcagcagcagtcgcaggcgcagccgcccttgttccccgggcaccacccgcaccccggcctcctcgccgcaccacagatagagcccatagtcagtggaaacctgcctcctgggtttgattcaagtacatgccgcagcgtgtatgttggcaatatccatcttcaagtgacggacacagtactgcaggaagtcttccaaagcattggtccagtagaagggtgcaagctcatcagaaaagaaaagtcatcctttggtttcattgactactatgaccgcagatatgctgcactagcaattttatctctcaatggcagacaactgtatggtcagccgattaaagtcaattgggcatatacaagtactccgagggaggacacatcaggtcattttaatatttttgttggggatctttgcccggaagtcactgatgctactttgtttgcatttttctctggatactctacttgctcagatgctagggttatgtgggaccagaaaacaggacgatccagagggtttggttttgtttctttcaggaaccagcaggatgctcaaagtgcgataaatgacttgaatgggaagtggcttgggaaccgtcaaattcgttgcaattgggcaacgaaaggtgctaatgctggtgaagagaaacagattctggacactaaggttgacctgtcaaatggttcatcagaatctggaaaagagaatccaaatgaagatggtcctgaaaataaccctcagtttactactgtttatgttggcaatcttcctcacgaggctaccatgaatgatgtgcacctgtttttccattcactgggggctggttcaattgaggaagtccgtgtaactcgtgataaaggctttggctttgtgaggtacagcacccatgaggaggctgcattggcaattcagatgggtaatggccaacttattggcgggaggcagataaagtgttcctggggaagcaagccgactccacaagggacagcatccttgcctctgcctcctccagcactggcaccattctccactggagtgtcggccaccgacttgctggcctaccagcgcctggctctgagcaagatggcctcgaaccacccagccctaatgggtcagcactccttgaagcaggtcgctgcattggggattggcggcggagccagccagtccatctatgatggcggcttccagggcatcaatactgtcaccggcacaacttccgcccagcagcagcagcagctcatgtactactagagtactactactccatgaggcacccagctacctatcccttcaagaggaaggcgaggatgaatggatgatgccccttactatacccctatacatatagtagatgatgaagtcattactaggaccttttttccctaatctttttaagacccatctaagtaacatgtcctctctatgctagctatataattgtgtatttctggatacataaagccaaggttcttagtagtataatcttctgtgtttgaccatcttttattgtgatgtatggattttcgttggcaattaccgtatgtcactggataggggtggtaatggatcgtgatccaaatgcttcttcacaatattgtagagtcctaaataaatttcagtttaaaaatgaatagaaata

SEQ ID NO: 117844 - DNA, 807 bp, Zea Mays
gccgggcttcgctcagcgtctcgcgggcatcccgtggcggagcatcgcgaggcaaggcctctcccgcgtgttcctggtggcgaaggcctactgcgtgatccacgtcgtcaacgaccacctctgctcggtgaccttagtgcggggcgccagcatgctgccgtccctgaacctggcgggcgacgcggtggcggtggacagggtcagcgtgaggctcggccgggtcgcgccgggggacatcgtgctgatgatctcccctgaggacccgcgcaaatcggtcgtcaagcgcgtcgtcgggatgcagggggactccgtcacctaccttgtcgaccccggcaaaagcgactcctccagaaccgtcgtggtaccgcaagatcatgtctgggtgcagggtgacaatatctttgcttctaacgattcgaggcaatttggagctgtgccttatgggctgattacagggaagatcttttgccgggtttggccgccagagagttttggcgcaattgatgacgcaacgaagcagtcttaacgctgaggaggagccgaggaggtactgagagcacatggacccatattgtttgctcgcccccagagattctataatagccaactgcaggggggcccttccttgagctcgagagctttcgacgacctaccgcagcgcatttctacagcgaagcaaagagcgttgtgtgtcttgattgatgtcccgtgtttttacagttttggtgtgacaagttctgaaacccgtgtttttacaactacactacaacttcacatgcttattcgaaacatttgaactgatttgtc

SEQ ID NO: 117845 - DNA, 228 bp, Zea Mays
atggtgctgctgctgcagcagaagcagcgacgacttgcactgggcgcacatgcagatctgctgggtggtgcagaagccgccgacgtagcccttgtcctggcagcgggcgatgcagagcagtggcgcgtcgcggcactccgggacgatgctgcggaacagcgggcacatgcccttgccgtctgcttggtaattaatgtgaacccatccatccatcccagattaaattaa

SEQ ID NO: 117846 - DNA, 411 bp, Zea Mays
atgaggagccgtccaaggagagcttcgtgttccggagctcgtgctgcgaggctgctgaaccggcgaagggcgccgacgacgacgacgacggtcgctgccagcggaggagggacgtcggcacggagacgacgccgctgggcagctcgtgtcacacgccgctcaagagcgcgtccccggcgcggcacaacacgccggcgagccggtcgtcgggcccgctggtgccgtacgccggcggcggcggcgggacggacatctcggagctggcgggattccgcctcgccaagctggacctgggcgcgcggttcggcgcccacgccacgctcgtcggctggagctccaaggaggaggaagaggacgacgaggacgtgtccaagagcctcaggcacttcgaggccaccgtcggcgggatag

SEQ ID NO: 117847 - DNA, 341 bp, Zea Mays
ggtggaacgcttacttgtagttgtagctgctgctcctccgacggactacgaggagaggtcgagatgcgaggagcgcgagatggccgcctgcctggaggcggcgagggaggcctgcgctaagttcgcgaaggcaaaatgcgcggggccattccaggacgcaaggatcgcccacgagggcgtcctagcgaacacgggtttcgatgtgtggggggccgctgctgacaagagttcctcaacggcggcggcggccgcctgtgccctgaacggccagccgccgcgtgtgtagcccaggtcctggtggcgcgacaaactacagaagggagcaatgtatgtgcttggca

SEQ ID NO: 117848 - DNA, 2177 bp, Zea Mays
cctctgctgcacaagtagcttcggctcccggcagtaccgcaactcctcttccaccaaactccagaggcatccaacagcaggcgaggaaagcaagacacgcccacccacccgctccggcagccagcggctatgcagcagcagatgcccatgccgccggcgcccgctgccgccgcggcggcggcgcccccggcggccggcatcactaccgagcagatccagaagtatttggacgaaaataagcaacttattttggccatcctggaaaatcagaacttagggaagttggctgaatgtgctcagtatcaagctcaacttcaaaagaacctcttgtacctggctgcgattgctgatgcccaaccccagcctccgcaaaaccctgcaggtcgccctcagatgatgcagcctggtatagtgcctggtgcggggcattacatgtcacaagtaccaatgttccctccaagaaccccattaaccccacagcagatgcaggagcagcagcaacaacaacagtttcagcagcagcagcagcaagtgcaggctcttacatttcctggacagatggtcatgagaccaggcaccatcaacggtatgcagcagcagcagcctatgcaggctgaccctgcccgggcagcagcggagctgcagcaggcagcacctatcccagctgacgggcgaggaagcaagcaggacaccgcgggtggggcgagctcagagccttctgccaatgagagccacaagagcgccaccggagcagataccgaggcaggtggcgacgtggccgagaaatcctaagtcgagcagcctgggcagggcgaaaaataatgccttgtatactagcaacgaaagaaaaaaagagtctttgaatgacagctactagcccctaccagtttactgtgtggtttagatgatgtagaacaaagtttagattggtgatgatgtaaaccgtccaatattgatactgcgttcttacattgctgtagtcaattatatgaataatttcatataagcatgttgccctagtggattttacctatgttttatgagctgatgtaaccaaaaacactgagcagcttttaattcagtatggcaattctgcagagttttcaccaatctgataagctgctccacacaattaaccctaagaattaacccaagcggaagcatttcaatacattcactcatacagatagacaaacatttatcaatacatagatgacatgtttccttaacaagaaaatgtcgatgagcaactaaaaacaaaacgagatgaaacacaggacaacttttcatttccagtacactattaaaatcgggcccctagcatcgatgcctttacttcttgccttcgatagggagtatttccaatccagccatccattcaagtaatgcaagccatttctgagataaatagccattggtttctctccttgtctcctttggataaaagccctactgccgtcgccgctttctcgtaacttcctttgggaacttgagaggggctgggagcgtcatgaaagtagacttaaaagcaccttctgtcacagatttgcatcccaactggtcatagtatggtttaagattttggcgggtcattttaaggtcctcacatatgtcgctggggttggatctgaagtcatcggcaaaaagtgttaggaccaatatgtagttggtcagaagctcttttttctctgttggcatgacactggaccccggttctgtaaacatgaacagcagcctgcgatatacagcctgcggggttgctggtccatggcttatctggttttcatttctgcctttccatttgcgattggacatggagccattccgcgccaatagagataggagatgttggatgtaggaaagtatccaagcaaacctctttttatcttcaccctaatgcaagagaaaagttgtttcttttagaaaacatatggaaaacatccatgaacacgatgtattaacaaaataaaaaatggcataagagcaagaattgtctgccatcattttggcagccaaactgtcacttccaaaagaggcgcacacagagcagtgccattcaacttgtcaacattgcagtagcaatggtgtctgctacactgttatcagcatgttatacaagtaaaaacggtcatgctaaggatcaattataaactgtcacaagttcaataagaagaaaa

SEQ ID NO: 117849 - DNA, 1445 bp, Zea Mays
gcacaagtagcttcggctcccggcagtaccgcaactcctcttccaccaaactccagaggcatccaacagcaggcgaggaaagcaagacacgcccacccacccgctccggcagccagcggctatgcagcagcagatgcccatgccgccggcgcccgctgccgccgcggcggcggcgcccccggcggccggcatcactaccgagcagatccagaagtatttggacgaaaataagcaacttattttggccatcctggaaaatcagaacttagggaagttggctgaatgtgctcagtaagtatctttcggaactattttgtgagacacctcatttttccgtactagtttatatctatcaattgataagggtgtctgaattagtttaaccgtaatgctgtctaaaattctgatcctttgacgtgttaagtcattttgccgtcattttacatacaagtttcagctgttagttgagaaggatgcatgggcatttacaattcataatattgatgcattaaaacttaaatgatatgtttgtaattagtaccttcaatctttttgatgacttaaccgtctcatgtgtacttgctatcttcttcacaatgtatttccaatagcgttcatttcgtgaacttgtaggtatcaagctcaacttcaaaagaacctcttgtacctggctgcgattgctgatgcccaaccccagcctccgcaaaaccctgcaggtcgccctcagatgatgcagcctggtatagtgcctggtgcggggcattacatgtcacaagtaccaatgttccctccaagaaccccattaaccccacagcagatgcaggagcagcagcaacaacaacagtttcagcagcagcagcagcaagtgcaggctcttacatttcctggacagatggtcatgagaccaggcaccatcaacggtatgcagcagcagcagcctatgcaggctgaccctgcccgggcagcagcggagctgcagcaggcagcacctatcccagctgacgggcgaggaagcaagcaggacaccgcgggtggggcgagctcagagccttctgccaatgagagccacaagagcgccaccggagcagataccgaggcaggtggcgacgtggccgagaaatcctaagtcgagcagcctgggcagggcgaaaaataatgccttgtatactagcaacgaaagaaaaaaagagtctttgaatgacagctactagcccctaccagtttactgtgtggtttagatgatgtagaacaaagtttagattggtgatgatgtaaaccgtccaatattgatactgcgttcttacattgctgtagtcaattatatgaataatttcatataagcatgttgccctagtggattttacctatgttttatgagctgatgtaaccaaaaacactgagcagcttttaattcagtatggcaattctgcagagttttcaccaat

SEQ ID NO: 117850 - DNA, 81 bp, Zea Mays
cggcacccactcgaagcgcccctccagcgggcggtcgagggcgacgtcgtaattgtacctgcagagcgagggtgtgcggag

SEQ ID NO: 117851 - DNA, 2614 bp, Zea Mays
tactctctctctctttctcaccatgattggaacacacgtagcacgttctctcgtacgttcagccactgacgaaggctgccccgtacgatacatgcaccgccttctactccaccagctacatgaacctacccgacgtgcagaaggccatgcatgccaacgccagcggcttcaaagaatacccatggcactattgtagcatgcccatatacgataactggacgacgtacgatcccatcgtttccatgctgctcatctacaagctaggagctcattggagctggcctcaagatctgggttttcagtggtgacacggacactgcggtgccgctgagcgcgaccaggcgctagcagctctctcgccgccctgccctgggccttcccgtaaagaccagttggtacccctggtacatcgtcgtggcgaccgaggttggcggctggagcatggagtacgacgaagggctgagcctgcttggtcaccgtccgcggcgccgggcacgaggtcccgctgcaccaccgcccggagcaggcgctcttcgtgttccagcaattcctgctgggcgaacccatgccggccgaggtgatcgatcagggttgatttggtgacaagggaatcacgggaggattggagatgattgagggggaaatgaactaatttccccctcaattccctacaatcctttcggaatcccgggtcaccaaatcagctctcagtgtttttttttcagcgtactgtgttagctccacactgatctgaaacataggtaacgaaccagctgctcatggaatttgtgaactgatgaaagctggtgttggtttttcaggcaaagaatggcagcagcctcatcctccttcctgcttcctcccagtgagaagagaccgcctgctgatacgatggatctgatcaaccagataaggttcattccacgatcgaccgctgaataaaagctactatgaattgaactagtggttggcgcacgctctgcgcgcgtaattttttattgtaggatacttttatatgaggaagggatataaccaaacttgaattataacaatatacaattagtagtcttcgtgataaagaaagtttgaaaacaacaaaatggatcattgaaaaatatgtggaaaaaaatattagttgaacgtgtctacagccaaataagcctttaccagcataatacctgtttttcaaaaaaaaattgtttttgtgccacgaggttcggcggctgttgctacgaaggttctaggagcattacagacacgatacatgcacaagacagtagtgaacattgtaaaaaagacaacagttatatgttacaatgagttgctcacaatttgagtttaatgaagcacttcaattctgattggtgacattgatgttcatctgtgatatgcttattatactagagagtggtggcccaaacactaacataggctgatgggcacattgactttcagttaaatgtggctacatgttaacaacataggaagggttttaaagagaagttccaggataagaactgtgctgaaacattgaactttagattgaacattcgtgattaaagtgctcaaagcattgacttttcaagtcctgtatcattcgcctcaatctccatccacaatagaattacacatactgatctcagatggagcgcttatggtaaaatcatatatctgaatatactgttgcaaggtcatcataaaaaaggaagtctgcattataggagacaggtcggtatgcatgtgtggcaagttctaaaacataactccagctagcatgcatgctgatttatcaatactggcatgtgcatctgctaacctctgggcacggcgtctcggcgggcgacgagggggtagcgaagtcaggcgtacacgacgctggaggagcccaagcgaagtctccagcgcatccgccgccgctgcttcagcacgacctccttgccgaaccccaccacacgctccatggtgaccttgttccgctcacagagaggggcgtaaaacactgaaggaactgatagctattggtcatagcctggtttctcctccttggggttgtgggcacgtgaagtctgtggccaagaatgaaactaaaaagaacaggaggcttcccaggtgtccaggacaagatgggatggggagcgatgcggggagccagggagggagcgagtcacaacgaaagagcgatggggagcagcgggagagagggcgggcggacgacaccaggttcgaccggagattcgtatggtccaagagcgcggagacgacgatgggaatgaagactcgccgtttttcatggaggtcgtcgccctgtggaagctatcacccaagagagttctggagacatcgtgtcgtgtgtactgtgtggagtggaggcaatgaaacgactcgaagtcgacgatgtgttcgcgtgtccattgattgcagagcgatgtttcgaaaagcagcagggtcacgtggttgcagcgcacaatagcatcagaccgaaagaggtggttgccatcggccactgattctaggtggttgccatcggccactgattctggatcgaatggcgaagataaaataaagtgacgtggacgttggagagaagccgttttgaaccggctttaaagtatag

SEQ ID NO: 117852 - DNA, 590 bp, Zea Mays
tcgtacgttcagccactgacgaaggctgccccgtacgatacatgcaccgccttctactccaccagctacatgaacctacccgacgtgcagaaggccatgcatgccaacgccagcggcttcaaagaatacccatggcactattgtagcatgcccatatacgataactggacgacgtacgatcccatcgtttccatgctgctcatctacaagctaggagctcattggagctggcctcaagatctgggttttcagtggtgacacggacactgcggtgccgctgagcgcgaccaggcgctagcagctctctcgccgccctgccctgggccttcccgtaaagaccagttggtacccctggtacatcgtcgtggcgaccgaggttggcggctggagcatggagtacgacgaagggctgagcctgcttggtcaccgtccgcggcgccgggcacgaggtcccgctgcaccaccgcccggagcaggcgctcttcgtgttccagcaattcctgctgggcgaacccatgccggccgaggtgatcgatcagggttgatttggtgacaagggaatcacgggaggattggagatgattgagggg

SEQ ID NO: 117853 - DNA, 773 bp, Zea Mays
gacttttcaagtcctgtatcattcgcctcaatctccatccacaatagaattacacatactgatctcagatggagcgcttatggtaaaatcatatatctgaatatactgttgcaaggtcatcataaaaaaggaagtctgcattataggagacaggtcggtatgcatgtgtggcaagttctaaaacataactccagctagcatgcatgctgatttatcaatactggcatgtgcatctgctaacctctgggcacggcgtctcggcgggcgacgagggggtagcgaagtcaggcgtacacgacgctggaggagcccaagcgaagtctccagcgcatccgccgccgctgcttcagcacgacctccttgccgaaccccaccacacgctccatggtgaccttgttccgctcacagagaggggcgtaaaacactgaaggaactgatagctattggtcatagcctggtttctcctccttggggttgtgggcacgtgaagtctgtggccaagaatgaaactaaaaagaacaggaggcttcccaggtgtccaggacaagatgggatggggagcgatgcggggagccagggagggagcgagtcacaacgaaagagcgatggggagcagcgggagagagggcgggcggacgacaccaggttcgaccggagattcgtatggtccaagagcgcggagacgacgatgggaatgaagactcgccgtttttcatggaggtcgtcgccctgtggaagctatcacccaagagagttctggagacatcgtgtcg

SEQ ID NO: 117854 - DNA, 2121 bp, Zea Mays
gcaataagatataagagataattattcctgtactcaactatgataatgtcgtgtttacattttagctgttggtacatacaaacaaaactttgtttcaccataacaccactgttagcaaaaaaatctgagttcaaaaaggctcttccagctttcctaatgtggagaaaaccaccgaggtccatatctgcaaatgtaacatgaactgttaatatgatctttccttgttaatatgtcttttcaagtttgttatgactaccataacctaaagtctaaactgaatgcaaacttgagttagaagatcagattaccaaaataaaaatatcttgagttagaagatcagattatcccatgtgagtaagcataaaaatgatatcaatgttcataaatatatcccatgccagttatcccatgcaaaccaaacatacaaaataatagaaggtcaagttctatgctaagattcaccaaaataattggagcacagaaaggatgaattaaaacaagataaccagggtgtaaaaaaaattctactatcatggtgtaccttgtccatcattctgaaaacatagaaaaaatgattcaatggacgatttatttgatatcaatgcaaaaaaaattcaatctcagtagggataatgatttattagctccatacaataataaaggcatatataacagacagggaggataaaagactaatccatcaatgcatcagaacatgcagttagcatctccattacttttcctcgcatacctaaaaatatgcaggattagttgaacatctaggcacaattgaatactaggaaatatattctaaactctccctagaattcccaaaaattcttttatgcctccacatatatattgtataggtgccaacctgatcgtgtagataaaggtgatataaacattttcatgaccaattgttttaggcaatttataatcattgtttcatttagtttaatccagttcggtatatggcacacatggataaaaaacaaaatcatcagagaataactctaatcatgacgttggagtagctaagtgctcaacgcttggtcgatagtggaagcaggcaacagaaagtgtctaaatgtaattcaaactcacgcaatgatatgtaaagcatcatgagacaactgccaattggtagcaaaatgtgccgaaaggctccaacaaatgaggtaagcagaaatggcattcctttgaaatgattactcttgctgcgcaataggataaagtattagataatatagcaatggccaaaaagtaatagctcaacctgaagaaacacttcgagcaccctggtccagcacggcgaaataggatggcattcctttagcacggagaagacagtccacccgccagtgcccacccgctgtctccagcgaggatgagaactctgagatggtgctcaccacataaacattcttgtatttcttcacacatggcgcctccaccacctcatacatgagaagacagtcatgcagcaaccctatccagcgaacccccaataatccaaaacgaggtgaatgacaagacgagatggcagcatcgcgaggagtggagaatcgaaacgagggtggacgggatgaagcagacgcacccaccgtcgctggcaccggatctagcgcgggccttcagcacggcgccgtagtcgccgccaccggatctagcgtgggccttcagcacagtgtcgtagtcgccgccaccgctgtcctcttcctccacggcggcaccgtcctgcccttgcgacgcttgtccacccccagcagcatcacgcgaagccgattgggcgagaacccattgcccctgttacagcaaagcaagcgaggcacacggggcgtgtcgtccacgaccgtcgctaaatcatgtgtagggccatctcgcccagatctggctgacacagaacacctctgcctccaagcgccgccggagcaaagaaggaaccgatgccctagaagcggttcgcgagcgcccaggtgagctcgccgtcatatcgtcggctttgagggacgtgctgccatagtggaggcgggaggaggggtcggtggaggcagatgaactcatcggagtaggagcctgcggcggcgcggaacatcgtcgtgcgggcgcagatcgccc

SEQ ID NO: 117855 - DNA, 1780 bp, Zea Mays
aaaagcatgagaggaaagggccagagaaagtccaatcgctgctgcgggcgtgtaactcgaatgagagagagctattaataagtcatgtagaaaacgtgcaccttcaagctgagctaaaacctttcatttattttcaccattcatcctgttgcgaccatctttggattataaatagcttgccagagccagcggatccagcagagcacgagacacccaagaaacacacagaagcgaggagcactacttgttggttggattctcttcagtctagcagctagtccagttaagtttcagacacacatggggagcattggcagaggcacggccaactgcgccaccgtgccgcagccgccgccgtcgacagggaagctcatcacgatcctgagcatcgatggcggcggcatccgcggccttatcccggcgaccatcattgcgtacctcgaggccaagctccaggagctggacggcccggacgctcggatcgccgactacttcgacgtgattgccgggacgagcaccggcgccctgctcgcgtcgatgctggcggcgccggacgagaacaaccggccgctgttcgccgccaaggacctcaccacgttctacctcgagaacggcccaaagatcttcccacagaaaaagtatgctcatccatctctgttcttcttccatctatcgatcctacctaatggtgctgcactcactgcatatgcagggctgggttgctgacgccgctgaggaacctgctgggcctggtgcggggccccaagtacgacggcgtgttcctgcacgacaagatcaagagcctgacgcacgacgtcagggtggcggacacggtgaccaacgtcatcgtgccggcgttcgacgtcaagtccctgcagcccatcatcttctcgacgtacgaggccaagaccgacaccctcaagaacgcgcacctctccgacatctgcatcagcacgtcggcggcgcccacctacttcccggcgcacttcttcaagaccgaggccaccgacggccggcccccccgcgagtaccacctcgtggacggcggcgtcgcggccaacaaccccaccatggtcgccatgtccatgctcaccaaggaggtgcaccgccgcaaccccaacttcaacgccggcagccccaccgagtacaccaactacctcatcatctccgtcggcaccgggtcggccaagcaggcggagaagtacaccgcggagcagtgcgcgaagtggggcctcatccagtggctctacaacggcggcttcacgccgatcatcgacatcttctcgcatgccagttccgacatggttgacatccatgcgtcgatcctctttcaggccctgcactgcgagaagaagtaccttcgcatccaggatgatactttgactgggaacgcatcgtccgtggacatcgccaccaaggagaacatggagtctctgatatcgatcggccaggagctgctcaacaagccagtggcgagagtgaacatcgacacagggctgtacgagtcctgcgagggtgagggcacaaatgcacagtcgctagctgacttcgccaagcagctctctgacgagcgcaagctacgcaagagcaatctcaactccaactaataaatacctctcggtcacagcatgtgctctttctgcagattcaccgtttcttatttttaatttcaatttcaattcagtgtatgtgtgtgtgtgactgtgtgtgtaccaataaacatttaagttcactcatttgcttgtctatgatcaaaagaaccatttccttctgatgcgca

SEQ ID NO: 117856 - DNA, 1776 bp, Zea Mays
aaaagcatgagaggaaagggccagagaaagtccaatcgctgctgcgggcgtgtaactcgaatgagagagagctattaataagtcatgtagaaaacgtgcaccttcaagctgagctaaaacctttcatttattttcaccattcatcctgttgcgaccatctttggattataaatagcttgccagagccagcggatccagcagagcacgagacacccaagaaacacacagaagcgaggagcactacttgttggttggattctcttcagtctagcagctagtccagttaagtttcagacacacatggggagcattggcagaggcacggccaactgcgccaccgtgccgcagccgccgccgtcgacagggaagctcatcacgatcctgagcatcgatggcggcggcatccgcggccttatcccggcgaccatcattgcgtacctcgaggccaagctccaggagctggacggcccggacgctcggatcgccgactacttcgacgtgattgccgggacgagcaccggcgccctgctcgcgtcgatgctggcggcgccggacgagaacaaccggccgctgttcgccgccaaggacctcaccacgttctacctcgagaacggcccaaagatcttcccacagaaaaaggctgggttgctgacgccgctgaggaacctgctgggcctggtgcggggccccaagtacgacggcgtgttcctgcacgacaagatcaagagcctgacgcacgacgtcagggtggcggacacggtgaccaacgtcatcgtgccggcgttcgacgtcaagtccctgcagcccatcatcttctcgacgtacgaggccaagaccgacaccctcaagaacgcgcacctctccgacatctgcatcagcacgtcggcggcgcccacctacttcccggcgcacttcttcaagaccgaggccaccgacggccggcccccccgcgagtaccacctcgtggacggcggcgtcgcggccaacaaccccaccatggtcgccatgtccatgctcaccaaggaggtgcaccgccgcaaccccaacttcaacgccggcagccccaccgagtacaccaactacctcatcatctccgtcggcaccgggtcggccaagcaggcggagaagtacaccgcggagcagtgcgcgaagtggggcctcatccagtggctctacaacggcggcttcacgccgatcatcgacatcttctcgcatgccagttccgacatggttgacatccatgcgtcgatcctctttcaggccctgcactgcgagaagaagtaccttcgcatccaggatgatactttgactgggaacgcatcgtccgtggacatcgccaccaaggagaacatggagtctctgatatcgatcggccaggagctgctcaacaagccagtggcgagagtgaacatcgacacagggctgtacgagtcctgcgagggtgagggcacaaatgcacagtcgctagctgacttcgccaagcagctctctgacgagcgcaagctacgcaagagcaatctcaactccaactaataaatacctctcggtcacagcatgtgctctttctgcagattcaccgtttcttatttttaatttcaatttcaattcagtgtatgtgtgtgtgtgactgtgtgtgtaccaataaacatttaagttcactcatttgcttgtctatgatcaaaagaaccatttccttctgatgcgcacggttgatttgcctataataatctgtgtgatgcaagcaccctaactttctggattgtaatcttgcgatcg

SEQ ID NO: 117857 - DNA, 1144 bp, Zea Mays
catccaccaccaccgacgacgagcaccctgagcctccgccgtcgagttcgagacgagacgtaccactatggagagtgagcaccacctgttcgagatcgcggccgcccggctcgagcgtagctctgccttcttggacgaggactactgttcatggtctccctgcatacagggctaccactggcgatgcgtctgctccgctgaccccgctgctggtacggcgtccttcaccgtctctcttccctacagcagcacccgcgagcccctcaacgcctcgttcaagctcagcctgctggaccgaggaggcctgccggtgccgtccaggacccgagccaccttgttccagaactgcctgatccagcagatgtggcagtgggagtgtccgggcttcctcaccagggacgacctagagcggcacgagtactacctcgacagcgacggcggccgctgcttccgcgtccgctgcgacatcgccatcaagcccttcgccgcggccacggccggcgacggcgacgccttcgtcgcggcgcccccgtccgacgacctccaccggcacctcggcgacctgctggcgcgcaaggacggcgcggacgtcacgttccagctggtcgacgcgggcggcgagacgttctccgcgcaccggtgcgtgctcgcggcgcggtcgcccgtgttcagagcgcagctgttcggcgagatgatggagagcagcaagggcaccggcgtcgtcataccggttgaggacatggaagcccaggtgttcagcgccctgctggccttcatctacaccgactcgttgccgccggagactggcagcggcgacgacgacgacgacgacgacgatgaagccatggtgcagtatcagcttctgcttgccgccgcggacaggtacggcgtcgacaggatgaagctggtttgccaggagaagctgtgcaagcacatacgcgcggactcggtggccacgatgctggttttagctgaccgacaccattgccctgcgctcaaggaggcgtgcttccgtttcctctcttctagcggcaaccttggctccttcactcagacgacggatggcttcgaggtgctcaacgccagctgccctgctgttctcaaggagctactggccaagcttgccaccgttttgatcttctga

SEQ ID NO: 117858 - DNA, 103 bp, Zea Mays
ttttcttttcgtttagaaagcttagatatatcttaaatgaattgtttacctttgttttcctcgcgaggtggattacacattgtaagaactaagaactaaattc

SEQ ID NO: 117859 - DNA, 752 bp, Zea Mays
ccatcgcacatattattgagaccaattatcaacatagaaactagaatagagtagcaacaatgacaaccaagatattttccctccttaagctccttgctctttctgcaagcgctactaccacgccattttcctgcaatgctcacaagctcctatagcttcccttcttcccccgtacctttcatcagtgatggcttcagtatgtgaaaacccaattcttcatctctataggatccaacaggcaattgcagcaggcatcttaactttatcacccttgttcctccaataaccgtcagccctattacaacagttatctttggtgcatttgttggcacaaagcatcagggcacaaaaactgcatcaacttgcgctggaaaaccttactgccaactctcagtaacaaaagtttattccattcaaccaactggctacattgaactctgttgcttatttgcaacaataacaactaccattcagccaactagttgttgtgagcctgttgccttcttacatagcagcagttgttgccgttctacccgcacgatgtggctaacacaaccaccctcttacaactgcaacaattgccgccattcaaccaacttgcgttgacaaacccaacagcgttctacctacaacccatcattgatggtgccctctgttagattgcttatgagttatagttcaataatgaagttttttggttgatgtttgtggcttcccagaaataataaagtacatttctagattctcatgtg

SEQ ID NO: 117860 - DNA, 758 bp, Zea Mays
agcttatagcaacggaaaaaagttagcacattccaaaaacttcaaagactgctgtgtacgacatcctatattaccgactgcttctgtttgaattgaacggcatcttcagaatctcggcgacgctaatttctaactcatatgggagagttgctacgacctacaatacttgaagaagagatccaggtttcccagacacctactttcgaggacaaaaccatcaatgaattggttgaaattgatccagatatattccatgaaggtagatggtggttcccatcttgcactaaatgcaacaagtcttcaattcagacctctactaaatatcgctgcatacgtgtgattggacagaaactaaatttaggcatgtcacagccttgcatattctaatgcactacatgatatagaggcataaaattacacacaaaagaaaaagaatactatctatgcaagatggactcgaaaatcctttcaacatgtggatcaatctaattattttagattttttctaaatttgcctttcaatggctgaagtcccattttgatgcaaatgaaaaagcgaacatcctgtagactgctgttgctgtgcatctcaactgttttggtcttccaatctttttggaagtattattatttttactttcacttactcttataattgcatcatgttacacgatgttgacgtcaatatggatatacacccaaacaatctaaattcaaggtcttgtcaaagcaaactaaggttctttttttaatacaaa

SEQ ID NO: 117861 - DNA, 718 bp, Zea Mays
agcttatagcaacggaaaaaagttagcacattccaaaaacttcaaagactgctgtgtacgacatcctatattaccgactgcttctgtttgaattgaacggcatcttcagaatctcggcgacgctaatttctaactcatatgggagagttgctacgacctacaatacttgaagaagagatccaggtttcccagacacctactttcgaggacaaaaccatcaatgaattggttgaaattgatccagatatattccatgaaggtagatggtggttcccatcttgcactaaatgcaacaagtcttcaattcagacctctactaaatatcgctgcatacgtgtgattggacagaaactaaatttaggcatgtcacagccttgcatattctaatgcactacatgatatagagataattgctttgcgtatctacaacgaccatcactacttttgaagcgcaaacgcttttatgtacatataaccaaaccgatgaaacttctctagcttagtatttgtttatgcgatcctcagctctgctttctgtacctatgacgatcatcgtcacttttgcaaagcaaatgcttttgtgtacatattaccaagttgatgaaaccttgccagtttagcgtctgtttattatgatctttagctcttggaacacactgctgaaatacaatgtaatatgtatagtcctctcagtctactctagacttgctgtaaccgc

SEQ ID NO: 117862 - DNA, 848 bp, Zea Mays
cattatctagctgtctggtagaagcatttttgtaaaattaacataccaatctagcattaacttttttccccaaatttctgaaacatattatgaactacaaataagttccaagtattcctttgcacatgaatatgagcacccttttttaagccatccaataacatttaagcaacatgtatgcttaaattccacaatactgaccaattacacaaatgtttgctactatttcaatttttgttgtcacatcatttaaaggttacaaaatattgaactttagttgctacgacctacaatacttgaagaagagatccaggtttcccagacacctactttcgaggacaaaaccatcaatgaattggttgaaattgatccagatatattccatgaaggtagatggtggttcccatcttgcactaaatgcaacaagtcttcaattcagacctctactaaatatcgctgcatacgtgtgattggacagaaactaaatttaggcatgtcacagccttgcatattctaatgcactacatgatatagagataattgctttgcgtatctacaacgaccatcactacttttgaagcgcaaacgcttttatgtacatataaccaaaccgatgaaacttctctagcttagtatttgtttatgcgatcctcagctctgctttctgtacctatgacgatcatcgtcacttttgcaaagcaaatgcttttgtgtacatattaccaagttgatgaaaccttgccagtttagcgtctgtttattatgatctttagctcttggaacacactgctgaaatacaatgtaatatgtatagtcctctcagtctactctagacttgctgtaaccgc

SEQ ID NO: 117863 - DNA, 432 bp, Zea Mays
caacaacatcgtttgcaaagctatccacttttggtgaccataaaaatgtggcatgtcacagccttgcatattctaatgcactacatgatatagagataattgctttgcgtatctacaacgaccatcactacttttgaagcgcaaacgcttttatgtacatataaccaaaccgatgaaacttctctagcttagtatttgtttatgcgatcctcagctctgctttctgtacctatgacgatcatcgtcacttttgcaaagcaaatgcttttgtgtacatattaccaagttgatgaaaccttgccagtttagcgtctgtttattatgatctttagctcttggaacacactgctgaaatacaatgtaatatgtatagtcctctcagtctactctagacttgctgtaaccgctataattattatcttagtacaacaa

SEQ ID NO: 117864 - DNA, 860 bp, Zea Mays
ctctcctgaagcacgacagccagtccagccaccatttgggtgctcatctccctctgctcggcacctagccccagctcgcccgagctccctgcgccgacctcatcttccccatggcgcgtcaccttctagtcctctccttcccacggcacagcagcgcccctgcagctccccttctccagatccatggcacccaacaccttgagcgcccctgccgctgctcctccaccgggatctcctcctccactaggcgtccaggcttgtcccaccgtggctgcccctcctccatctcctccctccccaccaggttacccagattccatggccgccgccgccccagccatctccctggtggccgacctcgcccctgccccagccacagctcccccttcggccctgctgctgcaagcactcagcctctcccatggcacacggtactcgtccagcccctttctactggtggctgagccatctctctggtgctcgatgaaatgaccatgaggagttttgtgttgtgtgcagccccatctgcaacaccgtcgacccccgacgaggtcctttctcgccttgtcgttttagtactcggcgtcgattaagtagatgctaaccgtgtgtatattcgtgtgttcttgtgaggagaaatcccatgatttgggggaagacgaagtccaagcacaacccccgccaatcgctcgatgaaaaatctaaaccaaaaccctcagcgttttcaagggttccggagggattttatgttggtaaggtaatttgtgtcctaattagttcactcagttattgagttgaagagattgttagttgtatgtgtcgatgatgctattttgattagcaggtgttgtgcggtgtga

SEQ ID NO: 117865 - DNA, 267 bp, Zea Mays
atggcctcccgcccaaagctgtctggtattcagaagcaggttttggcgctgtataggggattccttcggacagcacgccttaaggcccctgaagaacgccgcaggatcgagtctgttatcttggcagagttccgtgacaacgcaaggagtgttgaccttaggaactttgtacacatagagtacttgttgaggagagggaagaagcatcttgagcagctcaagaatcctgatattactggactcgctacccttgtagtaaagaaatga

SEQ ID NO: 117866 - DNA, 1104 bp, Zea Mays
ctggttcatctgctgtatggcctggtgcaccggacactgtccggtgcgccatttttcagcacactcaagtctagcaacatagaaagcacaatattgtaccaataatggcagccaaaatattttgcctcattatgctccttggtctttctgcaagtgctgctacggcgagcattttcccgcaatgctcacaagctcctatagcttcccttcttcccccatacctctcaccagcgatgtcttcagtatgtgaaaatccaattcttctaccctacaggatccaacaggcaatcgcagcaggcatcttacctttatcacccttgttcctccaacaatcatcagccctattacagcagttacctttggtgcatttattggcacaaaacatcagggcacaacaactacaacaactcgtgctagcaaaccttgctgcctactctcagcaacagcagttacctttggtgcatttgttggcacaaaacatcagggcacaacaactacaacaactcgtgctagcaaaccttgctgcctactctcagcaacaacagtttctgccattcaaccaactagctgcattgaactctgctgcttatttgcagcaacaacaactactaccattcagccagctagctgctgcctacccccggcaatttcttccattcaaccaactggcagcattgaactctcatgcttatgtacaacaacaacaactactaccattcagccagctagctgctgtgagccctgctgccttcttgacacagcaacatttgttgccgttctacctgcacactgcgcctaacgttggcaccctcttacaactgcaacaattgctgccattcgaccaacttgctttgacaaacccagcagtgttctaccaacaacccatcattggtggtgccctcttttagattgcttatgagttatagttcaataataaagttttttttgctgatatttgtggcttcccagaaataagaaagtacatttctagattcttatgtgcttctagtctccaaatgtggttgatagttattttgctctaagatcggcagtaatgaggtataaatacttgttgtcgtgtgctactcggttaattgagcatta

SEQ ID NO: 117867 - DNA, 1220 bp, Zea Mays
tggaagtgtgcaattcacgtgccagaaccctgattgatagtttcgcttttcctccttaatcgtttgaccttttcttgtgtccattttagatcttgctggtcctttgtgggttttatctcttttatgtgtttccccgtttcgttgttttcggttctcctttgcctttgtttcccttttctgttctttgggggttgagctctgaggttttcatacggggtttcatctctagcctaccccaacgtgcttgggacaaaaaggctttgttgttgttgttgttgttgttgttgttgttgttgtactgctgatcttagagcaaaataactatcaaccacatttggagactagaagcacataagaatctagaaatgtactttcttatttctgggaagccacaaacatcagacaaaaaactttattattgaactataactcataagaaatctaaaagagggcaccaccaatgatgggttgttggtagaacactgctaggtttgtcaaagcaagttggttgaatggcagcaattgttgcagttgtaagagggtgccagcgttaggcgcagcgtgctggtagaacggcaacaactgtggttgtgtcaagaaggtagcagggctcacaccagctagctggctgaatggtagtagttgttgctgctgtaaataagcaggagagttcaatgctgccagttggttgaatggaagaaattgctgggggtaggcaacaggtagctggctgaatggtagttgttgttgttgcaaataagaagcagagttcaatgcagctagttggttgaatggaagaaactgctgttgctgagagtaggcagcaaggtttgctagcacaagttgttgtagttgttgtgccctgatgttttgtgccaataaatgcaccaaaggtaactgctgtaatagggctgatgattgttggaggaacaagggtgataaaggtaagatgccagctgcgattgcctgttggatcctgtagggttgaagaattgggttttcacataccgaagacaccgctggtgagaggtacgggggaagaagggaagctataggagcttgtgagcattgcgggaaaatggtcgccgtagcagcacttgcagaaataccaaggagcataaggaggcaaaatattttggctgccattgttggtacactattgtgctttctatgttgctagttggtctaaataatatgtgcgatatattagctactaattt

SEQ ID NO: 117868 - DNA, 847 bp, Zea Mays
taagaatctagaaatgtactttcttatttctgggaagccacaaacatcagacaaaaaactttattattgaactataactcataagaaatctaaaagagggcaccaccaatgatgggttgttggtagaatgctgttgggtttgtcaaagcaagttggttgaatggcagcaattgttgcagttgtaagagggtgccagcgttaggcgcagcgtgctggtagaacggcaacaattgtggttgtgtcaagaaggtagcagggctcacaccagctagctggctgaatggtagtagttgttgctgctgtaaataagcaggagagttcaaagctgtcagttggttgaatggaagaaattgctgggggtaggcagcagatagctggctgaatggtagttgttgttgttgcaaataagaagcagagttcaatgcagctagttggttgaatggaagaaactgttgttgctgagagtaggcagcaaggtttgctagcacaagttgttgtagttgttgtgccctgatgttttgtgccaataaatgcaccaaaggtaactgctgtaatagggctgatgattgttggaggaacaagggtgataaaggtaagatgccagctgcgattgcctgttggatcctatagggttgaagaattgggttttcacataccgaagacaccgctggtgagaggtacgggggaagaagggaagctataggagcttgtgagcattgtgggaaaatggtcgccgtagcagcacttgcagaaagaccaaggagcataaggaggcaaaatattttggctgccattgttggtacactattgtgctttctatgttgctagttggtctcaataatatgtg

SEQ ID NO: 117869 - DNA, 847 bp, Zea Mays
taagaatctagaaatgtactttcttatttctgggaagccacaaacatcagacaaaaaactttattattgaactataactcataagaaatctaaaagagggcaccaccaatgatgggttgttggtagaatgctgctgggtttgtcaaagcaagttggttgaatggcagcaattgttgcagttgtaagagggtgccagcgttaggcgcagcgtgctggtagaacggcaacaactgtggttgtgtcaagaaggtagcagggctcacaccagctagctggctgaatggtagtagttgttgctgctgtaaataagcaggagagttcaatgctgtcagttggttgaatggaagaaattgctgggggtaggcagcagatagctggctgaatggtagttgttgttgttgcaaataagaagcagagttcaatgcagctagttggttgaatggaagaaactgctgttgctgagagtaggcagcaaggtttgctagcacaagttgttgtagttgttgtgccctgatgttttgtgccaataaatgcaccaaaggtaactgctgtaatagggctgatgattgttggaggaacaagggtgataaaggtaagatgccagctgcgattgcctgttggatcctgtagggttgaagaattgggttttcacataccgaagacaccgttggtgagaggtacgggggaagaagggaagctataggagcttgtgagcattgtgggaaaatggtcgccgtagcagcacttgcagaaagaccaaggagcataaggaggcaaaatattttagctgccattgttggtacactattgtgctttctatgttgctagttggtctcaataatatgtg

SEQ ID NO: 117870 - DNA, 848 bp, Zea Mays
taagaatctagaaatgtactttcttatttctgggaagccacaaacatcagataaaaaactttattattgaactataactcataagaaatctaaaagagggcaccaccaatgatgggttgttggtagaacactgctgggtttgtcaaagcaagttggttgaatggcagcaattgttgcagttgtaagagggtgccagcgttaggcgcaacgtgctggtagaacggcaacaactgtggttgtgtcaagaaggtagcagggctcacaccagctagctggctgaatggtagtagttgttgctgctgtaaataagcaggagagttcaatgctgctagttggttgaatggaagaaattgctgggggtaggcagcaggtagctggctgaatggtagttgttgttgttgcaaataagaagcagagttcaatgaacctagttggttgaatggaagaaactgctgttgctgagagtaggcagcaaggtttgctagcacaagttgttgtagttgttgtgccctgatgttttgtgccaataaatgcaccaaaggtaactgttgtaatagggctgatgattgttggaggaacaagggtgataaaggtaagatgccagctgcgattgcctgttggatcctgtagggttgaagaattgggttttcacataccgaagacaccgctggtgagaggtacgggggaagaagggaagctataggagcttgcgagcattgcgggaaaatggtcgccgtagcagcacttgcagaaagaccaaggagcataaggaggcaaaatattttggctgccattgttggtacactattgtgctttctatgttgctagttggtctcaataatatgtgc

SEQ ID NO: 117871 - DNA, 110 bp, Zea Mays
cagatttacgccagactatactcggtggatcttccatggtaaagcgcatcgtacgagagaggaggtgttgagactaaaagtcacctaaagggggggtgaataggcaaatc

SEQ ID NO: 117872 - DNA, 966 bp, Zea Mays
aatccaaaattaatcttgcacaagcacaaggactgagatgtgtataaaaatctcttagattagtaggtaatccatcacacaaagcgcaatagtgtagcaaaactggcagtcaaaatattttgcctccttatgctccttgctctttctgcaagtgctgctaacgcgaccaattttctgcaatgctcacaagatccaattgcttcccttcttccctcatacctctcaccagcgacatcttcagtatgtgaaaacccaattcttcaaccctataggatccaacaggcaatcacagcaagcatcttacctttatcacccttgttcctccaacaaccgccagccctgttacaacaattacctttggtgcatttgttggaacaaagcatcaaggcacaacaactacaacaacctgtgctgacaaaccttgttgcctactctcagcaacaatagtttcttccattcaaccaactggctgcactgaactctgctgcttatttgcaacaacaacaacaacttccattcacccagctagctgctgcctacccccaacaatttcttccattcgactaactggctgcattgaactctgttgcttatttacaacagcaacaactaataccatgaaaccagctagctgttgcgagccctgctaccttcttgacacaaccacagttgatgtcgttctacctgcaagctgtggctaacgtcggcaccctcttacaactacaacaattgttgccattcatccaacttgctttgacaaacccaatagtgttctaccaacaacccatcattggtggcgccctcttttatatttcttatgggttatagttcaataatgaagtttttggctgatgtttgtggcttcccagaaataagaaagtatatttctagattcttatgtgctactagtctccaaatgtggttgataattatgttgctctaagaacgggagtaatgaggtataaa

SEQ ID NO: 117873 - DNA, 1092 bp, Zea Mays
aaacgcagccgaagaggaaaggagagagaggcggcgaggatggggcggaagtggaacgagctgctgtcgtcggctccatggaggacgggggaggcggcagaggacgaggacgcggcaaggatgagccgagaggggaaggtcagcgtcaccagcaaccccgaggagatgcccaccatgagcgtgccctggagcagacgcccggacctcgacctcaccatcgacgacttcgaggaggacgagatcgaccccgagctgcgctactccttccagcggaacagcagggggccctgttatgcatcagacacctttggtgtgcgacgagccgatgacaccgtgcttcctttactacaggaattttatctagatttggcagaagacaacagaaaaattactccacgagattacctagagctagcattgaggcctgttcaaggtggaggaagggacatatctgcaaagaatgcgatacgggactccatccgtgcactttttccggacagggaatgttttacacttgtgcaacctgtgaacaatgagaaagatctccaacgtcttgatcaacttcctgttagattcaaacttttcctaagttcatttacgcaaatagcaaaattgctcttgaaacatatttacactttaaacagtttgatggcatgtacaaattatgtatgtccctttatgactgctttaaatgtttttgctgttggtgctgggtcagctcgttcaaaatttgaaaagctccttcacagttctctcaaaaaggcctttgaggactacaaaaggaatgcttttctggaggctgacttgcaatgttctaataaagttcagaacatggaatcaaaggtgcgagcagcatgtaacagttcgaatgaaaaattagatgacatagtcaggctccttgatgacctactcaaagagtatgagtcaacggcctatggtcctggaaaatggaaaaggctagccacattcttacagcagtgtttggctggccctgttctggaccttttcagaagacagttagagcatatagatgctgaaaggaacgccctgagattgaaatgcaattcaagagatgtggaactatctgagaag

SEQ ID NO: 117874 - DNA, 1536 bp, Zea Mays
ccgaacctttcacagccgcgttattattctcgtctccagccccccacacgcgctcccctccaccgtccgccgcgcgtccccaccggcggccaccgccaccggcccacctccccggcgccccttacccttctttggcgcgatggtaactcgcggcggcggtagccagtcctacggcttcccgatctactgcgccgcctggctcccgctcgcccacatcatcaagcccgaccctcccgctgccgaggcggatgcggatgacccctcctcctccaccccctcgcttccgatggctgtcctcgggggcggtggcggggagggccggagcggggtgccgaacaagctcgtggtggcggccctcgccaccggggaagaggccgcgccggctctctcccccgatacggtggtcgaggtgaatagtgaggaggaggtgccgtacagaatggccgtccacccgcgtggcgatggcgtgttctgtgccttccccaacggctgcaggaaggagagggaccacagaggttggctttggagccggaccaggatgctttagcagagctgaaagatgtcggtttgcagttggccgtatccttcagtggagaaggttcaatacttgctattggtggtgaagatgggtatttaagagttttcaactggcctaccatggggtctgttctcacagaaatcgatactaaaacatcgattaaggatcttactatcagttccgacgagaagtttcttgctgtgaataggagcagtggcccatgtagagtgtgggatttgcagtcatctgaagttgtagccagtctgccaagagaaacatggaacaatagaaggaagcatcatcgtagttggctcaaaagacatgcggacacttgtaacagttaaaaaggctcatcttggtattgttactacgctgaccttctctcaggattcaagaacattgctgtcaacttccttcgactcttctgcaagggtgacatctgttgggtctccaaagagtaatggaacaagcatatggcccatgctactagttgttattcttgcaattttggtgtactactgtacgcagcacaaagaagacattttggcaatgttgcagcgttgagatagatttctgttcagcccctgactggtctactctgctggacgtattattagtgttgcttcagtgattgaagaaattttggacttgggccaacttcattattctctcaaggacaaacaatacagcaaaaggcactgagccctgttatgttttgtagtaaaaagggtaatgtacttactcatgttgtcgaagtttttgtaagttgatggccgcaagtgatagacatatgtggcaatgtttcttcatgctgcacttgtgaattgcaagatgttcgccccaagagtccaatatagagagttcagaaacaaatttttttggtgtgcgaaacaatttattatgtatgcgtaataaagctgtacaaagaatatctaaaaatgcagatagcttctgggtgcttatacatgtgatgaccaattattgtttggatgacaaaa

SEQ ID NO: 117875 - DNA, 1778 bp, Zea Mays
ccgaacctttcacagccgcgttattattctcgtctccagccccccacacgcgctcccctccaccgtccgccgcgcgtccccaccggcggccaccgccaccggcccacctccccggcgccccttacccttctttggcgcgatggtaactcgcggcggcggtagccagtcctacggcttcccgatctactgcgccgcctggctcccgctcgcccacatcatcaagcccgaccctcccgctgccgaggcggatgcggatgacccctcctcctccaccccctcgcttccgatggctgtcctcgggggcggtggcggggagggccggagcggggtgccgaacaagctcgtggtggcggccctcgccaccggggaagaggccgcgccggctctctcccccgatacggtggtcgaggtgaatagtgaggaggaggtgccgtacagaatggccgtccacccgcgtggcgatggcgtgttctgtgccttccccaacggctgcaggttgtatcgatgggaatcacaggaaggagagggaccacagaggttggctttggagccggaccaggatgctttagcagagctgaaagatgtcggtttgcagttggccgtatccttcagtggagaaggttcaatacttgctattggtggtgaagatgggtatttaagagttttcaactggcctaccatggggtctgttctcacagaaatcgatactaaaacatcgattaaggatcttactatcagttccgacgagaagtttcttgctgtgaataggagcagtggcccatgtagagtgtgggatttgcagtcatctgaagttgtagccagtctgccaagagaaacaggggaaatatttggattctgcagattctctaataaggctgacaacagtcatgtcctatttataactgtgatggaaggcgattatggaaaaatagtgtcttggaatactacctcatggacgagaaccggatcaaagaaaataactcgtgaggcaatttcagcttttgctgtgtcacccaacggtgctcttcttgcaattggaacaatagaaggaagcatcatcgtagttggctcaaaagacatgcggacacttgtaacagttaaaaaggctcatcttggtattgttactacgctgaccttctctcaggattcaagaacattgctgtcaacttccttcgactcttctgcaagggtgacatctgttgggtctccaaagagtaatggaacaagcatatggcccatgctactagttgttattcttgcaattttggtgtactactgtacgcagcacaaagaagacattttggcaatgttgcagcgttgagatagatttctgttcagcccctgactggtctactctgctggacgtattattagtgttgcttcagtgattgaagaaattttggacttgggccaacttcattattctctcaaggacaaacaatacagcaaaaggcactgagccctgttatgttttgtagtaaaaagggtaatgtacttactcatgttgtcgaagtttttgtaagttgatggccgcaagtgatagacatatgtggcaatgtttcttcatgctgcacttgtgaattgcaagatgttcgccccaagagtccaatatagagagttcagaaacaaatttttttggtgtgcgaaacaatttattatgtatgcgtaataaagctgtacaaagaatatctaaaaatgcagatagcttctgggtgcttatacatgtgatgaccaattattgtttggatgacaaaagggagttgtaacactatgctcta

SEQ ID NO: 117876 - DNA, 1387 bp, Zea Mays
gcctccatgtaagtaaataacttttcagtatggtcttgcatttatgctttgaggattttcatggttgatggttcatatgcgattttcttctttctcttggagcttctgttatggcactgcaatcttatggttattgacatatttgtttctttatattcctttgtaggatgggtatttaagagttttcaactggcctaccatggggtctgttctcacagaaatcgatactaaaacatcgattaaggatcttactatcagttccgacgagaagtttcttgctgtgaataggagcagtggcccatgtagagtgtgggatttgcagtcatctgaagttgtagccagtctgccaagagaaacaggggaaatatttggattctgcagattctctaataaggctgacaacagtcatgtcctatttataactgtgatggaaggtgacattaaggtttaagttgacctagttacaaattgaattaggcaacaagcttaaggtctgacaatgcctgaacaatattgatttttaggcgattatggaaaaatagtgtcttggaatactacctcatggacgagaaccggatcaaagaaaataactcgtgaggcaatttcagcttttgctgtgtcacccaacggtgctcttcttgcaattggaacaatagaaggaagcatcatcgtagttggctcaaaagacatgcggacacttgtaacagttaaaaaggctcatcttggtattgttactacgctgaccttctctcaggattcaagaacattgctgtcaacttccttcgactcttctgcaagggtgacatctgttgggtctccaaagagtaatggaacaagcatatggcccatgctactagttgttattcttgcaattttggtgtactactgtacgcagcacaaagaagacattttggcaatgttgcagcgttgagatagatttctgttcagcccctgactggtctactctgctggacgtattattagtgttgcttcagtgattgaagaaattttggacttgggccaacttcattattctctcaaggacaaacaatacagcaaaaggcactgagccctgttatgttttgtagtaaaaagggtaatgtacttactcatgttgtcgaagtttttgtaagttgatggccgcaagtgatagacatatgtggcaatgtttcttcatgctgcacttgtgaattgcaagatgttcgccccaagagtccaatatagagagttcagaaacaaatttttttggtgtgcgaaacaatttattatgtatgcgtaataaagctgtacaaagaatatctaaaaatgcagatagcttctgggtgcttatacatgtgatgaccaattattgtttggatgacaaaagggagttgtaacactatgctct

SEQ ID NO: 117877 - DNA, 1090 bp, Zea Mays
aaaacagatcccaagtgctgccggcgagccagccggcctccagcttgtagcgaccgttcgtgacgtcgatgggtgacttcgtgggccacgtgctgccgggcacgctgctgctggcggtgggcctgtggcgggtgtgggcgtcagtggcgcgcttcgcggccgacccggcggcgttccgcgtccgcgcctggaaccccgtcccggcggcggggccgcggctgctggagctgcacgtggtggccggcggcgcgttcctggacatgtgcgtggagctctactacgccaacccgctccgcgtcctcaccggcggcggggtcgacccgggccacctcggcggcctcgagcacgccagcatgctcctcatgttcttcctcttcggcgcgctcgccctcgtctccgagaagaccaggtacctgcctttatcggacgacgcgctgagcctggtgttcgcgagcgcattcacggcggagttcctgctcttctacttccactccaccacgcacgcggggctggagggctactaccaccgcctcctcctcgccgtcctcgccctctgcatcgccgcgctcgtcgccggcgcgctccttcccgccagcttccccgccgacctcggcgccggcgtcctcatcgccgtccagggcctgtggttctaccaggccgcgctcgcgctgtacggccccatgctccccgcgggctgcgtccgccacttcgactcccctcactccgacgcccgcatcgagtgccacggcggcaccgcgcaggagcgcgccgagcagctggccaacttccagctgttcgggctcgtgttcctcgcgttcgtctacgcgctcgggtgctacgccgtggccgcggcaaggtatgggaataacctggagctgacgacggtccatcacacacatgtcgctgcgactgccatgtagaaggagaacaaagttcacgatctagtggccacggatctctttttttcttgttcggttcagagtacgtagggcaggcgagtacatgaatggctgggctgttcaaaagaagctcgagtgtgatcttacctaccacatggacctgtcactgtaaaatgtcaagttcgtgcaaa

SEQ ID NO: 117878 - DNA, 4411 bp, Zea Mays
atggaagatgacagcaggagggtggatacgatgcagatggggagcaacctggatgggagcttgctgcggagatcatcatcatggtgggcatcgagaggaaacaatgcattctggtggccagcgagggaggacgacgacgaggaggcgctgagatgggcggccatagagaagctacccacctacgaccgcatgaggaaaggcatcctgacagcagtgggtgacggcatacaggaggtggacatccaagggctcaacatgcaggaaaggaaatgcctcatccagcgcctcatccgcatccccgaggaggacaacgagaggttccttctgaagctgtgtgaacggatggagagagttgggattcagaacccaacaatagaagtgcggtttgagcatttgaccattgacacagagatctatgttggcaaacagggagtcccaacatttaccaacttcttctccaacaaagtcagggatgctttgattgctttgcacattatctcaagtggtaagagacctatatgcatccttcatggcatcagtggaatcgtaagaccaaacagaatgtctttgttgctaggtgctcctggatctgggaaaacgagtctacttctggctttggcagggaaactcgactcaactctgaagatgtcaggaagggtgacttataatggacatgccatggatgaatttgtcccccaaagtacatcggcatacattgggcagcacgatgttcacataggtgaaatgacggtccgtgaaacattagcgtttgctgcaagatgtcaaggagttggaacccgttatgatatgctcactgaactctcaagaagagaaaaacatgccaaaattaagccagatcctgacattgatgtttacatgaaggccatctcccaggaaggacaagagaacttcatcactgattacgtcctcaaaattttgggtctggatatctgtgcagatataatggtcggagactctatgatcagaggtatctcaggaggacaaaagaagcgtgtcacaataggtgagatgcttgttgggccagctaatacactattcatggatgaaatctccaatggtctggacagcgccactgcctatcagatcgtcaactctctaaggcagtcggtccacatccttggtgccactgcactcatctcattgcttcagcctgcacctgaaatatatgagctatttgatgacattgttctccttgctgagggccagatcgtgtaccagggtcctcgagaaaatgtcctcgagttttttgaggccatgggtttcagatgtcctgataggaaaggtgttgcagatttcctgcaagaagttacatctaggaaggatcaataccagtactggtgtacaagagatgaaccatatcggtacatttcagtaaatgacttcgtagattccttcaaagcattccatgttggccatgcattgcagtcggagctcgagctgcccttcgatcgaaccaagaaccaccctgctgccctcacaacatcaaagtttggtatcagcaagatggagcttctcaaggcatgcttttgtagggagtggctgatgatgaagaggaactcatttgtttacatcatcaaaatagtgcagctcataatcctaggaaccattacaatgacggtcttcctgcacacaaaaatgcatcgacacagtgttgaagatggagtcatctttctaggtgcgatgttccttggattagtcacacatttgttcaatggttttgctgaggttgccatgagcattgcaaagctgccaatattttataagcaaagagataatctcttctatccatcatgggcatatgcattgcctacatggttgatcaagatcccaatatcattcttggaatgtgctgtttggactggcatgacttactatgtcatcggttttgatccaagcatcgaaaggttcttccgccattacctactgcttgtactgataagccagatggcatctggtcttttccggcttcttgctgcagtaggaagagagatggttgttgcagacacgtttggctcatttgctcagattgtcctgctgattcttggtggattcttgatagcaagaaataacatcaagaaatcatggatttggggttactggtcctcccctctgatgtatgcccagaatgccatagcggtgaatgagttccttggcaatagttggcaggtggtgatgcaaccaacggcagaaaacaatgacacgcttggtgtccaaatcctaaaggcacgcggcatttttgtaggcccaaagtggtactggattggtgttggagcattgcttggatacatcatgatcttcaatttactctttgtactgttccttgactggcttggcccacttagaaaaggccagactgttgtttctgaggaggaactgagagagaagcatgtaaaccgtactggtgagaatgttgaattggcgcttcttggaacagactgccagaattcaccatctgatggaagtggagaaatctccagagcagacaccaagaacaagaagggaatggtacttccatttacaccattgtcaatcacctttaacaatatcaaatactccgtggacatgcctcaggaaatgaaagacaaagatattactgaagaccggctactactgctgaagggtgtaagtggagccttcagacctggaacccttacagcattgatgggagtcagcggagcgggtaagacaactctgttggatgtgttggcaggaaggaaaactagtggctacatcgaaggtgacatttacatatctggatacccaaagaagcaagagacctttgctcggatcgctggttactgcgagcaaagcgatatccactctccacatgtcactgtttatgaatccctcctgttctcagcatggctccggttgccacctgaagttgacttggaagcaagaaagatgcatgtggaagatgttgctgaacttgtcgagctcattccactgagaggagcattggtggggctgccaggagtgaatggtttgtctaccgaacagaggaagaggctcactatagcagttgagctcgttgccaacccatccatcatattcatggacgaaccaacttcgggactagatgcgacggcagctgcaatcgtgatgaggacagtcagaaacacggtcgatactggacgaactgtcgtctgcacgatccatcagcccagcatcgacatctttgaagcttttgatgagctgttcctgttaaaatggggaggtgaagaaatatacgtcggccccttaggacacaagtcatgccacctaatcaaatacttcgagggtttacaaggcgtgaagaaaatcaaggacggttgcaatcctgcgacatggatgttggaagtgaccaccgtagctcaagaagccattcttgggtgcaactttgctgaagtatacaggaattcatatttataccggaagaacaaaattttggtcagtgaattaagcacacctccgcctggatccaaagacttgtacttcccaacacagtactcacaatccttcatcacacagtgcatggcctgcctatggaagcaacacaagtcatactggagaaacccatcatacactgcaaatagaattttcttcaccgcacttattgccttcgtgtttggaaccatcttcttgagcttaggcaagaaagttggcaagaggcaggacctgtttgacgctttgggatccatgtatgccgcggtccttttgattggagttcagaatggcctaaccgtacagccgatagtagatgttgagagaacggtattctaccgagaaaaggctgctggaatgtactccgctctaccctacgcttttgcacaggttgtaattgagatcccacacatcttcctccagactgttgtgtacggtctcatcatatacaccttgataggcttcgactggacagtccagaagttcttttggtacatgttcttcatgtacttcacgttcatgtacttcacgttctacgggatgatggcagttgccatgacaccgaacagcgacatcgccgccctagcttcaactgcgttctacgcaatatggaatatctttgctggcttcattatcccccgaccaaggataccgatatggtggcgatggtactcgtgggcatgcccagtggcttggacactatatggacttgtggcttcccaatttggagatattacagatgttaagctggaagacggagaaatagtgaaagatttcatcgacagattctttgggtttacccatgaccacttgggctatgcagccactgccgttgttggtttcacggttctcttcagtttcatgtttgccttctccatcaaagtattcaacttccagataagataagaacacatctcaaacggattcagctgtgattactgattacgctcacttttgtaatacaagg

SEQ ID NO: 117879 - DNA, 1471 bp, Zea Mays
tgatcgacttgcagtttagctccggcatccaataatggctggcttgaaggcagctctgatgaggttcgcagtgcgccgccgcgcggcttcgcttgtacctccggcatcgctgacaccccgggagctgaagcggttgtcggacatagacgaccatgacaggctgcgggtccacgtccccatcatccaattctacgggaggaaggagtccatgcgcggcaaggaccccgcgctggtcatccgtggcgccctcgccaaggctctcgtggactactacccgttagctgggcggctcagagagcttcaagggcgcaagctcgccgtggattgcaccggcgagggagtgctgttcaccgaagctgatgccgacgtgcgcctcgatcagtttggcggcggccagggccagctgctgccgccgttcccatgcttgccggagctcattttcgatgtgcaaggctcttccgccatcctagactccccactgctactcttccaggtgacgcggctggcgtgcggtggcttcatcctaggcctgcggttgaaccacaccatggtggatgggcagggagtggtccagtttctgggtgcagtggcggagctggcgcggggtgcacaggcgcctacggtgcggcctgtgtggcgtcgcgaagtgcttgaggcacgcgacccgccacggccgcgtttcccgcaccacgagcttgacgagacgcctgacgccaagggcgccatcatcggtacgctcgacaaaacagtgcagcgctgcatcttcttcgggcctcacgaggtggccgccatccgtgcccagctccctgcgcacctgcagaagagcgccacgaggttcgacgtcgtcgtggggtggctgtggaagtgccgaacggtagcgcttgcaccggaccccaacgaggagatgcggatgatgttcccagttgacgcccgtggccgtgcccaagccgttggtgccgtcggcatccccgttggctactacggcaacgcgttcacgaccccagtcgccatatcgacggccggtgagctctgcagcaaccccctcagctacgcagtggagcttgtgaagaaggccaaacaggaggtggacttcgagtacatgcagtcgacggcggacctcatggtgctgcgcgggcggaggttcgtcatgccgtctgagaccgcgtttggggtgtcagacgtgacaaaggccaagttcgccgatctcgacttcgggtggggcagggcggtgtacggcggaccggcggagggtgtcggtagccccatgttgccatggtttgttagcttcctcttaccattcaagaacgccaatggtgatgatggcatcgccgtgcccatgtccctgcctcaggccgccatggacaggattgttgtggagattgccaagctatctactacaagtaccagcgcaagatgtggctcgccaagtcctggattgtcccccgtcacgaacaaactcgctctgaattga

SEQ ID NO: 117880 - DNA, 104 bp, Zea Mays
acatattacacttgtcctattgattgatcccatatactaccggaatcgcgttctttgtcgagtgtctaggacactcggcaaataccattttacactcggcaaag

SEQ ID NO: 117881 - DNA, 210 bp, Zea Mays
atgtccactcaagatgatacatatcgcactctggaatgcatgctatgtgacaaaaaaggaaagccattgagtcttaagcaacacttcttggaaagaataacaaacaacttctccgaggacaaccttgttggccgtggaggatatggagaagtttacaagggcatttttatatgtcacgttgttggagatgctcttagaaggctggattag

SEQ ID NO: 117882 - DNA, 1905 bp, Zea Mays
atggtgcccaaaatcacggacttcggtttgtcaagactcttgggtaatggaaaaagccacaccattacacaaacaagaataggaacatggggttacatggcacccgagtacttggatgatggagtgatcacaatgaagacagacatctatagcttgggtgtgataatcagacacatggtgaagggacgtaactcggcagacaccactgatgaagaagtactggcaaactggttgattaggctggaaaaggatccatcacagatgatgaggcagcagacgacccgattattatttgaaacagagtacaaagagcaaataaaagcgtgcatggatatatcatggaggtgcacgctgcgtaaaccaatggacaggccaacgacgcagcacatcctacttacactggaggaaacagaagcaaagatcaaatcggtcgttgggcctactccaccaaatgccgggcagcttcagattgccaaatttgggccgtggggtggagatggagggaagacgcgagacataagaatgacgccttgccatttgcatagcgtaacaattagcagtggaactattatcgattctatcgggttttcattcactgatcactatggtcagcaccacacaacagggccttggggcggtaaggagggtacgaataagattgaactaggcccttcggagtttcttacaggagtatctggaacaagcggcccattcaaaaatctaacaaatgttgtaacgtcacttacgtttgtcaccaatactcgtagttacggaccctttggaaaagggcgaggaacaccgttccacatccaaacgcagaacaacggcaggatcgttggcttctttggccgttctggccagtatctctatgcgattggggacctcagtgggcagcagcgcagcagaggtggaggtccatcgggagaatgtggagacagcgacgacgagcccaacggtgatttcgccaaattcggcccgtggggcggcgacggaggacagccgcaggacatcggaacactaccctgccgtctagacaggatcaagatcagcagtgggcttatcatcgactcgatcgagttctcgtacgctggccctgacagccagtaccgcaccgcaggcccttggggtggtcatggaggagacaacagctcttttcagctagctggttcagagttccttacaggtgtgtctgggtcaatcggcacattcaacggccatgcaaacgtcataacgtctctgacgttcgtcaccaacgctcgtagctacgggccgtttggaagagggcgaggcacatccttccacatcccagtgcagggcaatggctgcatcgtcggtttctttgggcgctccggacggtacctcaacgcgatcggtgtctacacggcgccgaaacccgaaccaaaagcagttgggaaacaagatggtggtgatgaggccgtcgtcgccaggattgggccttggggcggggttggaaatgctctccatgacatcgcagagaggccgcatcgcctgcacagagtgacgatcttcagcgggacgatcgtaaactcgctggagtatctgtacagcgatggcgacgggcagcagcacaccaccggtccgtggggcggctgcggaggaactggtcgaaagattcatcttgcccctgaagagttcatagtggaagttactgggacattccatccatgcgcgtgggacagaacaatacccagtgtcgtgtcctctctgacgctcgtgaccagcacgggcaaaacacacgggcctttcggaacgcagctgggagccgcgttccaggttccggtgcagagcgacagcaggatcgttggcttcttcgcccacggagacaattacatcgaagcaattggcgcctacgtgaagaaattgacagaatccagcaaccgttaa

SEQ ID NO: 117883 - DNA, 2120 bp, Zea Mays
tcagtctctcagtgctgatacttctctccactctcctctttctttccctgtcccgacagagttcgaggaagctggggtgggcctgatgcttctccttctcttgcagtctagcgtccattccacttcgcaagggcttttctttctgttttaagtaaaacggatccagcaacgcaccagttcctgaaacagaaacgtgatgatggattcagtaagcatgaagctgttagcttttgtgttccttctgttgcgatgccagcgggcatcgcttgctcttgctgtcgacttccaagtcgaagcattggttgaaatgaggacgcaacttggtgacaaacgtggtgtccttagtgattggaaggataatcaaatgagcccctgctactgggccaatgttaattgccaagataacaaagtcacaacaataattttgagctcgtcagggttaacaggatccttatcacccagcattgcaaagctaacaactttacagcagctgatactggataacaacaacattactggagggattcctccggagtttggaaacctatcaggtttgacaattctaaaccttggaagaaataatttaaatgggtcaataccggactcccttggacaactttctaaactccaaaatctggatctaagccataattatttgaccggaaatatcccaagctctttctcaaatcttctgtcattgagtgatattaatctggcatataataatataagaggtgcaatcccacaacatctacttcaggtggcccaatacaactatgcaggcaaccacttgaattgtggccaaaatttatctgcatgtgaacgaggcagcacattgacaggtggatccaaaaatttcaagctaaacgtggttattggaagcattgctggagcagtcacattttctgtaactgtagttctagttttgctatggtggcaaagaatgcgttaccggcctgaaatcttcattgacgtgtcaggtcagaatgatcatatgcttgagtttgggcaaataaagcggttctcatggcgggagcttcagattgcaaccagcaatttcagtgaacagaatgttcttggcaagggtggttttggtaaggtgtataaaggagttcttccaggtccaaacagtataaagattgcagtgaaacgactactgaacgtggacagtcgtgatggggaaatggctttcctcagagaagttgaattgataagcattgctgtacacaagaacatattaaggttgataggattctgtacaacaccaacagagaggcttttggtctaccctttcatggagaatcttagtgttgcttcccgtttaagagatataaaactaaacgaaccagcattagattggtctacaagaatgcgaattgctcttggcgctgcctgtggtttggagtaccttcatgagcactgcaatcccaagatcatccaccgtgatgtcaaggctgcaaatgtcctgcttgatgggaactttgaagcagtggtaggagattttgggctggcgaagatggtagacatagggaggaatacagtaacaacaggggttcgtggaactatgggccacgtagctcctgagtacataaagacaggaaggccatcagtgaagacagatatctttggttatggtgtcatgctgttagagattgtgacaggagagcgtgcaattgcattccatcctgaccgtatagaagaagcaggcgagatcctgctcactgatcaggtcaagctatggatggaagaagggcgactactcgacctagtggatcgcaatctagatgctggaaggagagattgtcccagcagagcggtgggaggagtggcagctggctgagctccaacgacgacaacagcatgagatgaggcaacagggcaaactattcaacttcagtgaagagtctcaaaacatccaggaagccattgagttgtcagctggcagatgagctgtcataagaaagtgacatgattttcacttgttccttaaatagaaaggctataagagaaatattgactattaggaatagtctataaggtcctggactcctggtgtaatatcttgcacaagtaactccgtccatatgctgttaatacaacgataggaccacacctagctc

SEQ ID NO: 117884 - DNA, 2258 bp, Zea Mays
tcagtctctcagtgctgatacttctctccactctcctctttctttccctgtcccgacagagttcgaggaagctggggtgggcctgatgcttctccttctcttgcagtctagcgtccattccacttcgcaagggcttttctttctgttttaagtaaaacggatccagcaacgcaccagttcctgaaacagaaacgtgatgatggattcagtaagcatgaagctgttagcttttgtgttccttctgttgcgatgccagcgggcatcgcttgctcttgctgtcgacttccaagtcgaagcattggttgaaatgaggacgcaacttggtgacaaacgtggtgtccttagtgattggaaggataatcaaatgagcccctgctactgggccaatgttaattgccaagataacaaagtcacaacaataattttgagctcgtcagggttaacaggatccttatcacccagcattgcaaagctaacaactttacagcagctgatactggataacaacaacattactggagggattcctccggagtttggaaacctatcaggtttgacaattctaaaccttggaagaaataatttaaatgggtcaataccggactcccttggacaactttctaaactccaaaatctggatctaagccataattatttgaccggaaatatcccaagctctttctcaaatcttctgtcattgagtgatattaatctggcatataataatataagaggtgcaatcccacaacatctacttcaggtggcccaatacaactatgcaggcaaccacttgaattgtggccaaaatttatctgcatgtgaacgaggcagcacattgacaggtggatccaaaaatttcaagctaaacgtggttattggaagcattgctggagcagtcacattttctgtaactgtagttctagttttgctatggtggcaaagaatgcgttaccggcctgaaatcttcattgacgtgtcaggtcagaatgatcatatgcttgagtttgggcaaataaagcggttctcatggcgggagcttcagattgcaaccagcaatttcagtgaacagaatgttcttggcaagggtggttttggtaaggtgtataaaggagttcttccaggtccaaacagtataaagattgcagtgaaacgactactgaacgtggacagtcgtgatggggaaatggctttcctcagagaagttgaattgataagcattgctgtacacaagaacatattaaggttgataggattctgtacaacaccaacagagaggcttttggtctaccctttcatggagaatcttagtgttgcttcccgtttaagagatataaaactaaacgaaccagcattagattggtctacaagaatgcgaattgctcttggcgctgcctgtggtttggagtaccttcatgagcactgcaatcccaagatcatccaccgtgatgtcaaggctgcaaatgtcctgcttgatgggaactttgaagcagtggtaggagattttgggctggcgaagatggtagacatagggaggaatacagtaacaacaggggttcgtggaactatgggccacgtagctcctgagtacataaagacaggaaggccatcagtgaagacagatatctttggttatggtgtcatgctgttagagattgtgacaggagagcgtgcaattgcattccatcctgaccgtatagaagaagcaggcgagatcctgctcactgatcaggtcaagctatggatggaagaagggcgactactcgacctagtggatcgcaatctaggtggcgtctacaaccttgaagagctggagaaggttacccagatagcacttctctgcactcacatggatcctgaacaacgccctacaatgtctgaggtggtgcagatgctggaaggagagattgtcccagcagagcggtgggaggagtggcagctggctgagctccaacgacgacaacagcatgagatgaggcaacagggcaaactattcaacttcagtgaagagtctcaaaacatccaggaagccattgagttgtcagctggcagatgagctgtcataagaaagtgacatgattttcacttgttccttaaatagaaaggctataagagaaatattgactattaggaatagtctataaggtcctggactcctggtgtaatatcttgcacaagtaactccgtccatatgctgttaatacaacgataggaccacacctagctcagaccatgtgtatatcaagaatagactgttctac

SEQ ID NO: 117885 - DNA, 2011 bp, Zea Mays
cagatgtttacaggagaaattccaattggtcacaagagtgcattcgaagcattggttgaaatgaggacgcaacttggtgacaaacgtggtgtccttagtgattggaaggataatcaaatgagcccctgctactgggccaatgttaattgccaagataacaaagtcacaacaataattttgagctcgtcagggttaacaggatccttatcacccagcattgcaaagctaacaactttacagcagctgatactggataacaacaacattactggagggattcctccggagtttggaaacctatcaggtttgacaattctaaaccttggaagaaataatttaaatgggtcaataccggactcccttggacaactttctaaactccaaaatctggatctaagccataattatttgaccggaaatatcccaagctctttctcaaatcttctgtcattgagtgatattaatctggcatataataatataagaggtgcaatcccacaacatctacttcaggtggcccaatacaactatgcaggcaaccacttgaattgtggccaaaatttatctgcatgtgaacgaggcagcacattgacaggtggatccaaaaatttcaagctaaacgtggttattggaagcattgctggagcagtcacattttctgtaactgtagttctagttttgctatggtggcaaagaatgcgttaccggcctgaaatcttcattgacgtgtcaggtcagaatgatcatatgcttgagtttgggcaaataaagcggttctcatggcgggagcttcagattgcaaccagcaatttcagtgaacagaatgttcttggcaagggtggttttggtaaggtgtataaaggagttcttccaggtccaaacagtataaagattgcagtgaaacgactactgaacgtggacagtcgtgatggggaaatggctttcctcagagaagttgaattgataagcattgctgtacacaagaacatattaaggttgataggattctgtacaacaccaacagagaggcttttggtctaccctttcatggagaatcttagtgttgcttcccgtttaagagatataaaactaaacgaaccagcattagattggtctacaagaatgcgaattgctcttggcgctgcctgtggtttggagtaccttcatgagcactgcaatcccaagatcatccaccgtgatgtcaaggctgcaaatgtcctgcttgatgggaactttgaagcagtggtaggagattttgggctggcgaagatggtagacatagggaggaatacagtaacaacaggggttcgtggaactatgggccacgtagctcctgagtacataaagacaggaaggccatcagtgaagacagatatctttggttatggtgtcatgctgttagagattgtgacaggagagcgtgcaattgcattccatcctgaccgtatagaagaagcaggcgagatcctgctcactgatcaggtcaagctatggatggaagaagggcgactactcgacctagtggatcgcaatctaggtggcgtctacaaccttgaagagctggagaaggttacccagatagcacttctctgcactcacatggatcctgaacaacgccctacaatgtctgaggtggtgcagatgctggaaggagagattgtcccagcagagcggtgggaggagtggcagctggctgagctccaacgacgacaacagcatgagatgaggcaacagggcaaactattcaacttcagtgaagagtctcaaaacatccaggaagccattgagttgtcagctggcagatgagctgtcataagaaagtgacatgattttcacttgttccttaaatagaaaggctataagagaaatattgactattaggaatagtctataaggtcctggactcctggtgtaatatcttgcacaagtaactccgtccatatgctgttaatacaacgataggaccacacctagctcagaccatgtgtatatcaagaatagactgttctac

SEQ ID NO: 117886 - DNA, 618 bp, Zea Mays
agtagcagcagcagtagtagtagtagtagtagtagtagtagtagcagcagcagcagcagcagcagcagtagtagtagtagtagtagtagtagtagtagcagtagcagtagtagtagcagtagcagcagtagtagtagtagcaatagtagtagtagcagtagtagcagtagcagcagtagcagcagcagtagtagtagtagtagtagtagtagtagtagtagtagtagtagtagtaggagcagcagtagcagtagtagcagtagcagcatcagtagtagcagtagtagtagtagcagtagtagtaacagtagtagtagcagtagcagtagtagtagcagtagcagcagtagtagtagcagcagcagcaacagcagtagtagtagtagtagcagtagtagtagaagtagcagtagtagttgcagcagtagcagtagtagcagtagtagtagcagtagcagtagtagtagtagtagcagtagcagtagtagtagcagtagcagtagcagcagcagtagtagtagtagtagtagcagcagcagcagtagtagtagtagtagtagcagtagcagcagctgcaacaacagtagtagtagtagtagcagcagcagtagtagtagc

SEQ ID NO: 117887 - DNA, 2419 bp, Zea Mays
cgtaacggcaccgcttcccaggctccacttcccttcgcgcgcacgcctccgcctccgcccccgcgacttcgtcgagcacctgcacttgcacctccacgggcgcgcccatggcaaccggatccgccgcgggagaggagtcatcggcggcggcgcgccgcctccgccgcctctccctgcacctcctccagcccgccccggccccggccgaccgccaccagcagccgctggccctcgcggcgtgcgcgcgccgcgtcgagggcggcgcggacgtggcggcggcgctcgcggcgtacctccgcggccggcaccgcgccgcgcagatgcggctgttcgacttcttccgggcgcgccccgacctgcagacgcccgtcgagctgcccacggccgcgcaccgcgagctctgctaccgccagctgcgcgcgctcgtgcgcgaggccggggtgcgcccgctcacgctcatggccaccgaccccgccgagtacttcgccgtcatggaggccgccggcggggccgacatctccctcggcgtcaagctcggcgtccagtacagtctctggggtggttctgtcataaatctaggaaccaaaaagcacagagataagtactttgatggaattgacaatttggattatccaggctgtttcgcaatgacagaactacatcatggatcgaatgtccaagccctacagactaccgctacatttgatcctgtcactgatgagttcattattaacactccaaatgatggagctattaagtggtggatcggcaatgctgcgcttcatggaaaatttgctactgtctttgcaaggttaattttaccccttcaaggaaaaggaggggaggctgctgatatgggcatccacgcgtttatcgtccccatacgggaccttgaaactcacgctgttcttcctggaatcgagatcaatgactgtgggcacaagatcggcctaaatggtgtagacaatggtgcgctgaggttccgctcagttaggatacccagagacaatcttcttaatcggttcggtgatgtgtcacgggatgggaaatacacgagcagtctgcccacaattaacaaaagatttgcagcaacccttggggagcttgtcggtggacgagttggcattgcttactgttctgtgggtgttctcaaagtcgcagtaacgatcgctgtgaggtatgctctgctgcgccaccaattcggtccacctaagcagcccgagatcagtgtgttggattatcagtctcaccagcacaaactgatgcccatgttagcgtcgtcgtatgcgtttcacttcgccacggtgcagttagtggataagtactcggaaatgaagaaaaccaacgatgaggaccttattgctgacgtgcatgttctttcgtctgggttgaaagcctacataacttcatatacagccaagtctataagcgtatgtagagaagcctgtggtggccatggctatgctgctgtaaatcgttttggagctctgcgcaatgaccatgatatattccaaacgtttgagggggacaatactgttcttctgcagcaggtcgctggagatctcctgaagcagtaccaggagaagtttaagggagggacactttcagtcacctggaattacttaagggactccatgggtacctacctgtcccagcctaatcctgtcactgcccgatgggagggcgaagatcatcttcgggatcctaatttccagctggatgcattcagataccgaacgtctcggttgctacacagtgtcgctgctcggctacagaaacacagcaagacgcttggaggtttcggtgcgtggaatagatgtctgaaccatctgcttacgcttgcggaatcacacatcgagtccgtcatccttgcaaagttcattgaatcggtgaaaagctgccctgacgaaaaatcacgggaagtattgaagctggtatgcgacctttatgcgctcgacaggatttggcaagatatcggaacgtatcggaatgtagactacgttgccccaaacaaagctaaggctattcataagctgacagactacctcagttaccaagtgaggcttgtggcgcgagaactcgtcgacgcatttgaccttccagatcttatcatccgtgccccaattggcatgcaatcggaggcctatgcacagtacacccagtatgttggcttctagtagagtatatacatataataagtccgagaaatatattacgaagttgcaatatagagatagatcataggtgagcaaataagtttcagtagtacatgtaaactgtaaatgtaaagcagtggatccgtaaagcactggctccgtgtgaataaattgtcagattatttttttgtctgaattgttttcaattaagatttttatcagtaagctaaaaatggctatacagactttcttttcacttggtt

SEQ ID NO: 117888 - DNA, 874 bp, Zea Mays
atggcacgcaagaaggtgaatctgcagtggatctccaacaacgctacgcggcgcgcgacgtacaagagacgcacccagggcctggagaagaaggccagcgagctggccacgctctgcggcatcaagctgtgcgtcgtggtgtacggcgagggcgaggcgcagccgaaggtatggccctcgcacgaagaggcgaagcagctcctcctgaaattcaacggcatgctggatgtcggtagcctcaagaagacgaagaaccaggaggagttcctccacggccgctccctgaggctccgcgagcaggtgagcaagctggacctcgagaaccgcgagcgggagaccctggacctcctccatgacagcatgtgcggagggcgtctcgccggcggcgaaggcagaggcaaggacgagctccttagcctgagggagatggtggagacgaagatgaggagaatcaaagcgcggctccagcagctcgtcgggcagggagtcctccccccaaagccgccattgccggcggcaccatcatcgttgcaggcacaggcttcttgctacacctacaataacatgcaaagcatggcactgctagaggaacaccggcactcgcagcaggattggagagctgttcacaacctagccccaaactacagtcccttcgcaggtagtagcagcgagccagtgggctgtgaagtgacgacgcacccttacaataatctgggtgcttgttcagggctcccatcggcatagtattgggaagttcatcccatagtatgttctcactgcattctgcatcttgctcttaagggtcctatcttagagtcactcgtttgcatcccatgtcttgtgcttagcagcagaagttatcgttcatgttgtc

SEQ ID NO: 117889 - DNA, 120 bp, Zea Mays
ctatccaaataccaccaacgtggatgctcaaaactagttttagatgaaccagccaagtttcagtacccactacaacccactacaggaaacttgttaaagaataaattaaagaacgtggat

SEQ ID NO: 117890 - DNA, 2108 bp, Zea Mays
acacacccggaccccggtctgcgtttgtccctgcgggctgcggccctgcctcttctcgtctcccgttcccctcgccgcgtgagctctctctctctctctctctcctctgtggtgacgactgggcgcccgcacccctggcagccgccgccgcccagtccccgtcgggcccttcggcaggtcttcttcggccccttcgccggcgacgagccgcaccaggcgtacatgtgtacacccagcccaggcccttaactgcgcccgcccctgcgactggttttcctgctggtttctgtggatttggctgccggaggattggtgcagcctttaggatcacggtagattcgctgtgaaatccgaagggtgctcaggtcatgttgggggaccagcgcatgatactgggcttagactcggcaacctcatcaagcactgcccctgatttgacccgcgctgaagaggatccttctgtgagcaggagctgcgtgatcgaccgcctgcaggtggggtgggcgcagaagggaggacaggtggagggtctggtgaattgttatagcaagaagaagaacaagaccggcagtggttcgaggaatcttgcagccagagcctggtcctccgagatggagggttctgatgagggtggagaagtcaacacgggcgacctcatcggcgggatcggcagggagttggccatttcatgcctgctccgtcttccccggtcttactattatgatgtggcatgtgttaatcgatctttctactcccttgtgaggtttggggagctttacaggttgaggcgtgaggctgggatcgtcgagcagatgatctactgctcatgcaatgttctcgagtgggaaggttttgatccgcgccgccaacggtggttcagcatcccttccatgcctcccatagaatgcttcacacttgctgataaagaatccctggccgtgggcaccaacatcctcgtctttgggaagagggtggaagcccatgttgtgctgaggtatagccttctcactaactcttggactacaggagaaatgatgaacacaccaaggtgcttatttggctccgcaagcttcggtgagaaggctattgtagctggcggtattggccagaacggtacattggactctgctgagctttatgattctgagatgcagacatggaccactcttccaagcatgaatagggcacggcagatgtgctctggtttcttcatggatggcaagttctatgtcatcggtgggaaatctgagaggcacaatgagatccttagttgtgctgaggagtttgacttggagagcagcacctggcgcttgatcccagatatggcacagggtcttaatggtggaagtggtgctccacctcttgttgctgttgtgaataatgaactttatgctgctgactatgcaacgaaggaggttaggaaatatgacaaggaaaataatgcatggatcactcttggattgttacccgggaggtatacatcagttcatggctggggcattgctttccgtagttgtggagatatgctcattgtaattggtgcaatgagtgctggtggtagcggggtgattgaaatttgttcctgggtacccaataatggactgccagattggaagatcattggcacccgccgttccggaagctttgtgtacaattgtgctgtgatgagttgttgacataccagggctattacattatcaactgtacatcttgaccaaaaggaaggataaagaaggcaaattctgctgagtctgtttactccttgatgggtaacttctgcccacaggcattttaggctaagctgaaggtccgatagaacttctcatgtagcttcttacatgcctatgtctaatctcttcattttaattccatttggagggcctgcaattgatttctggaacgtgggacatgcagtgcagtattttagattaataatttggtgcaacctcaaaaattttgatcttccctgtgtatcttgatcaaagtttttttagctccagagaatagccttacattggcaaatcatttgcccatagattgtaagaaataaagaaaaaagaaatatctttgttgacaattgttgccttttccctttgtcttctcttggt

SEQ ID NO: 117891 - DNA, 1995 bp, Zea Mays
acacccggaccccggtctgcgtttgtccctgcgggctgcggccctgcctcttctcgtctcccgttcccctcgccgcgtgagctctctctctctctctctctcctctgtggtgacgactgggcgcccgcacccctggcagccgccgccgcccagtccccgtcgggcccttcggcaggtcttcttcggccccttcgccggcgacgagccgcaccaggcgtacatgtgtacacccagcccaggcccttaactgcgcccgcccctgcgactggttttcctgctggtttctgtggatttggctgccggaggattggtgcagcctttaggatcacggtagattcgctgtgaaatccgaagggtgctcaggagctgcgtgatcgaccgcctgcaggtggggtgggcgcagaagggaggacaggtggagggtctggtgaattgttatagcaagaagaagaacaagaccggcagtggttcgaggaatcttgcagccagagcctggtcctccgagatggagggttctgatgagggtggagaagtcaacacgggcgacctcatcggcgggatcggcagggagttggccatttcatgcctgctccgtcttccccggtcttactattatgatgtggcatgtgttaatcgatctttctactcccttgtgaggtttggggagctttacaggttgaggcgtgaggctgggatcgtcgagcagatgatctactgctcatgcaatgttctcgagtgggaaggttttgatccgcgccgccaacggtggttcagcatcccttccatgcctcccatagaatgcttcacacttgctgataaagaatccctggccgtgggcaccaacatcctcgtctttgggaagagggtggaagcccatgttgtgctgaggtatagccttctcactaactcttggactacaggagaaatgatgaacacaccaaggtgcttatttggctccgcaagcttcggtgagaaggctattgtagctggcggtattggccagaacggtacattggactctgctgagctttatgattctgagatgcagacatggaccactcttccaagcatgaatagggcacggcagatgtgctctggtttcttcatggatggcaagttctatgtcatcggtgggaaatctgagaggcacaatgagatccttagttgtgctgaggagtttgacttggagagcagcacctggcgcttgatcccagatatggcacagggtcttaatggtggaagtggtgctccacctcttgttgctgttgtgaataatgaactttatgctgctgactatgcaacgaaggaggttaggaaatatgacaaggaaaataatgcatggatcactcttggattgttacccgggaggtatacatcagttcatggctggggcattgctttccgtagttgtggagatatgctcattgtaattggtgcaatgagtgctggtggtagcggggtgattgaaatttgttcctgggtacccaataatggactgccagattggaagatcattggcacccgccgttccggaagctttgtgtacaattgtgctgtgatgagttgttgacataccagggctattacattatcaactgtacatcttgaccaaaaggaaggataaagaaggcaaattctgctgagtctgtttactccttgatgggtaacttctgcccacaggcattttaggctaagctgaaggtaagctatctactatctatgaaggcacaagttggatgatagcacattgtcttcatgagcttataagtgtggtgattagtcatgtatatgtttagcatataataggtgattgtgtaattcagtttgtgtaatggtccattcaaacgtaacaaaatcgataggaggatgaacagaagattgacgtctgtgttctgggcctgctctctgatgagggacacacatcgggcatgcatatgtgagcccttcagcggatatcatatgtttgtatggttttctgtcagctgaattgaactt

SEQ ID NO: 117892 - DNA, 887 bp, Zea Mays
cctgctaatgaagaggaagtgcctccttttctagcaataatttcagtgcagaacaaactaaagaacagaacaaggatatggcattgtgcttcacctggagaaccaagaaaaggcagaagcagaaaggacaagcaatcaaacaaatagtgttactaactagtgtgacaagcctctgaaaaagaatcagatccatcgctacatttgatggagatgttctttaaattacatgccgtcgattttttttttcactaattgtttaaccacagattcctcattcatccatatgtgctgcaggattcaagttggtagaatctccaacgtaacatctccattagctgtgtctgtctcagtggctacatgcctacatgatgaagaaggtttctatggttattattatcaatacttcagcattatgaataatcttttgctggggaaatcattggtgggtcacgatctacagtgttggattagatgcacctcacctgcaggctgaaggatgtagtacccaattactcaattatttcgtgtggatgctgcacttgtcctcgagaagatgaagcatcaccagacatatcgattccatccgaggccagatgcaagtgaaggcggcccagcactcatgtctgtcttggtgtatcccttcacttgccattcgtcgttgtccttcacttgccatttactgtacaaaggggaaaaaatgcgattctgatagagaattggaagttttgtcgcgagcttatttactttgttggtgctgtcaggtcaggaaatggacgattgcagattaccgaacactactgcctgttggggaaaaaaaatggtgctcttgcatcggacgcaatggcaagttggcagtatcttatgcctttggcaattctcttgtggtc

SEQ ID NO: 117893 - DNA, 891 bp, Zea Mays
gccacacgctcgctgcgcctgcgtgcgtgtgctcgcctcccaccctccccgcactagctctgcactttccctggcagtcgtcccttgttcctgacttcctgcctgagcgcatccggccaccttctatccgcccgccagtccccgccggcctccgcggatcatctgcctgggatcaagatccgtcgaggccgaggcacccgcgcgccaaagatcgtttcttgatctaaatttgggtggtcgtagggatcaaagctcggttctctgcggtgcagttgagaggggtaaaagttgactctgatttgttgaggtgtctgggtgtgagagtcggatgggttctgtgtgaaagctggtgtctctatagtagttcgaaaggttgagcaatttggtttagatactgtggcgagggagaaggaagatggtttcttggtcagggggggctttagcctgtagggttagggagtagtgctgttcatcttatctatgctctgtgtgctgttaaatatctgaattggattctttgtgtattttccaatgagaatagttagttgcattatttgctctcaatataagaaggacgataagcctttgatctaaaatataataattacttggatcaaattggctttagtttcttgatgggttgtatgacagcatgtgcagtttaagatttttgctgttgttgtgaggtaaagagaaagaatagctagcttgatatgacttcttggactgttcatagtgttcttgtgttgttggatttgaaaggctggctaatttggtaggttaatatagcaaccagtagttataacataatttttatttgcaagattagaaaattgtattgagttcttgatgcagattcaaatagactttttattgctggtttgatccttg

SEQ ID NO: 117894 - DNA, 1435 bp, Zea Mays
gccacacgctcgctgcgcctgcgtgcgtgtgctcgcctcccaccctccccgcactagctctgcactttccctggcagtcgtcccttgttcctgacttcctgcctgagcgcatccggccaccttctatccgcccgccagtccccgccggcctccgcggatcatctgcctgggatcaagatccgtcgaggccgaggcacccgcgcgccaaagatcgtttcttgatctaaatttgggtggtcgtagggatcaaagctcggttctctgcggtgcagttgagagggcaccaatattcttggcatggtggctgacacggaaagctcagattcactgcctggcagttcaaatgctgcttctgagatgcctgctaatgggtctattcaccgaaagtctcaggaaaagccccccaaaaaaacacataaagctgaacgagagaagcttaaacgtgatcagttgaatgacctttttgttgagctcggcagtatgctagatcttgatcgacaaaacactggaaaggctacagtgctaggtgatgctgcgcgagtactgcgagatctaatcactcaagtggaatctctcaggcaggaacaatctgctcttgtatcggagcgccaatatgtcagttccgagaagaatgagctgcaagaggagaacagttcgctcaagtcccaaatatcggaactacaaaccgagctctgcgcaaggatgaggagcagcagcctgagccaaaccagcatcgggatgtcggatccggcaactcaccagcagatgcagatgtggagcagcattccccacttaagctccgtggccatggcggcgcgcccagcaagtgcagcgtccccgttgcacggccaggagggctactctgctgacgccggtcaagcgggctacgcgccgcagccgcaacctcgggagctgcagctctttccggggtcatcggcatcgtcttcaccggagcgtgaacgttcttcccggctcggaagcggccaggccacgccgccgagcctgacagattccttgccgggtcagctctgcctgagcctcctacagccatctcaggaagcaagcggcggcggcggcggcggcgtcatgtcgcgcagcagagaggaacggcgggacgggtagccaactgacagacaacgcacttgaatcggggtgtgtggcggcggcgattgtcctgtaaataccaagaattccgtccctttactggctcgttcatccagaactaatgctggtagctgccctgtgttgagcggcagctctgcttgttctagaagcttctgagaacatgtgtgggctatgttttccatgagattgtaagatgtgaggtggagccgctagaacacttagcgtgcgttttactgacagtgtggagtgctgctccttagttggaatagaaaaatgcaatttgatggctgtgctgctgtcttgatctgtt

SEQ ID NO: 117895 - DNA, 1846 bp, Zea Mays
ggtcaaacctcgccggctttctggcgcggtcagcgtcgtcgtcgatcaccgacacatgggtcagcatgtgcatgctcatctgctgcggtgctgtcccccactctctcagtctcactgacgagatgcttctgcaaaccctttttctatgtatggataatataatatcgtcaacgaagaacacatgtgtctgctactaccaataatcatcatggccctcgtcaccttagctactccgatccatgcataaatacacgtgctccgcgcccgcagtcttcacccatcaacccacactccagcacatagcaatggcgttcacgcggcggcgtccgtgcggcatcctcctcctctccctgctggcggcatccggctcgctgtcgctggccgccaccggcccgggcgacgtggccgtcttctggggccggaacaaggacgagggcacgctgcgcgaggcctgcgacacgggcacctacaccaccgtcatcatctccttcctccgcggcttcggccacggcgccgcctactactcgctcgacctctcgggccacccgctcgcgggcgtcggcgccgacgtcaagcactgccaggccaagggcatcctcgtgctcctctccatcggcgggccgcccaacaccaacaccggcgccggcgccggctactccctcccgtccgcgcgggcggcggcggacctcgccgcgtacctgtgggacgcctacctgggcggctcgcgcgcggggctgcgccgcccgttcggcgacgcggcgctggacggcgtcgacctgtacatcgaccagggcggcgtcgacggccactacgacgagctggccaggcgcctctacgcctacaacaggagctaccgcggcaggctcggggtgacgctgacggccacggtgcggtgcgcgtacccggacccgcgcgcgcaggcggcgctcgccacggggctcgtctcccgcgtccacgtccgcctgtacggcgacctcaagtgcacctggtccgaccgggaggcgtgggagaagtgggccgcggcgtacccggccagccgcgtgttcgtcggcgtcgtggcgtcgcccgaggcggacaaggacgcgtacatgttccagaaggacctctactacaacgtgctgcagttcgcccagaaggcgcccaactacggtggcctcatgatctgggataggtactacgacaagatgaaccactacatcagcagcagctaataattaagcttcccatccacatccatccacatccacccggtttatcacctaatatataatagtattattgtatttttcttcttaactttataatacactgtaatgtaataatgtgatgatctgatgatccaccaacggaataaaatggtcagcttccagccggtgggccgcgccactccgtcgcctggtctctgggcctgcagcgccgcgccgctcctggctcgcgcgcgcggagcgacctgcaccgctacgtcttgggcctgtccgggctgggccgcctcctcggctgctctgcctggactcaggcttagggacgataatgggccccgatcccgattcctcgtggtgcatgttttccctattaagattagctcaaattgataaaataaaaacaagattaataataaccaaaagcgaaggaatcaaaacagcaacagaagcaacaacgcctcgcaagacaaaggcgcgtgattcaaggagagtaaagggagaaactgaaaactaacagccagtaaaagttgcggccaccaaagaaaactgtgtgccccttttctccttaaactaaggaaaaaagttatcatgccgaacaaaataggattccttaagataagataagatatggcagaaaaaaaaaa

SEQ ID NO: 117896 - DNA, 267 bp, Zea Mays
atggcacaagaggataccaactctgcggtggataagatgggaacatctcaagcaccaaggcagcacttgtcacaaaatagggcctcactgaccagcaaggtgacagcaaaaattaggaagattctgttgaaagctaaggcacccaggaagaagaaaactactatgtatccggtcctagcagctgcactcaaatttcataaagatgatgacgtttgtcctgcagctgctggagtgaagcagcagcagcagcacaacaaggagatgtag

SEQ ID NO: 117897 - DNA, 322 bp, Zea Mays
gtcgagcaggactggaggtggcggcgcagcagcaggatacccgagtggcggctccgccgccgtcgtcgtcgccgggcgcacaacaccatcaggtggtggctaattcatcgatctagctgtataataatagttaaatacactctactggatcggagtgacaacttcatcgttctcgtacgtcattcaggaggccgccggcggcgccgtagctgcggaggcggcgcccgtcgggaggaagaggacggagctggagctggtggaggactaccctggctccggcgccaacgaccgccactcgccgtgggcacagaagcggaggaac

SEQ ID NO: 117898 - DNA, 884 bp, Zea Mays
aatggagaattcgtcgtccgctgcagcatgccactgtttggttctccaagagccatgcggcatcaacctcttcctcaaattcctcacctggtccgtctcagtgttccagattctcctcccctgctcatgcaaaccctgcaactgcaactgcagctgcagctgcaaccaaggctctgccgagaaggtgatacagacaccggttattaccacggcagacaaagaagtaacagagacaaggaacaaagatcaagatgatgagacggcgctggcacaagaagatatcaaaacggtaatgagaaacatagggtttaatttggaccaaccagagaacggcatggccattggcgatgattctgtagctcgggttttcgacgaggacgagccgagcctgcaggaggtatggcaggcattctcggtgttcgatcacaacaatgatgggtacttcgacgcatcagatttgcagcgggtgctcgggagtctaggattaagagaaggtctagggatggatgagtgcgagcagatgatcgccaagtatgacacgaacaaggacgggaggatagatgttgcggagttcaccagggttttggagtctgctggcatttgctaaactaatttgtttgtttgtgtttgtgtgtgtttgctttacccgaccgcgcgtgttcgaccagcagcaaggacatgatactaacaggatgctgagatttggtctggaagagtaacagtgttagtgtattcagaggaccctccgtttctccactagctagtttgcgcgtggcgcatatggctaggctcctggtctttcactaacaccggttgagcactgcctatatacatttttgtagtaacacttccggatcgatcaatcaagctatttttttgtatta

SEQ ID NO: 117899 - DNA, 141 bp, Zea Mays
gagtacgtgattttttttaaatgtgtagctagacgtggggaaaagaatatagaaggtgctttctttaaaaaaaatacgttagctaaagattgttggactgagatttgttccccacgctaaaaatacaaaaggaaaaaaaaa

SEQ ID NO: 117900 - DNA, 1422 bp, Zea Mays
caccggtacaaggcacgcactcccagaaatcgcgacacgtcgaaccacgcacgacgcacgcacgcacgcagacgcaggcgaagacggcatgcgcgccctgatgccggagcagaggaagggtcggtcgcggctcgccgccgtccgggtggggcggtcgccggcggcggcgtcgccgtcccgccgccgccgcaagagcgggagcggctcgacggcggcgcgcccggtgccgacgccgggcccgtcgcggtcgcggacgcggacgcggcgggaggggaagaggcgggcgctcgcgcgctccgcgtccgagccgctgctctggttcggcgacgcgcgggtccacgacgtgccgccgcacgggcccgggctcgggctcgggctcgattgcccgccgtcccctccgccgccgccgctcgagcgtccgcacacttgcttcgacgtctttgccccggagttcggccgctccccctcctacgcctccctcaccagtccctgcccccgggaggaggcgaaggtggtggtgagcgtgacggttgagggcagcgtcggcccggtgaaggccatggtcaggctgggcgccagcgtcggggaggccattgctgccgtggtcgagaggtacgccagggaggggagaagcccgcgcctggacccggccgcagccgagagcttccaacttcaccactcccacttcagccttgagagtctgaacaagaaggacagaatcggagacgtgggaggtaggaacttctacctgcacaagaacgattcaagcaacgacgggctctacctccagggccaggaggagcccggtgcagatccaagtggtggtgacatcagccggcactcctcctcaggagtaggacaagcatctggtggcgctacaagtcagcaccaggtcctcaccatcgtcatcagcaagctggataagattgggcggcggacgaggcggatctggaggttcatcacctgcaacaactgcgcatgacgcagcacaatgcacaaagcatctgctgcacaacagtgcaggcaagaggtagttagctaattaaccagtgaaaggcttggcatggattctggttaaccagtgtgtggtgtggtgtggtgtgtaatcctaattcctagcagcagttaaccagtgtacatgccattgtggttgtggttaaaccacaagaagagccagtggggaaggggatagccccactaagcagagtcatgggcacctatcgccgatttattaagatatgtgtccatgcgcatgtataaaattcaaaagttgtagctcgaaagaaaaattacagctctctctctctctctctctctctctataccgtggtcggtgctgcagtgtgtcgttgtctgtcgtctctgcccagctgggactggttttacatgaaaaccttgaaaacttgtaaggcttcgattttc

SEQ ID NO: 117901 - DNA, 1304 bp, Zea Mays
aaatttttttcccctagacacggcgatgccttcctcctcgcaaccgctgcgccatcttcggtccacgcccgcaagctccctctccacgacctccactccgccagctctgctcctccttgctctctagcacgcacgcttggaggccgtggaggtcgacgatggaggcgtcgtccagaagaggaaagtttgggggaagcgtgcttggaggtcgacaccgtagctctagcttcgtgcgaaggggctccaagccagcccagatccgtgtccaggctgtggcggcgatgaccgaggacctgatccgcgtccaggctacggcggcgatggcgaaggactcaatctgtgtccagaccaaggtcgcggtggcgacgaaggtgaaggccgaggtggaggtgaagagcgatgcttcctctctctgtcttggggtggggatgacagatgagagtggggtgctgtggtggctcatcgacatcagccgttggcgcccttcccctgcctagttcgacgttgtagcctccctcctactacatcacgagggcaccaccaccatctccaggtaccgtgccgatggaggaaaggagaaacaagttgcaaggtattttgaaggtacctaaaaggttcgggcaggatgagatgagatgggcaggatgaccatgttggatgaagagaagactgggctgacgcagctcgaggggaagcacaccaggttcatcatcaatagtgacgacgagatcggacgagaggaggtggcagatgcgactgagacgagggcggagcttggcgcactgatgcctagggggctgctgctgccggaggggaggcacctgcgcttccacaacgacgaggatgacgaggaataagaatgttcatattcagattgggtatcgacagtggttgtttttcctttcaccagccaaaattccttttgggggcctctatttctacaatttggttatgtattatgtccccattcttcagagaacaaataactcctttaccaatacaaaaaaaggtcctgaccaaagagatagtgtatcatttcgttttctgtactattaaacttgcagttttttttttgtctatgctttctccaatgaaatctacagtattttgttttgtgttttatccaaaatgtcatgaagattgtaattattaatcattcattgttgcttgcagagactgcgtctaacaatttcaagtggtttgtgatgttgaagctttgattaagcaagttgtttctgttcactttatattaaggttcaaatctgaacgttatctaggacattccagcttaattgcctatcagt

SEQ ID NO: 117902 - DNA, 690 bp, Zea Mays
ggaggtctttagtgtatgttatataggtggatgatgagagtaaaaccaatatatatactagcgaatcacttaagccaaccatcagtgtaaattaacagtttacacatatttctttgtatagtgatagttattatatatataggaacatatcatgcatacatgggaccgttgattacatccaatgcaatatagttatatcgtcggcggcgcttcaacgttgccaacaatgaccatggcttgatgttgctgaggacgaaatatgcagcagcacttccaaggcgtttggcatctactgttgactaacattttgtgttcctgagcggccagctgcgcgcacctcaaatggcagaacaatgggatgcatcctgctaagcctatacatatggtctcgtctccctggcaggatgggagtgctgaagacattatcactgccacgatgcaaagtgcagcatgcacgattctcatcatattgctcttcttgacgagttccatggggccaagaactcagagacaattttattgtactatgtttattctttgtttgcttatagttatatagaggctgagatacaccttaggcctatagagatttaaggtagcctcctatattaatgtctagggtaccttttgggatatggttctataacatgtaccagcaatattataaagagggcacaacttggatgtaga

SEQ ID NO: 117903 - DNA, 2875 bp, Zea Mays
agaagtccgcaccccacctgctcgcgcgacgcgtcacgaaaaacacccgattccgcgggcgacgccggcaggcaagatattttccgcctcgcttcatccacgtgtcatccccgtgctctcggcacgcctcccgcaccgaccacgcctcgccagcgccgcttttaaccgcaggcaggctggcgcagtgcgggacgcgtttgcaatacaactgggcgtgctcccgtccacccacctcacgaccgatcggaaatcccatctcccctgcccacccagagagagagaaaaaaaatcacaccaaatcccctccccccgatccatccatcccctcccgccgccgccgcgcgccgctgcctagatccgccttccctcccccgctccccgccgccatggcgtcctcccgcacctcctgggccgacgtcgccgacgccgagcccgccccgcctcccccggtcgccgcccccgccgccgcatccaacggccccgcgcgttcctcctacgttccgccccacctccgcaaccgcccaccagccgccgccgccgccgcgcccgcctccgccgccccgccgccgcgctccaccgccggcctcctcacccgcaccggcggcggcagcagcttcggtgcgggcggcggcggaggattcggcgggggccgcgcccgcggcggtgcccggtgggaccgcgagccggacccgttcgcggactccgccgccgacgccgaggtcccgttcgacgagcaccagaacacggggatcaacttcgacgcgtacgaggacatcccggtcgagatgtccggccgcgacatcccgccccccgtctccaccttcgccgacattgacctcggcgacgcgctcaacgaaaacatccgccggtgcaagtacgtccgccccacccccgtgcagcgccacgccatcccgatctcgctcgccggccgcgacctcatggcctgcgcgcagacgggctccgggaagaccgccgccttctgcttccccatcatcagcggcatcatgaaggccccgtccgcgggaaggccgcagcggggcggcggcatggggatgaggaccgcttacccgtccgcgctcatcctctccccgactagagagctctctatgcagattcatgaagaggcgaggaagttttcgtatcagactggtgttagggtagttgtcgcttatggaggagcgccaattactcagcagttaagagagcttgagagaggtgttgacattcttgtggctacacctggccgattggttgatttattggaaagggcaagagtatctctacagtcaattagataccttgctcttgatgaggcagatagaatgcttgatatggggtttgaaccacaagttagaagaattgttgagcaaatggacatgccacttccaggtgccaggcagacaatgctgtttagtgcgacgttcccaaaagagatccagaaaatggcatcggatttcctggataactacatcttcctggctgttggaagagttgggtcaagtactgatttgattgcccagcgagttgagtttgtgcaggaggcagataaaagaagccacctgatggatcttcttcatgcacaaagagatacaggaaagcaaactctcacgcttgtctttgtggaaaccaagaggggcgctgattcattggaaagctggttgtgcatgaatgggtttccagctacttctattcatggagatagaaaccagcaggaaagagaatatgctctgaggtccttcaagagtgggcaaactcctattttagttgcaactgatgtggcagctcggggcctcgacattcctcatgttgctcatgttgtcaactttgatctccccaatgatattgatgactacgtacacaggattggaagaactggaagagctgggaagagcggacttgccactgccttcttcaatgataataactcatcactggcaagatctcttgctgacctaatgcaagaatctaaccaagaggtacctgcatggctattgcgctatgcagctcgtccttcttatggtggtggtggtggtgggaggaaccggcgatcagggggagggagccgctttggtggccgtgacttccgcaatgattcttcgtcatttggcaaggggggatcccgtggtggtggtgactactatggtggaggcagcagtggtggttatggtggtggcggacacggtggagctggggctccgagtgcctgggattgatgttacagttgctcccaagtagaggggtctgccaagtttaggtcactttttactctagttctatttaggtatacatttttggtaggagctgttatacagcaacaagtacaaggtgaatgtggtcatcccctttcttcttctggttgctactggctgcagtcttaatcttgcagatgttcattacgaagagggtcttgaggacattcaagcacacgagattcctagttaggtgaaattccttggtagggatagtagctaggctctgacaagtagtgcttggtgccctttgctctttttccctttgtcagcgtcgaattttggtggtcggttgtaaagcttgtgttgagggggcttttgcggcttgatttttgtcctggattcgagttttgacaccggaggttgaagaagcggtaggatgatggtagtcctttagatcctgttgtaatgtatttaactgtgaggtgaggctggacacaataaattctgtaggcgtgtttagaggaagaagggggaagttgtgtgtgatggtttcttcagagaagattcctgctactgtgtacttcgaatctgtttttggatggagttaaattgacattatcgatgtcgtccaaatgctgtctcatttactttttgggtgtaatgtttccatgatatgctcgtgc

SEQ ID NO: 117904 - DNA, 2382 bp, Zea Mays
atagcccagcccaagagccacccaaaagtgcctttacgagcgagcgagcgtgcgtgcgtgaggatgacatgtcgctgacctcacacatcatggctccattattgcgtccgccccacttcccgccgcgacagacaactcgcgccaacccaccacgacggctgcggctgcctccctcccttataaaccccggccgcaccatcccggcagcaggccaagcgcaccaccaccaccacagacatcatcagatcaccacccagtgcagcaaaagaaagaaagaaagaaagaaaagaaaaaggcaggcgcgccaaaatggacaacggcggcagcaacggctccgccaccgcctccgcctgctgcaacggcaaaattaaccgcgggccgcacgtggcgatgctggcgacgcccgggatggggcacctgatcccgctggcggagctggcgaagcggctggcgtcgcggcacggcgccacggccacgctcatcacgttcgcgtccacggcgtcgcccacgcagcgcgcgttcctggcctcgctcccgcccgcggtgtcctcgctgtccctcccgcccgtcgacctctccgacctgccccgcgccgccgccatcgagacgcgcatgtcggaggagtgcgcgcgctcggtgccggcgctgacggccgtcctcgccggcctcaggcggagcacggccggccgcctggcggccttcgtggccgacctcttcggcgccgactcgctggacgcggcccgcgccgcgggggtccgccgcaggtgcatcttcttcccatccaacctgcacgtgctcacgctcatcctccacctgccggacctggacgccgccgtgcccggcgcgttccgggacatgccggagccgctgcgcctgcccgggtgcgtgcccgtcccggggcccgacgtgctcatgccgctgcaggacaaggccgacccctgctaccgctggatggtgcaccacggcgccaagtaccgggacgcgcacgccatcctcgtcaactcgttcgacgccgtcgagccgggccccgccaaggtcctgcgccagccggagtcgggcggccccagccgccggtggcccgcggtgtacccgatcggcccgctcatccacgccgacggcgggcggaaggacggcgcgtcgtcgtcgccgtgcctggagtggctggaccggcagccgccccggtcggtggtgttcgtctcgttcgggtccggcggcgcgctgccggcggagcagatgcgggagctggcgctggggctggagctcagcggccagcggttcctgtgggtggtgcggagccccagcgacgggggcgccgtcaacgacaactactacgacgcggagagcaagcgcgaccccttcgcctacctccccgagggcttcgtggaccgcacctgcgccgccggcgtggggctggtggtcccgtcctgggcgccgcagacccaggtgctggcgcacgccgccacgggcgccttcctcacccactgcggctggaactccgtgctcgagagcctcgtctacggcgtgcccatggtggcgtggccgctctacgccgagcagaggcagaacgccgtgctgctctccgacggcgtcggcgctgcgctccgggtgcccgagtcgtccaagcggagggagattatcgcggacacggtgcgcgaggtgatgcgcggggaagggaagggcgccgcggtcagggccaaggtggccgagctgcagaaggccgccgccgaggggctccgcgacgggggagccgccgccgccgcgctggccgaggtggtacaggggtggacgacgacgacaggtggaggagagaaggactaggtggtggtgactggtgatgccgacgcgattggcgcctgccacctgccgcctgccgcctggtgccacagcgatcgtcctcatccagaccaactccaacttgggccgggccaaacgattcgtttgttccttgtccttgtgtataactttggttcacatgctttgcttgctgtatgtaatgtgacctacaggcctgcactttggcacgtagttaattagtagagtactcctagatagctgatctgtgtcatgacgatacgatgtagaagaaggctaccgcttttaattaatttggcactttgtaacttacaactatactgttgggccaggagcattattctcccgaagatcctcatatactagaggagtaatgctgaagattggcttcagcctatgccgttgacagacgtggacacaaagacaacaacttgaaacaaatattgtgcgtgtataaaagagtgaggtaaagtaatatcccttaagataggatcatgtgctttatgtttaactcacgtcccatgttatcctcaattatattttatgttccatatgattgtttacccttca

SEQ ID NO: 117905 - DNA, 1621 bp, Zea Mays
attgagccttggagccaaggctagtgctgttgcgcgaaggagccgaggcaccccgcgcccagcgcaagggcctcatctccttttgcgaggatccaaggcggccatggatcgcggcaagagcacagtagcccgaggacggaggcgaggcccacctccacctctacccgtccacgccccacacgggcgctggcgtgacacaccaccgccctcggcggcggcttgggtgcaggcaaggcgttcgacggaacgcccccctgctcccgagccggcaaggcccagcgcgggacgagaactggagctcctgtcgtgggcggacctcccggcggacatcctggggctcattgtcagtcgtctcccccgcgtcgacgaccgcgccaggctgcgctccgtctgccgggcgtggcgcgccgcggcgcgcgtctacgggcggccgccgccgccgctcccactactcgtgctctccgacttctccttctccgccttgtgcgccggcggggctatgacgggcacacgacgcatcccgctgccctcacaggagatggcggctggcgtccgctgcgtgggctcctccgacgggtggctcgtcggcgtgcagctcaacgaaggtcgctactttggtgacagccagtgtttcctgatgaacgctttctaccaggacgtcgtgcgcctcccgccgccttccgtaaacacccactcccttgatgcgttcagtaaatctctccccatcgccaatggctcaggtgcagtgcaatgcacggtcaatggcgcccggtatgtgatgtcgttctgcaaggtactcttgtcctcctcacctgaccatgatggcaactgcatcgtggctgccttctccgtgcacagaagcacagctagccttgccctctggcggcctgggatggcatcgtggtgcgtgtgccaaggtggctgcatcagtaagttcagtgacattgccttgtaccaggggaaggtgtacatgtttagcaaggtcaccacgaacctctttgtctttgacatctctgaagacgagagaggcctaatggtttctcgtgttgagcgctgtgtgactgaactgcctgatgtcaaggatagctatggacagaggtggaacttagttgagtggcgtgggaaactattgctggttgtgatatacttgggacctgaaggctggtacaatatttgtaaggttggggtatttgaggtggacttgagcacaaaccctttcagattcactgagaccaacagcttggatggcgactgcattttcatcagcccctgcagcagcaattcattctgtgcatgtccgtatgacggagtcgaagatgatcttatctacttcattggtagcctcaaccactcaagaaatgcgtcccctttggataagtttgtgtacaacatgagggatggtacattggcgccatttgctttggaaataacagacgacgaccttcgggcaccagatggcagccggatgaatccaacatggctacttccttctgaatgaacagctgctatagatcaattctggtaattgcgctgctaccttgatgtgatgtgccatgctatttcatttggaagaactggattcaagtctatagatcaatttccattgtgcttatctgacaga

SEQ ID NO: 117906 - DNA, 75 bp, Zea Mays
attatcttctcaccttctatctcaattgcagcatttgggcagtcatccacaagctcatttggccacaacttattt

SEQ ID NO: 117907 - DNA, 513 bp, Zea Mays
ggtacctttgattttactcgggctagtccctccagcagtgttgccactctgcccaactatccgagacatggattgccagctagcagtagcaacaagcagtcctcttttggagcgcttttcccgaacagaagtgctaatgtaatgggtatttttacttgtcaaagttcggctaacgaaggaatagcaaatgttggtgtgcagtttcaggactcaagtgtccatggactgcagaaattgccattcaaatcgatgactcattagcatcctacactgcctggtgatcgaatccgtgtcacctgtatgaatgttggtggattgaacttgcaatgttgttacaacctgacttgactaccacaatatcaatgtggaggtagtctttgagatggctacaaagttacattgaacattttttgccacatctaaaatctgtacctgggatgtcctcaagtaaagacagtcatttgaatatgcatgattagttgtgtgcaaccaaaacatttacatcctccttgc

SEQ ID NO: 117908 - DNA, 891 bp, Zea Mays
atggtaggcgatgtgaggaggtgcggcctaggcctggccatggtggtggccctgctgctcgctgcgctggtgtcgttgcaagcggcggcgcggagacgaggcagaagctgcctactggcagtgctaatgacgatgaccatgcagccgttctcagccgcctgtggaaggacattgatccgtcggggagctggcctccacgtgctcactggcgtctacgatgagaccgtcaacataacaagaaggaacatgatgctgatcggcgatggggtcggtgccaccgtcatcacggggaacaagagcaatgaaataggagtccccatgaacatgacgacgaaagccatgttacaaagctgcccgctgttggtgtgccgtgcaccgaaaggcaagcacaatgtgctgacggccctaggctacaacaacgcaagccacgagtctggcttctcattccacatgtgcaccgtggaagcggcaccgggcgtggacctcaacggcgtggagacctacctcggctgcccctacaggaacttctcccacgtcgccttcatcaagtcatatctcagtcgcgtggtcagccccaacggctgggtcacgtggaacaagaacaagaccgtcaacataacaagaaggaacgtgatgctgattggcgatggggtcggtgccaccgtcatcatagagaacaagagcaatgcaactggtgtccccatgaacatgacgcgacaatgccttgggtcacggcttcatagcatagaacctgacaatcagaaacatggcaaggccggaaaggagcaatgcccaggccatgttccagagctgcctgctgctggtgcgtcgcccacccaaaggcaagcacaatgtgatgacggcgtagggctgcaacaacgccagccgtga

SEQ ID NO: 117909 - DNA, 291 bp, Zea Mays
atgggtgcgagctgcggcacgcaggccaagctgggcaccatggggatggagagggactccgccagcatggagcatggcggccaggaagctggagcaggcgacctgcagaggccgaggagaggagttgaagggagcgtcggtgagctgaagagggtgcggtccgagcgtcggacgccgggtagagcgcgcgacgtaggaggagctcaagcacgctggctagggagagaggagcagggagctatcggcgtgtggagaagaagtcagagagctcgagcagaagagcatgactag

SEQ ID NO: 117910 - DNA, 240 bp, Zea Mays
atgcccgcccgcctactcggcatccacgcgcccatgtatcgcacgctaaaccaaagaatgccagaaaaaggacaagcaaaaaagccgtgtaggggcgatggagcactggagtcactgtggcgccgctgtggaggtgtggaagtggagccgtccgcgctcaacgagtcggcgagggtggacgacggcatgatgcagatccgtgcagactgcggttcgctgcgtcggatccgtgaagcgtga

SEQ ID NO: 117911 - DNA, 842 bp, Zea Mays
tgtttaacttattgctgttgttttctcaacgatatctgtgtactattaatgttattgttgtaacattttttgttctcaattgcagcttctgctctcccaagcatgaacaatgacagatgtaatggatctaatctaaacccgagaaggattgaaaatatattttctcatcctcgccaaccacggtctgttaggcctcgtttgtgtttgtcattagattctgattcagagtagttcagacatcacactgggatagctgaatttgctattaatctggcaaagttggcttccagaatcttgaattttattgtggagggctatcaggttattctggttgatacaaagagaaacaccagtgtggatgctttgttgcattaacctggtaagattcaagtgttctatatgatccaagtgggatctccatagagttcatctaatggttggtacaggatattttctaactgggagtggtttaacgtggctagtggagcaggctgtacattttccctgacatttactgggtataaggaataggggggcatcacttggcacaagacaaatacatgtgaatgttttgtgtgtaccatcattgtatttagggttcgggtgttaatttagatgtttatgaccctgatgtttgatggaaaataaattattccttgatgaagcggtggtcaatgaacagagcccttcagttttcagtcggagctactgatccttcatctgttcctgttctgagccaattaatatttgtatatagacactctaactttggtggttttttgtctgacatatgcagttaagcatcagtccattcatcaaagaatacaacataaaacagaatc

SEQ ID NO: 117912 - DNA, 564 bp, Zea Mays
atggagagccgggtttgccgaggcggggccacggggcccgacgagattgctacgggtgagggcgagcttgccgcgatgtcctcggtggtccaagaacgggtgggtaggaggagggagagccgagagcgcacttgccttggtgatgacgatgtcggagtcaccgagggagacggcgcaggcgccgtcgtggtagatgccggtgatcctgaagtcgcaggcctgctcggtgtcgttgctggcgatgaagacgctgaccttggtgggcccccgcagctggatcatgtacggcttcacgacgctgaacacgaggtcccaccggcgggagctgtcgccatggagctgggtttgccgaggcgaggcggcggcggcgctcgctgttgtagatccgtgggcgggcgcggagggagcacgggagggagcggctgcggcgcggatgcgggatccgtgggggatgcgggatccgttgcattagctttcctgtggacactgcgcgcggggtggggaggccgctgtcgcgctgagcactgtgggcttctctgggccacaagcagatgggcctcctag

SEQ ID NO: 117913 - DNA, 303 bp, Zea Mays
atggtttatttgcttctcaaattggtattgcttttgccagtaggggcggagggcctgttatggccaagtatagcccacgccatacctcaactcagcccagtcgcagcctccctgctagtgcttcccctctgtggccgcgcaacaggcacaactgtagtatcgcaggcgcacaagcgagccatctgctcatcgttccgttcgcgaccgcctctgcctggccggccgccagctgcccgagcacggccgcgcgcctgtgccttactgagtcgccgcctctctgaaagttgcctaaagggggggtga

SEQ ID NO: 117914 - DNA, 889 bp, Zea Mays
gccgtgcgcctcacatcttccctccgccagtccgttgacaccccccccccccccccccccctcggccatccaccggagatgggcgccgccggcaagcctcctcccctcgtctgcttcaaatggccgtggggccctaatcctatcccatcggcgagctccagccccagcccctgcggcgacctcgagctcccctggctcttcaagtccatccgcaccctcgcgcagggcctcctcatcgccggcgacatcccctcccccgcctcttctcccagcggaggagtaaggggcgttcagaggcgcacgggtgccgcggtggtggaggtggaccgcggggacgctgaacagcgcgccctggcggcatcgctcgcgagcgggaggcccgccacggtgctggagttctactccccgcgctgccgcctgtgcgcctctttgcagggcctcgttcgcgagctccaagacggtgccagtggctccgccagtttcgtgctcgctgacgccgaggacgaccggtggctccccgagcttctgcattatgatatcagatacgtcccttgcttcgtgctcctggacaagcacggtagagctctagcgaagactggagtaccaaccagccggcagcacgttgtcgccggtctccatcacctcctgaggatgcagcagccatccggactggaaggaaaccagaatgcgcctccgtcatgaagcccaaatacctgagcaaggcctgtattgacaaagaaaaattttcagaatgtgccttttgtttttgcaagcatgaacaatgggcaaacattgatgcgttaattctttagctggtaagtacagattgaagttggtgcaaaagcaaaaggcaggtggtattttttttatgatatccgccttgaaataa

SEQ ID NO: 117915 - DNA, 2087 bp, Zea Mays
accaatcgaactgaatggaccagtcgacgtcatcgcctccctcgcctatccgctcggccgttggcgctcaccaaaaccacccagaagcctccgcttgaccgcttcactcgctttccgcccgccgcgccatgagcgccgccgcctgcctgttcgctgccgccgtctccctatcattcccgtcgacctccgcaccctcttccgcaagacgccgccgcctccggagccccaccaccctcctccgctgctccccgactcgccgccgtgggccggtccggcggacactcgacgagcggctgctcgaggccgcgccggcggagaccgaagacgtccaaaccgctgttgatgtagaggatggaggagggatcgctgagggcgatgaagtgggaacagaggagatggaggagctggagcagcgaccgccgacgagggctttcgtgaagagcaggcggcagcggcaggaagaggaggaagccgcggcggggcaagaccggttcaagctcatcaatggcaaagagatatttcaagagaaggcttatctggttggtgttgagtgcaaacggacaggagggaacctgttcggcatagaggagtcccttaaggagctggagcagttggctgatacggcgggccttctggtagtcggctcaacctatcagaagctttctaccccaaatccaaggacttacattggttcaggaaaggtttctgaaatcaggactgcaatccaagcacttgatgttgagactgtaattttagacgatgagttatcccctggacaactacgtaacttggaaaagtcatttggtgggagtgtccgagtctgtgatcgaactgctcttattcttgatatttttaatcaaagggcagcaacacatgaagcttctttacaggttactttggcacagatggaatatcaacttcctaggttgacgaaaatgtggagtcacctggaacggcaggctggaggtcaagttaagggtatgggtgagaagcaaattgaagttgacaagcgcatcttgagaactcaaataagtgccttgaggaaagaattggaatctgtacggaaacaccgaaagttgtaccgcaaccgtcgccaatcagttcctattcctgttgtttctctggtaggatatacaaatgctggaaaaagtacactcctgaaccgcttaactggagctgatgtgcttgcagaggataagttatttgccacattagatccaactactagaagggttttgatgaagaatgggactgagttccttctaactgataccgtcggattcattcagaaattacccactatgctggtagcagcatttagagcaacactagaagagatatcggaatcatcagttatagttcatcttgtggacattagccatcctttagctcaacaacagatagatgctgttgaaagagtactgaaggagttggatgtcgagtcaatccccaaattagtcgtgtggaataagattgacaatacggatgaaccattgagtgtaaaagaggaggctcagaaacaaggaataatctgcatatcagcgatgaatggtgatggtttggaagatttatgtaatgcagttcaagcaaagttgaaagactcgatggttcctatagaagcttttgtcccatatgacaaaggagatctcctgaatgacatacataaggttggaatggttgaaaaaatggagtacaaggaaagtgggacatttgtaaaagctcatgtgcctctacctctggcaaggcttctcacacctctacggcagcaggtggcagccactgtgtgatgtgcatgtccccgatcccttgatgccattggcactcacaaaattaccacatcttgtagattcacaaaaggaatagctttgctgtagaaaacttagattatcttcattgtgtttctacggttctaccagagtaccgtatcaacaggtgcacaggactagatagctgtatgtacgcacaacagaaatgtaaatgttctcagcagaatttaagccccgtttggtttgggtagtcacttttagtccctaaaaatataaacatggtgactaaaatagggtaactaaatttaagttctttagtca

SEQ ID NO: 117916 - DNA, 1621 bp, Zea Mays
aatcgaactgaatggaccagtcgacgtcatcgcctccctcgcctatccgctcggccgttggcgctcaccaaaaccacccagaagcctccgcttgaccgcttcactcgctttccgcccgccgcgccatgagcgccgccgcctgcctgttcgctgccgccgtctccctatcattcccgtcgacctccgcaccctcttccgcaagacgccgccgcctccggagccccaccaccctcctccgctgctccccgactcgccgccgtgggccggtccggcggacactcgacgagcggctgctcgaggccgcgccggcggagaccgaagacgtccaaaccgctgttgatgtagaggatggaggagggatcgctgagggcgatgaagtgggaacagaggagatggaggagctggagcagcgaccgccgacgagggctttcgtgaagagcaggcggcagcggcaggaagaggaggaagccgcggcggggcaagaccggttcaagctcatcaatggcaaagaggtagcggattgcgtagcttcagctgcttgcttttgttgctccgacaggcccgcttggcgccggcctgtttgacagattgggcggtttctactcagcgtgtggagaatatgataacctgcagcgatccatcaaattcaccggagagaacttttgattgttacatccccgctagatattttgggccgtgacatgaacaatagagctgtgagttggtgttacctgccagtttcatcatgtctgatttctgaacctgtggacctggctacctgcagatatttcaagagaaggcttatctggttggtgttgagtgcaaacggacaggagggaacctgttcggcatagaggagtcccttaaggagctggagcagttggctgatacggcgggccttctggtagtcggctcaacctatcagaagtaagcttctgtttgacgggaacatctcgactgagcctgcactgtgctctactagcaatcgtggttacacgttctcaccatagataagatgggacaccacggaaaaactgagatgcctggtcaatctaattcgtggtccacagaaacttcacgggcaacttggatagatgaaatgatactgttagttcagattttcaaaatgtactctgcagctgttagggcctaagaaggcccacggaggactgcagcagcagcaacgatgggccctcgaaggggattagataaggatagttagaaataagattagaagtttggttgagattatttagaagattagttgagattatctaggaaggtttcttggatagatgaaatgctactgttagttcagtttttcaaaatgtactctgcagctgttagggcctaaggaggcccacggaggggctgcggcagcagcaaccatgggccctccaaggggattagataaagatagttagagataagattagaagtttggttaagattatttaggagattagttgagattatctaggaagtttatcagttagtagtttgttgagagtttttagaagagttttaaggagatagaatctctagctagataggggcggctagccggcctatttatgtaatcaatgaatgagaaataaaacagacaagaattagaagggag

SEQ ID NO: 117917 - DNA, 2278 bp, Zea Mays
aatcgaactgaatggaccagtcgacgtcatcgcctccctcgcctatccgctcggccgttggcgctcaccaaaaccacccagaagcctccgcttgaccgcttcactcgctttccgcccgccgcgccatgagcgccgccgcctgcctgttcgctgccgccgtctccctatcattcccgtcgacctccgcaccctcttccgcaagacgccgccgcctccggagccccaccaccctcctccgctgctccccgactcgccgccgtgggccggtccggcggacactcgacgagcggctgctcgaggccgcgccggcggagaccgaagacgtccaaaccgctgttgatgtagaggatggaggagggatcgctgagggcgatgaagtgggaacagaggagatggaggagctggagcagcgaccgccgacgagggctttcgtgaagagcaggcggcagcggcaggaagaggaggaagccgcggcggggcaagaccggttcaagctcatcaatggcaaagaggtagcggattgcgtagcttcagctgcttgcttttgttgctccgacaggcccgcttggcgccggcctgtttgacagattgggcggtttctactcagcgtgtggagaatatgataacctgcagcgatccatcaaattcaccggagagaacttttgattgttacatccccgctagatattttgggccgtgacatgaacaatagagctgtgagttggtgttacctgccagtttcatcatgtctgatttctgaacctgtggacctggctacctgcagatatttcaagagaaggcttatctggttggtgttgagtgcaaacggacaggagggaacctgttcggcatagaggagtcccttaaggagctggagcagttggctgatacggcgggccttctggtagtcggctcaacctatcagaagctttctaccccaaatccaaggacttacattggttcaggaaaggtttctgaaatcaggactgcaatccaagcacttgatgttgagactgtaattttagacgatgagttatcccctggacaactacgtaacttggaaaagtcatttggtgggagtgtccgagtctgtgatcgaactgctcttattcttgatatttttaatcaaagggcagcaacacatgaagcttctttacaggttactttggcacagatggaatatcaacttcctaggttgacgaaaatgtggagtcacctggaacggcaggctggaggtcaagttaagggtatgggtgagaagcaaattgaagttgacaagcgcatcttgagaactcaaataagtgccttgaggaaagaattggaatctgtacggaaacaccgaaagttgtaccgcaaccgtcgccaatcagttcctattcctgttgtttctctggtaggatatacaaatgctggaaaaagtacactcctgaaccgcttaactggagctgatgtgcttgcagaggataagttatttgccacattagatccaactactagaagggttttgatgaagaatgggactgagttccttctaactgataccgtcggattcattcagaaattacccactatgctggtagcagcatttagagcaacactagaagagatatcggaatcatcagttatagttcatcttgtggacattagccatcctttagctcaacaacagatagatgctgttgaaagagtactgaaggagttggatgtcgagtcaatccccaaattagtcgtgtggaataagattgacaatacggatgaaccattgagtgtaaaagaggaggctcagaaacaaggaataatctgcatatcagcgatgaatggtgatggtttggaagatttatgtaatgcagttcaagcaaagttgaaagactcgatggttcctatagaagcttttgtcccatatgacaaaggagatctcctgaatgacatacataaggttggaatggttgaaaaaatggagtacaaggaaagtgggacatttgtaaaagctcatgtgcctctacctctggcaaggcttctcacacctctacggcagcaggtggcagccactgtgtgatgtgcatgtccccgatcccttgatgccattggcactcacaaaattaccacatcttgtagattcacaaaaggaatagctttgctgtagaaaacttagattatcttcattgtgtttctacggttctaccagagtaccgtatcaacaggtgcacaggactagatagctgtatgtacgcacaacagaaatgtaaatgttctcagcagaatttaagccccgtttggt

SEQ ID NO: 117918 - DNA, 1834 bp, Zea Mays
tcgcctccctcgcctatccgctcggccgttggcgctcaccaaaaccacccagaagcctccgcttgaccgcttcactcgctttccgcccgccgcgccatgagcgccgccgcctgcctgttcgctgccgccgtctccctatcattcccgtcgacctccgcaccctcttccgcaagacgccgccgcctccggagccccaccaccctcctccgctgctccccgactcgccgccgtgggccggtccggcggacactcgacgagcggctgctcgaggccgcgccggcggagaccgaagacgtccaaaccgctgttgatgtagaggatggaggagggatcgctgagggcgatgaagtgggaacagaggagatggaggagctggagcagcgaccgccgacgagggctttcgtgaagagcaggcggcagcggcaggaagaggaggaagccgcggcggggcaagaccggttcaagctcatcaatggcaaagaggctttctaccccaaatccaaggacttacattggttcaggaaaggtttctgaaatcaggactgcaatccaagcacttgatgttgagactgtaattttagacgatgagttatcccctggacaactacgtaacttggaaaagtcatttggtgggagtgtccgagtctgtgatcgaactgctcttattcttgatatttttaatcaaagggcagcaacacatgaagcttctttacaggttactttggcacagatggaatatcaacttcctaggttgacgaaaatgtggagtcacctggaacggcaggctggaggtcaagttaagggtatgggtgagaagcaaattgaagttgacaagcgcatcttgagaactcaaataagtgccttgaggaaagaattggaatctgtacggaaacaccgaaagttgtaccgcaaccgtcgccaatcagttcctattcctgttgtttctctggtaggatatacaaatgctggaaaaagtacactcctgaaccgcttaactggagctgatgtgcttgcagaggataagttatttgccacattagatccaactactagaagggttttgatgaagaatgggactgagttccttctaactgataccgtcggattcattcagaaattacccactatgctggtagcagcatttagagcaacactagaagagatatcggaatcatcagttatagttcatcttgtggacattagccatcctttagctcaacaacagatagatgctgttgaaagagtactgaaggagttggatgtcgagtcaatccccaaattagtcgtgtggaataagattgacaatacggatgaaccattgagtgtaaaagaggaggctcagaaacaaggaataatctgcatatcagcgatgaatggtgatggtttggaagatttatgtaatgcagttcaagcaaagttgaaagactcgatggttcctatagaagcttttgtcccatatgacaaaggagatctcctgaatgacatacataaggttggaatggttgaaaaaatggagtacaaggaaagtgggacatttgtaaaagctcatgtgcctctacctctggcaaggcttctcacacctctacggcagcaggtggcagccactgtgtgatgtgcatgtccccgatcccttgatgccattggcactcacaaaattaccacatcttgtagattcacaaaaggaatagctttgctgtagaaaacttagattatcttcattgtgtttctacggttctaccagagtaccgtatcaacaggtgcacaggactagatagctgtatgtacgcacaacagaaatgtaaatgttctcagcagaatttaagccccgtttggt

SEQ ID NO: 117919 - DNA, 759 bp, Zea Mays
aattcattcaactacccccaaatagacaacttaggccttatttaaatgcactagagctaataattagctggctgttgcccaactaatagctgatttggtaaaaatagctaatagttgaactattaattgggctgtttggatgtttgcagctaattttagcaactaactattatctcctgtgcattcaaacagggccttagtcatggaagcatgtgcatgggttacttgttaaaattttctttctgaataatcacacatttttgcttattgcaaatctgcaaacctagataatatctagacattcccaagtacacgatatattgatttcttgagaagctttcacttaacagaaaatttgctttgcattattgtttggatttagtgataactcccccctcttgcgatattcactgcaggagtacaaggaaagtgggacatttgtaaaagctcatgtgcctctacctctggcaaggcttctcacacctctacggcagcaggtggcagccactgtgtgatgtgcatgtccccgatcccttgatgccattggcactcacaaaattaccacatcttgtagattcacaaaaggaatagctttgctgtagaaaacttagattatcttcattgtgtttctacggttctaccagagtaccgtatcaacaggtgcacaggactagatagctgtatgtacgcacaacagaaatgtaaatgttctcagcagaatttaagccccgtttggtttgggtaaaaacaaagaaaaaa

SEQ ID NO: 117920 - DNA, 639 bp, Zea Mays
atggatgcatacatacacaggaaggatctggctgagctctgttgctcagcaggcgacgaactggtagtcgacgttgaggtggcccatctggtagccctgcccgttggtgtcgatcttcttgaacaccgtctcgtagtccaggtccaggccgccgttgctgcactggtccacgatcctcgccacgatggacgcgcccgtcgcacggttcttcacccttatgcacttgccgcaggcggcctggcccttctgcccggcgggcccgcagaaggccgtccagccgtgcttctgccgccacgacagcggcttgtcggcgtcccacgtggcgcagtacgcgctcacgcggttcaggtcccacccgttctgcgccgggttgtacaggtggtacgtcgcccgcacgttcgacgcctgctgcgccgccgccatggccgccaccgcgcagagcacgcccgccaccgccagcgccgcccgtcctccggagaccatcatcgccgccgcagcagccatcgtcgttgcctcttttctttgcctgcacgtacgccaccagctccgaactcagcagagatcgggcatgcacagcgatcgatgtgcttaccttgtgcagatcgagccgttagtacataccaaactaacgatatatag

SEQ ID NO: 117921 - DNA, 653 bp, Zea Mays
ttcgtgagacatgacgatacatgagtagtccggtatttaggtaattcagtttattccactgggcatatatgttttattggctcttacgtgtgggatcacatccatataactcttggaataatgttgtcgccgcagttgacgaactggtagttgacggtgaggtggccggcctggaagccctgtccgttggtgtcgatgggcttgaacgccgtgtcgtagtccaggtccaggccgccgttgctgcactggtccacgatcctcaccgtgatggacgcccccgtcgccgtgttgctcaccaggagacactgcccgcacgcggcctggccggtggggccggcgggcccgcagaaggccgtccagccgtacttcatgcgccacgacagcggcttgctggcgtcccacgtcgcgcagtacgcgctcacggcgttgaggtcccagttgttctgctgcgggttgtagaagttgtaggtggcgcgcacgccggaggcctgctgcgccgtggccatggccgccgccgcgcacagcagcaccgcagccagcgccagcttgccgactctcatccccgccatggcaaccgatcgatttagtaataataagctcagatgctgatgatcctagcttgctgccaatattaatggaggaggacgtatgta

SEQ ID NO: 117922 - DNA, 792 bp, Zea Mays
aagcaagtagcagctacatacgtcgtcctccattaatattggcagcaagctaggatcatcagcatctgagcttatatattactacatcgatcggttgccaaatggcggggatgacagtcggcaataagctggcgctggctgcggtgctgctgtgcgcggcggcggccatggccacggcgcagcaggcctccggcgtgcgcgccacctacaacttctacaacccgcagcagaacaactgggacctcaacgccgtgagcgcgtactgcgcgacgtgggacgccagcaagccgctgtcgtggcgcatgaagtacggctggacggccttctgcgggcccgccggccccaccggccaggccgcgtgcgggcagtgtcttctggtgactaacactgcgacgggggcgtccatcacggtgaggatcgtggaccagtgcagcaacggcggcctggacctggactacgacacggcgttcaagcccatcgacaccaacggccagggcttccaggccggccacctcacagtcaactaccagttcgtcaactgcggcgacaactgaactgatagattattcacctgtgcatgcacctatatgtactagcaccactattccaagagttatatggatgtgatcccacacgtaagagccaataaaacatatatacgcccagtggaataaactgaattacctaagtactctcgactactcatgtatctatgtctcacgaaatactacctccgttgtccgttctcaaatatttgtcgtccgctaatttatttttaaactaaaacgtgac

SEQ ID NO: 117923 - DNA, 559 bp, Zea Mays
aaacagcctgcacgcgtcatcatctgtggttttgctcttggttggcccccagctgtcataccatcaggcgcagcaaggtgggagaagaaactggcttccaagatgggcgagcatggaggtggtggtggtggcaatgggaacccgaggtctctcgactggaagcgcgattttttatcgcttcagggtgcattgtggatgctcctatctgaagctacactgtttccgtgagttcagaatgatctgacttaacttgccctgtgcgtgccctgcagctgctccttgttccgagttactttgtttcgaaacgatgccgcttatatatagcaagcaagcacttctctccactggccaatggtgaaaaactaagctagtgcttgctctgtggggatctttacaagttccgttgttatatcctttgttgctactcgtgaagttcctacattatttgccatgccaagttcttttgctcgctagcttcctgtgaagactgtaccatgagttgtacctttgttataagctataatgtttgtaatttgcttcatattatgtggttgatgag

SEQ ID NO: 117924 - DNA, 1410 bp, Zea Mays
atgcgtcggtccctgggcatggtggagacaggtgggatcttggccgaggtcgtcaatttcacagaggaggcgggcacttcaacaacgttggacccagcaggtttccagggggatgtagccagtttcagttcaggacaagggtacggttctgctgtcagcaaggtggagggttcatcgttggggccaccaatggcaggtccattggctgaagctcttgcacaagctgtcgccctgattaatcatgctcttgccaaacctgcacctgaaaccgctgctgatgtaaaacctgtgcctttggggtctcagtttctgtctgatgcaaaggacttgaatcatatgattgagtggggggtggtgcagacgaagttcaaatctttgatgacaatagaagagaagtcgtggcctaaagagttcattgaggtggtgattggtgaatgtttatttgagctgcaatttcgggttgaagaaaacatggatagtgacagtccagttccagtggatatggatgactttagcggtggggaggacgaaaataagtcggatcaattagaggatgtggttcgtgggggtaattctctgccccctaataatagtgctccagatagtggcaaatctgtttcaaagggtgctggtaatgatggtaatactggtaaaaagggagcggcacatgatgtaattagctcggtagtccagtatgctgatctgggtttgggtatgcaaggtgttgaacatgctggtaatcccactcaagctgttgtgccagcaacctcgtcgtgtatggttgtttcggtgtcgtgtactccggatgtggtagctatggctgctgttccagaagcaactatggggctaaccgagtcaggcaggagcaaaagaagaaacaggagcgggaatggggacagcatgcaaagagcttcaaagttgaaggttgctcgcaatttagatgcggtcctctctacaggttttgtttgtgggaataatgataaatcttgggacaaattcctagagttgttaaccaataagttgagtggtgagtctggtagtttcgtagatgccaaacctcgtgaacgatgtcctcgagaacagagtgttgagtgcacccagagttgcagggtagacatgcattcagcagaacgagacggagatgccgaggaggccgagaacgtgagccacgaactgcgcaagatacggtccggccagctcgccgccgtcacgagcttcctgtcgggtgaccgccccttgggcctccacggccacggcgccaccagccagcctcgatatcaccctcatggagttcatgggcaccccgctggcgcacttcttgcccctgagcagccccgccggggcgaggagcaagtggcccttgtcgatgctggctggctaccaccttgcccttgtccgcgaactccctga

SEQ ID NO: 117925 - DNA, 1101 bp, Zea Mays
caccaccgtcttaatggtcttcccagtggttgcacccacctggccaccccgcccagccgcccccacccgcgcgctagcgagtagggaagctctctctctctcttccggtcttcggtctcttccccatcgtctcctccccggtgattcatatatacgcgcgcgctctctctctccggccacagcgcgcggcctagctcgccttgcggaaccgcatcacgcacgccagcagcgctagccaagagcagccagcagatggaaaccacggcccacgccgccgcctccggcacgatccagaacgcccggcaccggacgagcgccctcaagctgtgctaccacctggcagtctccaacgcgatgtacctcctcctagcccccgcggccgcggcggcggcgcactggctctcccgccacagcgcggccgagctcgcgggctcggcccggtccgcggccgccgccaacccgcccctcgccgtggcgctcctggtcctgggcgcggtgctcgcgacggcgtacctgatgcagcgcccgcgcggcgtgtaccttgtggacttcgcgtgctacaagcccggcggcgagcacgtggtgacgcgggagacgttcatgcggcagtcggaggcggcgggggtgttcacgggcgacaacctggcgttccagcgcaagatcctggagcggtccgggctcgggcagggcacctacttccccaaggccgtgctcaactcgccgcccaacccgtgcatggcggaggcccgcgccgaggccgaggccgtcatgttcggcgccatcgaccaggtgctggcgaagacgggcgtccgcgccagggacatcggggtcgtcgtcgtcaactgcagcctcttcaacccgacgccgtcgctctccgccatgatcgtcaaccactacaagctccgcgggaacgtcgccagctacaacctcggcggcatggggtgcagcgcggggctcatctccatcgacctcgccaagcagctgctccaggtgcaccgggacacgtacgccctggtggtgagcatggagaacatcacgctcaactggtactggggcaacaaccgctccatgctcatgtccaactgcctcttccggatgggc

SEQ ID NO: 117926 - DNA, 759 bp, Zea Mays
aaacgactttcaacttttttttacagcagataactcacaacatacttttaatagcatacatttcacaatagttttttcacggttcacaaccgaaccaatcatattctaaatatcccaccaaccgactcatattagtgctcttgccaatttgatagccaaagcaacctatttggagtgtaagaaaaaaccttttgcaatgctttcattaacaatactgtagtattttaggcataacctcgtacgtccaccatcattgttcgctctgccggcgcacgccctccatcaccagcatatagtagttgccctccgtgggtgtcactgtcaggaggacatgacgacgctctccaccttgggcacctcaacggggaagttgtggatctcgtccacccacgggttcccaccggcgggcttctccttggcagggtcgatggtgcgcagcgcccgccacacggcgctgttgcacttgaaccctgagccgaaggcgatctgccacgcgcgggtggccgcggcgcacgcggccctgcgcctccgtgtaggcgagctcgtaccagagcgagctgctggaggtgttcccccagcggtagagcgtcatgcgggacggctccatgtgccaggcgctgagccccaggttcttctcgatggtgtccagcaccgccctccccgccggcgtgatgcagagtgctcgacgcatcttgagtccgggatgtagggccgcacgccgcggggcgccgaacaccctggggcgccaccagcgacgcc

SEQ ID NO: 117927 - DNA, 1674 bp, Zea Mays
tccttctcccataagagacaagaacgaggtcgtctcgccatcgccgccactcctatttaagagctgccggaggtgggggtagatccggcgagccgttcccgctgtccagattcaggaactagactcctccggtccggtcctccccctcccgccccgtctcgctccagcggctccacgccaccgtttgccattcactgccagaatggcgctcaacaaggagtacacgtacgcggagctggagaaggagccgtactggccgttcgagaagctgcgggtctccatcaccggggccggcgggttcatcgcctcccacatcgcgcgccgcctcaagggcgagggccactacgtcgtcgcctccgactggaagaggaacgagcacatgcccgaggacatgttctgccacgagttccacctcgtggacctgagggtcatggacaactgcctcaaggtcaccacgggggttgaccacgtgttcaacctcgcggctgacatgggtgggatggggttcatccagtccaaccactccgtcatcatgtacaacaacaccatgatcagctttaacatgcttgaggctgctagaattaacggcgtcaagaggttcttctatgcatcaagtgcctgcatctaccctgagttcaagcagctggaaactgtagttagcttgaaggagtccgatgcttggcctgccgagcctcaagatgcctatggcctggaaaaactcgcgactgaggagctgtgcaagcactatacaaaggattttggcatcgagtgccggattggtcgctttcacaacatatatggtcccttcggcacatggaaaggtggaagggagaaggcgcctgctgctttctgcaggaaggctctgacctccacagggcgctttgagatgtggggtgatggcctgcaaaccagatccttcacatttattgatgaatgtgttgaaggtgtccttaggttaacaaagtccgatttccgtgagcctgtaaacattggaagcgacgaaatggtgagcatgaacgagatggcggaaatggtcctgagctttgagaacaagcagctgcccatccaccacatccccgggccggagggcgtgcgtgggcgcaactcagacaacacgctcatcaaggagaagcttggctgggctccgactatgaggctgaaggacgggctgaggatcacgtactcctggatcaaggagcagcttgagaaggagaaggccgagggcatggatctgtcggtctacggatcatccaaggtcgtgcagacacaggccccggttcagctcggctccctccgcgccgctgatggcaaggagtgaactttggctgcgccggtcagttgcagggcatgatataccagtaatacacagttgtttcagtttccatgatttgtagtcaccatttcttgattcacatttgactccacaagagaagaccatttggacgatggatattttgtcagaagttacgggatttagttcaaatttgaactgaatacaaaatatcctgacacgatatctgtcgtccaaacacttataataatttccacgctgttttttttcctcttgtgtgcctgtacaatagaatatttcagacttacaacacacatgtaaactggtgtcactttatttcacagaaatagcaatgaataaaataaggttaagcagtcttgaaa

SEQ ID NO: 117928 - DNA, 1809 bp, Zea Mays
ataagagacaagaacgaggtcgtctcgccatcgccgccactcctatttaagagctgccggaggtgggggtagatccggcgagccgttcccgctgtccagattcaggaactagactcctccggtccggtcctccccctcccgccccgtctcgctccagcggctccacgccaccgtttgccattcactgccaggtatacagtctgccccctcccctctttgggggggaaaaacttcccgccggcgctcggggtctggagcaccagttcttctaggatcgccgcgtggtttaggtgtcgcgcgctcgtgcccgcgcatttgttttgtcgctcgcgcgccaatggcgctcaacaaggagtacacgtacgcggagctggagaaggagccgtactggccgttcgagaagctgcgggtctccatcaccggggccggcgggttcatcgcctcccacatcgcgcgccgcctcaagggcgagggccactacgtcgtcgcctccgactggaagaggaacgagcacatgcccgaggacatgttctgccacgagttccacctcgtggacctgagggtcatggacaactgcctcaaggtcaccacgggggttgaccacgtgttcaacctcgcggctgacatgggtgggatggggttcatccagtccaaccactccgtcatcatgtacaacaacaccatgatcagctttaacatgcttgaggctgctagaattaacggcgtcaagaggttcttctatgcatcaagtgcctgcatctaccctgagttcaagcagctggaaactgtagttagcttgaaggagtccgatgcttggcctgccgagcctcaagatgcctatggcctggaaaaactcgcgactgaggagctgtgcaagcactatacaaaggattttggcatcgagtgccggattggtcgctttcacaacatatatggtcccttcggcacatggaaaggtggaagggagaaggcgcctgctgctttctgcaggaaggctctgacctccacagggcgctttgagatgtggggtgatggcctgcaaaccagatccttcacatttattgatgaatgtgttgaaggtgtccttaggttaacaaagtccgatttccgtgagcctgtaaacattggaagcgacgaaatggtgagcatgaacgagatggcggaaatggtcctgagctttgagaacaagcagctgcccatccaccacatccccgggccggagggcgtgcgtgggcgcaactcagacaacacgctcatcaaggagaagcttggctgggctccgactatgaggctgaaggacgggctgaggatcacgtactcctggatcaaggagcagcttgagaaggagaaggccgagggcatggatctgtcggtctacggatcatccaaggtcgtgcagacacaggccccggttcagctcggctccctccgcgccgctgatggcaaggagtgaactttggctgcgccggtcagttgcagggcatgatataccagtaatacacagttgtttcagtttccatgatttgtagtcaccatttcttgattcacatttgactccacaagagaagaccatttggacgatggatattttgtcagaagttacgggatttagttcaaatttgaactgaatacaaaatatcctgacacgatatctgtcgtccaaacacttataataatttccacgctgttttttttcctcttgtgtgcctgtacaatagaatatttcagacttacaacacacatgtaaactggtgtcactttatttcacagaaatagcaatgaataaaataaggttaagcagtcttgaaa

SEQ ID NO: 117929 - DNA, 1381 bp, Zea Mays
aaatgaatttcgaaataaataaataaaaagaaaaccctccataaccctaaggcccactaggggcccatctacctaaccctatcagtcgcgcgtccctggcttctctcccagccgcagccgccgccgccgcctctctctcccttccctcttctctctgccctcacctctctcccccttccatcgcctcgctagtaacaggtcaccgtgtgtgtgcgcgccatggggattcatctgtcgccgcctgccctcgccttctgcctctcggcgcccactcggttccagtggccgcttcgaggaggcgctcgcgcgcatcgaggagctccgggagcgcgacactggcgccgacgacagcagcacagcctcgtcgttcttgagcgacggagaggcggcgtcgcggctagcaggcaagcagcagtcgcactccgcagatttcttgagcgacggagaggcggcgtccggtggcattcagagacgtgcgtgacggtcggaggtcgtcgagcgcgtctagatagcatccaagacaaatagcgttgttggcgatctgaggcagctggtaggcagtctaggcttgggcgcacgcgagccagagagggagggctgggagcacgtcatctccaagagcagcgacgacgtctcctacaaggcctggtgcgacaagcccacgttttcggcgatgcgatgagggttttcggcgatccgtgcttgctagttgcgctctacgatcaggcggagggggtttgagatgtgaatattccactttttcattctagaacatcaaacctgagttgctctacgatcaggcggaggttgttttgtagttgccaattgcgtacatgcattgcaacagatctgggctctagaagctgctaacttggtagcagaaagattgaggcattgcatagcaaaccactggatcaaagagtttagtgaatggccacagtgcatgttcttgagttggcatcaaagttccttccatataataataacaaaatatttgacataatgaatctgttggaggatagacttcaacatgcaaatggagccattgttttggcaacaattaaagtttttctccattcccatgactgttgttcatcaacagcaagagaagaaggaagacaagtcagacaaaacagaagacgagaagaactgatgtatccatgttcatgcttccactgttgaaatgcatattcaacatagcttgctcagctcctatctgttgtttcaacgttgatttaaaagaagagctggtagttgtgggcttttgaacaatagctggaatgatctagctagctatatgtaaatgatctagttgtgaatgatattataactgtgatgcttttgtgaatatataattgtggtgcttttgtgtttatgtgat

SEQ ID NO: 117930 - DNA, 778 bp, Zea Mays
atgccaagtctcccaagtcagtcccaccctcccttgtatttccagctcggccaaagctgtatataacttgcctacagccagctgagctccccatcgatcctgtcctgtccagcaagggagacctggactggaggaggaggacctacctacccggcctccagctctctcgtctcttcctcctcctcctcgaagctccgatccgatcccccaatgtctgacagcagtccagctcccggcgcctactactccggccctcccgccgcgccgccgcccgagtctaagcccgttgacggcggccaggtcaacgccgatgttcctggctactactcctccgtccctgctgcgaaatctggcgccggcggccagggcagctccgctgctcctaaggaatcgggcttcttcgccagctggtgagcatccggagcccaaacaatcgatcaaataaatcaaattaaatctagtcgttgttgcctgcttttgatttcacttgattccttctctgctggtgatgcctctccgtttgttgtatgcatgtatcatcacagttgtgggtgcttctctggcggcgaaaccgcgagatagatagattcagtgttggaccgaggaccatggatggatggatggaacatgcatgcccagtgattgtttgcgccgatgaaagttcaatttgtccggatttattttctctgaaatagtatatgttttttttctccatcggtgagccggtgatcttgtcaatttgtacaataatcattatatgcaaccaactgtgctttaa

SEQ ID NO: 117931 - DNA, 725 bp, Zea Mays
atgccaagtctcccaagtcagtcccaccctcccttgtatttccagctcggccaaagctgtatataacttgcctacagccagctgagctccccatcgatcctgtcctgtccagcaagggagacctggactggaggaggaggacctacctacccggcctccagctctctcgtctcttcctcctcctcctcgaagctccgatccgatcccccaatgtctgacagcagtccagctcccggcgcctactactccggccctcccgccgcgccgccgcccgagtctaagcccgttgacggcggccaggtcaacgccgatgttcctggctactactcctccgtccctgctgcgaaatctggcgccggcggccagggcagctccgctgctcctaaggaatcgggcttcttcgccagctgttgtgggtgcttctctggcggcgaaaccgcgagatagatagattcagtgttggaccgaggaccatggatggatggatggaacatgcatgcccagtgattgtttgcgccgatgaaagttcaatttgtccggatttattttctctgaaatagtatatgttttttttctccatcggtgagccggtgatcttgtcaatttgtacaataatcattatatgcaaccaactgtgctttaatttgctctgatatcaaaatcaaagagtctctcatatagagtttaccttatgatgaatggaagaagaagaaaaaaaacattac

SEQ ID NO: 117932 - DNA, 849 bp, Zea Mays
atgccaagtctcccaagtcagtcccaccctcccttgtatttccagctcggccaaagctgtatataacttgcctacagccagctgagctccccatcgatcctgtcctgtccagcaagggagacctggactggaggaggaggacctacctacccggcctccagctctctcgtctcttcctcctcctcctcgaagctccgatccgatcccccaatgtctgacagcagtccagctcccggcgcctactactccggccctcccgccgcgccgccgcccgagtctaagcccgttgacggcggccaggtcaacgccgatgttcctggtgcgcgcactacctacagatctgatccaagagtctcttcaattctcctaacaatccctccgatcacgttcctcgtctactgtaattgtaacgaccttggcttgtttggcaagagcaggctactactcctccgtccctgctgcgaaatctggcgccggcggccagggcagctccgctgctcctaaggaatcgggcttcttcgccagctgttgtgggtgcttctctggcggcgaaaccgcgagatagatagattcagtgttggaccgaggaccatggatggatggatggaacatgcatgcccagtgattgtttgcgccgatgaaagttcaatttgtccggatttattttctctgaaatagtatatgttttttttctccatcggtgagccggtgatcttgtcaatttgtacaataatcattatatgcaaccaactgtgctttaatttgctctgatatcaaaatcaaagagtctctcatatagagtttaccttatgatgaatggaagaagaagaaaaaaaacattacgaaaag

SEQ ID NO: 117933 - DNA, 2992 bp, Zea Mays
cgatgccggcggctttaagttttttttactactagtatacttgaccggcaggagtaacaatggaggaaggatgcccgtgattaagatttaactcgcttcgaggcagccagcgctggtgtcgcccaccggtcactgtccagggcccattaatgtcctcctgcaggagcagggctgctgactgcgtagatgagagatcaatctctggcgcactggggcgctctcgctcctcccctccgctgatgggtccattcttgcctgccccggctgcttgcttggtgccgaggaagaacggggaggagaaggttgggggggttcttggatgcattcacggcgttcaggctatgaactaagctgagcagcttcttgcgttttaattgagctctcttgttcttgctcccgcgtcccctgcatttcagcaggaaactgatatcggggagcaagcaaggcaaggtttctctcggaagaagcattacagtgccccacttcggcctttctgatttatttgctttgctagtcctcgttaaagttctgaccattttggtggcttggaagtgataaagtttaccaattcactaagccaattgagaaaggatagtgctaactgagctccaatggcttggcaccttgatatccttgtcatggtcactacttgtttgatttttttctcaataagcgagcaatcttcacagagcgagctgctgcagcagctcaggaagcagctggagtaccctaggcagctggaggcttggggcagcccaagcagcgatccctgctacactcaacccactgcagtgcttgcggtcacgtgtgaggaaaatgccatcagagagcttaagataatcggtgacaggatcaccaaaccgccaaagttcagtggcttttctgttcctaatgtcaccctctcagaagcctttgttttggattcgtttgttactacgctggcaaggctaactaccctaagagttgtcatcctggtgtctttgggcctatggggtcccctcccagataagatccaccgtttatcttcactggaagtgcttgatttgagctccaattttctctatggatcgatccctcccaagctgtcagtcatgtcgaagctccatactgtgacactggatggtaactacttcaatggaagtgtgccagactggcttgactcattctcgaacctcactgttcttcggttgcagagtaaccagctgaaggggtccataccggcatcgattggcaaagctgccatgcttacggagctcgcgcttgccggcaatagcatctcgggggatgttccaaatttagtcaacctaaataagcttgagatgctggatttaagggacaacaagttggatggagagcttcctgagatgcctacatcagtggtaacaatcttacttagtaaaaattcactaaagggtgaaattcctgagcagtttggtcagttgaaccggcttcagcaccttgatgtctcgttcaacttccttgtggggagtcctcccgcagagctgtttgctctccctaacatcagttatctgaatttggcggcaaatatgcttagtggttcattgttaagtagtttaacatgcagcagcaccctgggatttgtggatttgtccactaaccgactcacaggcgatctgcccagctgtctgaacggtaatttgaataacaaggtcgttaagtttgatgggaattgctttagagttgaccctgcccaccagcatgaagataaatattgccaacaatctcataatgggagaggatcaaaaaaggatgttggacttgtagtcactgttgttggcatattgtttgttattcttgtgctttctctgttgttaatggcttccaacaaaagaagctgtcagaaagttctggccgaacaacagatccagcaaaagcatacacaagataatttgttgtcaggaatgtcgtctgaactgctggtgaatgcaaggtgcatatctcaagctgtcaagttaggaacacaaatacaaccgtcatatcacatattttctttagaagaactcaaggaagcaacaaagagctttgaaaggtcagcatttttaggcgagggagcaattggaaagctgtacaagggaaggttagagaatgcaaccctgattgccataagatgtttgccattgcaccagcgatattcaattaggaatctaaagcttcgtttagatctccttgcaaagcttcgtcatccaaatttggtttgcttattggggcactgcattgatagtgcggttgatgaatcaactgtgaagagggttttccttgtgtatgaatatgtgcctggtggaactctttcttcttatctttctggaataattcctggttccttatccaatcggctaaaatcttccagtattttggttgacgaacaccatacggcaaagttgagtgactatggattatctataatcacagaggagatatacagacatgaggtaataggacaaaaggaaaaatacttgcaaaatgatgctacagaaatggaaaatttggaggatgatgtatgctcttttggttatattctactggaagtacttatgggcccaaaattacatgagaaaggtggccctttcattttgaaagatctggttgtgtcaatgtctactttggaagagcgcgatcaagttgtggatcctgtcatcattggcacttgttcacaggattcgttatccatcgtggtttcaattatgataaaatgcctgtccatcgaatgctcggctcgaccttccatggaagaagttctctggaacctgcaatatgctgcccaggtccagacaatggcggacagcgaccaacgatcagaagtttcctcacaagcttgttagcatggaaactggaaatagctcgaaactgtaatctagatcggatcaaagatgataggaagcaagaatcatgtttatatgatcttgatttgagaacaggggatgaccggatgagtgagctcggctaactgttgcttcatggctatcctgaattt

SEQ ID NO: 117934 - DNA, 3151 bp, Zea Mays
cgatgccggcggctttaagttttttttactactagtatacttgaccggcaggagtaacaatggaggaaggatgcccgtgattaagatttaactcgcttcgaggcagccagcgctggtgtcgcccaccggtcactgtccagggcccattaatgtcctcctgcaggagcagggctgctgactgcgtagatgagagatcaatctctggcgcactggggcgctctcgctcctcccctccgctgatgggtccattcttgcctgccccggctgcttgcttggtgccgaggaagaacggggaggagaaggttgggggggttcttggatgcattcacggcgttcaggctatgaactaagctgagcagcttcttgcgttttaattgagctctcttgttcttgctcccgcgtcccctgcatttcaggaaactgatatcggggagcaagcaaggcaaggtttctctcggaagaagcattacagtgccccacttcggcctttctgatttatttgctttgctagtcctcgttaaagttctgaccattttggtggcttggaagtgataaagtttaccaattcactaagccaattgagaaaggatagtgctaactgagctccaatggcttggcaccttgatatccttgtcatggtcactacttgtttgatttttttctcaataagcgagcaatcttcacagagcgagctgctgcagcagctcaggaagcagctggagtaccctaggcagctggaggcttggggcagcccaagcagcgatccctgctacactcaacccactgcagtgcttgcggtcacgtgtgaggaaaatgccatcagagagcttaagataatcggtgacaggatcaccaaaccgccaaagttcagtggcttttctgttcctaatgtcaccctctcagaagcctttgttttggattcgtttgttactacgctggcaaggctaactaccctaagagttgtcatcctggtgtctttgggcctatggggtcccctcccagataagatccaccgtttatcttcactggaagtgcttgatttgagctccaattttctctatggatcgatccctcccaagctgtcagtcatgtcgaagctccatactgtgacactggatggtaactacttcaatggaagtgtgccagactggcttgactcattctcgaacctcactgttcttcggttgcagagtaaccagctgaaggggtccataccggcatcgattggcaaagctgccatgcttacggagctcgcgcttgccggcaatagcatctcgggggatgttccaaatttagtcaacctaaataagcttgagatgctggatttaagggacaacaagttggatggagagcttcctgagatgcctacatcagtggtaacaatcttacttagtaaaaattcactaaagggtgaaattcctgagcagtttggtcagttgaaccggcttcagcaccttgatgtctcgttcaacttccttgtggggagtcctcccgcagagctgtttgctctccctaacatcagttatctgaatttggcggcaaatatgcttagtggttcattgttaagtagtttaacatgcagcagcaccctgggatttgtggatttgtccactaaccgactcacaggcgatctgcccagctgtctgaacggtaatttgaataacaaggtcgttaagtttgatgggaattgctttagagttgaccctgcccaccagcatgaagataaatattgccaacaatctcataatgggagaggatcaaaaaaggatgttggacttgtagtcactgttgttggcatattgtttgttattcttgtgctttctctgttgttaatggcttccaacaaaagaagctgtcagaaagttctggccgaacaacagatccagcaaaagcatacacaagataatttgttgtcaggaatgtcgtctgaactgctggtgaatgcaaggtgcatatctcaagctgtcaagttaggaacacaaatacaaccgtcatatcacatattttctttagaagaactcaaggaagcaacaaagagctttgaaaggtcagcatttttaggcgagggagcaattggaaagctgtacaagggaaggttagagaatgcaaccctgattgccataagatgtttgccattgcaccagcgatattcaattaggaatctaaagcttcgtttagatctccttgcaaagcttcgtcatccaaatttggtttgcttattggggcactgcattgatagtgcggttgatgaatcaactgtgaagagggttttccttgtgtatgaatatgtgcctggtggaactctttcttcttatctttctgcctgcagtccagacaagactctgaaatggtgtgataggctgcaagtgctgattgccattgctaaggctgttcatttcctacatacaggaataattcctggttccttatccaatcggctaaaatcttccagtattttggttgacgaacaccatacggcaaagttgagtgactatggattatctataatcacagaggagatatacagacatgaggtaataggacaaaaggaaaaatacttgcaaaatgatgctacagaaatggaaaatttggaggatgatgtatgctcttttggttatattctactggaagtacttatgggcccaaaattacatgagaaaggtggccctttcattttgaaagatctggttgtgtcaatgtctactttggaagagcgcgatcaagttgtggatcctgtcatcattggcacttgttcacaggattcgttatccatcgtggtttcaattatgataaaatgcctgtccatcgaatgctcggctcgaccttccatggaagaagttctctggaacctgcaatatgctgcccaggtccagacaatggcggacagcgaccaacgatcagaagtttcctcacaagcttgttagcatggaaactggaaatagctcgaaactgtaatctagatcggatcaaagatgataggaagcaagaatcatgtttatatgatcttgatttgagaacaggggatgaccggatgagtgagctcggctaactgttgcttcatggctatcctgaatttgatctctccattgcaactgtttgctgctacatccaaatcaggttccttgtaaaataaatagtccaattcccacaa

SEQ ID NO: 117935 - DNA, 2063 bp, Zea Mays
caacatgcatataagcagcagctccgggtcgcgttccccgggctcgtacgagtagaccaccacacacgcgtccgaggtcgaagaacctcgacacatgtaccagtcgagaaggagtacggacgacgaagtcaacatccaagaagatacaatggcggcgacgtcgtccaaggcaacggggccatggagcaggctctcggaggccgaggccgccgtgaaccgtgccgtcgccgggagccacgtggggaggtacttcaagctggacgcgcgcaagagctccttcaccaaggagctccgcgccggcgccgccacgttcctcaccatggcctacatcatctccgtgaacgccgcaatcctgaccgactccggcggtccgtgcacggcgcgggactgcacccccgtggccaccgccaccaactcgacgaccgcggactgcgcagtcgtcggggctaaggctaacccggggtaccagcagtgcctggcgcgcaccaagagcgacctgatcgtggccacggccgtggccgcgatggccggctccttcgccatggggctcttcgccaacctcccgctggcgctggcccccggcatgggcgccaacgcctacttcgcgtacaacatggtcggcttccacggatccgggcccatcggctaccgcacggcgctggccgtcgtgatgctggagggcctcgtgttcttcgcgctgtccgccgtgggactccggtccaggctggcgcggatgatcccgcggaacatccgcctggcctcggcggtcggcatcggcctgttcctggccttcacggggctccaggcgcaccagggggtcgggctcgtcggcgccagcccgtcgacgctggtcacgctggccgcctgctcggacgtggacccggccaccggcgcctgcctcggcggcaccatgcgcagcccgacgttctggctgggcgccgtcggcttcctgatcacggccacgtgcctgggcagggacgtgaaggggagcatgatctacggcatcctgttcgtcactgtggtctcctggatcagaggcaccagcgtgacggtgttcccggacacggcggcgggcaatgccggcttcgactacttcaggaaggtggtggacttccacgtgatccggagcaccgcggggcagctcagcttcggcggcttccggcacggcaacgtctggctcgccctgctcacgctcctgtacgtggacgtcctggacacgacggggacaatgtactccatggcagagtacggagggttcgtgaaggaaggcggcgggttcgagggcgagtaccgcgcgttcctcgtggacgccgggtcgacggtgctcagcgcggggctcgggagctccacggtgaccacctacatcgagtccaccgcggggatccgggagggcgggcggacggggctcacggccatcaccgtggccgcctgcttcctggcgtccctcttcttcggcccgctgctgatgagcgtgcccccgtgggccgtgggcccgtcgctggtgctggtaggcgccatgatgatgcgcgtcgccagggagatcgagtggggcgacatgaaggagggcgtcccggcgttcgtgaccatggcgctcatgcccctgtccttctccatcgccaacggcatcatcgccgggctgggagtctacgtcgcgctgcactggtacgactgggcgcgccacgggtacggcaagctgaggaacgcgctggacgagcgccggaaccaggtggccgccgccgccgccaccgccaccgcgggagaagtcggcccggcggcgcagggcattgtctgagctaggtccgatccgacgtgtaaggccgtagcaggtcatgttgtttatatagtagattgatccctacattattactagctttttagcttggtcctctggattaggagtttgggttggtgctgggccctacgtacccctgtctgtgtatggtaatggagtgggaacagctgaacggacggggcctgctgggagaagagaaggagaataggagattcttgaggtgtttgtactttgaccatcattgcagcgttgtcattgattccctcccttt

SEQ ID NO: 117936 - DNA, 1203 bp, Zea Mays
atgcgttccggcgaagcagctgaactcggagtcggaggaatcctcggcgaccttggcaatgccgaagtcggcgatcttggcctcgtagtcctcgtcgagcaggatgttggtggacttgatgtcgcggtggatgatggccggcgtgcagtcgtggtggaggtacatgatccccttggccgcgccgagagcgatcttgctccgccgccgccagtccagctccgggcgcccgctgcccttggcctcccgccggagcgcctggtgcaggttgccgcgcggcatgtactcgtacacgataaagttgagctcgccgcgcgacagacacgcgtgaagcttgaggatgttccggtgccggaccttgccgaggatggccatctcggcggccatcactcgcgccgcgttgcccttccacagccgcttcacggccaccacgccgccgctgccgccgccacggcccttgagctccagccggtacacgcgccccgtgccgcccgacccgatcaggttctcctccccgacggcgcagatctcgtcagcatccaggtccagcgggtggaacgactccagcttccactgcccgcacccgtcgccgtgctccaggtctctcttcttgagctcctcgagcttgaagctccggtagctgataaacaggatgccggccacgagcagcagcatcgccgagacaagggccggcacgagcacaagctgcgacttcctggcgaggctgtccttgtggccgccgtccacgttgcagacgccgaggttggacctgccgtcaatgcagaggccggggttccgggcaaacgcctgggtgccgccgctgagcaccagaagccccggcggcacgttcccggtgagctggttcgaggagaagtcgatggagctgagcttgagcgcctggaggctcgtcgggatcggcccgctgagctcgttgcaggaaaggttcagcgagttgagcgacgacagcagcgacagcgaggccggaatcggcccggacagtgcgttctgggagacgtcgatctcgacgagcctcaagcagccgccgatgtcgtccggcaaggcgccgctgaacgcgttgtcctccaggtgcagcgccgtcagctgcgacaggctgccgatctccgacggtatggagccagagaaggtgttgttggataggtagagcttctgcacctgcccaagccggccgatttccggcggtattgc

SEQ ID NO: 117937 - DNA, 3617 bp, Zea Mays
cgaacatattcccctagattgctctcctgacactatcatcttccacctcccagcttcactctcaagcctccactccatcttcttgtgaagcttctcaagattctcgcatgcctttactcctcctctcactcactctcgccagcttgcttgctaaacaacctccaacgccgacgccaatgccgacagctcaactcctctaactagcctcccgccgcaattcacaagcgcccggagaaagaaaaaagaaagaaacattggaggcaccccccgatgaggccttcgccacctctgctcctgctcgtgctcctgcatttcgcgctcctgtccaccaacgccaatgggaacggcgacctgcgcggcgacgcgatggcgctgctggccctcaaggccgcgctcagctgccgcccgggcgcgctgcggtcgtggtcggtggccaatgccgggtccgtgtgcgcgtgggcgggcgtccgctgcgcggccgggcgcgtggtcgccgtcgacatcgccaacatgaacgtgtcggacggcacgcccgtgtcggcccgggtgacggggctcggcgcgctcgagaccatctcgctggccgggaacggcatcgtgggcgccgtcgccgcgtcggcgctcccggcgctgcgccacgtcaacgtgtccgggaaccagctgggcggcggcctcgacgacggctgggacttcgcgtcgctgcccggcctcgaggtgctggacgcctacgacaacaacttctcggccccgctcccgctcggcgtcgccgcgctcccgaggctccggtacctggacctcggcggcaactacttcaccggcgagatccccgcggcgtacggcgcgatgcccgcggtggagtacctgtccctcaacggcaacaacctgcaggggcgcatcccgccggagctcggcaacctcaccaccctccgggagctctacctcggctactacaacgtgttcgacggcggcatcccgccggcgctcggccggctgcgcagcctcaccgtgctggacgcctccaactgcggcctcacggggcgcgtcccggcggagctcggcgcgctcgcctccctcggcacgctcttcctccacaccaaccagctctctgggcccatcccgccggagctcggcaacctcacgtcgctcgccgcgctggacctctccaacaatgcgctcacgggcgaggtccctcgctcgctggcgtccctcacctcgctcaagctgctcaacctgttcctgaaccggctccgcggcccggtgcccgacttcatcgccgcgctgccgcgtctggagacggtgcagctgttcatgaacaacctcaccggccgcgtccccgcggggctcggcgccagcgccgcgctccggctcgtcgacctgtcctcgaaccgcctcaccggcttcatcccggagacgctctgcgcgtccggccagctccacacggccatcctcatgaacaatttcctcttcgggcccatccccggctcgctcggcacgtgcacgagcctcacgcgggtccggctcggccagaactacctcaacggcagcatccccgccgggctgctgtacctgccgcggctcagcctgctggagctccacaacaacctgctctccggcgccgtgccgtcgaacccgaacccgagcccgagcgcgtccagtttgcagctggcgcagctgaacctgtccaacaacctgctgtccggcccgttgccgagcacgctggccaacctcaccgcgctgcagacgctgcttgcgagcaacaaccggatcggtggcgccgtgccggcggagctcggggagctccggcggctcgtgaagctggacctcagcggcaacgtgctgtcggggcctatccctggggcggtggggcggtgcggcgagctgacgtatctcgatctcagcaggaacaacctgtctggggtgatccccgaggcgatcgcgagcatccgggtgctgaactacctgaacctgtcgcggaacgcgctggaggacgcggtcccggcggcgatcggggccatgagcagccttacggcggcggacttgtcgtacaacgacctgtcggggcagctcccggacacggggcagctggggtacctgaacgcgacggcgttcgcgggcaacccgaggctgtgcggcgcggtggtgggccggccgtgcaactacaccggcgggggcctgggcgtgacggcccggcgcggtggcggggccggggccggggagctgaagctggtgctggcgctggggctcctcgcctgctccgtggggttcgcggcggcggccgtgctccgcgcgcggtcgttccgccgcgtggacgggagcggcggcggcgggggcaggtggcggttcgcggcgttccacaaggtggacttcggcgtggcggaggtgatggagtgcatgaaggacggcaacgtggtagggcgcggcggcgccggggtggtgtacgcggggcgcacccggtcgggcggcgcgatcgcggtgaagcggctgcaggcgcggcggcagggcgacgacgacgacgaccgcgggttccgcgcggaggtgcggacgctgggcagcatccggcaccggaacatcgtgcggctgctggccttgtgcacgaaccgggaggcgaacgtgctggtgtacgagtacatgggcggcggcagcctcggggaggtgctgcacggcaagggcggcgcgttcctggcgtgggagcggcggtacacgatcgcgctggaggcggcgcgcgggctgtgctacctccaccacgactgcacgcccatgatcgtgcaccgggacgtcaagtccaacaacatcctcctcggcgacaacctggaggcccgcgtcgccgacttcgggctcgccaagttcctccgctccggcgccacctccgagtgcatgtccgccgtcgctggatcctacggctacatcgcccctgagtacgcgtacacgctgcgggtggacgagaagagcgacgtgtacagctacggcgtggtcctgctggagctcatcacggggcggcgccccgtggggggggacttcggggaaggggtggacatcgtgcagtgggccaagcgggccacggccggccgccgggaggccgtgccggggatcgcggaccggcggctcggcgccgcgcccaaagacgaggtggcgcacctcttcttcgtctccatgctctgcgtccaggagaacagcgtcgagcgccccaccatgcgggaggtggtgcagatgctcgccgacgagtccccgcgccgccgcgcgtcgtcgtcgtcgccgcacacgtcgccctccaccacctcctcgtcgccgtcgccgtcgccgtcgccgccgggcgtggaggagagcggcggccccgacggcggcggcaaggagccgccggccaccagctacaagctgttccccgacctgctggcctgatgaagcgcagacggacgaacggcacctgttttgccatgccactgttaattacaccccaaaaaaacacacacacgacgactcatcatcgtgcaggactgaagttacagcatgtagcgcagcagactggagctagaggttcttcaggttggtcggccgacattggagatggtaacaagatagaactggggatcaataataattaagtaacatgtaactttatt

SEQ ID NO: 117938 - DNA, 585 bp, Zea Mays
cgtacactaatgagctaatcctttttagtgatatcgataagtctctattgtatgtttgcaaggatggcatatcgacacgaattgtcctcataacttaacagataaatcataaagttgcttcgaagaatctttgcatcctacagacaaagacataagagaacaaaacgtcaatttgtattatatgaccggaatgtatgttttgaacatgaaacgaacgtactacactcaccttaagtggggaaatcaaccagaattgtgtgctccaatctgtaatctataacatagacattatcgccactttttgagactgatagaacactcgaacatgcatgaaaatatgaccaagaaactgacagaacacccgaaccgtgtgcttgcagtatatataatagtttctaaaggtgataaaatgctaccaaaaagaagcatatggaagtattgctgtttacgaaacacatattgctcgtatttgtatatgaactaaatcatagatttgaccatatgatgttcctcgagtgagttagtatcattgactaattactttgaccacaccagaagtaaagacttgtggtaaacttacatctg

SEQ ID NO: 117939 - DNA, 369 bp, Zea Mays
atggagacgcgcacagacgacgggatttggagattctccttccatgtaccgtgggcgaggacaacagagaggagagcgggggcgagagagacagctagacgcgcgcagatggcgggcggggatggcggcgagatttggagattctccttccgagggaggagcggatccagcacagtggctggtgctggtgccgccattcacgggtacatgtttgactttttgatgttctacattactaatatgtacattctgggcaaagtatctgtttcagaaggggaaacaaacagacagataaacatgttacaacaggtggaagaaccacactattccggtagcatatacaaagaaaccaagatagctcaaaattaa

SEQ ID NO: 117940 - DNA, 435 bp, Zea Mays
attataaatgtgcacattatctgaagaagccaataatgttattgcatgaaatattgatacatatgttcttatctagatttatattccttccaaaactttttttgtatcataccaggatctgtaaactccagatttcaaataatagcctccaaacttcccttcagtagtattttcacatcagtacagtagtacaggcatgtaatgttgctaattcatacagaagttaaccatgtttgcaaattttgcatccttcttctgatgtataaaatccaattttgcagcctcccataactaccaaagcatgtaagttgcattttgtagctcaacagcagacaatctagataagaactcaccaatccaatactaatgagaaatcagagtggaagacttgttaagcctacaaagtagaccacatgtcttaaaaatactccatat

SEQ ID NO: 117941 - DNA, 672 bp, Zea Mays
gttgagtttgtctaggagctcatcaactactggtatggggtacttgtctttcactgtgcgctcattaagggctctgtagtcaatgcagaagcgccaagagttatctgccttcttaaccaataggactggagcggagaaggctgatgtactatgtcggattattccctgtttcagcattgctgcacactacgcctccagttcatctttctacagctgagggtatctataaggacataccgccactggtgctgtgcccggcatcaggtggatgcggtgatcacatggtcgtgctggagggaggcccgttgaggatgagaaaacatcatcaaattgctggactagggagtccatcattggtgtcgggtttgatgttgaaacacgtgctgaaattggcctgtgcatcatgctgcgagtagaattcaaccctttccacaaaacttggtaaccattcttctagaatgccatgctcatgttggctaagtcccagaggatgggaccaagagtgcgcaggaactgaacccccaagatgatgtcaaaggaatctagtggaatagcataagcatccatggtgaaaatatctggacgcatgcatagtctgagattgttggcaaggccatgacagtcgattttgtcgccatttgctacagctacccgaccttggcttgagcagac

SEQ ID NO: 117942 - DNA, 452 bp, Zea Mays
tataatttaatatgtatactatgtgcaccaaaagattcatgtacacttataccataagccccttccaaaaaaaataaaagtaaccgaaaacaaaaacatgtatcttttttatataaagtttgcagtcattcgctgtgaaattttaactgtccgtccaaaataaccccagcagagtgtggaaccaacagctggaatgtcggagcagatcatgtatcataatcccggactctcaaatagccttgaggatgtcgaccgccgcctggtactcggcgagggtgaggatattcggggagtccatggagacgacgtcctctgccagaaacccgtcttggtcgcggcgcagctcctcgctgccgtggcaaactagctccggcaggaccagcgttctgtgcaggccagggagcagccgttcgcggtcggtgtcgcccttgtcgcccacgagcacggccacc

SEQ ID NO: 117943 - DNA, 503 bp, Zea Mays
tataatttaatatgtatactatgtgcaccaaaagattcatgtacacttataccataagccccttccaaaaaaaataaaagtaaccgaaaacaaaaacatgtatcttttttatataaagtttgcagtcattcgctgtgaaattttaactgtccgtccaaaataaccccagcagagtgtggaaccaacagctggaatgtcggagcagatcatgtatcataatcccggactctcaaatagccttgaggatgtcgaccgccgcctggtactcggcgagggtgaggatattcggggagtccatggagacgacgtcctctgccagaaacccgtcttggtcgcggcgcagctcctcgctgccgtggcaaactagctccggcaggaccagcgttctgtgcaggccagggagcagccgttcgcggtcggtgtcgcccttgtcgcccacgagcacggccaccttggacaggtcgatgccccattgtatcgacaggtacctacagacacagcac

SEQ ID NO: 117944 - DNA, 340 bp, Zea Mays
atggctgaaaggcaggggaaaaggaaacaaatgctgtggcagctgatggctgttgttaagctgttatctcgtggcatggtcgtggagcacatcttgcctgacagccccttcgcatccaccaacaacaaggcctcaactccaacggctcagaacgagagcatcagcaatgggagccctcaccatgtggcttcttcatccctcttcccacctgcacccgccattgagctgcccctgtacaactcctgcttctttcaggcgcccaggttttctcctgggcatgaagccattgggctgtgaatacaaagcaaaaggggtctcctctcctctaatttgggagtaa

SEQ ID NO: 117945 - DNA, 796 bp, Zea Mays
ccgaccgttgtagatctgggagccgttggcgcaccggacatgtccggtgcacaccggacagtccggtgctcccttccgaccgttggcccggccacgtgtcgcgcgcagattccgcggccgaccgttggcccgaagcccggtgccgacggctccttccctttggaccgggcggaggcgaccagcggcgagaagctcctctgtgacgtcatgaacgagaacaagatcgagctctacgtcgcatacggcaaggtgatgaactgcggtggcggcggaagttgtggcacttgcatcgtcgagataatcgatggaaaggagctcctgaatgagaggacgagcaccgagaatcaatacctgaagaagaaaccagactcatggaggctagcttgccagactattgtaggcaacaaagagaactctggcaaggttgtcgtccaacggctgccccagtggaagagatgaccacgcagtgcagtgcagcaccgcgttggtggatgatcgatcatccagttgtatgtgactaaaacgccatgccctgtgcattagagaagatacaaaatcgccatgccctgtacaggacagtgagccaaattcttgttcattttgcactatgatacagattgattcattaggccctaggttagagtttgtgactgatgagttgggaagggattacttgattggtggtgtacaattcttggacaggatacaggttccaatttttggtccattagttcaggaattgtttcatttacatgtatattcagtacactcgtataatggaaacaggcaaatctct

SEQ ID NO: 117946 - DNA, 1623 bp, Zea Mays
aaaaaaactcagacgcccaataaacccaatcgacgcctcgtaacccctccctctcctgcgctccaatgtctgacaagaaggacgtcgaggccggcacctcgccgccggcggcgcccagggttgcggcggcggctccaaagccatccacctacgtgcccatgttcgctctgcgtggcgaggaatgcgctaacctccttgcgctggtctccgccgtctcgcgcccgctcgaggacgccgtcgtggatttcctcgcacgcgtgcccccagagcgccgcttccggtttggctccgccattagcttcgtcctcgaggttgcatgtgatgaaacttctgaggcagcagaccaggcgtttctccaacttctgttaagttcgagtaatggggacaatagtgaggttctgaagcagtctgctgttgattacttgaatggatctgattatgcatctcaggttcttttgccaagagaacatctagagaaacaatgttcttatgatgctgcacgacctctgcccttctctagtaatttcagagatgccactgtcagaagtgttattcctgacccatatgtttttcaaagcttcggtagttcatcggaggtgtcctcaataataccaaatagagatgacatggttgctactttacttcaacaaacatcacttggactgcctcctcaatggatacgaccgtctccaccaagacttgaaatttttgaaggggagttacagtggctgaacatagacaacaaccatgagctactatgggacggtaccatgtgtgcagacactagccgaggtgctgtgattcgagatttgtttgaacaagcttgtaaaggtcccctttcaatggcccagcgagagaaaattatcgaatatctgaggaaggatgggaagctacttaatcattgtggaatgacaccacagaagctccctgaccttgttgaacataatccacttatagctgtcgatgttctttcaaagctaatcaactctccggacgtggatgcatactttgatgctattgtccatatggatatgagcttgcattcaatggaagtagtaaacaggctcactactgcagtagttttaccaccaggatttgttcacgactatatctcaaactgcattcgatcatgtgaagacattaaggacaagtatatgcaaaatagactagtgagactagtatgtgtctttctacagagcctcattcggaacaagataatagatgtgcaagatctcttcatcgaggtgcaagcattttgcatcgccttctcgcgaataagggaggcagtggggttgttcaggctcctgaaatctgtagaatgaagagcgctctgcgatctgttggctgctggattctataaatagaaacttccattgtgtacattcatggctctgcttttgtttttccagcgtccaagagttgaaaagatgtggtggccttggtccagggttgggtgtaaatggtatggatattttccgatgatattcgatatcaaatccaattaggcctagtttgttttcgcctgaacagcccgttctgggcctctttctgggtggaaccaatcagcctggtttggtttagtctgatatagtttgctggagctgttcgtttgtcttgggccac

SEQ ID NO: 117947 - DNA, 2076 bp, Zea Mays
aaaaaaactcagacgcccaataaacccaatcgacgcctcgtaacccctccctctcctgcgctccaatgtctgacaagaaggacgtcgaggccggcacctcgccgccggcggcgcccagggttgcggcggcggctccaaagccatccacctacgtgcccatgttcgctctgcgtggcgaggaatgcgctaacctccttgcgctggtctccgccgtctcgcgcccgctcgaggacgccgtcgtggatttcctcgcacgcgtgcccccagagcgccgcttccggtttggctccgccattagcttcgtcctcgaggacaaaatgatgcttcaacctgctgagcgtttagttgcatttgcaattctgcatcaaggttattcctcacagtcggcaaatccatttcttcctctcttaataaatgttgcatgtgatgaaacttctgaggcagcagaccaggcgtttctccaacttctgttaagttcgagtaatggggacaatagtgaggttctgaagcagtctgctgttgattacttgaatggatctgattatgcatctcaggttcttttgccaagagaacatctagagaaacaatgttcttatgatgctgcacgacctctgcccttctctagtaatttcagagatgccactgtcagaagtgttattcctgacccatatgtttttcaaagcttcggtagttcatcggaggtgtcctcaataataccaaatagagatgacatggttgctactttacttcaacaaacatcacttggactgcctcctcaatggatacgaccgtctccaccaagacttgaaatttttgaaggggagttacagtggctgaacatagacaacaaccatgagctactatgggacggtaccatgtgtgcagacactagccgaggtgctgtgattcgagatttgtttgaacaagcttgtaaaggtcccctttcaatggcccagcgagagaaaattatcgaatatctgaggaaggatgggaagctacttaatcattgtggaatgacaccacagaagctccctgaccttgttgaacataatccacttatagctgtcgatgttctttcaaagctaatcaactctccggacgtggatgcatactttgatgctattgtccatatggatatgagcttgcattcaatggaagtagtaaacaggctcactactgcagtagttttaccaccaggatttgttcacgactatatctcaaactgcattcgatcatgtgaagacattaaggacaagtatatgcaaaatagactagtgagactagtatgtgtctttctacagagcctcattcggaacaagataatagatgtgcaagatctcttcatcgaggtgcaagcattttgcatcgccttctcgcgaataagggaggcagtggggttgttcaggctcctgaaatctgtagaatgaagagcgctctgcgatctgttggctgctggattctataaatagaaacttccattgtgtacattcatggctctgcttttgtttttccagcgtccaagagttgaaaagatgtggtggccttggtccagggttgggtgtaaatggtatggatattttccgatgatattcgatatcaaatccaattaggcctagtttgttttcgcctgaacagcccgttctgggcctctttctgggtggaaccaatcagcctggtttggtttagtctgatatagtttgctggagctgttcgtttgtcttgggccacaaagccgcctgtttttaactcctctgcctcaaatccttagcccaaaatgaacccaggtgagcaaccattcggattgattcctgtgctggaagttggctgccgaccaggaatgagtgacagcttatgatccactcaatcctgggctggtttggttcctggcttgcttcaatcctggcctgccaaacaggacgagttctctagagtttggatattcaacttatctgaatactcaaattgctatcgtatatttatgatatcgatatccagttgtatcctatccgatatagttgacactatccaaatttgaacatgattcgaatggcaaacaaatataaacaatatttgatc

SEQ ID NO: 117948 - DNA, 702 bp, Zea Mays
aagacatcagaaaccaagtaccagcaccactgaccaccaagccaccaatcatggccgccactttgcatctccacctcctcgtgacccttcttttcgtcgccactctcaccgtggcctctgttgccgacgactcgccgccggcacccacaccaccggcaccgccgcagccgaccgcgtaccagatgctggagcggtacaacttcacgcagggcatcctgccgcagggcgtgacggggtacgtcctcaacgccgacggctccttcgaggtgtacctcccggcggactgcagcttccgcgccggcagcatgcgggtccagtacagcagccgcgtcgccggccacattcagccgctgtccatcacatccctggagggagtgaaggtgaaggtgctgttctcgtgggtcggcgtcaagcaggtcgaccgcgacggcgaccagctccgtttctccgccggccctatgtcgaaatcgttccccatcgacacatttgccaacagcccccaatgcagctgaggccctttggtcgattgcggaagaaaagcctgttagtttcatttttcttgtgtgcctttagtttgtaatgtcattttgcaaggatggatcggttacacagagagtgctaggaatccctaggacgtggttcgagatcattcttacttgtaaccaatttgattgtttttgctttgatgcccattcaccagca

SEQ ID NO: 117949 - DNA, 1347 bp, Zea Mays
atgccagagacttatgttgatgagcaaccaaagggtgtgtctcggaatcgtccacctgcacatatgaatggtgatgaagaaaaggtttatcctggccaactcccagtgttgacctgggaacataagctaacccatgttagacatgatttgccgccattcagacttacatggagagagataatgcagctggctggtattggtttacgtcttagtcgacatatccttgaggaaacttcaaaagggcgaattgctgttattgatcctatgaaaaagcgggctgcaagatctggtcagggtgtcccacttggtggaagtattggaagaagctacaaaggcgatttccaacgttggcaattgtttccaggatcttgtgaagataatgctgtattggcaaatcaattttctgccttcatttcccgccaagatggtaaaaaatattccacagtgttgcatcctgggaaaccagatttgccgaaaggaagtgacatttcaggaattggatcctgggactggaatatgagtggacaacaatctacttaccatgccctttaccctagggcttggacagtatatgatggagaacctgatcctgagctcaatatagtgtgccgtcagatatctccaattattccacacaattatcaacagagcagctatccagttgcagtgttcacttttaccgtaacaaactcaggacatacagctgctgatgtgactttgctttttacatgggctaactctgttggtggaaaatctgaactcaccggatatcattccaactccagtatgatagaaaaggatggtgttcatggcatactattacatcacagaacagcagatggtcaaccacatgtaacttttgtgatagcagcacaggagaaagaggatatccttatatctgaatgtccttactttgtgatatctgggagctccgcatctgatgaattcacagctaaagatatgtggaattctgtgaaagagcatggatcttttgatcatcttgatcccatcaagacatcgatgtgctccagaccaggatcatcaataggggcagctatcgctgcttcagttaagctggctcccaaggcaacccaggatatttcattttcacttgcatgggcttgtcctgaagtgaagttctctagtgggaaaacctatcataggcgttacaccaaattttatggcacagacggtgatgcagcagcagcccttgctcacgatgccattcttgagcatgcttcctgggagagacaaattgaggagtggcaggatcctattttgcaagatgagaggtttcctgcttggtttgttccaaccctaataattcatttacttggtacacaaaac

SEQ ID NO: 117950 - DNA, 3018 bp, Zea Mays
atgccagagacttatgttgatgagcaaccaaagggtgtgtctcggaatcgtccacctgcacatatgaatggtgatgaagaaaaggtttatcctggccaactcccagtgttgacctgggaacataagctaacccatgttagacatgatttgccgccattcagacttacatggagagagataatgcagctggctggtattggtttacgtcttagtcgacatatccttgaggaaacttcaaaagggcgaattgctgttattgatcctatgaaaaagcgggctgcaagatctggtcagggtgtcccacttggtggaagtattggaagaagctacaaaggcgatttccaacgttggcaattgtttccaggatcttgtgaagataatgctgtattggcaaatcaattttctgccttcatttcccgccaagatggtaaaaaatattccacagtgttgcatcctgggaaaccagatttgccgaaaggaagtgacatttcaggaattggatcctgggactggaatatgagtggacaacaatctacttaccatgccctttaccctagggcttggacagtatatgatggagaacctgatcctgagctcaatatagtgtgccgtcagatatctccaattattccacacaattatcaacagagcagctatccagttgcagtgttcacttttaccgtaacaaactcaggacatacagctgctgatgtgactttgctttttacatgggctaactctgttggtggaaaatctgaactcaccggatatcattccaactccagtatgatagaaaaggatggtgttcatggcatactattacatcacagaacagcagatggtcaaccacatgtaacttttgtgatagcagcacaggagaaagaggatatccttatatctgaatgtccttactttgtgatatctgggagctccgcatctgatgaattcacagctaaagatatgtggaattctgtgaaagagcatggatcttttgatcatcttgatcccatcaagacatcgatgtgctccagaccaggatcatcaataggggcagctatcgctgcttcagttaagctggctcccaaggcaacccaggatatttcattttcacttgcatgggcttgtcctgaagtgaagttctctagtgggaaaacctatcataggcgttacaccaaattttatggcacagacggtgatgcagcagcagcccttgctcacgatgccattcttgagcatgcttcctgggagagacaaattgaggagtggcaggatcctattttgcaagatgagaggtttcctgcttggtatccagttacacttttcaatgaactatactatcttaatgctggaggaactatatggacagatggattaccaccaattcaaagcttgacagcagttggctggaaaaagttttctcttgacatgttaaatggtgaatctgatgatttcaatgagatggttcgacagaataatactgcttctgatattcttcatcgaatggcatcagtatttgagaggatgcatgcatctattgcatcaaattctgctataggaacaactttgcttcagggtgaagagaacattggccagtttctatacctcgagggcatcgagtattatatgtggaacacatatgatgttcatttttatgcatcattttcactgatcatgttgtttccaaagcttcaactcagcgtccagagagactttgctgctgctgttatgatgcatgatcctgaaaagctgaggatcttgcatgatggaaaatgggctgcaagaaaagttctcggtgctgttcctcatgatcttggattatatgacccatggttcaaggtcaatgcgtacactctctataatacagatcggtggaaagatttgaatccgaagtttgtgctgcaagtttatagagatgtggtggccacaggcgacaaatcctttgctcgagctgtttggccatcagtttatatagcaatggcatatatggagcaatttgataaggataaagatgggatgatagaaaatgaggatttcccagatcaaacatatgacgtgtggtcaatggctggtataagtgcatactgtggtggtctttgggtggctgctcttcaggcagcatcggccttggcacgtgaggttggtgacaaagcttctgaaaagcttttttgggacaaatatgagaaggccaagtttgtctatagcaagctgtggaatggttcttacttcagttatgatgatggcgacaacaaaatgagcacatctatccaagcagatcaattggctggacaatggtatgccaaagcctgtggtctcttcccaattgttgacaaagacaaggcacaaagtgcgctagagaaggtatattctttcaatgtgatgaagttcaagggtggtacaaggggagccatgaatgggatgtggccagatggcactgtggacatgtctgcaatgcaatctagggagatatggccaggggtgacatatgcactagctgcaagcatgattcaggaaggcatggttgagcagggatttaaaacagctgaaggggtctatcatgctgcctggtcaccaggaggacttggatactcattccaaacccctgaagcctggaacaacgacgacgagtacaggtccctgtgctacatgcgcccgctcgccatatgggcaatgcaatgggcactgtcgaagccgaagctccacaacactccacaggcagatataccccaggactcattccccaagaaccagttcgcctacgcgcggatcacaaagctcctgcagctgcctgaagacgaatcgtccaaaagcttcgtccgggtggtgtacgagatcatccggaacaggtttaggtcctgatcgccgcctccgcacgcctgtgcgctgagtgtccgaattcttgatgatacaattcattagtcactgtcattgttgctgttggatcccgcggattcgtatatgaaactggtggtaataaacttgccaagtgcggtagttcgtatataaatgaatttattatat

SEQ ID NO: 117951 - DNA, 114 bp, Zea Mays
ctcccctcttttattttctttctttggggaaaaatctcatgcctccttggttttaaacttgcagtatgcacattctaatcctctttccagcagacaaaataggttgacatgcaa

SEQ ID NO: 117952 - DNA, 2119 bp, Zea Mays
atgcatgcttggttgcttgctcccctaccttgtgacaaagcaacgagcaccggaaaagggaaggaaaaaaaagagacgataataacctggactttgttcgttttgttgtttcaagaaaagttcatcacccacttctctccctgcttggacgacgacggtagatagatcacttgggaaggaatggactaatggaacagtgaaatagccatcgatgcggtccgtcggtctgctagctagctagtttaccacttaccaccaggacggatcaacggccaccaatggtggtcaccctcttcttgttttttgtcaggttgtcggtggtcactcgagcttgagcggcagcggggagccgggaccgccgcggtgacaggacgacccggcctgcggcggcggcggcggcggcggcatgactccagcgggcatctgcagaggcaagtgcagctgtgggggtggcggcggcggcggcggcgacgccatgcccgccatcgcctgctcctgcgccggcgaggcctcgaggcgcttggtggcgaggttgtgcttgttgttgtgcatccacaccttgagcacgcgccgcttcacgccgatctcctggcagaaggcctgcaccatgccgtcgtccagcttctggaggcgccaccccacgcgctccgcgaactccagcatgcgcgccttctgctccggggtgaacttggtgcggaaccgcttcctggacgacgacgacccgccgctgccgcgcgccgcgtccccgcagccgccgcggccgccctccatgtcgtcggactccgaggtgtgcatcatgttcagcggcatcacgtactggtggtggtggtgggcgtgccctggcggcggcggcagcgccggagggagcgcgcgcgccgacgcgtaggcggcgtaggggtcggccccggagatcaggagccccccgccgccgctcttgtggtgcgggtgcgccatggcgggggccaggaggcggcgggcggcacggtggccgtggccgtgcccgaggccgaggccgagaccgaggccgctgaagccttcggcggcgccgtacatgtcgtcgtcctcgtcgtccacctccttgcggtggaaattgcggtggcagccgcaggcggagcacttgagcgcctccaacgagccctcctcgccgcttggcatgaactcgccacacccgtcggtggcgttcccgccgatggccgccgcgtgattcttgaggcactcccggtacttcaccgtggagctgcccccgccgccgccggccccggctgccggaccgcgcttcttcgccgagctctccgtctcctccgccgcggcaggcggtggtggcagcggcggcgccggagactggccgttgttgctgccgtggtcacggtgcagctgcaggacatggccgccgacgccggctccgtagggcgacgcgacgttggcgtgcattgggatcgcgagctcgccctgcgtgccagatagatccatgcctcctggtcccgatccgtcgtcctcttctcggaggcgccgctccagagagaagatgcttcttgctggtgctgctgacgcttctgttctctgcagcggcacaatggaaaccatgatgagagagcgagcaagaaaaggccaatggcgcccagagagctcctagctcccctcactctcaagggtagatgcaacaaaattctcagtgcttcttgggactctcaacacaggcagaaggcactgaaggaaagagagagagactgtgagagagagagagagaggaggaggaggaggagggatcagagagaacaaaaagggtgctcctgcggtgaggtgcttggtgggggatcttgggaccttatcaacaagatactagttgcaattgcaaaccccaggagggaggttgtaagcaagctgctaaattttgaggccatagaataatgcatattgttatctgtgcttgctgccatgccctatactacatatctatcttgccagcttctttcttcttcttctgctactttcttgggctcttccccatgcaatgcaatgcaatgcgcacaagattacattacatacaagttggaagcaagggaggacggaaggaaggagaaagctactcggctatagtggaaggaagaaggatgaacag

SEQ ID NO: 117953 - DNA, 194 bp, Zea Mays
tttttttttatttttttattctcctagccgaaggttgcatcatcacacatcatggctgatgtcatccctattgctccatcactcgatgacatgtggggaccttttgctagaactcctgttcttgtgcttcatctcgccatgcccaggagacggagccatcgcgatcccaacggaaacaataaactcgcaggttt

SEQ ID NO: 117954 - DNA, 776 bp, Zea Mays
ggtcaggcaagagctacataacgatgcgtgctgcagggtagaataaatgacactactaggcttgaggaatctatcaccatgtgggttcaactccaagttgtacacctgcatcctgatgtgaaggactccatcacctataaatgggcttcgaatgtagaatacaccaccaagtcggtgtatcagattcaattcgatgggtcctacaataccttccgcaacaacatgatatggaaagcaaaggcagaaaataaatgcgagctcttcacttggaccttagaaaaagataaaattctaatcgctgataatctggaaaaaagaggatcgccacatcaaacatcttgcgtactatcccatggtcaacaggggagatttatgtctgctttgcacttttgaggctggcgtttggaggcagttgctagcttgggagcaattttctctgccttcacatttccaggttgctagttacacctccattgctaattagtgggaactgggaagttgttgttaatacagtgtcaaaatagaaaaaacaaatattcaatggcctgtgcattttcgtcatgtgggacttgtggaaagaaagaaaccagaggatattccaaaggaaagaaagaaaccagaggatattccaaagtgagaactcaacgcctctaacggtaacgttacacgtaaaagatgacatggaacaacagcagcagcaggttttcaatctatgtaaatggaggacctagatttgttggcttatatcctgttttagagctcttttgtttgcccct

SEQ ID NO: 117955 - DNA, 128 bp, Zea Mays
gttcgtccaaacctaaagttatgtatttaggctacaaagaagatgttcaaaacgctaccatctacttcttttagccattacctacaaataatatacatttttctgattaaattgaactttttttctaa

SEQ ID NO: 117956 - DNA, 1376 bp, Zea Mays
gtgtgggctgttttctttggtgcggcccaagtagctgccaggaggcccaagtatctccatacccgcaggccgcatccctcgccatcgcctccttgcccagtctccgtgccgccgcctcctcctccgctcccctccttctagggtttctactccatgcgatctcgcggccttggtggcgcgggagcgggacagtagggacgcctcctctccatcgaatctagagagtcagcgacccaatgggtaagggcgggcaagacgaaggcaagcggcgggccggatccgccgcctccaatccggaccccgccgcgccggtcttcccggcgtgggcgcgcaccccgagcgagtgcctcgcggagctgggcgtctcggcggaccgcgggctcagctccgaggaggcggcggcgcgactgcagcggtatgggcccaacgaactcgagcggcacgccccgccgtcggtctggaagctcgtcctcgagcagtttgatgacacgctcgtgcgcatcctgctcctggcggccgtcgtctccttcgtgctcgcgctctacgacagcgcagaaggcggcgaggtgggcgtcaccgccttcgtcgagccgctcgtcatcttccttatcctcattgtcaacgccgtcgtcggcgtctggcaggagagcaacgccgagaaggcgctcgaggcgctcaaggagatccagtcggagcacacaaccgtcaagcgtcatgggcggtggtcgcatggcctccccgcacgcgacctcgtccccggggacatcgttgagctccgggtcggggacaaggttgtatgcagtactgcttcgggtttgtcgtctgaacactgaaggcgaaacagtcattcgtagcatggaaccacaatagagactttgcgatacttttttaggaatctattcgcctcatgaccaatttagtttgctgtgaatttgacgtgtggggtccaatttaatggaagggaattttgtcacactttgtgatgatggccaaaattacctaaccttgagcgtgataaatggtcacaagtagatttgctttgcacattgtccactgctagcgttaaaagaaatttccttcttactggacaagctagggttcatccttgtgtggcgggcagaattacagtcatggcttggacctacatttaccactgagtttacatgctccttatccaacattttaccatgcactggttgggccttgagactcttagcttctttccactgtgacatattctgaaccgtgtttagcacaggatgaacatactagcatctatcacggagtttctttgtcgcaattagagggctttctgcctctatagaagtaccactgctcttgggtgcaggactaacaacttctgcgtttgttggtct

SEQ ID NO: 117957 - DNA, 861 bp, Zea Mays
cctttacacaacggcgtcgagatatccaagcggcggacggggcccgcgcacgtcttccggagcaggtggctgctgcaggacgtctcgccggagcagttcgtggccgccgccagcgccgtcgacgccgccaagcagtgggagtcggaccagctggtggagtcttcgtacatcagggagctcggcgacgacctgagcatcatccacctcaagttcggcgacgcctcctcctccaccaggaggcccgcccggcgccgtgacctggtcgtctatgagcggcgccaggccatggacgacggcacgctggtggtcgcggtggcctcgctgcccaaggagatcgccgcggggctgctaccgccgcccgcggccaccggcaagggcggcggaggctccgtcgtcggccgcagcctgctgctgcagtccggctgggtcgtcgaaaggctcgacggcgacgccggctcctgcgtcgtcacctacgtcgtgcagctggacccggccgccgggtggctgccgcggtgcatcgtcagccggctcaacagcaagctcgtcatgatcatcgccaagctcaggaggatcgcgcaggccaccgtgcctgccgccgccgcagaggtgtgacgtgcatagctaccagcaagtgatcgaaatcgaactagcagcatcgggtcagctgcacgtttagttgcattgtgtgtgtgcctaagtaaatagatatatacgtactatatgtcttctttttgtagggacagagggcatgcgtctatcttgggatgcacccgcatctgtatacgtactgctacaagactatgtcagtgagaattactatgtgtgcacgttttagtgttatagaattcgcctacacgactg

SEQ ID NO: 117958 - DNA, 1707 bp, Zea Mays
acctcagctcagacgcttcgcgacggccctgctgctccgctctgcgttccccgttcctttcctcgtgtgctctcctttcctcgtgtgcggcacgccaaggcagcaagcgatccttccagaatgctcctccgcgtcggccgccgggccgcgctcctcctagccgcaaccgccgccttctcgcgcctccgcgatcccgacacagccgtctacgtttcggcctccccgccgcagccgccacgccaggccttttcctcctccgccgccgccgagggcctccgctccggcacctgcctcttctccccgtatctgctcccatatccgttccaagggttcccagtactgaataccttcacgtctgcatcggtttcacctgctaacaatggcgaccaaggttctgacggaagctctggtgatccaagatgctgcccagcgtgtctaggcaggaattcgattgccaaggcggcatctgcagttggtcctgctgttgtaaacatttcttctatgcatgatatgcatggatgggtaaacgagcagagcattggatctggaactataatagatccagatgggactatattgacatgtgcgcatgttgttgcagattttcaaagcacaaaagcaattgtgaggagaaaggttagtgtgactttacaagatggtcgtgaatttgaaggtgttgtccttaatgctgaccgcctgtctgacattgccgttgtgaagattaagtcgatgacccctttacctgctgccaggcttggatcatcatctcaacttcagccaggtgactgggttgttgctctgggctgtccactttctcttcagaacacagttacagctggtattgtcagctgtgttgaccggaaaagcagtgatctgggtcttggaggattacgaagggagtatcttcaaacagattgtgctattaatcagggaaattctggaggacctcttgttaaccttgatggtgagattattggagttaatgtgatgaaagttcgtaatgctgatggtttgagctttgcagtaccaattgactctgtcattaaaatagtagataactttaacaaaaatgggagagttgtaaggccatggcttggtttaaagatgcttgacctgaaccccatgatcattgcacagctcaaagaaaagtcaagtacttttccagacgtaagaaaaggggtgcttgttcctatggttacaccagcatctccagctgaacaagcagggtttcgtcctggggatgtggttgtcgaatttggtggcaaaccagttgagagcatcaaagagataattgatatcatgggggacaaggtcgggataccatttaaagttcttgttaaaagagcgaacaatgtgacagtgacattaactgtgataccggaggaggcagatgccagcagatagacctaaactatctgctgggaagctgatctaaagccaaaggggaggattttccatggaaactccaatttttctcaagatataatacaagatgccgtggacacctgtagacaaaattttatgttgagttctgtatgtggccaaaggatggttgacaggaccacccgaaaaaggggacgaagataaataggaaatatgtattattagctccatgctcagttaaggtacatgttggttttggttatctgcggcataatcaataacggtaggactgcattctacttcttcaaattggatgatgctgtc

SEQ ID NO: 117959 - DNA, 1911 bp, Zea Mays
gctccgctctgcgttccccgttcctttcctcgtgtgctctcctttcctcgtgtgcggcacgccaaggcagcaagcgatccttccagaatgctcctccgcgtcggccgccgggccgcgctcctcctagccgcaaccgccgccttctcgcgcctccgcgatcccgacacagccgtctacgtttcggcctccccgccgcagccgccacgccaggccttttcctcctccgccgccgccgagggcctccgctccggcacctgcctcttctccccgtatctgctcccatatccgttccaagggttcccagtactgaataccttcacgtctgcatcggtttcacctgctaacaatggcgaccaaggttctgacggaagctctggtgatccaagatgctgcccagcgtgtctaggcaggaattcgattgccaaggcggcatctgcagttggtcctgctgttgtaaacatttcttctatgcatgatatgcatggatgggtaaacgagcagagcattggatctggaactataatagatccagatgggactatattgacatgtgcgcatgttgttgcagattttcaaagcacaaaagcaattgtgaggagaaaggttagtgtgactttacaagatggtcgtgaatttgaaggtgttgtccttaatgctgaccgcctgtctgacattgccgttgtgaagattaagtcgatgacccctttacctgctgccaggcttggatcatcatctcaacttcagccaggtgactgggttgttgctctgggctgtccactttctcttcagaacacagttacagctggtattgtcagctgtgttgaccggaaaagcagtgatctgggtcttggaggattacgaagggagtatcttcaaacagattgtgctattaatcagggaaattctggaggacctcttgttaaccttgatggtgagattattggagttaatgtgatgaaagttcgtaatgctgatggtttgagctttgcagtaccaattgactctgtcattaaaatagtagataactttaacaaaaatgggagagttgtaaggccatggcttggtttaaagatgcttgacctgaaccccatgatcattgcacagctcaaagaaaagtcaagtacttttccagacgtaagaaaaggggtgcttgttcctatggttacaccagcatctccagctgaacaagcagggtttcgtcctggggatgtggttgtcgaatttggtggcaaaccagttgagagcatcaaagaggtaactaaagacaactactagtgatgtgtgctatatgacttattattactataccggcagaattccttatcttttccctgttataatatcatatttgaatatcgccatgaaaaagtagctggttagaaccaattgcagtagtggactcgtccttttttgttttttctaatttcaatattccttttctttcaaacccacaattcaagaggaagatcgtattctttttccttttagttgcacaaacacgataataaagtgttggctgcagataattgatatcatgggggacaaggtcgggataccatttaaagttcttgttaaaagagcgaacaatgtgacagtgacattaactgtgataccggaggaggcagatgccagcagatagacctaaactatctgctgggaagctgatctaaagccaaaggggaggattttccatggaaactccaatttttctcaagatataatacaagatgccgtggacacctgtagacaaaattttatgttgagttctgtatgtggccaaaggatggttgacaggaccacccgaaaaaggggacgaagataaataggaaatatgtattattagctccatgctcagttaaggtacatgttggttttggttatctgcggcataatcaataacggtaggactgc

SEQ ID NO: 117960 - DNA, 2764 bp, Zea Mays
cgagcgagcgagcgagagtggtggtggtgtgtgcgcgagcgcaacagggagagggagagcgtatttcttcttcctcaccctcctcgaggaagagagagggcagctccggagccgcacgggcgcgagcgaggcaggcagtggctcctcccccctcctttcgatatcagctcatcgattcgtcctatcacacacatatcattaccgctcctcttcctcacctatgcttgtcctctaactcattggcagaagagaaaaaaaaagtccttgttgagttgttgtatcgggttctggtggtgactgttactggggtttccttgcccggttcttgatttgcgcaaggacagatttgccgtcctctcgggttccgccgtgcggtgctgaatcctccttccctgttcccttcccttaggtttggatcggggatagggatggaagtggacagaaagaagaatttgcagattggatccaaggggaaggaggttcagagcaagaatccgaggcgggaggagccgctggcatcgtcggaggtggacatggatgagccagacgctcctgagagcggtgacatgattgttgatggcaacaatggcagctccagagagagccccttgcagcccatggattccaagaattccaagggctgtgcggtcaagaagccaacatcggtgagctcagacttcggtgaggagctggacttggaccttggtggggagaagagtgggacgcagcaggagaggaagctctcaaggcaggaccgggttgagctttgccggtcgttccagcttgcagtgagctcccatgattgggagagcgccgaggggctggtaggaatggctgacgcacaagggctcaacgatgtgctgtgtgtggcagtggatgcgatttggttcttgagtgatagggatgagctgcttgctattgtggggttgatcaaaagggttgtgtctgagggcgcaaaagattttacccgtgctgcgctccggacatcattcctcgcatcgtgtgtatcagcatgtagggggcggtcgactagccttgctgatgcagtgagcttcatgggccagaaattgcatgaacgacttcaagaatcccaaggtgatgaggtattgaaagcagaagcaagtgcaaaggtgcacaggtttacagaatgggctctaaagtgtatcgggctgcattcacgtgttcgagagaacaggggcaaaggaaaccacgacactgtaattgaggttcagcttcagttgtctgctttcaagatatttcttgatcttgctgataatgagcttaccgggaaggattttacggaggcttttgatgctgcatgcttccctcttacactcttttcaaccaccttcgaccaaggatgggcatcaggaatatcagcagctgcagtacaaggccttttagagttgttggtagagggtggcgcagacaatgtgaaccaatgctttcttgaagctgcacgctatggcagcactgagcttgtgcggatcttacttcaggttgctcaaagaaacagcttggacattgatgtggacctagcccttggctttgccgcacactatgggaagatcgaaaccatgggatgcttggttgaagaaggtaatgctattggctttcttggccctttgatgcgtgctgctgaacgtgggtgcctccaagttgtggaatggtttgtcaaccacgggtgtcgagaaatggagctttgcctagcccttactgctgccacctctaatagccagattgcagttgctgcttatcttcttcctcttgtcccgcaacatgttcttgcccccctcagcattgagattatcaaggctgctggtgagaggactacgggttccctgcagggtgtggattttcttctccgctcggatttcctcaatgacccagctgccacatatgccgtggcagacagtattgcaagatgcaccgatgaagctgtggacgcaaagcttaggtctttcatgaatgagcactggagcgaggcagctttttgtgcgggattcgaatctgcacagcagcactttgttaatttcatgaggataatggaaaggggtgaatcaccaatccgcttaggggatctcccacttgagctggtgattgccatggcctacctgccgctctataaggaatgcatgaattccaatgggcgacttttgcctcaaaggcttagaggtcagcttgtggaggctgcaagcaggctcgaggaccggcaagtggaaagggatagccaaagcagagaactcttggccatcttggagcaccacataccacgattcatgatccaaacttgaaggtaagcgcaggcatccactctgaaccactgctgtcaatgcaagcaaaaaacaacttacaagggcaatccacgccgtcttcagtgccgccaccatgttcctgcttggggggacatcaccaaatgatagcatcttgagttggctctcctgcaggcgatcttcggagagtatataattctggggaatggtgtgtgccttgtcgaggcatgtgtcggagtgttttactgggaccgtaatcttccatgaaaaaaatgatataagccttcggtatgtaatcctgagttttcggtgtaattcaaaacgctggtcttgtgacaacatgtcgctagttttggctagcgacttttttgatcatggcttcaaaaacaaaacgaagggagtatattcatactgtgtggagattgccttgatcgtgagatgtgacatggttctgatgaggtacaagtttgagcaactctgatagcttcgaa

SEQ ID NO: 117961 - DNA, 2695 bp, Zea Mays
cccacagtcccacccgacatcctcgcgcagaacgcgtcgctaatctcgcggtcgcgcctcggccgatccgcgcctgcctgccgccgcccgcgattgtagctcaccccgacaccgcgccccctcctctcccctgacgtgatgcccgcctcccacccctttctccgcatcgcacggatctagcgcgggaattgctcggccacggctccgcacaccctcccttcccatgagacggagccgccgtatcctgctcgcgaggcaacggaagggtacgtgatcctctgtctacatggaaggtgaggcagatcggggggagagtggctcgtggcagtcgcctcgacggcgtccttcgcgccgtccggcgaggtgtcgtccaagcacggcgtcgtcggctacgggatcgtgggcgggcccaacggcaacgccgtcgcgcccgccgccaagtccaccgtcgtcgagaccaccgtcgagagggttatcttcgatttctggttcctggcgctcctccccaccgctcgggaaccactccaccgccgagaccgtcttaacgatcggctccgtcgtggcccgcccgcgaccccgtatctgctcgcgctcagctagggttcagatctgaaaatggccgatgacggtgcgaggaggggaatgcccgctgaaggctgaagctgcccccacgggctacagtaggtgccatcgctcaccacaccgaacaccccactgcccccagaccgtgctccaggaacctacggcgataggaggccactgaggatggcccggtgcggtactgctgccttccggaggacgccgagcgccggagaggggctcttctattggacttggagcaagcccacggcgacaacgccggaagcaaaatggcctcttctctagaaggacatgagttcgatccaccacagggaggcgcgcccgccaggctccatcttcggatctgatcgcccaccaagtgggttgagttcggatgacgagagtttgcctgcaaccgatctaaaggttagagcgagcggcatgtgatgcggaaaaatgaagtcagcaaggaatacttcttaaaaactgtaaggaatattgttggtgataaattgcttaagcaagctgcttcacgatatcaaatgcaggcacaacgaagccctcagacaaacccaagcaactattctttatcaggtcaagtttctggtcagcagactgctcccagtggttctgtgacaggagatgaacagaagggatatccatgggcgcacaccatccctatgagacaagctattgccagcactcgaccaatttgcataaggctaatgaaatgggaaacatgtcagatgggaaaggggtccatatgttacaaactcgtccacccaataactccataccagtacaaacaatgcagcatcacgtgcagtgaccacaaacatcttcaccagtgtttggggcaaatagtattcatgcacgtccatttccgcggccagttggaggtccagctgcaccatttagaccacaaatggcagattccaatccaagagcacacttgattcggggagctgtgaccacagtatctgggagtgtgccaacacgatccatagtgtctggaaatgcgccagtcaatcaagccttgggatcttcaaaagtcagtgctggcatggaaagccagtcacaacaattgagtgcacctaaagcctttagctgcaacaagcttaagtcagactcaatctcatggcattcaagaagagcctaaaattcaggggaagaaacaactattattcgagagtttgcctgcaaccgatctaaaggttagagcgagcggcatgtgatgcgggaatatatgaggccttggagttgagggatggaggatctgattatcttggcaagggtgtttatcttagacctcaaagctcaatctagcatgctcttcgctctgttttactttccatgattcgttgagtatctatgcagtttctgcacgattactatgaattacgaactaaacttaaatcaaatacttcagtatggtctctagagaggaagctctgccaaccattactaataactgagaagatgttcgcgtacagggagacggtgttggaggaggcacatcggggcatggagctgcgtgagcactgccgccatatagttgacaacgatgaccgacactatagattccattctctgtgtgtacaccaaggtatcggtgtctcgtctcggaccacgccctttcccttcccttccttctccgcacacgcagaaccagctgattctctttcttttgctttcctcctctcggcctacgttgatctggcgatgcgcttttcatggttactgcgaccgtgatgggcatctaggtgctcgaaccattagttgggctaaggaacacggaacagcagcaacaatatcgtaaggagagtgcagacgttggacaaatggaagtagctcttccactactggagcaattgttggtggagtggctgctggcgcagccttgctatttgctgttcctgctatcagttttgcctattggcggcataggaaaccacaagagcattttttcaatgtatctggcttcaaagttagtctttgattattatctttctcgcaacataagggcaaacaacgtttatatgtagcaaacaagtacggtttgcaaatgttttaggaacatgtttttacaataaagatatacttatagtttcaccaa

SEQ ID NO: 117962 - DNA, 2565 bp, Zea Mays
cccacagtcccacccgacatcctcgcgcagaacgcgtcgctaatctcgcggtcgcgcctcggccgatccgcgcctgcctgccgccgcccgcgattgtagctcaccccgacaccgcgccccctcctctcccctgacgtgatgcccgcctcccacccctttctccgcatcgcacggatctagcgcgggaattgctcggccacggctccgcacaccctcccttcccatgagacggagccgccgtatcctgctcgcgaggcaacggaagggtacgtgatcctctgtctacatggaaggtgaggcagatcggggggagagtggctcgtggcagtcgcctcgacggcgtccttcgcgccgtccggcgaggtgtcgtccaagcacggcgtcgtcggctacgggatcgtgggcgggcccaacggcaacgccgtcgcgcccgccgccaagtccaccgtcgtcgagaccaccgtcgagagggttatcttcgatttctggttcctggcgctcctccccaccgctcgggaaccactccaccgccgagaccgtcttaacgatcggctccgtcgtggcccgcccgcgaccccgtatctgctcgcgctcagctagggttcagatctgaaaatggccgatgacggtgcgaggaggggaatgcccgctgaaggctgaagctgcccccacgggctacagtaggtgccatcgctcaccacaccgaacaccccactgcccccagaccgtgctccaggaacctacggcgataggaggccactgaggatggcccggtgcggtactgctgccttccggaggacgccgagcgccggagaggggctcttctattggacttggagcaagcccacggcgacaacgccggaagcaaaatggcctcttctctagaaggacatgagttcgatccaccacagggaggcgcgcccgccaggctccatcttcggatctgatcgcccaccaagtgggttgagttcggatgacgagagtttgcctgcaaccgatctaaaggttagagcgagcggcatgtgatgcggaaaaatgaagtcagcaaggaatacttcttaaaaactgtaaggaatattgttggtgataaattgcttaagcaagctgcttcacgatatcaaatgcaggcacaacgaagccctcagacaaacccaagcaactattctttatcaggtcaagtttctggtcagcagactgctcccagtggttctgtgacaggagatgaacagaagggatatccatgggcgcacaccatccctatgagacaagctattgccagcactcgaccaatttgcataaggctaatgaaatgggaaacatgtcagatgggaaaggggtccatatgttacaaactcgtccacccaataactccataccagtacaaacaatgcagcatcacgtgcagtgaccacaaacatcttcaccagtgtttggggcaaatagtattcatgcacgtccatttccgcggccagttggaggtccagctgcaccatttagaccacaaatggcagattccaatccaagagcacacttgattcggggagctgtgaccacagtatctgggagtgtgccaacacgatccatagtgtctggaaatgcgccagtcaatcaagccttgggatcttcaaaagtcagtgctggcatggaaagccagtcacaacaattgagtgcacctaaagcctttagctgcaacaagcttaagtcagactcaatctcatggcattcaagaagagcctaaaattcaggggaagaaacaactattattcgagagtttgcctgcaaccgatctaaaggttagagcgagcggcatgtgatgcgggaatatatgaggccttggagttgagggatggaggatctgattatcttggcaagggtgtttatcttagacctcaaagctcaatctagcatgctcttcgctctgttttactttccatgattcgttgagtatctatgcagtttctgcacgattactatgaattacgaactaaacttaaatcaaatacttcagtatggtctctagagaggaagctctgccaaccattactaataactgagaagatgttcgcgtacagggagacggtgttggaggaggcacatcggggcatggagctgcgtgagcactgccgccatatagttgacaacgatgaccgacactatagattccattctctgtgtgtacaccaaggttactgcgaccgtgatgggcatctaggtgctcgaaccattagttgggctaaggaacacggaacagcagcaacaatatcgtaaggagagtgcagacgttggacaaatggaagtagctcttccactactggagcaattgttggtggagtggctgctggcgcagccttgctatttgctgttcctgctatcagttttgcctattggcggcataggaaaccacaagagcattttttcaatgtatctggcttcaaagttagtctttgattattatctttctcgcaacataagggcaaacaacgtttatatgtagcaaacaagtacggtttgcaaatgttttaggaacatgtttttacaataaagatatacttatagtttcaccaa

SEQ ID NO: 117963 - DNA, 1393 bp, Zea Mays
atgtgtgcacggcactgcttagttctttccaaagagagaaagcaacaaaacaatcaggggtccatccatttttgtcagccatgacgaacggctacctgttccgcgagtacatcggcgcgcagtccaccggcgtccagttctccgacgtgcccatcaacgccttcgttagcttccacttcatcctctccttcgccatcgactacacgcccgtggggcagcagccgaagccggtgccgaccaacggggtgttcagcccgttctgggacacgggcaacctgtcccccgccgccgtggccgctataaaggcctcgcaccctaacgtcgccgtcatggcggggctcggcggcgccagcgtgctggacatcgtcaatgccgtcttcaccccgacctccgtcgacacgtgggtggccaacgccgtgacgtcgctcacgggcatcattaacaggtacgggctggacggcgtggacgtggactacgagcacttcgccgacggcgccgacgtgaatacgttcgtcgagtgcatcggccgcctcctgacacagctcaagcagacgatgcccaacatcgccacctccatcgcgccgttcgaggacccagtggtccagaagtactaccaggcgctctggagcaagtactccggcgtcatcgactacgtcaacttccagttctacgcctacggcgacaacaccgacgtgcccacgtacgtcatgttctacaacaaccagttggcgaactatcccggcggcaaggtcctcgccagcttcaagaccggcaacgtgaccggactgctctcgccggaccaaggtatcagtggggccaaggagctgcagcggcagaacaagctgccagggctgttcatctggtcggcggacagctccaagaagagcagctacggcttcaagtacgagaccgaggcgcagcagatcattgccaaccactgatcgatctgcgatcaggacttagcttaacaagggatcacacattttacaataaataaatgataacctctcaggtcaacaacaattacttgcaggttaaggagttcggctgttgatttaaggacagaatgatggtgagtgaaaatgcaagtttaaagaaaatcgtcattattctgtcctttaaacttgtactagcaaagtaccagtgtgttgttacgatttacatttatgtttaagtatacaataaaaacataaacacatgtgtgttatgttggttggatatatgtaaatatgagtttagagccaacaatcatggtttaaatctccatttatgtataattttagcatttttactatttaaatgtgggcagcacaatgacaatgaaaactgtggaaccaaggaaaccggtgctctaatataatagagatttatgcataattgttacatttttact

SEQ ID NO: 117964 - DNA, 381 bp, Zea Mays
atgagtttatctctttccaggttgggttacgaccaggtgaagttcttgaaggggttcaatgaagatgctaagacagtggcgcttgtcggagagagtggcagcggcaagtcgacgataatcgctttgctggagcgtttgtacgacccagattccggtagaatatcactggacgacgttgaatgtacacaaatgacaaatttgacatgctcatattgggtccagtacaagcgtgctgaagatgagcatctcattggtttaaggtgtgacgagagtttccttgactgttgggctcaccttgcccaggaaataactcttgaccatgtgaaggcaattggctttcttggagatggttttggcgccacaccagagatgagcaaatga

SEQ ID NO: 117965 - DNA, 737 bp, Zea Mays
atcctatatataaggtgcaagcacacacacaagttttcagtagaagaacatcaaatacatactggctcactcgtgattccttcacccagcagttcgtaaccacctgctaaatcatcaaaaagatggccccctgcaaagtagcagcagccttactcctgttgatcacaacaatttccgtcaacaccgtaaccgggtcgcgatgtaacgctcaggagaagaaccagattgtgagcttgtgccaaatgtacatccagagaggaaccctcgttcagctcccatcccaaactgggccatgctgtgcggcagtgagagagctggagagggtacacaggggtatgcagatgaagtgcatcgccgatctactaaacgctggagacctgcagaaatacgatccaactaagatcaagcatcttgacatttcctgctacacttaacacatcgttagtttcattcctctcctccccatcgttgtaaggtcatgctgtgaagggcgcgatggcgtggaatggatggtggtggtagcaaagatgctcagaagatgacatttcgttagttatttaattaagtcttccaaggcgtcaatcttcctgacatgtatctttattcgaaaaaataaactggattatttctggtatcattttcttttttcagttgtgttaagcatgcctccacttcatttctgatagaatattcagggacatatgcaaataaactacgagaaacaaaaaaccaacaaa

SEQ ID NO: 117966 - DNA, 702 bp, Zea Mays
atcctatatataaggtgcaagcacacacacaagttttcagtagaagaacatcaaatacatactggctcactcgtgattccttcacccagcagttcgtaaccacctgctaaatcatcaaaaagatggccccctgcaaagtagcagcagccttactcctgttgatcacaacaatttccgtcaacaccgtaaccgggtcgcgatgtaacgctcaggagaagaaccagattgtgagcttgtgccaaatgtacatccagagaggaaccctcgttcagctcccatcccaaactgggccatgctgtgcggcagtgagagagctggagagggtacacaggggtatgcagatgaagtgcatcgccgatctactaaacgctggagacctgcagaaatacgatccaactaagatcaagcatcttgacatttcctgctacacttaacacatcgtcatgctgtgaagggcgcgatggcgtggaatggatggtggtggtagcaaagatgctcagaagatgacatttcgttagttatttaattaagtcttccaaggcgtcaatcttcctgacatgtatctttattcgaaaaaataaactggattatttctggtatcattttcttttttcagttgtgttaagcatgcctccacttcatttctgatagaatattcagggacatatgcaaataaactacgagaaacaaaaaaccaacaaa

SEQ ID NO: 117967 - DNA, 418 bp, Zea Mays
acattaaagtagaagcacatttgcatgttgttctttcctcaaatcatgacaactttgggacgtggctcgatggggaacatattccttatagtttctcttgtgtttgtcatggttattcaatcaacttcatttcccacaagagatgatgtgcgttgtgatgtgctacaacaaagatgtgcacctaacaattgcaatatccaactatgtcgagtgtggtatggagaaagacaattcaaatctgctttttgcaagaggactcctccttttcctgaccagtgttgctgccaaatgcgtggccaaccaccaaactcctatgtccaagtcccttgaagcttaggggttctacttgaataataatatttcaccattactttttttcttattttagtgatatcaataaataaagatgcatttggct

SEQ ID NO: 117968 - DNA, 2858 bp, Zea Mays
gaccggattcggttcggaccgcagctccccacagcccacactcgtccgtccgcccgtcgaatggcggctcccaaaccctaagccacagatcccttcccctgcctcagcttcgaacgccctcgcctcgccgccggtctttgtgtactgccgctgtgtccgtcggcgcggatcaagggtccgctccgctgcaccccgcggggagaaaggggcgggcctcggcgtcctccgctcgtcgcccgagtgtctgagtactatcaggtgcaagtccagccgaactgattgcatgacatatgaaatagcgagcgtcgaatgaccttctctatggatatggatttgaacgcatcaccggtgcctgacgatgatgagcagcagccttacaatgaaccagtggaggctgagtatgctcaggaggaacatgttgaatctgctgtcgcaacattgcgccgggaacgtgaagaaagacgcaagagactaaagagagagcagcaggatgatgggtcaaggctacattcccagcagattagggttgattatgctcctcaacccaaaaggcatagtcgcatcaaagaggcacctcagggctggttggactgtcctgcatttggggagccaatagataaaatcataccatctaaagttcctctcgatgaaacattcaatgagtcagtgcctcctgggaagcgatactcctcaaagcaactagttaacaaacaaagaaaagctggtcgtgaaataggtctggtgattgatttgacaaataccaccaggtattattcaccagctgaatggacgaagcaaggtactaagtatgcgaagattgcatgcaaggggagagatgcggtacctgacaatgaatctgttaataagtttgtctatgaggcaatgatattccttgatcgacaaaaacattcaaagaatcctaaatatattctggttcactgtacccatggtcataatcgtaccggtttcatgattattcattaccttatgcgcacacacgtatcttgtgttgctgaggcgataaatatgtttgctcaaaggcggccacctggcatatacaagagggactatattgaagcactatattcattttaccatgaggtccctgagaatatgatgatagcatgccctccaacaccagaatggaagagaccagatgatctcgatttaaatggcgaagctaagcaggatgatgacgacgacaatggtgatccagaaccaccgcgtaatgaatcagaggataaaatcatcaccaacgacgatgtgttaggggacgaagtgccatatgaccagcaagaagctttgcgtgtgctatgttataagttgcttgaaatgccccttataaggggacattcacaatttcctggatcacatccagtttctcttaacagtgaaaatctgcaactacttagacagcgatactactatgctacatggaaagctgacggaacacgatatatgatgcttataatgagagatggttgtttcttgattgatcgaaatttttgctttagaagggttcagatgcgctttccccataagagccttgaaggtctgcatgatatgaccttgattgatggagagatgattatagacacggtaccagattcaggcttgaagagaaggtacttggcatatgatcttatggcacttggtgcagtgtccaaaactaagttgccgttttctgaaaggtggaaaatgctggaagatgaaataatacgaccacgttattatgagaaaaataaatttgagagtggttctaagagcaatccgttgtacaaatatgacatggaattattttcggttagaagaaaagatttttggctgctctcaacagtaaaaaaggttcttaaggtgttcattccatccctttgccatgatgctgatggccttatatttcagggctgggacgatccatatgtaactcgtactcatgaaggtctcctgaagtggaaataccctgagatgaattctgtggactttctgttcgagcttacgaatgataatcgtcaactggttttcctttatgagagaggaaaaaagaaactcatggatggtgcccggatagcatttactgacgatgtagatccatcctctatcgccgggaggattgttgaatgctcctggaataaggaagaacagtgttggtcctgtatgcgtattagatctgataaatctactccaaacgacatcaacacataccggaaggtgatgaggagtatcacagataacattaccgaggaaaagcttctcgaagagattgatgagataagtcttctcccgatgtatgctgataggatgcagcaggctcatacaaagatggcacaacaacagcggcggagattgccaccacagtgctagccagtgctggggcgctctcctaccgccctagccagctgctggcttccgtagctgtgtaattagtagaggtttcagtagccccatatgatgatggctggctgggtctggcctgccaactaattctttgcacctcatttgtgtcttctccctgccctcccacccacctgtataggcgtcgccgcagagtagtttccctgtaaattgtgtactctatgttctcccatattctcccctatggttttatttttcatgggtgtagaatagcgtttaacaagagggtggtgttctaggtacattagtgtacgcgttactatctctcggtgttgcggttgccttgtgctagaataaatatggttaccatctgttgctgatgggtcatgtggttcccccggcggatatcatgtggttgcgtggtatgggttattttcgtcttctgttttgttcgcacctgatccgatccgatcttttgttcaatgaagaagaaaaaaattattggt

SEQ ID NO: 117969 - DNA, 1167 bp, Zea Mays
ctatttctctctcatcgcttctctcccctgctctctctcggccgccagcagagctgcgcccctgcacgcgagtagcagccgcgccctgccccgcgccacctacacccgagcgccccgcccgcggagccgagcgacttgagctgccaggaactcgccaaggccgcccgaagcaccaagccccgacgcccagcgccatgcccagagcggacgctcgccgccccgcaccgatcgaccccgcgcgcacccgacatcgagactccccgcgacccgcccgctccagccgccaggaccgcgtgccaccccgcgcgcagctccccacgcctgcgcagccgcgacgcccgggacaccgtgcccctgcagcttccccgacgtccgcgccaagacaccctgccaaggaccgaaggccaaccgacgaaccccgcgccgtccgtgcgttattggaacttcaatgcgtccgttcctctccctcccccattactccctctcctccatgaacgccatcaacatccatgaagactcgacctttcctctccctccctattctctataaattggacaccggacctctctctccattccatcccgcctccctgcctcgctctcacacgctcctcttcattgctcgcttgtttgcgtgtgtgtgttcacgccatcgtgccactcgccgtgtgactggaggtccctgctccttccccgtcgccggcgaagacgaacacaagtcactgcgtccccttcgatggatccctgcccagaacgctgtccgccgcagtgaaaccgacccagtctctagtccgttgtctcctttgccgtggacgccaagaaccggagcaccccggctggaccatacatcacttcgccgtgctcggaccgcccgtggaactcgccggaccgtccgcctgcaccttgccctcgccacgttcgtgccctgcttgccgaagcgatgccacctgtcgtgccaaaccttcgcctagacgcgcgcccaagccccgtccgccgttcgtcgtaaggttgaaggcaacccaaatattttattaactccaaaatcacagtttgaattaattcatgaatttggtaattacttgtgttttggaatattgtgatttggaattcatatgtgtaaatgattgattttaagtatatgtgcgatgaattagtgaattgtagtag

SEQ ID NO: 117970 - DNA, 103 bp, Zea Mays
atcgatcgcagtcggagtcgcaaggaaggggaaaggagcagcagagagaagataaacgcgatactgatagtgtattcggttattccataagccttactattcc

SEQ ID NO: 117971 - DNA, 957 bp, Zea Mays
acacacacacacacagacaccaaacgccacagaacttgcaggcatggctgaaggttaagaagaaaaagaggagggcggcctcacatggagatggagagccccttttggtagccaagaatgacttgcctatgcacgccctctgttggcagttccgtccggcagccatggcgacggttgcacaaggtgagtttttgcggcgtggatgatgcaatgtggctgcatcggcaggtcttcttggctagccagtgggctctcgtccaccatgccaggcctccctcttcaaaatttccctgatttttgccctctgcacatggaacttggtgattaaacttttggatataggccgttctttggcgctgaactcccctgattgaacacagcatgttgtaaatactactcacctggctatgcactcctgagttgcatgcagttgcagaaccaagaaatgttaccgctgttgaaatcattaaaaaaaatagagaaatgcctttgcatggctacgggtgtttcagcttctgcagggcagagatgatcatcaggtttgtccggtctgcagttggcatgcagttctcgccagatccaagaagcggccctgccatgccaacaagcacggccacaaggagttcgtgtctgcgcgtgtggcagcgcatgagaccccaaccgccacacgtgtagggcattccacgcaccggctttccaaggtgtactcgtgccgtctgcacgttgcacgcgttcagcatttcgtcgttgcgtgcgtacagtacagacggggctggaggcgttctctcccccctcctccccctctaataaaaatcttgcacatcaattgtggttgtataacatttctactaggatgaaaacggtcggaaacggtatttattcggtaatcagtttgttctttgattgcgaataaataggatatagaatatacaatacaaatttgtattcttgttttta

SEQ ID NO: 117972 - DNA, 1180 bp, Zea Mays
acatgtggccattggctaagtgaacagcgacacctcatcgcctcgccctcctaccacgacaactggaacgtgcgagcctcatcacctcccgactcccctccacgccttggaatgctgcctgcgcagacgctaacacacacgtttcccatggcagcgtccacggcctcgcgcatcttcacgcccttcctccaccggcaccagcggcgcacgaaggcagtcgtggtcgcagccgcgagcccgcccgacgccgaaccgactcctgcgacggcggacggtgcagggccggggaagaagaagacggtggacaccaggatacactggtccaaccccgacgaagggtgggtaggaggcaaggccaagaaggaaggcgacggccgcggcagcagcaagaacgagccgttgggagggaggttcgcggacctcatcaacaacgcggccgagtctcactaccagttccttggcatagcgccagaggcggacatcgaggagatcaagacggcgtaccggcggctgtccaaggagtaccacccggacacgacgacgctgccgctcaaggtggcgtcgcagaagttcatccgcctgcgagaggtgtacaacgtgctgagcaaggaggagacacggcggttctacgactggacactggcgcaggaggccgagagccgccgcctgcagcagctcaggtccaggctcgaggacccatacgagcaggacatcatcaactacaaacccgtgccagacatggttgaccgcctcggcggcaagaacatgaagcttagcgatcaggccatgactgcgctcaccatcgatatcgttatcatcatcatctccatctgctgcatcatctatgctgttttcttcaaggagcagtactgacagcagcataccagcaacagcagcaaggttgcaggagtgtaccatagacagaacattataggtaaattaactgataatgccctaagattgtcttttgggatgttatcatgcactgcatcatgtaatgtccaatagaataaggtaggaacgacgattattcatggtttgttgccaacaatcctatatttgcataatcaaatcataattccagtataaatctgtgacatcataatttattgcgtcaaatcaaaagacaatctgaaaagagggcaaaattccctaacaagatatcttgtgctcttgctgt

SEQ ID NO: 117973 - DNA, 1368 bp, Zea Mays
gcaaaacccgcttctccctcctgcactccactacttgccttcccgcccgtcctctactcccccaaatccgccgggccaaaccctagagaaggcgatcggcatttccccgacggcgagcgggcggaagcggacaattatgccccgctgccgccgcgacaaggggcaggcgctcatcgacctcgacagcgacgccgaagacgagtgccaaagcaagggttctcaaacaagtagaacaacaacattgaagacatctgggagattgaaaaatgtattaacaacaacattgaagacatctgggaggagatccaaaaatgtattgccttcattttatgataacctcccccagggcagagcctcacgccatgcaactagcaggaggaacaagacaaatcaagacaagctaaatactgatatttttgaattatacatggaagatctttggaagcacattgatgaagataagaagagtgcttatgcatacttggattctttatggtttaacatgtattaccatgggagtaataaacctaatgtccttaaatggataaaagctaagagaatattttcaagacaatatgtttttgttcctattgtttgttttggacactggagcctccttgtcttatgccactttggtgatgcaaactgttcggatattaagaaaggaccacggatgatggtgctggactcactcaatacgacagatccgacaaggttgcgatcagcaatcagaaaattcattattgacatttacaagactgaggagcgggaagaaagcaagcagttcataaacaaaatctgcctcgagtttcccaaagtgccacagcaaaatggggatgaatgtggaatttatgttctttatttcatccgctgttttctactgaacaaaaaactgacagaagttcttgaaaacaaaaaattggaagaaaaatttacccagctgtttgatgatggctggtttaacccagaggaactagagaacttccgcaaggatatccattcattccaagcgaatcgaaataacaaagttgcagagtagggtatatagcaaaatggtgccaagtatataaattgatagcttcatccaccatgtagattgctgagtttcatcttcctttgtggctcattccgaggacatttgaaggctgttgaggatatgttgtatttccgttttatccatggaagagggagtacatagagcttcgctggcagacagcaaactagccatttatcgtatttaaaatatcgaacttggtagtgtatatatattatatctggaagtgctagattagcatcaccctcttggataatgttagcatttagcagggttacacacgatgtactagtgtatgtattctcattctagag

SEQ ID NO: 117974 - DNA, 1435 bp, Zea Mays
gcaaaacccgcttctccctcctgcactccactacttgccttcccgcccgtcctctactcccccaaatccgccgggccaaaccctagagaaggcgatcggcatttccccgacggcgagcgggcggaagcggacaattatgccccgctgccgccgcgacaaggggcaggcgctcatcgacctcgacagcgacgccgaagacgagtgccaaagcaagggttctcaaacaagtagaacaacaacattgaagacatctgggagattgaaaaatgtattaacaacaacattgaagacatctgggaggagatccaaaaatgtattgccttcattttatgataacctcccccagggcagagcctcacgccatgcaactagcaggaggaacaagacaaatcaagacaagctaaatactgatatttttgaattatacatggatggacactggagcctccttgtcttatgccactttggtgatgcaaactgttcggatattaagaaaggaccacggatgatggtgctggactcactcaatacgacagatccgacaaggttgcgatcagcaatcagaaaattcattattgacatttacaagactgaggagcgggaagaaagcaagcagttcataaacaaaatctgcctcgagtttcccaaagtgccacagcaaaatggggatgaatgtggaatttatgttctttatttcatccgctgttttctactgaacaaaaaactgacagaagttcttgaaaacaaaaaattggaagaaaaatttacccagctgtttgatgatggctggtttaacccagaggaactagagaacttccgcaaggatatccattcattccaagcgaatcgaaataacaaagttgcagagtagggtatatagcaaaatggtgccaagtatataaattgatagcttcatccaccatgtagattgctgagtttcatcttcctttgtggctcattccgaggacatttgaaggctgttgaggatatgttgtatttccgttttatccatggaagagggagtacatagagcttcgctggcagacagcactagttcggcagatttattacattttagggctagtttggcaactctattttcccttgggaaacgaagtaatttccgttggtaaaataaaaatccttggaaaaaatagggttgccaaactagccatttatcgtatttaaaatatcgaacttggtagtgtatatatattatatctggaagtgctagattagcatcaccctcttggataatgttagcatttagcagggttacacacgatgtactagtgtatgtattctcattctagagatgctgtagagtctcctgcttatccgggtatagacgttacagtttcacatctgttgtgccgagatggtgatggtaatagtaagtaaaaaaaaaaaaaaactcgcagcagcttcctgtttc

SEQ ID NO: 117975 - DNA, 1603 bp, Zea Mays
gcaaaacccgcttctccctcctgcactccactacttgccttcccgcccgtcctctactcccccaaatccgccgggccaaaccctagagaaggcgatcggcatttccccgacggcgagcgggcggaagcggacaattatgccccgctgccgccgcgacaaggggcaggcgctcatcgacctcgacagcgacgccgaagacgagtgccaaagcaagggttctcaaacaagtagaacaacaacattgaagacatctgggagattgaaaaatgtattaacaacaacattgaagacatctgggaggagatccaaaaatgtattgccttcattttatgataacctcccccagggcagagcctcacgccatgcaactagcaggaggaacaagacaaatcaagacaagctaaatactgatatttttgaattatacatggaagatctttggaagcacattgatgaagataagaagagtgcttatgcatacttggattctttatggtttaacatgtattaccatgggagtaataaacctaatgtccttaaatggataaaagctaagagaatattttcaagacaatatgtttttgttcctattgtttgttttggacactggagcctccttgtcttatgccactttggtgatgcaaactgttcggatattaagaaaggaccacggatgatggtgctggactcactcaatacgacagatccgacaaggttgcgatcagcaatcagaaaattcattattgacatttacaagactgaggagcgggaagaaagcaagcagttcataaacaaaatctgcctcgagtttcccaaagtgccacagcaaaatggggatgaatgtggaatttatgttctttatttcatccgctgttttctactgaacaaaaaactgacagaagttcttgaaaacaaaaaattggaagaaaaatttacccagctgtttgatgatggctggtttaacccagaggaactagagaacttccgcaaggatatccattcattccaagcgaatcgaaataacaaagttgcagagtagggtatatagcaaaatggtgccaagtatataaattgatagcttcatccaccatgtagattgctgagtttcatcttcctttgtggctcattccgaggacatttgaaggctgttgaggatatgttgtatttccgttttatccatggaagagggagtacatagagcttcgctggcagacagcactagttcggcagatttattacattttagggctagtttggcaactctattttcccttgggaaacgaagtaatttccgttggtaaaataaaaatccttggaaaaaatagggttgccaaactagccatttatcgtatttaaaatatcgaacttggtagtgtatatatattatatctggaagtgctagattagcatcaccctcttggataatgttagcatttagcagggttacacacgatgtactagtgtatgtattctcattctagagatgctgtagagtctcctgcttatccgggtatagacgttacagtttcacatctgttgtgccgagatggtgatggtaatagtaagtaaaaaaaaaaaaaaactcgcagcagcttcctgtttc

SEQ ID NO: 117976 - DNA, 1876 bp, Zea Mays
gtctttttcgcgtggcttggctgacatgtgaaaaagctaggcgcccccgataaaaagggcctccccgctccccggacgcggcggctactgtttctgtttcttccttcgaccccggtcgtcccgtcctccgctgggcatcgaaagtcgaacgcctcccccctccctccctcccagttccgtcgtcggctcctgcagcagcagcaagcaatggcggcttcctggagagccgtggcgctggcggtggccgcagtgggctggcttcttgccggtgccgcgcgggcgttcccggccgaggacttggtcgcgcggctgccggggcagcctccggtcacgttcaggcagttcgccgggtacgtggacgtcgacgccaaggccggcaggagcctcttctactacttcgccgaggcgcgggaggacgccgccgccaagccgctcacgctgtggctgaatggaggtcctggctgttcttcggttggaggtggtgctttcaccgagctagggccattttatccgcgaggagacggccgaggcctcagattgaacaagaagtcatggaacagagcgtccaatcttctgttcgtggagtcaccggctggagttggatggtcttattcgaacacttcatcggactacagcactggagacgtgcggactgctcatgacatgtaccaatttttgttgggatggtatgcgaagtttcctgagtacagatcaagagctttgttccttaccggagagagttacgcagggcattacataccacagctcgctgatgtacttatcacccataacgagaaatccaagggtttcaagttcaatattaagggagtcgctatcgggaatccgctcctcaagcttgacagggacgtccctgcgacctacgagtacttctggtctcatggcatgatctccgacgagatattcctggcgatcagccacagctgcgactttgaggactacaccttcaacgaccctcacaacgagagcaagtcatgcaacgacgccatcgcggaagcgaacagcgtagtcggagactacgtcaacaactacgatgtcattctcgacgtctgctacccatcgatcgtgatgcaggagctacggctgcgagaatacgcgacgaagatcagtattggcgtggatgtctgcatgtcctacgagaggtttttctacttcaatctaccggaggtgcagcaggctctgcatgctaacaggacgcatctgaagcatcactggagcatgtgcagcgatatcctgaactacagcaacaccgacggcaacatcaacatactgcctacacttcaaagaatcgtcgagcacaagataccactttgggtgttcagcggcgaccaagactccgtcgtgcccttgctgggcacccgaacccttgtgcgagagctcgctcacgccatggggctgcatgtcaccgtcccctacagcacctggttccacaaaggccaggttggagggtgggtgacggagtatggcaacttcctgaccttcgccacagtgcgaggtgcgtctcacatggtgccctttgcacagccagaccgggctctcgggctgtttcgatccattgtactcggacaaagactaccgaacacgacgaatccacacattgactagaagtgtatctacaaaagaaggtggagacagacagaaaaatagcttagattttgctttttcagttttgctgcaatgaatggatctacaaaagaaggtagttcataaagacgtgtgatgtgttggatgctcaactagtactttaactatttataaagagcagaaataatatttttattgctgtggttataactatcatcaatctgcatccctcgaagtttggaacacacatagatttgtgcaagtgacgacaggc

SEQ ID NO: 117977 - DNA, 1758 bp, Zea Mays
gtctttttcgcgtggcttggctgacatgtgaaaaagctaggcgcccccgataaaaagggcctccccgctccccggacgcggcggctactgtttctgtttcttccttcgaccccggtcgtcccgtcctccgctgggcatcgaaagtcgaacgcctcccccctccctccctcccagttccgtcgtcggctcctgcagcagcagcaagcaatggcggcttcctggagagccgtggcgctggcggtggccgcagtgggctggcttcttgccggtgccgcgcgggcgttcccggccgaggacttggtcgcgcggctgccggggcagcctccggtcacgttcaggcagttcgccgggtacgtggacgtcgacgccaaggccggcaggagcctcttctactacttcgccgaggcgcgggaggacgccgccgccaagccgctcacgctgtggctgaatggaggtcctggctgttcttcggttggaggtggtgctttcaccgagctagggccattttatccgcgaggagacggccgaggcctcagattgaacaagaagtcatggaacagagcgtccaatcttctgttcgtggagtcaccggctggagttggatggtcttattcgaacacttcatcggactacagcactggagacgtgcggactgctcatgacatgtaccaatttttgttgggatggtatgcgaagtttcctgagtacagatcaagagctttgttccttaccggagagagttacgcagggcattacataccacagctcgctgatgtacttatcacccataacgagaaatccaagggtttcaagttcaatattaagggagtcgctatcgggaatccgctcctcaagcttgacagggacgtccctgcgacctacgagtacttctggtctcatggcatgatctccgacgagatattcctggcgatcagccacagctgcgactttgaggactacaccttcaacgaccctcacaacgagagcaagtcatgcaacgacgccatcgcggaagcgaacagcgtagtcggagactacgtcaacaactacgatgtcattctcgacgtctgctacccatcgatcgtgatgcaggagctacggctgcgagaatacgcgacgaagatcagtattggcgtggatgtctgcatgtcctacgagaggtttttctacttcaatctaccggaggtgcagcaggctctgcatgctaacaggacgcatctgaagcatcactggagcatgtgcagcgatatcctgaactacagcaacaccgacggcaacatcaacatactgcctacacttcaaagaatcgtcgagcacaagataccactttgggtgttcaggttggagggtgggtgacggagtatggcaacttcctgaccttcgccacagtgcgaggtgcgtctcacatggtgccctttgcacagccagaccgggctctcgggctgtttcgatccattgtactcggacaaagactaccgaacacgacgaatccacacattgactagaagtgtatctacaaaagaaggtggagacagacagaaaaatagcttagattttgctttttcagttttgctgcaatgaatggatctacaaaagaaggtagttcataaagacgtgtgatgtgttggatgctcaactagtactttaactatttataaagagcagaaataatatttttattgctgtggttataactatcatcaatctgcatccctcgaagtttggaacacacatagatttgtgcaagtgacgacaggc

SEQ ID NO: 117978 - DNA, 2130 bp, Zea Mays
gaaatctccgcctcctccagtcctgctcgctccccacctctcatggcggcgccggcggccacccgcctccactccccgttcctcctgcttccttccccaccgcacccccacccttcacttcgcctccgcttcctcctgccgtccccgccgccgctccgcctccgccgccacttcccgctgctggctgccgccgccgtatccgccgcagccggcgccggcggtggcggggaggaggtcgccgctaggaaggacgacaaggccaggcagctgcagaagcgggtcctcgtgggcgtcgccatcggggtgggcgccggcggcatcgtggtcgccggcggccgggtgttcgccgccgccgtcgcggccgccgttcttgccggctcccgggagtacttcgagctcgtccgcagcactgtagccggaggcgggaccccgccgccgcgctacgtgtcccgcgtctgttccgccatctgcgctctcatgcccatccttacgctgtactatggacgcatggatgttactgtggcgttttctgcattcgtcattgcaatagcattgcttttacaaagaggaaaccctcgttttgctcagctaactagttcagttttcgggttattttactgcggttatctaccttctttctgggttaagcttcgatccggactagctgcccctgccttaaatacaagcatagcatacaattggccaattcttcttggtggacaagctcactggacagttggacttgtagcaaccttgatggctattagtagcatcattgctgctgatacatctgctttcctttgtggaagggtacactcttcaattaataacaatttatttttctttttgctgttgagttgcatctctagactacccaacttgcgtgggggctaaaggatctgttgatgtttttttattgtatgttgcatagcaccatgggtttacttttaccaatgcactagtgtaatattgtactaagaaacaggcgtaattgtttgggttcttgtagctcattatttcaattataacaagtatctgtttatctgtataccttgagacagtttttttttaaatgagtcatattgctcaaaagttatgatgccaacgaaccatgtggttcatcgagtatggtgaaccactgaagctgcactcaactgattcctgctttatgcagtgctcagttaattcattggcatttggtcgtacccctttgactaacataagccctaagaagaccttggagggtgctttagctggcctagctggctgcgtactgaccactgtgctgctgtcgactgccttacgctggccaaggtcgcttttgagtgccacagcttatggaatcctgatcttcctgggttcgttattcggggatcttgttgaatctctgatcaagcgcgacgctggtgtgaaggactccggatcgctcattcctggtcatggtaaagcagcgttaatcgcccctatccccttcttttcccttcacttcttgtactgcatcgaagtaaccgtccttggagaaaatatataccagtaggagaggggagaaatgcattgccgtgatgtattcatattctattctatcagcatgtcatacttcatgcatgaatgtgatacgctgctatgccacaatgcaggtgggattcttgaccgagttgacagctacgttttcacgggggcactttgctactcttttgtcagagtggctctacccctgtacggggtctgattagagcaccggccttcttgttgttttgcctttctccttccatcagcaatgcggtcagtcaccatacattttaacatgcaacgatgagtatttgctgggatgccctagatcagttcttcatctcaagacaacgtggtcttccctccaagcgaatttggtggccactagctcgtcatcgacattgcttcttgctttgggtttgagatggcctttccagctcaaccagtttcttgcaagccttgtaactctgtgtgtacatagtttattttttcatatagagagagagtaaaaaggaaaggctaattattcatcacaaaagctgttaacagtgcattgaggcagcttatgtcaatatgtaccaaactacacttgttttaataattcaaggcactaaattccct

SEQ ID NO: 117979 - DNA, 658 bp, Zea Mays
gggtttcagcggcggcggctgccgagccccattccccgatctgaagcacctcaaaccaccgctctgccccagatccagatccacccagctactgcggcgagcccgtggggacggtggcggcggaggacccgagtgcacggagatgctcaactacgaccaggtcttcatcagggacttcgtgccctccgcgctcgccttcctcatgcacggcgagaccgagatcgtccgcaacttcctccttcacaccctccagcttcagcagcagccatagtcgcctaggggctcaggtgtggtcgtcgtcgcggggcccggccccagccgcgggctcggccgcaagccacggacgctctgctgccagccgcgggcgtgcgctctgccgccagccgcgggtccgaccgcctacgggtgcgcatccggtcgccgccgtcgagtccatcttggaggcaaggagtgagcaaggcatcgagcttccccaccaaattattccctgacggtgcacgggaatggccagggaaatccatggtcgccagatctgcgcctacttattcctctccagtccccagcgagagattcaggtgaaacatgaagagctgcttgagtatgcccaaagtatcatttcaggattgaagagaaatgatgaaattgtgaggtgatataa

SEQ ID NO: 117980 - DNA, 307 bp, Zea Mays
tttcttcgggcaggctgcagccgccgtggaagcagggtgccgtgtgctcaagctggcgccggcggtcaccgtggcacagagcgactcggactgttcgttggtagtggacctatcgtcgtcgccaccagccactgtgtcggcgaggaagcccgccgtgttcgatctcgacctgaactgctcaccgctgacggaggcgggagcatagtcgccggagctttaatgactgtatgtctgttagtttctttcttcgcctttttcccggtagaggaaaattcggtactacgctgagagaaactcttgtccgata

SEQ ID NO: 117981 - DNA, 585 bp, Zea Mays
atgtttctggtggattggttgtgcgacttgtttgtctccctgcggcggctgtggcagaaggaggccaagatcctcttcctcggcctcgacaacgccggcaagaccacgctgctccacatgctcaaggacgagaggttgagtcagcacgcgccgacgcagctcccgacgtcggaggagctgagcatcgggcggatcaagttcaaggcgttcgacctcggcggccaccggatcgcgcgccgtgtctggaaggactactacgccaaggttgacgcggtggtgtacatggtggacgctgccgacggcggccgttttgacgagtcgaagacggagctcggcgcgctgctgtcggacgacgctctggccggcgtgccgttcctcgtgctggggaacaagattgacattccgcaggcagcgcccgagcatgcgcttgcctactacctcgggctcaccggctgcaccaccggcaagggcaccgtggacctcgccggcaccggagtgcgccccgtcgaggtcttcatgtgcagcgtcgtccgtaaaatgggctatggcgaagggttcaagtggatgtcgcagtacatcaattaa

SEQ ID NO: 117982 - DNA, 638 bp, Zea Mays
ctcggaagttagtagattctcggaagttagtagcttcacgccgtcagctgactaacttcctacgactaacttcctacagcttactgtagcccctaggaagttagctagctaacttcctactgctgactgtagcccctaggaagttagctggctaacttcctacggcttaataagcctctaggaagttaatttgaccagcattacaaatgatatttatttttattttacaccacattccacaacataacaaatatatcaacagctatatagcacaacatatttttacacaaaacatctcacacacaatcacataacaatatttaaatccatagtctcatcaattacatcacaaaagtctcatccatagtctcatcaattacatcacaaaagtttcatccatagtcataataagacacatctcatcatctagtactaataagagacaatatctcatacatagtcataataaaagtctcaagtatcagaacgcagtaacatggaagctcacggtcgctgatcaccatcgagttacagtgacaagtgatggtcgatacctccactagtgaagagggtttcgacaaagtctaacccgtcgtctttattcatgcgttggcaaggtagctggaggggtctaatgt

SEQ ID NO: 117983 - DNA, 1932 bp, Zea Mays
atgccgtcgcttcgagcggtgatggtgcacggcggcggcgaaaaggacggcggcggctccacggacggcgtgccgcccccgtgcgcgcataccctggtgagcctcctccgggcgcggtcgcagcgcagcgccaaggccgacgagaaggtggagtgggtgcggtcgcagctcgtcggcagcgacgcggagttcgagacgccgttcggccgccgcgcgctcctctacgccgaccacaccgcgtccggccgtagcctccgctacatcgaggactacatcgtcaagcacgtcctgcccttctacgggaacacgcacacggaggacagctacgtgggcagcaagacgacgcggatggcgaggaaggcggcgagctacatcaagcggtgcatgggcgcgggccccgacgacgcgctgctcttctgcgggtcgggcgccacggcggcggcgaagcggctgcaggaggcgatcggggtggcgtgcccgccggcgctgcgggcgcgcgccgcctcgcagctgcgcgcggaggagcgctgggtcgtgttcgtggggccctacgagcaccactccaacctgctgtcgtggcggcagagcctggccgacgtcgtgcaggtcggcgcgggcgccgacgacggcctcgtcgacctggccgcgctgcgccgcgcgctggggtcgccggagtacgctagccggcccatgctgggatccttctcggcgtgcagcaacgtcaccggcgtgctcaccgacacccgcgccatcgctcgcctcctgcaccagcacggcgccttcgcctgcttcgacttcgccgccagcgggccctacgtggacatcgacatgcggtccggggagatggacggctacgacgcggtgttcctcagcccgcacaagttcgtcggcgggccgggcacgccggggatcctgctcatgaaccgggcgctctaccgcctcgccggcatgccgccgtccacctgcggcggcggcaccgtcgcctacgtcaacgggttcagcgaggaggacacggtgtactacgacgacatcgaggagcgggaggacgcgggcacgccgcccatcgtgcagaaggtgcgcgcgtcgctcgcgttctgggtcaaggagcacgtcggccgcgacgccgtggcgatgcgggagcgcgcctacgccgaggcggccatggcgcggctgctcgccaacccgagcgtcgaggtgctcggcaacgtggccgcgcgccgcctgcccatcttctccttcctcgtctacccgccggacgacgacgacggagccgctgtcgctgccgctgtcgcccacgacgacgccgacgacgacgcctcctcggcatcgccggcgccacggcggcggctgcccctgcacggccggttcgtcgccaagctcctcaacgacctgttcgggatccaggccaggggcggctgcgcgtgcgcggggccgtacgggcacgcgctcctcggcgtcggcgaggacctctcgctccgcatccgcgacgccatcgtcaggggataccacggcgtgaagcccggctggacgcgggtcagcttcgcctactacctctcccgcgacgagttccgcttcgtcctcgccgccatcgacttcgtggccaagcacggccaccgcttcctcccgctctacagcttcgactgggccaccggcaactgggccttccgccggcgcacgttcaagcaccacgtcatgagggaggagctgctgcgcgagcgcgacacctccaccgacgactcggacgacgacgacgaccagcagcacttcacgaagaagaagaccgccgccgcggaatatcagcagcaggacaagtttcagagctacctggacactgccaccaagatcgcgctctcgctgccggacacgtaccgtgaactcgttgccagcgtgcccaatggactggacccggacattattctctttcgagtgtga

SEQ ID NO: 117984 - DNA, 2754 bp, Zea Mays
atgaacagagagcaatggatgtatggaattgatcggtctgatatcaattatttccgtcatgtgcaagggttcctaaaggtggctgaaaaacatcgattagataataaggcaacaactatcttatgtccttgtgtggactgtagaaactttgatccaattatcgactcacgtgtaatcctcggacacttgataatgcgtggttttacatatgggtacacatgctggacaaatcatggcgagtgttctattggtgataacaatggaaacactgagggtcctttagatactaatggcggtcctatggatactaatgaggcgaatgaccattatgtgcatatccaagatacaaaaagtcattttgcggacgcgacgattgttgatgtgcctgtcgatcatctggaatacatgatacatgatgttactgtaactcgtaatttgagtgaggctcaagcatcacaagaggtgatgaaatgcaagttggtggtgcagataggtccgcaatctgttgtggtcgctagagggcaggcttaccctccaaaggatgttgtaatcgtccatgggattgagcggcgagatgaccacacaaaagtgcaagttgattttgtgtttgacaacttctgggaatttccactccctatacctatcgctggtggtgatatgttcactcttggcgaagccaaaaaatcatttgtgttatggcctaagtcaggcatacaactagcagaggaaacaatagttcatgcaaagcctcaactagtcccacacacatcgcctcaggtactccatcacacacctgaaaaggataaaatgccaacaccaacaatgggtaccgagaatatagaagtcacacatagtgcctctaatgtcagcaagaagaggaaacataagcataaaaaacataacaaaagcaaagagaaggagcaaaaaaattcacaacagaaaaacatagaagatgatggtcttgatcccctttggactcccccctttcatcaacgatctccaccaccagttccaaataataaacaatttgtgctagggcagcctttagtatctagtgcattgcttaagaggatgggtaaacagagccaatgtttccacaaatggtattttgctatgaccacaccaatatctcgaaggcaaagtgccacacacttcatggtacgatacgaagaacatgattttcttgaaaattccggggtctatgcagtagaattcagtgatgtatttcacatctacaatgatcttgcccttgacatatccttacatcggagttggatgctggcttttggtgcttatgtcgacaaaaaaggtcgccataacaagaattttggtcgcacagttatatggaaacattttcagttctttgaccatgccattggtatcaacgttccaaggtcctgcttcctaccagttaaggcgacattagatttgcagctagtacagtctgatctatataccttggttgatggcttcgttacacgtaattcagccagaacaaatccatcaaatccctcaattgaacttggtcctgagttcaagaaggttgggagcttccttggtcgcttcaagtccatacctagcattgttgagcttgacagcttgaaggtttccagtgatgtttggttcggttctggaattgtactgaagtctttggttaatggggcaaacaaggcatctagacggactgaacatggcaggaccccaagtgttctcgttctgctaccaacaagagagctagccaatcaggatttcattgttaaaggaactctcaatttgaaatgcttgaaatttcgtgtccttgatgaagctgatgagatgctaaacatgggttttgttgatgatgtcgagctcattcttggcaaggtagaagatgctaccaaagtacagacgcttctgttcagtgccactctgccagattgggtgaataagcactctatgaggtttctgaaagttgacaggaaaacagttgatcttgtcggtaatgagaaactgaaggccagtgcatctgttaagcaccttgctcttccttgtaacaaggcagcaagggcacaagttattccagacattatccgatgttatagccaggatgtactaccccatagatggttgtttttcagtaatactggtgttgctgtcatgctttatgagcccagatataagcacagtgtcagcagactagaaagggagtctggggttaaatttgagcatatctctgcgccacaacccactgatgtagcacaatctgctggcagtgaagctgcagatgccattgcgagtgtgtcagacagtgttattcctatcttcaggcagcaagcagagcagttgctaagctcttccagtctgtctgcagctgacttgcttgccaaagcacttgcgaaggcagttgtttgctataacattccggtgatcttgtttcttcatcgtcggggtcatatttgttcccattggtgttatcttcagtttgacgtcggcaacgtggtcatggtgaccggcgggaggaacaccgggcgtgtaggagtgatcaagaactgggagaagcacaagggcatcttcgaggaaaacatagaatggaattcaaatttggtggtcgcaaaagtgtggagacttgaattcatataatgttaggcttaacattagtgtaaacagttgtattttagtttagatttagagtacacttatgtatgccttgtttgacaatgcttatttatgatatattgaatggtacttatttatattatattaattataatgttg

SEQ ID NO: 117985 - DNA, 4892 bp, Zea Mays
aagaaacggtggaaaaataattgggaaaacaaaatttcaaatcgaagtcttcctacacccagcgacgaaaaggctgcgacaattcgaatcaaaaatccatccgagtcgaatcgagccagcggaaactccgcggccgatctcctgtgctctcaccgcccgcctcccccgattctgcagcccctcgctgcgaatctggacgcgatttcgaggctagggtttgggaggctccggatcgcgagcccgtgcggaggcaagggtttggattcgggggttgctgctgcatgtcgggggtgctggattgagctactccgcgccggcttgtgatggtggtgaccggcggtggaagacgagtagacggcggcggtgagtagggtttgttgactgagttggggtcgagggtgcgccggccatggtgcggcttctcgggctgcggagcctgagcttcggcccggaggactcgccgcgggagatcccctccactgccgacgtggccccgcccgttggcagcagcggctggctcgtgcgcttcttcgactccgccttcttctgcgagtggattgccgtcagctatctctacaagcacgaccatgctggagtgcgcgactacctctgcaaccgcatgtacacgctcccgctgccggggctcgaggcctacctcttccaggtctgctacatgctcgtccacaagcccagcccttccctcgaccgcttcgtcatcgacacctgcgccaagtcgctccgcatcgcgctcaaggtgcactggctcctcgctgcagagcttgagctggaggatgctgacgatctcgacgggatcgataaggtgcaggagcagtgccaggttgcagcgaccgtgcagggcgagtggccaccgcttgtccggccttcacctccatcccctgctgccagtccgcgaggtaaccccatgctcagcagaatacgatcgtccaagcagcggctactgtcccttgcatcgtcaccttcgcttggactgagccccccagcaggtggtggggtcaatgtcgctgaggatgctatgggtactggagggaagcagccagccacaccgtcatcagaggataacaagttactcaagaggctgagcattggtccaaaaatgcgcgatgcactgctcttcagacgatcaggagagaaggatgaagaacaagaccgggatggtttttttaaaaggcttcttagggacagcagagacaaggaggaggaggatggtgacagagaaggatttttcaaaagattacttagcagggagaaggataatgaggaggaagaaagtgatagagatggtttcttccgcagattactcagggatagcaaagaggaggacatggaactgacaccaagctcagatggtttgttgaagcgactttttcgtgataaggaggacaggcaaggtgaggatgatgagaaggaaggattttttcgcaggatgttcaaggataagaacgaggagaggagagatagtagtcatgcaagacatgggaatgaggaaagactgggcaagagtgtggaagatgatgacagagaaggtttcttccgcaaaattttcaaagataagaatgaggagaggaaagatgaagggcatcaaaagccagatgagagggaaaaggttggtgcgaacatagaagatgataagagagatggttttttcaggcaactctttaaggagaaaaacgatgagaaaaaggaaggcagcacaccaagcaagaaagaggaagatgataaaggccataaaaatgcagatgatgataatttctttcgcaggcttttcaaggataagaatgaagaaaagaaagggattgttcatgacaggaatgaagatgacaagtgtgaggaaggtgataaagaaaacttcttccgcaaattatttaaggataaacatgaggagaggagaactgagggacctgataaaaatgatgattatggtaagggaagtagtggtatcgaagaggaagataatccagagtttttgtcattccgtaggttgtttagagtgcacccagaagattctaagagtgggcacatagaaagcagtcaatctaacaatctttctgaggggagcccaggatcagaaagcttttttaagaggctattccgtgatagagaccgctcacttgaagattctgagatttttgggtcaaaaatggcaaaagagaaacaccctggtactacaggaatcaatgagaagcaaagtggaaaaccaccattaccaattaatgcagtagcagagcttcgaaaaggttcttactatgcttcgttggaacttgttcaggctttatgtgatacatcgtatggcctggtagacatatttcctattgaggatcgtaagattgccctccgggagtctcttacagagatcaatagccagattgcttctgctgaaaaaaacggaggagtatgctttccgatgggaaagggcatatatcgagtggttcatatacctgaagacgagtctgttcttctgaattctagggagaaagctccttaccttatatgtgttgaagttttaaaagcagaagctcctagccactctaaaggatcatcagatgggcacaaattatcaaaaggtgggataccattggctaatggagatgtgcaactaccaaaaccacctccatgggcctatcctttgtggagcagacacgaaacacaaaactatgaaacagacagaatgctgaagtctacttctcaggttattgaccaagcaatggctcaactctgggagactaaagtaaaatttgtaaatgttagtttctctattgagaaacttggtcgctcaaggagcattgtactttctgaaacgggtcgtaggctgcgacatgatgctacggattctcatgatccacctggagattcgcaaacagttgctgatcagcctattgaatgggtgaaggttacgttgtctgcagttccaggagttaacatggaagatgtagatgataatgaaccaacacgaaagaaggaccatcgccgtgttcctagtacaattgccattgaggaagtaaaggctgcagcattaaaaggagaagctccacctggtcttcctctgaaaggagttgcgcagagcacccaaaatttagatcctaaggctactgatggtggggatccaaaaccaaccgatgctttggctggtgagctttgggctgtcaaacgcgaaagaattcgacggtcttcggttcatggaaaatcacctggttgggacttgcgttctattattgtcaagagtggtgatgattgccgacaggaacacttggccgtacagcttgttgcacacttctatgatatatatcaagaagctggtttaccactatggctgcggccttatgaagtaattgttacttcagcttatacagcactaattgagaccatccctgatacggcatcaatccattccgtcaaaagtaggtttcccaatatttcaagtctccgagactactatgtagccaagtatgaagagaattctccaaattttaaactcgcacagagaaactttgttgaaagtatggctggatattcaattctgtgctacctacttcaggtgaaagatcgccacaatgggaatcttctaattgatgaggaaggacatattattcatattgattttggtttcatactgtcgaactctcctggaggtgtaaacttcgagagtgcaccatttaagctaacgagggaactccttgaagtgatggattctgatgcagagggaactcccagtgagttctttgattactttaaggtgctatgcattcaaggtttccttacttgccggaagcatgcagaacgtattatacttcttgtggaaatgttgcaggattctggctttccatgtttcaaaggtggccctcgcacaatacaaaacttgaggaagaggttccacttgagtctaactgaagagcaatgtgtatccctggtgctctcactgatcagtagcagcatggatgcttggcgcactcggcaatatgattactaccagagagtattgaatggaattttatgattttccccacaggagcaacggattcattcagaaaccaattttcttgtatccttggagcaaaccatgggattgcataggtcagttttgggctgatctatgctggcaccccatatcagatttccaggagaggactaggttattgatcactgtgttttcatgtggcattgcacatttgtggtcaactagggaaacagattggtgccgcattgtactttcatgggaccccccctctgaaagagttgagaagtgtacagtcatcggcagtcatctagttagcgctttgtgctaggaggttgtgaccagtggagctctatttggcatattggaatttggaatccggctacattgttgtacagacctttgattgacgtagcttggagaggatgtaggagtgaacagggccatgctttgaagcgaacaagttataggcatatgggagctggggatcatccgagacagatgccgctcgaagtgtcactgtacttgttgtgtggtatccctatagcaccaaagtagatggagatgtgctttgctaaaaaaagataaagacccagtgttggccgctctcatatgtcactaggtctgaaaggaaattggccgctaatttgcgcgaggcctgtccttcagagaggtgctttgctgcatttgtaaattatcattactgtacagggaccatactgtcttagcattctgtttttaagttgttaagattttaattccttctttgtgggtgtcttggtcttcgaagatctaggtgatagcttgtttgactagcactatgatcagtgttcgaaagtacagttccatgtgtcatgaagaaaaacactgcaagatttttaatacatttttgatgtactatgagagcaaatttctatttcga

SEQ ID NO: 117986 - DNA, 1390 bp, Zea Mays
agtgaacggtgcaaactagatatctctagatcatcggaacggaggttattgcattgcattgcatccgtccagcgcgcacagagaaaatggagttggtcgtgctaatcgtcggcgctggcccagccggactggcgacggcggcatgcctgagccagcgctcgatcccgtacctgatcgttgagcgcgaggactgcagcgcgtcgctgtggcgctaccgtacctacgaccgcgtgaagctccacctgtccaaggagttcagctgcctgccgtacatgccgcacgaggaagacaccccgacctacatccccaaggcggagttcctcaagtacttggactgctaccgcgagcatttcggcatcaagcccaggtactgcacttgcgtcgtgtcggcagcatacgatgagggaaccggccgctgggtcgtcgccgcacgtgacacggtcgagggcacggagatccggtacgcggccaggttcctggttgtggccaccggcgagaatggagcggggaggattccggagatccagggtctggagagcttctgcggggaggctatccactcctcgacctacaagtctggaaaaagctatgccgggagaagggttctggtggttggtgctggaaattccgggatggagatcgcctatgatcttgcaaaccatggtgccgacacctcgattgttgttcgcagtccggtacacataatgcccaaggagctgatccgtctcggaatgacgtttgtccaatacatgccagttacaatagttgaccttttcttagtgaagctagccgatttcatatttggtgatctatcaaattatggcatcgtacggcctggagttggccccctacaactcaaatccaaaacaggtagatcttctgtaattgatgttgggacagcagggttgattaagaaaggcgtcgtgaaggtgttcaagaggatatcgaagatcactggaaacaaagttcagttcgaatgcgggaaggactgcgaattcgatgccatcgtgtttgcgacaggttacaagagcagtgcgaatctatggctcaaggcagacgacaagtgcatggtgaatagtgacggacgtccaaacacatgtcgtcccaatatttggaaaggagaaaatggcctctatttctctggttttaggaggatgggattggctggtatttgcatggatgcttataatattgccaatgaaatcgtatctgtctactgaagatttcttgcttggccttttaagtctagttaaatctatattaggtcttggttatccggttcattgcatcaataaatcagtagtagtgcatgcattggcttgtatgtcaacacattgtcctaagattgactgtctgtaaacggtgccttttatgcataacaatagctctc

SEQ ID NO: 117987 - DNA, 1311 bp, Zea Mays
taaatttgttcttttctttggcgtggaaacctcgaccgatctgtccgatctctctcccgagtccactccaagccttttcgccttttcctccgccttctcgcgatggcgccgccgcgccgcgctctactcgtcctcgccgctctcctcctctccctctcccttggggccgcctccttccattccgacgagctcctcctcaacgatgacgaagagttcgagggcgtcgtcgcccgcccctccgccccctccccgccggcggccccggtggtctcctcctcccgccgcagatcagcggacgcgccgttgcccgggtcaggcgagtccaacgcagtgcagttcacgctcgagcacgaccttggcgacggcaagggcttcgtctcagctggaaccttctcggcccgcctcaagaccttcgcccacggcacgcagaccctcactaaacttcgctttacaaggaatgattttactgaggatgataaagcggcgttcaaaaaagtgcttcaggaagatggcttttatacaattaggctgccatctaatgtgttggacactacaaagaaacatcatgttgtttcttcaatcagagctagatgcattccacgtgacagtttggatgaacacattgttatccacatggatggtgtaaatatcttggcagtcaattatggctctgttgatgggtgccaataccctaggcctatgaaattgccatcaaaatggacattcagctcttacactatcctaaagactgctgaacaggcaccaagaaccccatcgtttgcagatcagttaatagaagctgacaatggtcttggcgaagtaatgaaaccacctgagaaatctttctgggctaaatattggatgtacatcattccgcttggtcttattgtcatgaatgctgttacggcagctgccaacataccagaggaagctgcagggcagggccaacctggagcacaacgggcacctgctgctgttgctgggaggaggagatgatggctgccttccataccgtagttaactatcttcacattgttttctgttttttttggggtattgtatcaatcttaccttgactgcatcatctatggcactgcatgatgatgccatcttttgcttgtgttgaaacacgtagcctatccaagacaatgtggttcctatacatctgtagccaattttggccactagcatgccattggacactgaaactttgcttgaagcctgtgcacacatcatttgcagtgaccacttcatacttgatgcagcaaaaacacctattaatttcagctgttgaattttctgctaataatt

SEQ ID NO: 117988 - DNA, 757 bp, Zea Mays
ttgttcttttctttggcgtggaaacctcgaccgatctgtccgatctctctcccgagtccactccaagccttttcgccttttcctccgccttctcgcgatggcgccgccgcgccgcgctctactcgtcctcgccgctctcctcctctccctctcccttggggccgcctccttccattccgacgagctcctcctcaacgatgacgaagagttcgagggcgtcgtcgcccgcccctccgccccctccccgccggcggccccggtggtctcctcctcccgccgcagatcagcggacgcgccgttgcccgggtcaggcgagtccaacgcagtgcagttcacgctcgagcacgaccttggcgacggcaagggcttcgtctcagctggaaccttctcggcccgcctcaagaccttcgcccacggcacgcagaccctcactaaacttcgctttacaaggaatgattttactgaggatgataaagcggcgttcaaaaaagtgcttcaggaagatggcttttatacaattaggctgccatctaatgtgttggacactacaaagaaacatcatgttgtttcttcaatcagagctagatgcattccacgtgacagtttggatgaacacattgttatccacatggatggtgtaaatatcttggcagtcaattatggctctgttgatgggtgccaataccctaggcctatgaaattggttagttttctttcaggatttatattatgatttatcagtgttcaacgtaattaa

SEQ ID NO: 117989 - DNA, 964 bp, Zea Mays
ttttaaaaggtgtccaccaaagtactatccttttgtgtagcacctagcatgtacattttttatggaacaatcaataaataaagcaattgaattagttataagaaaaaacgactgcttgatgtattgcaaaaactgtgatgttatcttattatttgaagtattgatttattgtctgattctagagttatccttttcagttccttaactgtcttgactttcttatgtttcctagagatgcattccacgtgacagtttggatgaacacattgttatccacatggatggtgtaaatatcttggcagtcaattatggctctgttgatgggtgccaataccctaggcctatgaaattgccatcaaaatggacattcagctcttacactatcctaaagactgctgaacaggcaccaagaaccccatcgtttgcagatcagttaatagaagctgacaatggtcttggcgaagtaatgaaaccacctgagaaatctttctgggctaaatattggatgtacatcattccgcttggtcttattgtcatgaatgctgttacggcagctgccaacataccagaggaagctgcagggcagggccaacctggagcacaacgggcacctgctgctgttgctgggaggaggagatgatggctgccttccataccgtagttaactatcttcacattgttttctgttttttttggggtattgtatcaatcttaccttgactgcatcatctatggcactgcatgatgatgccatcttttgcttgtgttgaaacacgtagcctatccaagacaatgtggttcctatacatctgtagccaattttggccactagcatgccattggacactgaaactttgcttgaagcctgtgcacacatcatttgcagtgaccacttcatacttgatgcagcaaaaacacctattaatttcagctgttgaattttctgctaataattcatgctttc

SEQ ID NO: 117990 - DNA, 552 bp, Zea Mays
atggcgcggtcgagcgcggacgacatggagctgaagcgcgggtgcgaggccgggatcctcgccaagggggaccgggacaaggtggtgatgtgcatgcgcgtggccaagagccgcggcggcggcggcggctgggccaagggcaagctcacctcccgccacaacatggccaagccccgcgtcctcgccgtcaccgccaaggccaaagggcacaggaccaagacgttcctgcgggtgctcaaatactccaatggcggggtcctcgagccggcaaaagtgtacaagatcaagcatctccacaagatagaggtctcccaaaacgaccccagcggctgcaccttcgtcctggggtttgacaacctgagaagccagagtgtggcgcctccacaatggaccatgcgcaacaaagacgacaggaaccgcctgctgatgtgcatcctcaacatgtgcaaagagcacttgggaagcatccccaaagtcgtcggcatggacgtcgtcgagatggctatctgggcaaaggtatcatgcctcttgcttatagttttgatgacataa

SEQ ID NO: 117991 - DNA, 324 bp, Zea Mays
atggcggagcagggaaagggaaacaacactcaagcaaaggttacacaagtgagcagtaaagatgggcctgtagaatcactagtattagaggatgaatcacatgttatcgttgagaaggacttggtttctcagggagaagaggaggacattgaggctcttcttggcaattatgttatggccattggtgaagcagaggctttttccgaaaggatgaagcgcgagcttgtagcgctagaatctgcaaatgtttatgccttgttggaaactgaatctgttgtagaagaggtatgtgctcttcttaacttttttgacaaaggaatctaa

SEQ ID NO: 117992 - DNA, 1286 bp, Zea Mays
  misc_feature (990)..(994): n is a, c, g, or t
gccagggaaaaacgtgcagaatttgtacttcttaagtgcaccttcgttcggagggcatcagaatttttaaggaattactttcctagtttgattgattctatgctaaatgacaaaggaaacttctctcagcgaggtcatctgcagaggcctgatcacactgatatgaggtacaaatttaggacttatgcacgacttttacaacacatcaagagtttggacaagagttgtatgatgcctttgcggaaagcttactgccattcgctgaacatgataattcgacgtgagtctcgtgacttttctaatgaactccgtaatagttcaaaagcatcaaagagcagcacaccattgtttgagggtcctgcaggtgcaaaccagcctgcaagtattacagatagtcctgcagatgcatactccaagatgattactgttttcgttccacttcttgttgatgaggaggacttttatgctttggttgactgggcattcaagctagatccattgagttgcatatcaatgcatggactaacagatcggtatctttctggtcagaaagcagaggtctccggatatgtacaagtgttgcttgatgacttggagacaagaataacaattttattcagcaggtttgttgatgatgcctgctaccagattgagaaatatgagcgtaatgtgcgtcaaattggagttgtgccctatattcccaggttctcacaacttgcagcacgtatggagcagtatatcaatggatccagggatctagttgaccaggcatatactaaaattgttaccattatgtttgtcattctggagaaaattgctcaagtggaacctaaatatgttgatattgtacttttggaaaactatgcagctttccagcacagcttgtatgatttagcaaatgttgtgccaacacttgctaaatattattcatcaagctagtgaagcctatgaacaagctttgctcacgccatatcaatttggtcataatannnnnaaaagaaaagctattccaattcgctcggaaaattgaggaattaatgtacaacatgagccctgaggagatacccttccaagttggaatgtcaaaggtagattttcgcaagatgttgaagtctagcttaactggacttgacaagacaatcaatgcaatgtatagaaaactacagaagaatatgactgccgaggaattgctgccttcgctatgggaaaaatgcaagaaagagtttcttgataaatacgcaacattcctcaagttgatttcgaaaatatatcctgacgagaaggtg

SEQ ID NO: 117993 - DNA, 1452 bp, Zea Mays
aaatacatttcgaaataaataaaaaaagaaaatccttcctaaccctaaggcccactaagggtccatctacctaaccctagcagctgcgcgctccttagcttctctcccagccgccgccgcctctacctcttcctacgcttccttctctccaccgcggtcccgcaccacgggcacgcgccgtcgcctcgcccccacggcctacgccgccgccgcggcagctgcggctgaggccccgctccccatgacgccccgtccgaccattcattcgttcaccggccagcgtcagccagccaggcgtctaactccaacacgtgttgccaaatgccaacactccagtctccaggtgatggtcggtcagccaccagggcctccccgttcggccgccgtgcgtccaacagtcgggcaccggcgggcggcggccgctcgcccctgcggcttgggcgctcggccacggccagtgcgggacggggggaatgcttctggtaactgcccaaaaaacaaagagagggttagctggtgttcattttttctgctgtgcgttcaggttgaagcgcccagggtgcagccgaagctgagcgagcccttcttggggttcacccagaccgcagagatttggaactccaggcttgcatgatcggcctcatcggcaccttcattgtggagctggtgctgaacaaggggattcttcagatgattggggtggaggtgggcaagggtctggaccttcctctttgaagggtgaccaaatagtgacattatcgtttgctggtgtattatgctggccgaaaaacatgagggtttcacttgctttttgacttggtggctacatatgcatgttcatcatgcatgtccttggatatccggatgttacaacatcaactatgttaatgacttggtggctggccgtttgacagggttaatttgtgaacaaaaacgtgtgccttgtgaaacagagaaagataattgatgccaccgtgaaattagtactggtttataagataagatcaatgcaaaaatgggagaaggtggtcttctccgctgcgctcctgaaatatttgagcagtctggagtggctagtttgttttcagacattggagtttctcctcattcaacatcaattctcatgagtacccttaatgctttgctgatactcccttgtataactgccgcaatgctgctgatggatgtctgcgggagaagataaaacatgagacaccatgaaaattagtgatgtagttgtgggcttttgaacaatagctggagtgatataaaatattagtgatgtagttgtgggcttttgaactgcttcaagctggagtgatgtcgctgtggtgcttttgtgactgatcatctctggagcttttgtgaatgatctagctaacaatctgtaaatgatctaattgtgaatgatattataattgtgatgcttttgtgaatatataattgtggtgc

SEQ ID NO: 117994 - DNA, 1289 bp, Zea Mays
aaatacatttcgaaataaataaaaaaagaaaatccttcctaaccctaaggcccactaagggtccatctacctaaccctagcagctgcgcgctccttagcttctctcccagccgccgccgcctctacctcttcctacgcttccttctctccaccgcggtcccgcaccacgggcacgcgccgtcgcctcgcccccacggcctacgccgccgccgcggcagctgcggctgaggccccgctccccatgacgccccgtccgaccattcattcgttcaccggccagcgtcagccagccaggcgtctaactccaacacgtgttgccaaatgccaacactccagtctccaggttgaagcgcccagggtgcagccgaagctgagcgagcccttcttggggttcacccagaccgcagagatttggaactccaggcttgcatgatcggcctcatcggcaccttcattgtggagctggtgctgaacaaggggattcttcagatgattggggtggaggtgggcaagggtctggaccttcctctttgaagggtgaccaaatagtgacattatcgtttgctggtgtattatgctggccgaaaaacatgagggtttcacttgctttttgacttggtggctacatatgcatgttcatcatgcatgtccttggatatccggatgttacaacatcaactatgttaatgacttggtggctggccgtttgacagggttaatttgtgaacaaaaacgtgtgccttgtgaaacagagaaagataattgatgccaccgtgaaattagtactggtttataagataagatcaatgcaaaaatgggagaaggtggtcttctccgctgcgctcctgaaatatttgagcagtctggagtggctagtttgttttcagacattggagtttctcctcattcaacatcaattctcatgagtacccttaatgctttgctgatactcccttgtataactgccgcaatgctgctgatggatgtctgcgggagaagataaaacatgagacaccatgaaaattagtgatgtagttgtgggcttttgaacaatagctggagtgatataaaatattagtgatgtagttgtgggcttttgaactgcttcaagctggagtgatgtcgctgtggtgcttttgtgactgatcatctctggagcttttgtgaatgatctagctaacaatctgtaaatgatctaattgtgaatgatattataattgtgatgcttttgtgaatatataattgtggtgcttttgtgtttgtgtgatagatctatgactgtggtatac

SEQ ID NO: 117995 - DNA, 1416 bp, Zea Mays
agccgccgccgcctctacctcttcctacgcttccttctctccaccgcggtcccgcaccacgggcacgcgccgtcgcctcgcccccacggcctacgccgccgccgcggcagctgcggctgaggccccgctccccatgacgccccgtccgaccattcattcgttcaccggccagcgtcagccagccaggcgtctaactccaacacgtgttgccaaatgccaacactccagtctccaggtgatggtcggtcagccaccagggcctccccgttcggccgccgtgcgtccaacagtcgggcaccggcgggcggcggccgctcgcccctgcggcttgggcgctcggccacggccagtgcgggacggggggaatgcttctggtaactgcccaaaaaacaaagagagggttagctggtgttcattttttctgctgtgcgttcaggttgaagcgcccagggtgcagccgaagctgagcgagcccttcttggggttcacccagaccgcagagatttggaactccaggcttgcatgatcggcctcatcggcaccttcattgtggagctggtaacgacgtttgaggcattgcttctattcctacttgagttccgttctcaatgttcgatggaccggcttcttaatttctaggtgctgaacaaggggattcttcagatgattggggtggaggtgggcaagggtctggaccttcctctttgaagggtgaccaaatagtgacattatcgtttgctggtgtattatgctggccgaaaaacatgagggtttcacttgctttttgacttggtggctacatatgcatgttcatcatgcatgtccttggatatccggatgttacaacatcaactatgttaatgacttggtggctggccgtttgacagggttaatttgtgaacaaaaacgtgtgccttgtgaaacagagaaagataattgatgccaccgtgaaattagtactggtttataagataagatcaatgcaaaaatgggagaaggtggtcttctccgctgcgctcctgaaatatttgagcagtctggagtggctagtttgttttcagacattggagtttctcctcattcaacatcaattctcatgagtacccttaatgctttgctgatactcccttgtataactgccgcaatgctgctgatggatgtctgcgggagaagataaaacatgagacaccatgaaaattagtgatgtagttgtgggcttttgaacaatagctggagtgatataaaatattagtgatgtagttgtgggcttttgaactgcttcaagctggagtgatgtcgctgtggtgcttttgtgactgatcatctctggagcttttgtgaatgatctagctaacaatctgtaaatgatctaattgtgaatgatattataattgtgatgcttttgtgaatatataa

SEQ ID NO: 117996 - DNA, 1778 bp, Zea Mays
gagcaaagagagagagtcgcggagccaccgcgttccctagagagacgcggagagccagggcaaggcagctgtcgccgcagcgacgatgtggagctcgggctctgaccgcgacgaggccgtagacacggcgaacgcctcgtcagtcgacgcttcgtcgcccgcgcggcagccgtccacgccgcccccgccgcctcggcgccggcgccagcgcgcgcgacgccgcgctcaccgcctccgtgccaggaacacgggcgcaggagcggaggaggagggactcgtggaggcggacgcggacgcggacgacgtctggcgcgggctgcagcagcagcgggagcgggaggcgtggctgcggcgggcgtcgaggcccgtggtggtggtcgccggcgaggaggggtcccctccggacgcctccgccggctcgggggagagcggcggggtggggagggcgcggagcctgaccgacgacgacctggaggagctcaaggggtgcgtggatctggggttcggcttcagctaccgcgagatccccgagctgtgcggcacgctgccggccctcgacctctgctactccatgagccagcgcttcctggacgagcaccaccaccagcagctgggcaaggcggaggaggcgccgccgctcgctccggcctcgccggcgcagccggccgccaccaccaactggaagatctccagccctggcgacagcccggacgaggtgaaggcgaggctcaagtactgggcgcaggcggtggcgtgcaccgtcaggctctgcagctagctgatcaacggcgtggcagtggcggtggcggtggcggtggcgccaccatcaatcaatcttggcacaagagatgagagttgagacgagcacgcaagaagggaaatccattccgtctccgcccagccagcacagggcatctggtggtcggcatacaggcaggaaccgtggcaccaccgccggaccaaccagccagccagccgtcaaagttcaacgtaaacgaacacagacaggagcatcgtcccattcccatacatgcgctccatccagatcaagatggcctggactagcatcgtagcgtcaccatggccagcattcatccgtcaggagcacacaggagtcgtgaattcgaatttcgctccaagattttgcttgagatatgtggtagggacggaaggaggagggagaatcgcgtagttaattccatgccgtcctttatgttttttttttttttgtctctgttcaagctttgacatgatacaatctgccggctagctgccaccaccttgcctttgccttcaccggggaggcttaatggaccgaatcaacggagaatgcgtctaaagaacatgtccatcatcactttggtcctgatcatgagccagctgtatcatacaggtgttcttgcttttggcgaaagttttattttttttagtccaggtgtgtgtgaatgggccaggcgtctccggactctccggctagacattcttttaatctgagatctgcaggcttggctactacagctcgccagtgcaggagcttgcctgactggcctgctctgttcgggaaagttgtgtggccagaatcagaatagatagaccgccgcactgcgataactgctcctccatgtgcacatttaactctgcaacctgattatcaataaaaaaaaatccatagttaactgtggctatactttggacagatggcatcacatgtcatgtgtaaaatgtccaaatgtaatagtatgcttatatatgatcttatatatgatctggccatttgc

SEQ ID NO: 117997 - DNA, 724 bp, Zea Mays
gcagcatgagtgcctgtcatttcgctgatcaacagtgtgcattaatccaagaacagtgattgctctgtcatccatgtcttcaaagttggaactccatgactgaagctacgtcttcaattcaacggacaagccaattccaggaggccagctcgttccatcagcgttccccccgcaccagctcggcctcggcggctccccctcgcggtggttcctcgccaccgttgctggggaggaggaagaagaggaggaggaggaggaggagaagatggacatgctgtgggaggacttcaacgaggagctcgccagcgtgccgccgctgtgcccgctgagccctgtgatcaacaaggaacggttggcgatgagctggctcgacctcgacgacgacgacaagatggtcgtcgtcgatctggagaagcactgcaagggcaaacatccccaccacccacaggacggcagggtggtccggcgccggaagtggagcctcatgctgatgctcaggctcctcaagaagctgttcctcgtcaacaagtccaggaacccgaggactgcgcccatctgatctcatctgatctgatcgttccaagaaatcagtggcggatgagatgagtgacacaaaacatagtagtgtgtgtgtgtgtgtgatcgtacaatgctctatacaagttttaagttcacttgatgtttctctgtcagagtttacttgatgtccctcttcaaagttgcg

SEQ ID NO: 117998 - DNA, 872 bp, Zea Mays
tgtcttcaaagttggaactccatgactgaagctacgtcttcaattcaacggacaagccaattccaggtaggtagatgaggatgttgcaccatccatggcagcagtacagaccaagtgttccacatatgtagaattacacacatatatagagagatactaaggggctaaaggagtagcggtagtagagacatacatcaacaccacacacacacacacacacatgctcctacacctgaaacatttgcaggctcgcatcaggcatggatgatgacttcactttccccactcttcacgcaggaggccagctcgttccatcagcgttccccccgcaccagctcggcctcggcggctccccctcgcggtggttcctcgccaccgttgctggggaggaggaagaagaggaggaggaggaggaggagaagatggacatgctgtgggaggacttcaacgaggagctcgccagcgtgccgccgctgtgcccgctgagccctgtgatcaacaaggaacggttggcgatgagctggctcgacctcgacgacgacgacaagatggtcgtcgtcgatctggagaagcactgcaagggcaaacatccccaccacccacaggacggcagggtggtccggcgccggaagtggagcctcatgctgatgctcaggctcctcaagaagctgttcctcgtcaacaagtccaggaacccgaggactgcgcccatctgatctcatctgatctgatcgttccaagaaatcagtggcggatgagatgagtgacacaaaacatagtagtgtgtgtgtgtgtgtgatcgtacaatgctctatacaagttttaagttcacttgatgtttctctgtcagagtttacttgatgtccctcttc

SEQ ID NO: 117999 - DNA, 1929 bp, Zea Mays
tcaccaaaccgctcctaatccccaccatcatcacgtgcaattaatcaaccctctccaaccaatccgcgttggaattacaagaaagtcccttgcttcccttcccccctcgtctccgttcatggtgctggtggccgtcgaccggcaactccggcgcgggggcctctaatggcgcagtacaggcagcagtacggcgtcggcttttccgactcccgcggccaccatcaccaggtgctcccggactggcaccggccccaccacgcctccgccaagtcctcctcacggatccgccgccccgggaagcctgcgccgcgccgccgctcgccggctgctgctgccgccgtcgccgccgctctactcctcgccgccgtcttcctcctttcgcgccgcatctcgcgcagccccgcagagatcagccaagattcgagcgctagggagacgttgccggactggaaccagagcaagagctggaaggagctcaagttcgggcacggcggaggtggccgcagcgcgcgggactccaggtactgggaccgggacgataggcgccgcgacgaggactacacagaggacgaaaaggagaagatctcgggtggaagtgggacctccggcgatgctggcggcagcagcgataaaggtaccacctctgagggaggtggggaggataaaggtttgactaccggcagcgatgctaaggatgttccagaggtgtctgaaggtgggaaaggtgggaccttgtacaatgagggtggcaggaaggagctggagcagtacgaggctgcagccatgggagccacaggaacaggggtgaaggaggttgatccagatgatgagtatgacgatggcatcgatacacaggatgaaatggaggatgctcacctgcattcatctgatggtgggaggaagcttggtggtggcagccatgagggtgctgagaagaaggacgaggtcgctactgagaggcacacagaagcaggtggagggattgcgggtagtcatgatattagcagcccagacaaaaagaaggtttcaggtactggagacaagaagcatgggcccaagaagaaaccgaaacgcaagaagtctggttcaatttgtcaaatgaagtttcttaactcaactgctcagcttgtggagcctgtgaggaatgagaaatttgctagttttaagttggagtatgtagaagttgaagaaagacctattggatcagaattttgggaaccgagatttgccggccaccaaagcctgcaagaaagagaggagtcatacaaagcccatgaccaacagttgacatgcgcttttgttaagggtccaaatggtacaagtactggttttgatatatctgatgatgaccgaaagtacatgagtaaatgccacattgctgtatcatcctgcatctttggaaattctgatcgactgaggactccatttggcaaaacgattacaagcctctcaaagaagacagtttgctttgctatgtttttggatgaagtgacattgcacactttagaatctgaaggccagaaaatggacagcatgggtttcattggcatatggaagatcatattgattaagaacatgccttataatgacatgcgtagagtggggaaaataccaaagtttttggcacacaggctattcccatcatcgaggttctcaatctggttagacagcaaactgagactacaaactgatcctatccttatcctggagtatttcctctggcggcatggctatgaatatgctatttccaatcactatgatcggcattgtgtttgggaggaagtagcacaaaataaaaagctgaacaagttcaaccatacaataattgaccagcaatttgagttttaccaagcagacggactgacaaggttcaacccgtcggatcccaacaagcttctaccaagctgtatgctctgttacctgctagta

SEQ ID NO: 118000 - DNA, 209 bp, Zea Mays
ttttttatttggtttgtggaatagaatgggttgatccatcaccacccattcctcacaagctactaattagtatatacttgaagaatgagttgatttcaccaaaattgatgaaatgaacttatgatgcatcacctcataaagcataaagtgactttataaaccaaaacacatcataagagaatgttggagacatgttttatgtttttttc

SEQ ID NO: 118001 - DNA, 761 bp, Zea Mays
gccaagttattaaaaaatgacatgttgtttaccttgggggctgagctttggaagaatttcatgaggtatgggtggttgtcagggttcttgtcaaaagtgacaactctagggatggtgctagcatcaataaacttcatcagtgcaaatgtgagtaaaaccttgctgtcaacaacaagctcatcaaatggcttcagcagcctgaccaatggccgttccactgctgcatcaccacgtgggaggtggttggcatgcaaagtgtggccaaagtcgtagtcagacctcagcttctctgcgacctccatgaagtttgtaaattcggtgccgctgaattcagcgaagataccaacctgtaaaattgcaattattatggccgtcgcatcttctggtgacttgatctccttggacgcagggccaacctgcttcttcaagtaatccacaatgccatcagcctccctagggcccttgtattcctgaatgttcttcccctggtccctgaatatcttgatggttgggaacccttggatctcgtacttggtagcaagcggcctgttcttctcctcgttagcatcaaccttagcgagaacaatcggtgggtcatgcttgctaagtgccttggccgcattctcatactgaaacatcaaagaaaacacagtttagcttatgggattaaaccaatcagaacacaacccatgtgtaagtaaaggtagtgattacagagtaggagatccattacctctggagcaagtttcttgcagtgccca

SEQ ID NO: 118002 - DNA, 300 bp, Zea Mays
atggtaaacctggaacgatcactgttcatcgtcgcaggacctgcatatggcgaaagacgacagcatttgcggtcgatgcagttctattggttttctttcgagcgtgggttcctcagagctgttccgaccatgaatcacgctgcgcagcggcagctacagtcccgacctgtacaacagatccagaacagtgaagaaatcgagaacgccgactgctcaacaaacagtggagactggacaaaagagcgaaagaaattgaaacacctgcgcagcaaactgtgtgattgggcaaaagggaaatga

SEQ ID NO: 118003 - DNA, 992 bp, Zea Mays
acataaataccatcattgtgcgggaggcgttgatcaaacaaaaccaagcggtcgagctagataagacaaccatgaagatgcacgaggtcgaggagcctccagcggagatcacccgcgacgcccacccggcgcacgcgctgaggctggtggccaccgacgacggcgcgccgttccggtgcgacgggtgcaaggagcccggcagcggccaggggcggcggtacaggtgcggccacggctgcgacttcgacctgcacgtggcctgcgcgctggcggggccgactctgaggcaccccctcttcggcgagggcctcgagttccagctcctcccggaggcgccgccgcccgtcgacaagacgttctgcgacgcctgcggcctgcgggcgcccggcctcgtctaccactgcttcgacagggacctggacctccacccgacctgcgccgcgctgaagccggagagcgccttcccgggcggccacctggcccagctcggctgggaggccgccgagcaccgctgcgtcgcctgcgacgccgccgccgccgccgccggcaagaggttctgggcgtaccgctgggcctacggcggcacgcacgggtacctgcacgtggcgtgcatgaagaagatcgcctttcagagctgggaacaggcctaccaggccagcgtcgtcggcggcggcctcgtggaggcgagcgtgccgacgatgacagccgtgctgcacaggaagcgcaccgacgaaattacgggcggcgttaagattatcgacaccggcatacgcgggcagtacctttccagttcaacttggggtacttaaataattggtactatcgctctagtttattacacccaaaatactgctggcacataagagggctagctgcctagctatagtgccggcctgtgaatcaagccaacgactttgtgtaccgttgccacctcagctgtgtttaataattgggttttttaagctggtgccatcagattaagcctttttttt

SEQ ID NO: 118004 - DNA, 1544 bp, Zea Mays
cagcggcgaccagagttcagcttcccgggctcgccggcgcgggggctgccgccgcggccgccggcgaacccgatggcgccgcggtacggggacgaggaggtccggtggctgcaggcgtcgccgcaggcctcgccggagatggactacagctccggcggctcgggcacgccgtcgccgcagctgtgggcgcaccaccaccagctccaccggcagtacccggcgtcggcgggcagctcgccgtcgcgggcgcaggccatcgcggggtaccgccgcgagatgctcgacctcgtccgcggcctcccggagtccgcctacgagctctcgctccgcgacatcgtcgagcacccgtcgcccccgtcccctccccacgcccctaccaaccctctgccgccgcctaccaccgccggaccacgcgcgagtcgcgccgtccccgtcccggcgcaggagaagggcgagtccgccggcgccaggaaggacgccgtcgcggcggcggacgccgaggacggcggcggtagcaggaagcagggaggctccaagggcaagaagcaggggaggaagcagaggacgatgcggaagcagcggagccggagcctggaccgcagcgtcagcctggacaccggcctgctcatcaagctcttcctcccgctctccctcggcggcaagaagaaggtctcgcccaagcccgacgccgccaaggacagcaagaagaagaagaggaaggagaagaaggaggcggcggtgcaggaggaggagtggtggaccaagagcgagttcagcgaggccgggaacagcagccggaccagcagcagcaacagcaacagcagcgccgccagcctcaggaatgccaatggcgccgccaatccgagagcgccggacaggagctggagcaggaagcggaccgggtgctacgctttcttcagggcgaacaagggcaagaagaacgaagccaaccaggactagagctagtgatgacgacacggcctctccatgaaacacggaaagaagaagtgtttctccggtgaaacgttggtggtggtcgtagccatcagcagcggcgtcacgcatgcagctagcacaaggaagctcgagcaagcagcagatctccatactgccgtaccgtaccctaaaattgatgctgttcagtgcctggtttctgcacacgagtagtggcggctccggcatcgtcgtcgtcgtcgtccttttcctttctgttctggcatgtgatcttcatggtataaacagagaggacatgccatgtgtagcgtacaatagttttgactggttcgcacagctcgtacagaaatactgtattgatatggacggcacgccggaggcagtgacaccaatggattaatacttgcaatattttcctgactcggtcacattctgcactgcactgtactgagaagcttcagttgctactgtacaaatctttgtgaatactagaaaacagaggttgtggatagagatggcaatgggtacccgcgacccgatacccgatgggtatttactccattagggtatgtatgtgagctaaatattat

SEQ ID NO: 118005 - DNA, 96 bp, Zea Mays
caattttttgtgtgcagtaaaaacgaaaatatcattcaaaatttgtgcgcatgcaatggaaactctcacggtctgccataatttttggatctaaat

SEQ ID NO: 118006 - DNA, 265 bp, Zea Mays
gatttttttgagtatgttcggcaaatggatctgtatccaaatatttcaatcgtttattggatattatttactgtgcttgtgactgtggcatcgggttagagaagctttttaaagttgaaattgttgaagaactattaaggtcaacaatgtctccagatcgcctcaacggattggctactttatacattgagaaaaaatattagacgatgttgatagcaacactattatcaatgacttcgcatcaagaaacattaaaagaaatttt

SEQ ID NO: 118007 - DNA, 106 bp, Zea Mays
gagagatttaaacgcacgttcttggcggattcaaatcaatgcacgttcccatctcatttaagaaatgggcgtaaaatcagagtccaacatcttgtacggcgaatca

SEQ ID NO: 118008 - DNA, 103 bp, Zea Mays
tcgttacaacatttcgtaatagaacactgcacaattgtgttttctcatgcattcttacatgcttgtatttataatgaccatcctattcactctaaaagaaaaa

SEQ ID NO: 118009 - DNA, 1029 bp, Zea Mays
atgaagaactcgtggggcaagaactggggggagcaaggctacgtcaggataaagatgggcaccgggaagccagagggtgtctgcggaatctataccatggcctcctatcccttgaaaaatgcaacacgctgggggcgatgtccggagagtaagaacgaggcgacacagtatggactcgatatgaccgagcaacaatatcttgagcattcgattccatggatagctgccaatgatgctgcttggcgtgcgttttgtcgttactgggcttcggctgaattcaaggcaaagtctgtgcgacacagttctaatcatggaaccgagtcatatcacaagtatggaggtgatgatcactttcgtttggcaaaacgaatggaagctagcactggtgcagtgcctagtgatgttcaaatataccttagggggcacagaggaccagatcctgcaaatctagatgtgttgtacagccaaaagcaacagattgtgtggtacacaatgtttgctaacgtcatcgactcgagccaggtgagggttcagcgtggaggttcgtcgtggtctgctgctcgtagctcccgtctctccactcaagatccagcagaagtggaacaactgcgagaagaacttaggcgacatcaggatttcttgaagcaacaagctgcgcaacatgaatattatgctacacagattcaacaacagcaaaacactcatacaacaactagcacaggctcaagggatacacgtcctggtgcccccccaccaccacctcatgttcattatccttggtcttcacctccacctacacctacatctccatctaccgaacatcaggtgctcgttagatttggcggccgtggccctgaccacgaccaggctaaggcggcggcgaggagcggctgtcgccgtgatggggacgctcatcaacgggttcgtgctgaggaatgccattcttcttggcttgatggatgtctatggattgtggttcttgtgctgctggcttgctgccttcggatggaggggaaactgttggtataa

SEQ ID NO: 118010 - DNA, 1402 bp, Zea Mays
acgggtgctccaaacaactgcactagacatctcaattaattagctaatgagcaagcggctgagctgcactcaagacaaactaccatggatcagtcaaacattagcaacaagcacatgacgatgacaaccctaatgctcctcctctgtgtcatagccattgcagattgcatttgccacgccgcagtggcagcccgggtggagccatccaccaccgtcggcagaactacaggaggagacgaggcgatgatgatggcgaggtacaagaagtggatggcgcagtatcgccggaagtacaaggacgacgccgagaaagcacaccgtttccaggtattcaaggcgaacgcggagtttattgacaggtctaacgctggaggaaagaagaagtacgtcctagggaccaaccagttcgccgacctgaccagcaaagagttcgcggccatgtacaccggtttgaggaaaccggcggcggtgccttccggggccaagcagatccctgcagctggttccaagtaccagaattttacgcgcctagatgatgatgtccaggttgattggaggcagcagggtgctgtcactcctgtcaagaaccaaggccaatgtggctgttgctgggcgttctctgcagtaggtgccatggaaggtttgatcatgataacgacaggaaacctggtctccctgtcggagcagcagattctagactgcgacgagtcagacgggaaccagggctgcaacggtggctacatggacaacgccttccagtacgtcatcaacaatggcggcgtcaccactgaggacgcctacccttactctgcagtccaagggacgtgccaaaacgtccagccagccgccaccatcagcggcttccaggacctgcccagcggcgacgagaacgcgctcgccaacgcagtcgccaaccagccggtgtctgttggcgtcgacggcggatcgagtcctttccagttttaccagggtggcatatacgacggggatggctgtggcacggacatgaaccatgcagtgacggcgatcggctacggcgccgatgaccagggaacccagtactggatcctcaagaactcctggggcacaggatggggtgagaacggtttcatgcagctacagatgggcgtcggcgcctgtggtatctccacgatggcctcctacccaactccatgaacacaaatcttcagataaagcgtagtatataccagtccatgcatatgactgcagaataaagcatggaagattaattacatgcgtgcatcaaggcatgctacgtactgtattaaaacttcggtactggccagatatatacacaaaggtagaatgtttgtgtgataatatagtaatgcttgtacgaatgcaaagaacatgacctttcaataataaataagattaggct

SEQ ID NO: 118011 - DNA, 474 bp, Zea Mays
atggcattcctcagcacgaacgcgttgatgagcgtccccatcacggcggcagccgctcctcgccaccgccgcagcttggtcgtggtaagggccgcggccgtcaaatctaacgagcacctgcaggaaagagcaagcatccgtggcccgacggagctcgtgggcgtcgcccgagcccatggtgttgttggcccgcccaccgctgctgtcactggatcatcccgtagccatctgcagagaacgtcaggacccatatgtccagggtgtcggcgaatgggctgtcaggagcacaacaggcagactggtgagagcttgcagtcccgaggtggtcagtggcatggaacagtggtcgtcggcatcaactcgagctcacctcggactgaagattcaacgtcgtcttacccagcagtttgtgttttaatccgttgccaaactccagcaaaaaatcgccagctcatgtccttcaagtctatttga

SEQ ID NO: 118012 - DNA, 486 bp, Zea Mays
tccatcaggcatcaagaagttgaggaggttgatgatgaatttgaccacatattagatcttatgatgggtgaataccggaagaggaagaatgaagaacaacgtaaaagacgacgaggttcagtttttggacatgaggtatatgatcgcagtagaggagaacatgatttaaaattatttaatgaatactttgctgagcgtccaacatatcttgagaagtatttccgacgacggtttcggatgagtcgtcctcttttcatgcgcatagctgaaggtgttaaacaacatgatcgctactttcatcagaaaagaaatgctgtcggtgctcttgggttttcctgtcttcaaaaggtgactgcaacttttagacagcttgcttatggtgttccagcagattacgtagatgagtatttacggattggagaaagtactgctatcgagagcctacggaaatttgtcagggcagtgtgtgaggtttttggaccagag

SEQ ID NO: 118013 - DNA, 387 bp, Zea Mays
atggcgtgctctaagaagattcttgctgttctcattgttccaatattgttagctcttcttgcttcgaccatgcatgcaagccaaggcagtcgtgccctatttggaggggaacaatgctcgacatctaacaattgcaatgagcagttgtgtggagcaacatgtgccgtcttgggggagaatggtattgggatcattgtaacctctacaaaacatacctcggttgcacgtcttgatgccgactcgaggttgattattggaaactcctttgatcttgttggaaatgtgaaaatgtttggttgtggaagaaacaaaacagatgatggtgaaaaggatgatctaactaatccaagtaatccaatgtacatcaagaagcttttggttgtttaa

SEQ ID NO: 118014 - DNA, 220 bp, Zea Mays
cacaccaacaaattaaaatgaccaagaaggatgttggcgagcgccgtcgcggtcggatcctaccttggccgccggtctggcctcgggaggagaacgtgagatcacggagccaggagggtcgaagatgtgatgtggaatggctagtattgctctccagcgatcaccatggccgcggtgccgcactccgtcatggccagtaatatccgtactgcaatttacg

SEQ ID NO: 118015 - DNA, 1830 bp, Zea Mays
aaagcgcgcgctgataattatgaggtcacgcgcactaaacaaaaatttagccgcatggcccaaagtcccactcgcagctagaaccgatacttctgctaaaaaagaacataaaagtagagatatggaatggtcatctcaaagtcaagctctatcataccatggggtagttgtccttgtcccgtcaatccaccatgaacagtgcaaggtcttaggtcaagtcttctttatttgtttttccttccttcttgtacagtaccagactaccagtaccacaccactcctttcctgcctctctctctctctctctctctctctctctctcttctcttctttcctcacctccgacggctgaacaagcgaaactgcgaaaagcagcaacagcaggtaggtatagtgatcctcctcctccatggggaacgccctcaagtgcttcacgggagaagaagaaggccaccacttccacgggcgcagagaccgctacccctactaccagccgcagtcctacagtggtggcgatccacatccaccggccgctgctcatcagcagggtctagcagccccccatggcttcgtaaccttcgtccccgtcacgcaggctgctggtccaaacgccgggcaccagcagaggagcagtggggttcatgacagaagaccggtggcttctaagtatgaatccaacaccgaggacatcgacgaatcgtctgccgagggcctgtgcagcgccaagagctacgccaaggcgaacccgctgctgatccaggtgccggtgctgggaaccaccaggaagttctggcggctatccgacaaggccacaaggatcacgcgaaagctcgcgctgatcttgaggagccaccacgccgtcggcaagcacctcgccacgcccctgcaggtgtctaatgtctggatcgggagcaccggtggcagcgtcaagctaagaggcgtcagcttcaccgccaagggcttcggcatcgagcgcgtgagagacgactacaggcagctgtccaggctcctgcacgcgatcatcagaatctccggtgggggtgataccgccatcgccaggctgcctcccgactaccgcgagttcctcgcgctcctggggagggacaccctcgccatggaagacgagttcttgatcgtcaacaacgccgcgctgctgccgatgaaaaaccgcacggaggccttcctgatgctgcacgacaggatcgtgaagtacctcggccgcacggaccgacagaagaagaggaggatcctctccgggctcccctaccagagcgactggctggatacggccagggcgaacaagcggatcaaccagtgggtcatgaacgtccagcacgagtacaagggaacgcaccagtccgacatgctgcggctcaacaggaatgtgaggagccacctgcatgagcacaaggacgacgacggcatcgaggaggccctgtactgcgagtggcccgagctgctcatggccatggtgaagctgttgcaccaggaaggcgagctcgaggccactgacattgagaacaagttcggctagtccatcgtcctgccgaagaacagatgtgctaggtagctctgcactgcggtttctgaatctactgttggtgttggcacgctttcagtgagaaagtttatggtgatggcctgatcgcgggtgatatgctacctggtttatgtaatgtaatataggctccgtactttcttgaattctctggacttgaaggcaaaaggttggggtcagctttatataatgttgccttgaaactcaaagttgtactcgatcttttgtgggtgtcttgttttcgttttgatgaatggattgttcatggtggc

SEQ ID NO: 118016 - DNA, 1474 bp, Zea Mays
ctcttctttcctcacctccgacggctgaacaagcgaaactgcgaaaagcagcaacagcaggtaggtatagtgatcctcctcctccatggggaacgccctcaagtgcttcacgggagaagaagaaggccaccacttccacgggcgcagagaccgctacccctactaccagccgcagtcctacagtggtggcgatccacatccaccggccgctgctcatcagcagggtctagcagccccccatggcttcgtaaccttcgtccccgtcacgcaggctgctggtccaaacgccgggcaccagcagaggagcagtggggttcatgacagaagaccggtggcttctaacaccgaggacatcgacgaatcgtctgccgagggcctgtgcagcgccaagagctacgccaaggcgaacccgctgctgatccaggtgccggtgctgggaaccaccaggaagttctggcggctatccgacaaggccacaaggatcacgcgaaagctcgcgctgatcttgaggagccaccacgccgtcggcaagcacctcgccacgcccctgcaggtgtctaatgtctggatcgggagcaccggtggcagcgtcaagctaagaggcgtcagcttcaccgccaagggcttcggcatcgagcgcgtgagagacgactacaggcagctgtccaggctcctgcacgcgatcatcagaatctccggtgggggtgataccgccatcgccaggctgcctcccgactaccgcgagttcctcgcgctcctggggagggacaccctcgccatggaagacgagttcttgatcgtcaacaacgccgcgctgctgccgatgaaaaaccgcacggaggccttcctgatgctgcacgacaggatcgtgaagtacctcggccgcacggaccgacagaagaagaggaggatcctctccgggctcccctaccagagcgactggctggatacggccagggcgaacaagcggatcaaccagtgggtcatgaacgtccagcacgagtacaagggaacgcaccagtccgacatgctgcggctcaacaggaatgtgaggagccacctgcatgagcacaaggacgacgacggcatcgaggaggccctgtactgcgagtggcccgagctgctcatggccatggtgaagctgttgcaccaggaaggcgagctcgaggccactgacattgagaacaagttcggctagtccatcgtcctgccgaagaacagatgtgctaggtagctctgcactgcggtttctgaatctactgttggtgttggcacgctttcagtgagaaagtttatggtgatggcctgatcgcgggtgatatgctacctggtttatgtaatgtaatataggctccgtactttcttgaattctctggacttgaaggcaaaaggttggggtcagctttatataatgttgccttgaaactcaaagttgtactcgatcttttgtgggtgtcttgttttcgttttgatg

SEQ ID NO: 118017 - DNA, 1722 bp, Zea Mays
ctcttctttcctcacctccgacggctgaacaagcgaaactgcgaaaagcagcaacagcaggtaggtatagtgatcctcctcctccatggggaacgccctcaagtgcttcacgggagaagaagaaggccaccacttccacgggcgcagagaccgctacccctactaccagccgcagtcctacagtggtggcgatccacatccaccggccgctgctcatcagcagggtctagcagccccccatggcttcgtaaccttcgtccccgtcacgcaggtttcaatccacatccagtgacatgcatactgtgctgttcctttgtttcccttccccttttctgtgtccctactccctactccctggctactgtgtgtgtgtgtgcatctatttgtgaatgtgagtttgtgactgagccagagcagttgctacaatcttgtgatttgaatgttgggcgcgattgggtaatttctggcaggctgctggtccaaacgccgggcaccagcagaggagcagtggggttcatgacagaagaccggtggcttctaagtatgaatccaacaccgaggacatcgacgaatcgtctgccgagggcctgtgcagcgccaagagctacgccaaggcgaacccgctgctgatccaggtgccggtgctgggaaccaccaggaagttctggcggctatccgacaaggccacaaggatcacgcgaaagctcgcgctgatcttgaggagccaccacgccgtcggcaagcacctcgccacgcccctgcaggtgtctaatgtctggatcgggagcaccggtggcagcgtcaagctaagaggcgtcagcttcaccgccaagggcttcggcatcgagcgcgtgagagacgactacaggcagctgtccaggctcctgcacgcgatcatcagaatctccggtgggggtgataccgccatcgccaggctgcctcccgactaccgcgagttcctcgcgctcctggggagggacaccctcgccatggaagacgagttcttgatcgtcaacaacgccgcgctgctgccgatgaaaaaccgcacggaggccttcctgatgctgcacgacaggatcgtgaagtacctcggccgcacggaccgacagaagaagaggaggatcctctccgggctcccctaccagagcgactggctggatacggccagggcgaacaagcggatcaaccagtgggtcatgaacgtccagcacgagtacaagggaacgcaccagtccgacatgctgcggctcaacaggaatgtgaggagccacctgcatgagcacaaggacgacgacggcatcgaggaggccctgtactgcgagtggcccgagctgctcatggccatggtgaagctgttgcaccaggaaggcgagctcgaggccactgacattgagaacaagttcggctagtccatcgtcctgccgaagaacagatgtgctaggtagctctgcactgcggtttctgaatctactgttggtgttggcacgctttcagtgagaaagtttatggtgatggcctgatcgcgggtgatatgctacctggtttatgtaatgtaatataggctccgtactttcttgaattctctggacttgaaggcaaaaggttggggtcagctttatataatgttgccttgaaactcaaagttgtactcgatcttttgtgggtgtcttgttttcgttttgatgaatggattgttcatggtggcaaggccaacgcaggcag

SEQ ID NO: 118018 - DNA, 309 bp, Zea Mays
atatcagaatagcagatagaggcattattcaaggggtcaggtctacttactttatctttctttcccattttattgtgggtttgataagaaccttttttgctttgtggataaataaaaaaaaagagttttttttaacccgcttgttttattctaacaaattctatatggaactgcccgctgaagagaaaaaagatctgattgtctttcagcctatatcgaattttggaaagaaaaaaccagaattttcttcttttttattaacattaagaaaaaagaatataattaaaatggaattggcagatacctttc

SEQ ID NO: 118019 - DNA, 3060 bp, Zea Mays
ctatctaggtttctgaataatccagagcgagcaaattaaaggagaaggagagagcgagggggagagagggagagatgatgacgacccagtaaactaataatcgtcaagaaaaaaaagaaaagcaacaaggcaagatggcggaggccatcgtggggtcgatgctgtggaagctgcagcaggtggcggtgagtgaggcgcggacgctggtggccgtgaacgaggacatccggagcctccgggacaagctcatgtggatgcaggcgttcctgcacgacgtccagccgtcgcgccgcgtgcagcccaacgagctcatcaaggtgtggctgcagcagacccgcgacgccgtcttcgacgccgaagacgccgtcgaccagtacttcgtccaaatcgatctctcaagattccctagctggagccgtgccatcttgggtttctttgccagctttaccacccaagtggttgtccgtcgcgacctctccagcaggatcaggctgatcaatggaaggctggagggaatcattgccaacaaggacaggtacaggttgggagagtctactacgctgggagcaatttggaggccatctagctccacgtcaccgctctcggaaatgatggacgaggtggtgctgccactggtgggacgagaggaactggtgcgcaatcttaagaattggctttataaaggcagcgggaatcataaaaatgtgatcaccgtgacgggggaaagtggagtcggcaagacaaagctggtgaggaacttgtacgacagcaagcagaccctgtctcactttgacatctacgagtgggtgagctttgggcccaatctcagtgcctctgatgtcctcaagatcatcatcagacgcattacagatggagaagaatgttccaaggacaacatagagaggaagctgcgggagatactgaaagaaaagaagtatctgttggtgatagatgctgagctcagtaactcggagtggaatcgcattttcgctatgctccctgaccccaaggatgtggatgtcgatgctgccagcagaatagtgaggatttctcagattccgccacataagccacccccacactatcaagaagccaaacttgaggttccgaagttttatgaccaagaagtagtcatcaatctgttcaaggaaaccttccaatcatgtggcagaaatgaacttcctgacgaagcaataagagaatacagacagagaatcttggacaacacaaaagggttgccgctggcaatagttcttctgtcaggccttctgcggaccaaggagtaccctagtgaatgggagacggtgttcgagcacctggacaggatgcagtcaaagcagatcgacaagattctatccctctgcttcgatgaccttcactatgacctgaaatcgtgcctcctctactttgctgcattgccagtgaatacctttatcagggcaagcaacatcgtgtgcatgtggatggcggagggcttcctggtacccaaggccacaacggtggaaaaagtaggagagcagtacctgatggagctgatagataggcgcctcgtcaacttggcgccagtgggctacaatgttcctgggtacgagcgtgtagctgttcagagcaaagtacacgctttcctgcagctcgaagcacaggagcaatgcttcgtggagatccacagtggtgacgacatcccggctttgtcggatgcacgacgcttgtcactccagaaccacaaagacaagtatgcagcactgtcacacccgctgccgaagctgcgagccatcctgtcaaactttgagacggagcaagaggctgcacaagttgctggcgagaagccaccagatgaagctggagaagggcaacatggaaatggatgccggcctggtttcaacaaaaagaaaatgcaagccaagtcttgtgtgcaggacctgctacggaactcaaggttcctccgtgtcatccatttcaacggcctcgaggtggacaaagagcttcctgacgaaatcggcaaagttgtgaaacctgcaaagatgccgccgtcgattggcaggctgtgcaacctccagactcttgatgtccggggcacctcggtccgaagcttgccagatgggttctggaggattcagacgctccgtcatgtgctgggcgaccgtctcatcctgcctaaacgtgttggtgacttgaggaatctgcagacactcaacagcgtgaagcccgactatggtgacccccatgcctgggacgacaagaccttcaaccacatgatccgcctcttgtacttgcacatccggcgcggtgagagtctgggcgtccaggaaatcttctccaaccgcaagaacaaggctgccttggtaaaagcagtatccattctcaagtaccttgtcgtcctcatcataaaagctcctgtgatcccctcagaagtgttcactaggtccaacctccaacgtctcaaggcaatggaactggtcgggaagcttgaccttcctaaaaatggcatccctgagatggatgtccgcaatcgcctcccaaacctcaagaagctgaggcttatgaagacaatggtgtcacaggaattcattaaccaacttggaggcctacagttcctttccacccttgaactaaccagcaattctttcagggacagggagcttgtcttcacggaaggattttgcagcctcaaagaactgacattgcatgaggagacactcgagaggttggagatacatgagtcggcacttcccgagcttggggatctggatattgtcggccatagggacaagctccatgttgttatccatggtcattccgtgctcgtgcaacacattgaagcagaggatgaagatatttttaaggttacggaagtaataacgacgcaacaagtccaagtggaagaccacaaagtctgattacaaagcctgaagattgaatgtgaactgatgtgcttttatgcacgcttctgattgcagtgtatttttatatatgtgcgcatgtgtattttattctgtgtgtttcgaaacctggtgtgcttctgtgtgatgactgtaatacaatgtacgggtcacccgtttt

SEQ ID NO: 118020 - DNA, 3715 bp, Zea Mays
gatctcgcgggcttgctggtggtgaaacgatggctaggtgagtacaagccgcgcgtgatctcctagtggttggtgcgagcggtggacggccaagatgatgccgtcgggcccgccgaacccgatggggcccggtcagccagtgagcggtgcggcagcgtcgctactacggacgagctccagcttgctcagtggcggtggccagcctgggatggctggaggtggtggtggcggcatgctttcttcacagtcgcccttctcctcgcttgtctccccgctcacacagtttggcggcaatggtcttcttggaggcgcctcgaatgtctcctccctgctgaaccggacgacgttcaggaatggtggccctatgccaggtccggggtcgatgcagggtggtgggatgcagatgagtacactccagcagagagctgggttggatggtgccagcgatttcattagcacgggagggtcagaccctctctcattcccgtcttcctcacaggttaatttggtcaatcagatgggatcagataatctgcaagtgacttcacagcagcaacagcagatggatgcagtgcaggatatgcagcagcagcagcagctaccaatgtcttacagccagcaacagttgccggcacaacactcgcagcagctccagcagccacaggctacagtgaagttggagaatggaggaagcatggttagcatcaaatcagagcagcagatgggacagcctgaacagaatggtcctgcccagatgatgcgaagtgctggttgtgtgaaacttgagccacagcagttgcaagcccagatgatgaggagtttaagttcagtcaagatggagcaacagagttcagattcatcagccttcttgcagcagcagcagcagcaacaacaacatcatttgttgcagctgacaaagcagattcgaaattgtccagaccttgtatcaatgggtggaccaaacacaactgcaaaccctcaagctgctgctgctgctgctgctcaactgaccctcttgcagcagcaacggctcctgcatatgcaacagcagcaccaacagcaacagattctaaagaacttgcctttgcaaagaaaccagttgcaacagcaacagcagcatcaacaacagcagcaacaacagcagttacttcgtcaacagagtctaaacatgagaactccaggaaagtcatctccttatgagccaggaacttgtgcaaagagattgactcattacatgtatcatcaacaaaacagaccacaagataacaacattgagtactggagaaactttgtcaatgagtattttgctccaaatgctaaaaagagatggtgtgtgtcactttatggaagcggtcgtcaaactactggagttttccctcaggatgtatggcactgtgagatttgtaatcggaaacctggccgtggttttgaaacaacggttgaggtgctaccacgactatgccaaattaaatatgccagtggtaccctggaagaacttttgtacattgacatgccacatgagtcccagaatacgtcaggccagattattttggactacacgaaagcaatccaagaaagtgtttttgagcaattgcgtgtcgtacgagagggacatctacggatagttttcaatccagaccttaagatcgcatcttgggagttctgtgctaggcgtcatgaagaacttattccacggagatctataataccacaggttagtaatcttggcgcagttgtacaaaagtatcaggctgccgcacagaactcaacgagtttgtctcctcaggacatgcagaataattgtaactcgtttgttgcatgtgcccgacaattggcgaaagcactggaggttcctttagtaaatgatttaggatacacaaaacgatatgttcgctgccttcagattgccgaggtcgtaaactgtatgaaggatttaattgatcacagcaggcagactggatctggacccattgatagcctgcataactttccgcggaggactccaggggttagcactcttcaaccgcagcagcaaactgaggagaagcaggccattccccagagttcaaaccagagtggccaaaattctgctcctatggctggtgtgcagccttctgcctctgccaatggtgacgtgacatcaaataattctctcagttgtgcaccttctacatctgcgccttcaccatcagttgttggactcctgcaaaattcaatgaattcgagacaagatcatccaatgagcggcactaatggtggcccatataatggaggcaatgtggctattccgaaggtgaactctacaagctcactgcagtcaaatccgtctacctctttcccttccccagcaccgacaacatccaataacagcatgatgcatgctcctcaaaacacaaatcagctgagctccccaactacatcatcaagcatacctcccatgcagccacttgatactcaacctcaggaggctgagccaagcgactcgcaaagctcggttcagaagatcttgcaagatctgatgtcatcctgtgttggccactcaggtaatgatacgaagacaccaaatggactaacccatggtgttaatggggttaattgcttagttggcaatgctgtcacgaataactcgggaatgggaggaatgggatttggcgccatgaatgggttcggtcatgggatgagaacggcaatgacaaacaatccgatggcaatgggtgcaaggatgggaatgaaccacagtgcacatgacctatcgcaattgggtcagttacaccagcagcagcagcagcatcaacagcagcatgacataggaaaccagctgttgggtggatttaggtcagcgagcagcttcaataacattcaatatgactggaaaccctcacaatagagcagccagaaaccatagagtttcagtgtgatgatgcatctggcttcgctggcaatgcgtgtggagcatccacatttatggtgccataacctccccttggcccaatagcatttgggcctttgcattaatgccgccatcaaagggtaccataagcgatagcaagcatcccggctggtacatgtaagtctaactgtcagtttagctatctcgtgtgtagctccctgagttttacaacattagtcgattttaccgggagttgcaataccatcatgtgtcacattgtttgtccactctttacccccttcaatgctgtgaaaagaaaggctaagtagctgtagcatgttatagtaggtgtatgtggggtaattcctcattagctcttagatctagtctttcctctgtctatttatacggttatcattgacatattgcggaatggagagccagacttacaggatttgtcactgaaactgtccgagttgggtgcctgtcacttactgcttgctccagttatctgagtgaggaagatactctgaaagaattagagcctctctgcactttttaccatctgtcagatcctattgtgctttgtggtacggaaatgaagttgtccctcgccttttttcctcgttggatgacatgtatcttatcctctgcaattcctaagactactggtgctgatatcctcttatcctcgcgtttggagaattctctttgtagctttactgtgctgcactgttgtataattggcacactgactagatcgaagtaccaccatggaatggatgttctcctagtcttgttgctttatactctctcctccgtctt

SEQ ID NO: 118021 - DNA, 110 bp, Zea Mays
gtatatttgtagagattaggggatgtagttatgcaatcaccaatttatatactcatgtttttgtctttttaatctatttagtaattcatttgagactatgaatttatttg

SEQ ID NO: 118022 - DNA, 263 bp, Zea Mays
atggatcacgtgctcgtaggaccgatgggcgaccatctcgcattgatcgtgggccggctgctgacggagtcgatgctggacgcggcgatcggcggtgggaagcagatggtcgatctgcgtcaggagacggtggacgtcgagtactgccatcgtgggctaggcggcggctcggcgacgaaggtggtggagtgcaggatttgctaggaggaggactgggacacctgcatggaggccccctgcgcctgctgtggcaacctcaagga

SEQ ID NO: 118023 - DNA, 1854 bp, Zea Mays
gcaaaaacgaatccggaatccctgccggagcacaaatagagaaagatggcggcggccccgtccccctccgtccccgcctgcagcgacctcccggctgccgtatccgccttcgccgacgcgttcgtggactttgccgtgtccggcatcttcttcccgaccttcccgtcctcctcctcgccccctcctcgcccgaagactccgaccaccttcctcccttccttatcccggctcgtcgccatcggagatctccacggggacctgcccaagtccctctccgcgctccgcctcgccggcctcgtgcccccgtcttgcacccccgactccccctccgcctcctcctcatgggccgcggggcccaccctcgccgtccagctcggcgacatcctcgaccgcggcggcgacgagctccgcctcctatacctactccgccgcctctccctctccgcagagagccgcggaggcgcgttcctccccatcctcggcaaccacgaggtcatgaacgtctccggcgacttccgcttcgccacgccgcagggttttcaggagttctccgcctgggcagggtggtaccgcgcggggctcgccatcaagcgccgctgcggcgagcacctcgacccgcagccgaggaacccctttctcggcgtgcccaagtccttccccggcgtcaagccggagttctgggacgggatgcggtcccgcctcgccgccctccgacccgacgggcccattgcgcgccggttcctggccgacctccctaccgtgcttgtagtgggcgactcggtgttcgtccatggagggctcctcgaggccaacgtcgagtacggcctggagcggatcaatgcggaggtcagcgagtggatccgcggcgagggtggcgacaatgccagggcgcccgagtatgtgcgaggccgggacgccgtggtctggctgaggaggttctccgacggcttcgattgtgactgcaagaggctggagggggtgcttgggatgatccctggggccaagagaatggtgatggggcacacaattcagacagtggggatcaatgcagtgtgtagcgcacaggcggtgagggtggatgtggggctgtcaaggggatgcgggaacgggctgcctgaggtgcttgagatcaatgctggtggcactgatgtcagggtgatcacgacgcctccctcagaggcctggatgtataggaagcaagaggtggagaaggctgccgcagcggtcgcggagaagagcgttgaggtgaaggatgggcttgcgttgctggtaagagagagccatgggttaaaagaggtaggagttaaggcttaggctaggattgtttgggtaacccacaattgggattgctttggtgaatttggtaaagaagactagttatgagagagattgtttgtaggaatcattacctgttagtgggttggtatccacaaaagaaaggaagatctaccattatgttttatttttcaagatacaatagtgcattgctgatatatatacctacaattaacggtccaattgtgcagttgtttttgaacttttgtgtagtatatttccccaatgttacttttctgttaatgctgatcatgaacgattttggtctgatttggtgtagagaatcaacagtctctagaacacttttatggctgattggctacagttcggctctgtttttgtcatatcatttagtagccaagttcctactgaagattttagtacggatcctttctaattaagctcactgtttggaaattgtgagttgaagctatcatttgattctttggagcccatggatttgacatcaatgttaagttttcatttgtacaaacaccataatcaatgattgatgattgc

SEQ ID NO: 118024 - DNA, 549 bp, Zea Mays
cttctcgtagtgatcatggcaacacttactgacaagttgatgaagttgagggaatttatagcaagatagagagttgttgaggtacttctgaaatggaggtaatggtcattatctccccattctccatatttattgttcaacgtcacactaccaatgctgattgatgtgtagaagttgagatgtgcaaatttctgcagtcgttttagttgaaacatactgcataaccttgtcagacatgatcacatatgaaattctgctaatccagcctaaaatatgtttcctgaaacatgattgctgttccagtgcgcctgcaacgtgtgtgagggtgataggctatgtgcatatcctaacaatcagtgaggagtttgattactacccatatcgatgtgtatgttgtgcggaaaaggaatttgacaagtggatagtattgccatgcggaacagcaagtagacaaggaaaggtatctcgaatgtgatttgcatttgcatcctagctgtaaccccttttttccacaaattttctccccactgggtcgttgaattggtctcg

SEQ ID NO: 118025 - DNA, 106 bp, Zea Mays
ccgaagtttgcgtgggcaatcaggggtttccttctctcgagtcctggcagaagtgttgaagaattgattgagtattcagcacggtggaattttcagagttgcagaa

SEQ ID NO: 118026 - DNA, 618 bp, Zea Mays
agaatagtttacacatcccaatttattcgtcagcaagattacaatcgaacaatagttgcattagcataatatatataaatttccgtcacaaatacaaaaataaatacacaagacctgttacgtttatatggcccagcgtaagttggcaggtgttggcttatttcctggaccggaattacggatcagagccagcgtgggtgccatttacgaggcgaaggagctgaagccggcgtcagcgccaccgccgacgcggtggaaccgggagacggcgcagtccgtggcgaagaggcccgacgagcggtacttgtcggcgccgcccatgacgggcatcttggcgctgatatcgagcttgttaacgtagtccggacggtaggtctggccgagcacgccgtcgacgtccttggtgaggccgtggaacttgtaggaaacgtcgaggtgcacgagggagtccttccccgtcttgccgtagccgtggacgcgggagtcctcgtcggtgatgggcacggcgttggcggagatgctgaactcgccgttgagctccacgacgacggcgttgacggcgtgggagcgggtgacggacagcccgggcacggccgtcgacacccagcgcgcgtcctt

SEQ ID NO: 118027 - DNA, 461 bp, Zea Mays
gtgcatcaagaaagcatccatctctcggtagagaaccatagccagcttccttcatccatggcgctactcaagataagcatcaagagtacactggttgttttcaccgtcacatggctgctgatgacactccttgctacggccgtgccatcagctggcaaccaggaagcggagaaccaagcggtctgcgcccaagtgaaaggcacctgtacacagaaggtgtgtggcggaatgtgtgctgagataggctccaaaggtgttgggtcatgcaagttgaatggcaaggtctcctactgctgctgccaaccaaaatcccccacaaacatcggtgtccactagctagtagctaggaaccagttaatttggtttttgatccatagtatggctgttaaattgacatttttcattaataataaacgaaacgtgtggtgcgtgattgatcaataaatgtgtggcaccaggaa

SEQ ID NO: 118028 - DNA, 1052 bp, Zea Mays
aaaaccctagaacgtggccttaaaccctcctcttccaacccctttttctcttcctcaccaagaaagaaaaacagacacacgtcactgttcgccttgtccggtcgtttctgctccattcctcctcctgcaagccgcaaaggaatcaggcggagtggcgcgatgggagagcaggtcgtgacggagcagatccagcggaagctggaggaggtcaacgctaccgtccaacagcacctcgcgggtgtccaggaccacatcaacttcaccatgcagcaagcatacttcaagtgcgcatatggttgctttgatcggcgccatactcaggaagcgatcagcaactgtgtggagaattgtagtgtgcctgtccttgctgccaacaatatttttgagagtgagatggccaagtttcaggtacttctaacttctaatttcctgcgttacaagtatcatttttcccaaatagaacgtagtatcaggcttttctttgttcgtttttttagtaacttaatccctttgtggctttgtgcttgtgttgaaattatgattgactatcttttgatgcagtgaagttaattgtttcttagctgtaactttttactacagaatctttctgactttaagttactaaaatttgatttatgtcctccattttgctctgattttattgatgtttgcagcaactctaatgctgtgtgtaaatggactattttccaagtgtatgcatgatagtttcaatgttgttcagtcaccagccctaatacctcaacaatcatgatgtatgttgttggttcgctgtgatggtgtacttgtttcatgcaatcaaccatgtatgcaatcacttgtcatatggaagtcctattcctagaagataatttaggattaataagcagcatatttgttgctatagttatttttgttcgatgaatatgctttaatggtctcaatggtacaagtaggagttttataaggttctcccctgcagcaatttagtttttgcttcatccttatgtacattgtacttctgacatacaatctgagaaccttccttcacttca

SEQ ID NO: 118029 - DNA, 931 bp, Zea Mays
aaaaccctagaacgtggccttaaaccctcctcttccaacccctttttctcttcctcaccaagaaagaaaaacagacacacgtcactgttcgccttgtccggtcgtttctgctccattcctcctcctgcaagccgcaaaggaatcaggcggagtggcgcgatgggagagcaggtcgtgacggagcagatccagcggaagctggaggaggtcaacgctaccgtccaacagcacctcgcgggtgtccaggaccacatcaacttcaccatgcagcaagcatacttcaagtgcgcatatggttgctttgatcggcgccatactcaggaagcgatcagcaactgtgtggagaattgtagtgtgcctgtccttgctgccaacaatatttttgagagtgagatggccaagtttcagggaatgttgaaccggtcattgagggtctgtcaagataagtttgaagctgccaatctccagaagttgaaatcagatgcaactcgggaactggaatcctgtgtcaacagatctattgatgacagcctcagggtccttccgcatgtggtggatcagatcaagtccaccctcaaaatcaattagaggcactattacttttagcaaatgaaccagatatagttgagaatgtttcatattcacattcgctgcataactccacattttcagagctcttaccgatattgatagaacatgatcaccctatcgtagttttttggattctgctcttaccacctagtcctggcatgtcaacagcgtcgacattttgaactctactgagaacacagcttaggcattgaaaggctggatgaacttgttgtgctacatgtacaagaatactcttacgtcttgtgattttttacgttgctgtaaagtacaaattgtatgttgcgacgagacgataaaatgcaaaaaatcatacagacaa

SEQ ID NO: 118030 - DNA, 1923 bp, Zea Mays
ctaccatttttcctccgttccattcttctctcctcgcctcccctcccctcctctcttgaaccctccgccgctccgaggaaaatccgatttgaattgaaaatcatccggagacagagatcttttcttcctcgaagctatcttctctctcgactcgatccatagctgctcgcgtccctgttcctcgccggctggcaagtggcggcgacgggacgaggtcttcatcgcctcctcgcgagcgacgatcacccactagtttggtcggtctgaggcacatgatgatggccaacgcgaagctccacaagcaggccctgctgccgccgcggagccccttcccgacggcggcgccgtacgccgaccgcggcccaatcgcgcggccgcaggttggcgccacgcaccaccgccacggccaccaccagcgcacgtcgtccgagagcttcatcgaggagcagccgccgtcgtggctcgacgacctgctcaacgagccagagacgcccgcggcgcggcagagcggccgggctgggcaccgcaggtcgtccagtgactcgtttgcgttgtttgacggtggagctgctggtgctggtgcttacgccaatggtttcgaggggatggggagaggaggtgggcaacctgcgccgtggggcggtgtgcaggagtactatgccaagctggccccgattgggagggcacatggccggccgtgggagcaaggcatgccgaattcggcgggcttcaggcatggtggtggcctgccaatgcccacaaaagataaggttggtgggcatcatgggccaccgaaagtgtcgagggagcatgaccatggcatggacaagagaactgatgatgctggccatgatcaaaaggttggagccaaggagggtgtgccgccgaagcatgcacagtcagaggcggacaacaagcgtgctaaacagcaatatgctcagaggtctcgtgtccggaagctgcagtatattgcagagcttgagagtagagtccaggcattacagtcagaaggggtagaagtgtctgctgaaatggagttccttagccagcagaatatcatgctagacctggaaaacaaagccttgaagcaaagagtggagagtctagcacaggaacaacttattaagcgttttcaacaggagatgtttgagcgggaaattggtcgtctcagaacaatatatcagcaacagcagcaacaacaggctcctgctcttgttcgtagtaacagcagggaccttgatgtgcagttcgccaacttgtctctgaaacacaaagaccccaacacgggccgggatgctctctctgggcctcttcgtacttagttctttccatccttccgttcttgtgggttctatcagtggccaccactgtgtctgtcatctccaccaagaaaggagaagtgcacttggattgtgtgaaaaacaccggaaaaaggctaatagctatggatctgatgtttattatttcgggatatgcacctggcggtcatcctcagctcgcgtccattggtgatgctcgaccagtcggcggtgtttagggtttttgtttttagctagatgcttttcaagcatcattgtaccatttttcatgctagggttctaatctgttactacccccgttttcctgaactgtgtgcttcaagcatcttagtcatgtttggattagttctgcgttatcagtgcctcagtggaatgtggagcactaggcagcatcaggtaagttgctttggagatgtgccacatccttgacaactgcatgttctgctattatttcttagtactcaataagctagtgcaaatgaggtattagcgatcttcagatttcaggttgttcttgatgtactcctatgaatatatctcaattgctcaacgtttcctttttatgttaaaatttggctccataattgtatattttgaatcaagc

SEQ ID NO: 118031 - DNA, 2957 bp, Zea Mays
atgcacgacgaagaagatggcggtcccataggagcaagcgatgtggaagctattgcgctaagccgtggatcaccacgcgcaacgcgccacgggcactccagatccggctgctgtcttgagggtaaagcttctagctatggggaaactaagatgccggtgggttgtcctggtagcgacgaggtaactactaccaagcagtgtggtttgccaccacggtgctcacgtgaggtgggcaggctctttcgtgacaacaggttagttggcctcgacaccgatgctccggtgaacgaccggccttacgcttgcgtcaattgttccatgacctttggtcgggagacgacgctgtgtgggcacatgaggtcgcacatgcgcgaccacctctcatccggctctgagtctgaggaggacacaccgcccacgccaaagaggagaaggaagaagcggaagtcaaagcagctgacgcccctggtcacgacatggggcaataccgagcgtcgcaacgggagccctagacacgccactacccgtgaagaacaaccaccgccagataggtcgcagcaggtcgcgcagatccatcaggacctgatggccacacagcttggggtgaccgacgacgctgtcgtcgtcgtctcacatgccgagaacctcgaggtcaaagtttctggatctgagtctaatatggttgttcccaacataggggtcaccatgcacggcagcaacgaggtcacagagaacagccgcagcaaccagcatgacaattctgtgatcatcatcatcgacgatgacaatgacgacgacgcaaatcctgtcatcaccgtcgcagggtctcctggagctcctggtctagctcctgatgcagcggcagctgtggccacggcaccagctcttgcggtggccatggtggcaactcctacagtgcctgctgcacctcacgtcgcagcatctatgaccattcaaggagctcctgcatctgatcatcggccggtgaaggggaacaacggcggctttggtgaaggtgctcgctatggatatggtggtggcaattctctcaccgctggcgctggctatgacaccgtcgtcgacaatggaaaagctattgctggctatagcaataatgcctgctatggaggtagacgtgtttctagctatagcggccgtggctacggcgaaggtcttgacggctctagcatcggcagccacaactacagcacatttactaccccagctggaggtgagagcaaggaagcagcagcctgtggcaaggtgtacggttgcccagacccagagtgtaagaacagcaacactcgtcgtcacagcaggatcatggagaagaaagacaaggcgaagctagtcttgcatagtggtcgtactggtacgcacaagtgcaaagttgctgctgctgatgaccctttcaaaaccatcgaagcgacaggcatcaacggcatcggcggagctgtggatgacccttacaatctcaggggctggaggttcccagctggaagcagaagcaccgtcctcccgcgtctcgccacaaggccgccggcgcaacagccacctcaaggaacagtggctatggctgccgccaataatcctgtgactggtcgtcatttctcagctggcagcaacaccttcactggctggtcactccctccaactaccagcagcatccttccggcagtccccttgcacaatcaagaacagaatctactggaacagatagcagcagcaggacaccgcagcatcaatcctgcgttgttctcattctcaaggagacaagaggaaaacccactactagaaggtatagcagtggtgcctagcaatgcaattgccagcagttcctccactcctcgccctggcgttgctgccgctactcatcagccctccgaagctatagggatcaacagctactttccatccattgttgatgcccctgccaataccatgggccgtcgcttgccattcttcctagctggaactggagctggaagaagcgacatccatgcactccctgtgtgcaggccggtgcgccacccagctcaagtgatggcaacgggtggcgatcctttgactggtcatttcccagctgccatctctgccactggctggtcattacctgcaactaccagcagcggccttccggcatttcccttgcagaatccgccagaacagatagcagcagtggttcctagcaacgccattggcagaagctcctccactcgtcgccctggcgtccctgctactactgagccctccgaagctatagcagggatcatcaacagcaacgttgcagccattgatgctcttaccaacaccatgcgcggcttgccattcttcctagctggcagaagcgccatccatgcacctcctgtgtctaggatggcgcaccggccatctcaagggatgggggctatggttggcaatcctgtgactggtcatttcccaccatctatggctgccaatggctggccattccctgcaactaccagcagcagcatccttcctgcgattccaccgcagaatcaagaacatcgtccaccacaagggagactggtggtgcctgcgaatggtgagcatccctccacccttctctttggctccaacacctttcctactctcccctcgcagaatcaagcggagaatccaccagcagaggagacagtgcctggcaataacggaggtcgcgccattcttctctttggcatcaacatcgctgaaggagataccaacttttacattgcggaagctttatgtgctttagaagcttttgctgctaccgattaagtccaacaggactcatgctcggcacagtatttctttccttgaaaaactacttttaatttcgttcaaaattactttggttcaagcaagagttgtagtctttggaatttgaataaggtgctcagtgttcttaaggtgcctaggcgagcaaatgcaccaggcaaccacctttgcccgag

SEQ ID NO: 118032 - DNA, 804 bp, Zea Mays
catttttttataaagattactgttatgtttgttatgctcatgcaggatgaagatctttgtgaaaagctcaaccggtcggacagtatgcctcagggtacacccagcagataccgtgcataccgtgaagacaaagattcaggaacagcaataccttgtttatgatggagtgcagctcgaggacgatcgtacactggctgactacggcatcgaacataaatctgtgcttgacctcaaagaaaagatgcaaatctttatagtggaaacactagcaggcacaaccatcactcttgaggttgaaagttcagagactatcgacaacatcaaggaaaggattaaagaaagtgagggctttcccaagggtcagcagtgtctcatatttgacaacaagcagctagaggacaacagcaccttggcggacaacaacatttccgaggggtctaccctcctccttgtcctccgccacatgcttctcagaggaactatgcatatctccatatacatgttctcgggaaaggtagtcactcttgaagttaagaggtcagatacgatcgataatgtcaaattaaagatctatgagaagacccatactcggcacatacagcaaatgataatatttgatgggatcaagctggagggcagcaagacccttgcatactatggcatagaggatggggataccctacatatgatgccctgcttgtgtggctgctaaggttgatgtattgcatggtcatcagtcatctttctttcgtgcattggtgtgtgttatcagtaaaagcagcattgtattgctgcagcctcttt

SEQ ID NO: 118033 - DNA, 3443 bp, Zea Mays
atgcctccttccaagggcaagaagaagaacccatcgacgtcgccgcggccgtccccacgcacgccttcatcttgtccctccgctggctccggaactggcgatggcgagagaagcgtcgacctcccatccatcgccgccgccgccgcggagcagttcccggcgctcgtgccacgcggcggtagtggctactttgctggcatcgttgccgaagtggcccctagggatgggagccgcggcggccgcttggggaggctctggctctccgaggccgctatggtcggcgccgggatgcggcctgggtgctttgtctccgtctcactaatttcgtcaagcagtgatcagttagatggttttccattaattaatttatttgaggagtgcaacagattctttgatcttgatctggacaatgatctcctttatggtgaagctgggaaaaactttgtggttgctacagttctcccctcgcgtgaggttccaaagaatggtatcaagctctcttgggatcttgcttgtgttttgggacacccttttgtaggtcgatcattgtttatttgccccttatgtacacttcaggccccaaagcgtagtgatgatgttcatattttacgggtaatgaaatgcaagaatctttatcttagcctagttccacctaatgttggatcttccaaaggcattgaatcagagtctgactaccatcctgaaagaagcgcaatggttatggagacacctaagaggggtccttcaactccactgcgtaagaaggaatcgcatcactttgcttccaacaatggctcttcaatgtgcttggatccaaccactgcaagatcagcactagcagatgagaaaatcaatgagttgttgcatacttcagcattgtggtggctcaatggtagacacttgcttaaaggaaactttgttcctctctcaatatgcggaaaactgtctctatttgtggtcatgggagcagaaccagatagttcttctcaagatgttttgtatgagaatgggaatacactgtctaatgcagaggattcaactaaatcccaggaaaacccagttttattccttgttgacagaaccacaaaagttcatttatctgattctgtctgcacaaagcagcttgactcagataaaccgggtttaccatcagaacctcacgagtatgatgataaaagaaatgcagatttcaatcattctccaacacttggtgggttatctaaagagtcagcaaccataaaaggaataatttcattttcactagctgatcaaattggtctgccaagatacaaaggtattcttctttatggtccacctggaacagggaagacctctcttgcttcttcctgtgcctatgatgcaggggtcaacctttttacaatcaatggaccagagatcattagtcattattacggagaaagcgagcaatctttgtacgatgttttcacttcagccaagcaagcagcacctgctgtgatatttatcgatgaattggatgcgattgctccatcaaggaaggatgggagtgaggcgttatctattagaatggtagccactctgttaaaactgatggatgagattggccctagtgaccgtgttctcttgattgctgctacgaatcgacctgatagcattgatcctgcattgcgacgtcctggaagattggataaagaaattgaaataggagtgccatccccaggacagaggatggacatacttcgccaccttctaattggagttcatcactctctgaccaatgaagaagttgagtctgttgctctagcaacccatggatttgtgggtgctgatctagcagcagtgtgcaatgaggctgcattgagtgctctccggcgttacatcagcctaaaagaaaattcaattcaacaacttggtcatcctggctgtagtttttataagtgtaatagtcaagatactgaagattcaagctcattatcgtcatctttctcaaagttgaccatgtcatcatatgttgcttgcatgaacggtggtaacataaaaagtagcgagtcttatgatgatacagatgaaataccactatatgtaaccaataaggattttgacaaggctaaaacaaaagttagaccgagtgcgatgcgcgaggttattcttgagcttccgaaggtacgttgggaagatgttggtggtcagtgcagtgtcaaggagcaactgattgaagctatccaattaccacaaaaatgcccagaagcatttgaacgtttagggatccgaccccctagaggattgctaatgataggaccaccaggttgcagcaagactttgatggctcgtgctgcagcttctgaagcaaaattgaatttcctggctgttaagggtcctgaacttttcagcaagtgggtcggtgactcagaaaaggcagtgagatcgctatttgcaaaggcgcgggctaatgcaccagcaatattattttttgatgaaatagatgggcttgcagtaactcgtgggcaagaaaatgatggcacgtctgttgctgatagggtcctcagtcagttgcttgtggaaatggatggtttggaccagagagttggtgttactgttattgcagctacaaatcgccctgacaaaattgatcccgcacttctgaggccaggtcgtttcgatagggtgctggatgtgcaaccacctgatgaagctgaccgtgcagatattttccggatccatacacgcagcatgccatgcagtgccgacatgaatctaaatgaactcgctagactcacagaaggctacactggcgccgacataaagctcatctgcagggaagctgctgttgccgcacttgatgagaggtttgacattcaagaagtagcaatgagacatttcaattctgcgatcgacagaacaaaaccttcagatgtcaagttcttccaagaacttgcaaagcaattccgcagatcgttgacttcactgaggaagcaataattctgagaaagcgttgaggaatgggtcaagcatcaccctctcactccctacatttttgcttggtccagagaatggagttggttaatccatacaagtacacggctagcttagccatctggaatcagttcatccaaagaaataaaacatggggtgacctcattctggatattcatgtgatttctcaaagcaggcgccacatcagtgaacctggcgtgactgaatctgggctggtatctaagaagccttgtcctcgttgctctgcatcttcgaaatttctgcgttgttcctctgacttcaattactatgccactgtagatagtattgctttaaaagttgactagaattttctgttccagaaacctttttgctgctatttattgggggagcaattttctcttttctgactcttctcaacattacactcgagagaaacttgctagacatgtttatagatcgagacagtttcagtgggcctgttttaacct

SEQ ID NO: 118034 - DNA, 670 bp, Zea Mays
cgtgcttcttagaggcttttacagtcagagtcctgatatctgaacttgcacactcattttctggtcgatcaggcacaggatccacaggtgaccgttcctcaacttcgcatggactgtcagcaggcgcagtggtatcctcttcaatgtgttcgtcagattcatcaatgtcctggatagctaatggcagcattctgcatcaattggcggagttccagccacaagttcagatgcttcagctgacgaatcttgcacgtggggattgctttcagaatgatcagaggaatgcttgatcccaaacttgcagctgtcatggcaagagctggtggatgctcgtaggaaatgcgggaccggcttctacttcctctttaacatcaggtgtcatgctgctgccatccataactactagagcagcatttatcaggtcttcacatttgttatgtgagggactaaaatttagttagaggaaccaaacatggtcttagtcttcaactcttcatggtttgagcatgggagaaggggggagtggactataaattgggcgtagaggttgtggatttgtgaacctagaatgaaatagattctgctgttattctcaagaaattgaggcatgaagtctaaaaagacgaatttaaaggaaaaataaataaatgttgcagcagtttaaacagcc

SEQ ID NO: 118035 - DNA, 921 bp, Zea Mays
atgtggctctcttgcacatcatatttccatctttttacagaatcttgtttggaatcattgctcctcccttccccatctcattcaccccatggatctataaatcttggtcattccacccatcaaccactgtatagacctgcaccatcatctaaattctaccggcatacttattctcccaccataaacccctcctcaaccctcactctctcgctccctgtgcgcgcggcacacaccactcttctccttgttagcagagggctagctagctcatcccccacagtccttatgctgaatctagcaccatttgagacgccgcctcttggaaggcaggagagaccaactaataccatcgtcaccgcaacagcggccatcgccaggggaaacgaagaaagctccagcaacacttgcctccagcacggacatctggacctcagccttggcatctccttgtctcatggcggcggcggcggcggcggcagctgcgacgcgtccagctgtggcggaaacaagcaggatagctatggcggtgggcagggcagccgtgacgacaaggacaacaacgtccgtcgcatgaccagctgcatcggcggcaccgccactgccaacgtgattaccgcagggcacagcagccttgctggtgatttgacagcagcaccaggaggaggaggtggtggcggctgggcagcggcgttcatgccgagcccgaccgggttcatgcatccatggagcctcgccgcacggcagcagaaggctgctgccgagcaagaccggacgcctcctgccacttacctgtcaaggtgaggtcaaatgttatacgctgaaacagtgaagcgtttctctgcatatggctataatacgtgcatgcaccgtcagtaatttctacacggtaacaaattgaattaaagcaacgcataagtttat

SEQ ID NO: 118036 - DNA, 1657 bp, Zea Mays
ccatctcattcaccccatggatctataaatcttggtcattccacccatcaaccactgtatagacctgcaccatcatctaaattctaccggcatacttattctcccaccataaacccctcctcaaccctcactctctcgctccctgtgcgcgcggcacacaccactcttctccttgttagcagagggctagctagctcatcccccacagtccttatgctgaatctagcaccatttgagacgccgcctcttggaaggcaggagagaccaactaataccatcgtcaccgcaacagcggccatcgccaggggaaacgaagaaagctccagcaacacttgcctccagcacggacatctggacctcagccttggcatctccttgtctcatggcggcggcggcggcggcggcagctgcgacgcgtccagctgtggcggaaacaagcaggatagctatggcggtgggcagggcagccgtgacgacaaggacaacaacgtccgtcgcatgaccagctgcatcggcggcaccgccactgccaacgtgattaccgcagggcacagcagccttgctggtgatttgacagcagcaccaggaggaggaggtggtggcggctgggcagcggcgttcatgccgagcccgaccgggttcatgcatccatggagcctcgccgcacggcagcagaaggctgctgccgagcaagaccggacgcctcctgccacttacctgtcaagcagtgatgaccgcgtggtcacttcgccgtcggccgtcggctggccgccggtgcacacctcgcggcgcaacatcgtcagcgccatgcacgtaataaccaacaagcagaccgctggcgcctccagcgccgtcgccggaaacggcggcacaccacccggaagcacgacgacagccacgcacaccggcggcggcgagacgaacggggcggcggcggcggcgctggcggcacggccagcgctggcggccagcagcatgttcgccaaggtgcacatggagggctacgcgatcggcaggaaggtcaacctcagggcccaggacggctacgactccctctcaaggacgctcaccaatatggcaaccaacttcttctgccccgcagactgttcaggcgcggcagaaaaagacgctccaaagagtgacaagttcatattcctgtacgaagacttcgagggcgaccgaatgttggttggtgacgtcccatgggaattgttccttgcgtctgctaaaggattgtacatcgtccgaaaacccagcatcaggcgacaaaggtcggggtgaaggtgacagaaactataaagccgaagaaccaacgaccaacggctgatgatgcaggcactctcttcaagcaagtgtggtcgcaaggacaggagcatataaatatatatgcactacatgctaggacatcttcttggttttggcatatatatagctccgaattacatttcttctgctggtactatatatttaatagtaaggtagttagtagagctatgtgagttatgttgtactgttggtgtttcctgatatcaatgtgcatatagttttgatcgctttgtaatggggggaaaaatctacaaaaggccggaagaaacatgctcacattggtctcaacaagtcaacggtgataaataaggcagatatattatgacttgtt

SEQ ID NO: 118037 - DNA, 1654 bp, Zea Mays
ccatctcattcaccccatggatctataaatcttggtcattccacccatcaaccactgtatagacctgcaccatcatctaaattctaccggcatacttattctcccaccataaacccctcctcaaccctcactctctcgctccctgtgcgcgcggcacacaccactcttctccttgttagcagagggctagctagctcatcccccacagtccttatgctgaatctagcaccatttgagacgccgcctcttggaaggcaggagagaccaactaataccatcgtcaccgcaacagcggccatcgccaggggaaacgaagaaagctccagcaacacttgcctccagcacggacatctggacctcagccttggcatctccttgtctcatggcggcggcggcggcggcggcagctgcgacgcgtccagctgtggcggaaacaagcaggatagctatggcggtgggcagggcagccgtgacgacaaggacaacaacgtccgtcgcatgaccagctgcatcggcggcaccgccactgccaacgtgattaccgcagggcacagcagccttgctggtgatttgacagcagcaccaggaggaggaggtggtggcggctgggcagcggcgttcatgccgagcccgaccgggttcatgcatccatggagcctcgccgcacggcagcagaaggctgctgccgagcaagaccggacgcctcctgccacttacctgtcaagtgatgaccgcgtggtcacttcgccgtcggccgtcggctggccgccggtgcacacctcgcggcgcaacatcgtcagcgccatgcacgtaataaccaacaagcagaccgctggcgcctccagcgccgtcgccggaaacggcggcacaccacccggaagcacgacgacagccacgcacaccggcggcggcgagacgaacggggcggcggcggcggcgctggcggcacggccagcgctggcggccagcagcatgttcgccaaggtgcacatggagggctacgcgatcggcaggaaggtcaacctcagggcccaggacggctacgactccctctcaaggacgctcaccaatatggcaaccaacttcttctgccccgcagactgttcaggcgcggcagaaaaagacgctccaaagagtgacaagttcatattcctgtacgaagacttcgagggcgaccgaatgttggttggtgacgtcccatgggaattgttccttgcgtctgctaaaggattgtacatcgtccgaaaacccagcatcaggcgacaaaggtcggggtgaaggtgacagaaactataaagccgaagaaccaacgaccaacggctgatgatgcaggcactctcttcaagcaagtgtggtcgcaaggacaggagcatataaatatatatgcactacatgctaggacatcttcttggttttggcatatatatagctccgaattacatttcttctgctggtactatatatttaatagtaaggtagttagtagagctatgtgagttatgttgtactgttggtgtttcctgatatcaatgtgcatatagttttgatcgctttgtaatggggggaaaaatctacaaaaggccggaagaaacatgctcacattggtctcaacaagtcaacggtgataaataaggcagatatattatgacttgtt

SEQ ID NO: 118038 - DNA, 534 bp, Zea Mays
atggatgagatgaagagtacaaatacttctattgcgcctgaggttgaggtgcatcctggattctcaccatcgaggtttgtgaaggtttttatgcaaggtgaagttgttgggaggaagataaatctggccactcaccagaactatgcctcgttgtccttcgctttaaaaagattaggcaacaactattctatgccatcatgcgagcttaatgggttagtaaacaatgaagttgatggggcatcagatgacaacaacttcattcttttctatgatacgatggatggtgaccgtttattcgttggggaagtcccatgggagattttcgtcatttctgtcaagaggatctacattgttcgtgttccacaggaacaagagaacgttgcagacaacggagaggaagaagacagagagaatggtgaagacaatgctgctgtttctgctactgccctagatggagatgatatcccagctaatgacgacgacgacgacgttgttgatgacggagatgctacggccactactcctgctgatgga

SEQ ID NO: 118039 - DNA, 3047 bp, Zea Mays
tagccaccaaatccaccacttgacgcggccacacccgctcacacctgtgccgcggctgccttaccatgtcccctaccctgccgctccccctccccctccccctcctccccgcacgctgctgcgcgctcccatgccgccgccgcgccggctccacctccatgccgccttcctcctcctgcccatcttcctgctcgcgacgtggcggcccgcggcggcgtccgcactctccaccttcgcgctggccaaggcggacgccaccaccatagtgtgcgcgctcctgccgtccgcggcgtcgcctctgctggtcgacctcaactgcacggccgccggcggcgaccacgcgcgccaggagacgtacccgtcctcgcaccccttcaacgcgctggccggaggggaggacttcctctgcgccgtggggccctccggcgagcgcgcgggcgacgtggacatgcgctggtgggacctgtccggcgacggtagcaacaggtccaagcgggtctacatgggcccgccgctccgggcgctgtcctcgagcgagtaccgcgtctgcggggtgctccacagcggggagctccactgctggcgctggcgcggcctccgcatctccagggacctccggttcgtcgccgccgccgtcggggacggattcgtgtgcgccatcctcaaggggacgccggcctccatccgctgcttcggcaacgacacagcggccccggccgtcgccggcgcgccgacgaacgggagcttcgacgtcgtggccgcttgcgcccaccgcgcgtgcgcgctgtccacggcgggggcgctcacgtgctggggccgcgacccgccgcgcgtcggcccgggcgatgcggcggccaccgggtacgcggcgctggcattgggggaggacggcgtctgcggcctgcgcaccaatttcaccatccgctgcttcggcgacggcgtggcccacccgccgcccgacctcgcgcacgcccagttcctcgacgtgcgcgcgcacggcaaggccttctgcggcgtgctcatggccaactactccctcgtctgctggggcggccctgagttcaacaccaccaaccgcctcgtcttcggccgcgtcatgccgggcccctgcctgcccatgtcctcgtgccaatgcggcgtcttgccgggctccgccaacttctgcgacgacagccgctgcgtctgcgtcgactgcgcgttcgagctcaacgtcgccaggcccaacgcgtcggtcgtccccgggaagggaggttggagcaggaggaccatgtggattgcaatcgccgcggcggccgccgttttcctcgtgttcttcgtggcattccagttcgcgctggtcctatggtgtcgccgccgccgccgccgcaggaaagaactggatgcctccgctggtgtgcagcagtcgctgatgccgccgaggctcgggtccagcaggagcaagggcccgggcagcgtggtggagcacttcacgctagacatgctccaggccgcgacggacgggttctccgatgacagccggatcggaaccgggagcttcgggtccgtgtaccgtggcaccctacccgacggccgcgaggtcgcgatcaagcgcgccgaggactcggccaaggcgtcgagctcgatggcgcgcccggcgcggcgccgggaccgcgagacggcgttcaactcggagctgaccgcgctggcgcgcgccaaccacaagaacatcgtgtgcctgctgggctgctgcgcggactccggcgagcgcgtgctggtgttcgagttcatggcgaacggcacgctgcacgaccagctccacagccgcagccccatggctgcggccgtgtcgtcgtggcgcggccgcctcaccatcgcgctgggcgcggcgcggggcatcgagtacatgcacgtctacgccgtgccgcccatcatccaccgcgacgtcaagtccgccaacatcctgctcgacgacgcgtggacggccaagatcgccgacttcgggctgtcctccgtcctggaccccggcgtgggcgcctgcggcgacggcacgccgcaggagcccctctacaccggcggcacggtggggtacatggacccggagtactaccggctgcagcacctgacggacaagagcgacgtgtacagcttcggcgtggtgctcctggagctcatgtccgggtgccgcgtcgtgcagcgctacgccgagagcgtgacgcccaagaacgtggtggagttcgcggtgccgcacatcctcgccgacgacgtcgcgcgcgtgctcgacccgcgcctgcccgcgcccacgcccgacgaagccgaggcgctggcctacgtgggctacctcgccgccgactgcgtggggccagtggggtgcgaccgcccgtccatgaccgaggtcgtggacgccctggagcgcgccctcgcggcctgcggggctgggccgctctcccgcgccggcaccggccgccgccccgtgctctcccgctccggcaccgaccagttcgacctcaccgacaccgactagccgtccagaaccctctgctgctgctgagtgctgacgaaacgtagccattcgcatcgcgtcatctgccacttccatggaccatggtgtctgccaactgcaagccgccgcacgcgcgtcgccactggggacaccaaatggccctgtccctgggccatggcttgccgttgaaaaaggcgatcaagcaagagccagatcacaaggcaatcgacgccgacacctccgatgctgctgcgtgatcaacggcttgatttcttcttcgtgagataaccttcgattgacttgcgaacaaccccacacaacgacatggcagcggatcaacacatggcccgtcgtgtaggcaaaacgattgacgaggccagcacgacgggaaaaagatcattcattctttctttctttctccccactttctccttccttgctgtattcgttgtacacttgtatctttgctttcggcttctccccattggaaggtttccatattcttttaccaatgtgcatagatagatcagcgacaaagattgagaagaaaagaatcacgatttacatg

SEQ ID NO: 118040 - DNA, 1719 bp, Zea Mays
ctgatctagaatacactgtttttgataaattaagcagcaacaaagaagtctatgtgccccttcttcaatagcaaggtattgttgtgcattgggttagatgatatgtttatgtgatcgttacagtgttgggtcttgaggttatggctaaatagtcaatcatcaaaatggcagttacctcacaactttgtaagaaaaacaggttatgtgatcttaggtaacttctgaaattttgttgcttagtgtagcagattaccagggttaccttacctttttgcccttttaaactgatactaataatgtatcattcaatgcaggtaatttcaagcttttggaggatcatgcttttcttctagattttatcttcagttgtccttgtaagggttgtgtcaatggtagtggtgaattatctagaagcaacaaagcagcagtcaacatatttaaattgccagatatagagttaggcttagttttagttaaaatattagtggtgaattatctaggcatacatccagtccacaccctcaacctaccgagttaggctcagttttagttaaacagcgtctcggttgcttgtgcctactgatggcttttcttaaaattatatcaacgacatcttaggttttggaaggtggtgcagttgtcatgactcttagagatcatagtattccttctaatggggatatcaatgaaagtaaagtttcttatttgttattattatattcttgttggtgcagcctgaaaatgaaaagccaattactgaaagcggagatgaaatctcttatgaaagagcaaaggcaaaaagtccaatatctttattatcgggactacgaaggagatcaattgactgcatctaaactatgagatgtgtgcaagattgggtttgttgtatttggagttcctcatagaaaaatcatacatatgctctagagttcctcatagatttggtgctcgcgatctgccatggatttgatttaagatttgggagatctgtcgtgttcgcgctgcgagattcgattttttatgcatgttttattcacgagattgcaagaacgggactgctaggcaagatgagtatacctgaaatttaggtctagaaattcactgctatcagtctcaggaataggctaggttgaacttatacatgagatatccacaggtccaggtgcattgtttgaatttgattagaagtgtgtaatgttagttcttataaaaaagcaactcaaaaagggccaaagtttggatgtaccttctgggttattgacgcagatatctttatcactatatgtgcttggtttgctcagtggcacatttaatctagagaatttcagtttccctctataaaatggtggagcagaatgacttctaaatctactacacttggaagttttgggtctctgatttagtccagagttgtgttgattcaacaaatcttgaataatcaggttgccatttgccatattcaaagaaggaacattcaaatgacaaccattatcacctgctgtctcaggagaaatattgactgacaacctcatgtcaacattttcaggataatgcatttgcttataccctaacttgtaatcaatactggcaacattgtcatccaggcggcatgaattagtgatccttccagagaaacagactatgcaaaacaaatgtcatattaataatctagaaacagcttcgagatgggttttatctattgatgaggaacctgttaag

SEQ ID NO: 118041 - DNA, 354 bp, Zea Mays
acaatggtgcgccaaactgctatggttgtcaaatgtttactgctgatgtactataagaacagcagaggccgtagctatcgtaggcagggtcaaatgttgacgattgtggaatattttctacttttgtaccgtgcattattgcctacacctgtgtggtaccgttttttcctgaacaaggagtatggaagcctattttcgtctctaaccactggcttgtatctcactttcaagttgacatctgttgtggaaaagggcaatgggtgtaacttccctattggaaaaggatggtgcgtagctgcaaaagagaggacatcttgcttgtgtgctcgcaagaaggatgcaaaggatctgtga

SEQ ID NO: 118042 - DNA, 102 bp, Zea Mays
ggttgtctgttgtcttatatcttactgtatatggtaatcatctttgtttttctagatcttcatgtaattgttgctattcaattgttttttaaatggttgaaa

SEQ ID NO: 118043 - DNA, 1294 bp, Zea Mays
tctattctatctagatctcactctttatttcaaacctttaagccataaatagtgaaaaacatctatacgcagattctcctggagatgagcttattcactcattcggaccaagacgacgaacttcgaatttcctcaattttcacgcgagcacctgtttgtatcgccggcggatcggatatattttctcggttcctgctactcctttctttctcgcctgcatccatggtctcgctgctccctcgcgctccctcactcgccttcctcgctaagtccgcctcttcgcagcggccgcctgcgccatccatgtcgtcgcccttctccgccgcttccgtggccgcggggtcagaggcggcagccggcacgaggaagctgcctgtgctgctgttcgacgtcatggacaccctcgtccgggacccgttctaccaccacatccccggcttctttcaaatgtccatgaaggaactactagaagccaagcatccaacggcttggtcagaatttgagaaaggactgattgatgagaatgagctggccaaaaagttcttcaaggatggcagatcgtttgatttgcaaggtctaaaagagtgcatggtgagagcatatgaatacattgatggcgtcgaagatattctttgctgtttgaagaaaaataattatgaaatgcatgcttttacaaattatccagtatggtaccaattaattgaggataagctaaagctctcaaagtatttatcttggacattttgttcttgtagaactggaaagcgcaaaccttcgcccgagttttatcttcaagctgcagatcaactcaacgttgatccagcaagctgcgtttttattgatgataggatgataaacattgaagcagctcttagtgtaggaatggttgggttgcagtttaaaagtgctgaggcactacagaaggacttgtgtgctctgggagttgaattatctcctcttgtttgtgaaggtgaagcacaagtacaataaggtcgtgtgtgccctatcttatcttatgctcaaccaaactacaatacgaatgtacataatgtatggtgcccttgctttgtgagctatgtcaataaattattgtgctaatctgaatcgtctatcaaatataactgatatgttaactgcacatattctctcctatgaagagctttttgttgtcagttagtagaggtgaatttgttttatcacaaacatgtgctgtcaagcctcagccaataggccctgtaacttcaattcaggttaatgttcgtcgagtttgaggagtttttatcaaaagttataa

SEQ ID NO: 118044 - DNA, 1611 bp, Zea Mays
gacctcgctctctgacgtcgtcgtctctccttatttggatctctctcccagagctcacaacaaatcaaccgtgtgcagctgctgcagaaccagagaagctgcaccctatcgatcgatcagcagcagctagcaatggcggtacacctcccggtacctcagccttcttctggcctatgcgcgaaaccccagcagcagcggggcaatgcctccaccgcggcggcggcggtggccacgccgccctccacattcgctccgcagaccacacggctgtcggctccgaccatcgcgctgaacatcagacacacgacgacgccggcagcgccgccggtcgtcgtcatgaccgagagagtggcgaagaagcagaacgaggagacgacggcgacgctggcgagcatgtggcgggagattcagggcgcccgcgactgggccggcctggtggagccgctgcacccgctcctccgcgccgagatcgtccggtacggcgagctcgtagccgccacgtacaaggcgttcgacctcgacgcgtgctccaagcgctacctcaactgcaagtacggcaaggccaggatgctcgaggccgtcggcatggccggcgccgggtacgacgtcaccaggtacatctacgccgcgccggacatcgcgctccccggcgcggccgggccgtgcccgagccggtggatcgggtacgtggcggtcgcgtccgacgagacggcgcgccggctcgggcgccgcgacgtcgtcgtctccttccgcggcacggtcaccggttccgagtgggtggccaacatgatgagctccctcgagcaggccaggttcgatccggcggacccgcgccccgacgtgaaggtcgagtcgggcttcctctccgtctacacctccgacgacgccacctgccgcttcacctacggcagctgccgaaaccagctgctttccgaggtcactcgcctcatcagcaaatacaaacacgaggagatgagcatcacgctggccggccacagcatgggcagctccctcgccctcctcttgggctacgaccttgccgagctcggtctcaactgcgacggttgcggcgacaccgtgccgatcaccgtctactcctttgctggcccgagggttggcaacactgggttcaagaatcggtgtgatgagctcggggtgaaggtgctaagggtggtaaatgtcaatgaccctatcaccaagttgcccggcatcttcttgaacgagaacttcttcggggccggcaggttggagcttccatggagctgtgcctgttacacgcatgtcggtgtcgagcttgccctggatttcttcaaggcgagagatcctgcttgtgtgcatgacctagaggcctatatagggttgctcaagtgccctaacaaggttgcagtggtgaaaaacgacggggagcatgttttgagcaaggcaatgaagtttgtgcttcaacacagttttgatacttggagatggcaaatggccgcaatccaagttggtgagttagtgcaagccattgggttgtagattgattgatacaggggtccaatttcattcccattttttgtgggggatatgaaacatagatgcccttgtaaattcattcatcttgtcggtaaa

SEQ ID NO: 118045 - DNA, 3151 bp, Zea Mays
gaagaggcaacacgcgaacgagaacgacgaagccaaagcaacacaccagcgcgcacgcacgcgcagcgtccggcgggcatcaccacctcctgtcctcctccctcctgccccgatccgccctccccgccgctcgccgcacccgatgtcggccgccgacccttccgcggctccggccgcggccgccgacccggacggccctgactccgtgcggctcacctggaatacctggccacggtcaaaggtcgaggccagccgctgcgtcgtgccgctcgccgccaccatctcgcccactcgcgtcccggatccctccgcggcatccccgccgccgctcccttaccctccgctccgctgcaagcctccctgttccgcgctcctcaaccccttcgcgcgcgtagacttcgctgccaagatctggatctgcccgctctgcttctcccggaaccactttcccccgcactatgctgccatatctgagtccaacgtccccgccgagctcttcccgcagtgctccaccgtcgactacatcgtcggcggagccggcatccctggggtaggcggcgcgccgccgcccccgccgcccgtatttctcttcgtcatcgacacctgcgtcatcgaggaggagctggagtacgttaagatggccatgcggaaggccgtcgcgctcctgccggagcacgcactcgtgggcctcgtcaccttcggcacgcaggtgcacctgcacgagctcggattctccgatctcagcaagatctacgtcttccgggggaccaaggagatctctaaggaccagattttggatcagcttggcctggcgggtgctgggcggccgggcttccccaagatgccacagcaaccgggcgggccacaggtgaatgggatgcatccgccgtccacggccggggtcaacaggttcctgctcccggtgtcagattgtgagattgctctcagcacgttgctggacgagttgcagcctgaccaatggccagtcgaggctgggaaccgtgcgatccgttgcactggtgttgcgctcagtgtagctgctgggttacttggtgcttgcatgcctggaacaggtgcaaggatcatcgcattgctaggtggtccgtgtactgagggacctggaatgattgtttcaaaagatttgtcagaaccagttagatcacataaggatcttgacaaggatgcagctcctcacttccagaaagcagttaaattttatgatggtcttgctaagcagttggtcagtcaaggtcacgtgttagatgtttttgcttctgctctcgatcaggttgggctagctgagatgaaggttgctattgagagaacaggtggccttgttgtcttgtctgaaagttttgggcattccgtattcaaggattctttcaaacgcatttttgagggaggtgaacagtctctaggactttctttcaatggcataattgaaataaactgttcaaaagatattaaagtccaaggtattattggaccatgcacatctttggagaagaaaggagccatgtgctctgacacagttgtcggtcaaggaaatacatcagcatggaaaatgtgtggtctcgatagaaatacttctcttacagtattttttgatgtctcaccgagtgaacgatcgagccagccaggaaaccaaaatccccatttgtatatacaatttgtgacaagttaccaacacccagaaggtcaaatgaggataagagttactacgatatgcaggaaatgggtagatggttccactaataccgaggaattagttgaaggttttgaccaggaaactgcagctgttgtgttggcaagatacatctctttgaaaatggagatggaggaagagttcgatgcaacccggtggcttgatagatctctcatacgtctttgttcaagatttggggattaccggaaggatgatccctcttcatttagcctgcattcaaatttctcattgttccctcagtttatgtttaatcttcggcgttcacaatttgttcaggttttcaataacagtccagatgagacagcttatttcaggatgttactcaatcgtgagagtatcactaactcggttgccatgatccagccttccttgatatcattttcttttgattcacctccatctccggtatttctagatgtggcatcaatagcagcagatcgtatactgctacttgatgcgtactttagtgttgtcatttttcacggaatgacaattgctcagtggagaaacatgggttatcagaaccaacctgagcatgagcaatttgcacaactattacaagcaccacatgaggaggcacaaatgataataaagggtcgatttccagttccaagactagttgtctgcgaccaacatggctcgcaggcaaggtttttgttggctaagctgaatccatcggccacatataactcagctcatgatgttgctcctggttctgacatcattttcaccgatgatgttagcttccaggtcttctgtgagcacctacaaaggctggctgttcagtcttgaggacctacctgtatgcaaaggttgtacaccctatttgatagttgctcataatgcactgggttcttaggttggagttgtgagaatttcccttttctgtttctctttggccatagttttctgagatcagacaattttttcgggaaactgccctaaaggaatgtgtaagttgcctacagaggtctattatctacatatatagtatatatacttatttatgttgacatcacccagctttcttctgcaaggtggttgcatgaattgagttgtgtgtcaagttcactttccagaaatcagaaatgtaagatcgcaaggcattataatgcagtgtgcatacaattgagcagcttagatcatgtttgaatgcactaggtctaatagttagctactaaaattagttgaaaacatttagctaatagttcagctattaattatttttagtaaattagctaatagttaagctatctatttgttagctagctaattccactagtattttttagcccacctaagtattagctctagtgcattcaaatactcccttaagcaattgtctctcaagcacatcagtttgtaaatgtgacattttggacgattgacatgctcttcaacattagattttactgctatcttata

SEQ ID NO: 118046 - DNA, 1736 bp, Zea Mays
aagcatttccatggagaagttgaagtggccacaaatatgtttcttttgtatcataggttttgctttcataaaggaaacaacacttaacagttagaagtaaaaaagaaaacccaatagaattgcttctcaaaagccggcaaatccataattatagagaaccataaggtcccataaactgggtgttattttgactagtcttataagctcgcatactactttatatacaaaattcagaacaactgctttgtcattttgtgatatcattttgataactcctaaaatgcagttattcatggtttgttttgttctgcagtggcataattgaaataaactgttcaaaagatattaaagtccaaggtattattggaccatgcacatctttggagaagaaaggagccatgtgctctgacacagttgtcggtcaaggaaatacatcagcatggaaaatgtgtggtctcgatagaaatacttctcttacagtattttttgatgtctcaccgagtgaacgatcgagccagccaggaaaccaaaatccccatttgtatatacaatttgtgacaagttaccaacacccagaaggtcaaatgaggataagagttactacgatatgcaggaaatgggtagatggttccactaataccgaggaattagttgaaggttttgaccaggaaactgcagctgttgtgttggcaagatacatctctttgaaaatggagatggaggaagagttcgatgcaacccggtggcttgatagatctctcatacgtctttgttcaagatttggggattaccggaaggatgatccctcttcatttagcctgcattcaaatttctcattgttccctcagtttatgtttaatcttcggcgttcacaatttgttcaggttttcaataacagtccagatgagacagcttatttcaggatgttactcaatcgtgagagtatcactaactcggttgccatgatccagccttccttgatatcattttcttttgattcacctccatctccggtatttctagatgtggcatcaatagcagcagatcgtatactgctacttgatgcgtactttagtgttgtcatttttcacggaatgacaattgctcagtggagaaacatgggttatcagaaccaacctgagcatgagcaatttgcacaactattacaagcaccacatgaggaggcacaaatgataataaagggtcgatttccagttccaagactagttgtctgcgaccaacatggctcgcaggcaaggtttttgttggctaagctgaatccatcggccacatataactcagctcatgatgttgctcctggttctgacatcattttcaccgatgatgttagcttccaggtcttctgtgagcacctacaaaggctggctgttcagtcttgaggacctacctgtatgcaaaggttgtacaccctatttgatagttgctcataatgcactgggttcttaggttggagttgtgagaatttcccttttctgtttctctttggccatagttttctgagatcagacaattttttcgggaaactgccctaaaggaatgtgtaagttgcctacagaggtctattatctacatatatagtatatatacttatttatgttgacatcacccagctttcttctgcaaggtggttgcatgaattgagttgtgtgtcaagttcactttccagaaatcagaaatgtaagatcgcaaggcattataatgcagtgtgcatacaa

SEQ ID NO: 118047 - DNA, 1122 bp, Zea Mays
atgattcgacagtggagcacacccgagctatatatacatctggatatgcacacacagtgttctgatgcagtgttcaagggaccggaaggattagagggggcagaaggagcgagatgggttccaggaaagcacacggggttttggtacttgttcttctgcttattgttttgcctgcgctctcgatcggtatgcaccgcaggcagattgatttccctgttcaatctgttgttatctttattttctacacatttcttgttttttttcgtcaaattgtacgagcaggtatatatgtaaagagagaaaaaaactcaggaacttgtcaaaatatactcaacatgtgctattggaagtatgtagtagatttttgtcaggcatgcaaaagtgacggatttgattcattagtattctgaaatttgattttgcaggaggaagggagttggcggatgaaaaggatcacaaggagcattccactgcctcttctgaaaagggagcggcgacggctgcaggggtggcgacaaatgattatgggcgctacgatccggctccggcgttttccaagcctcgcttcaagtttatacccaactgactcactgtgctgcttggcttctttgtgccacacgaaggtctctaaaaagtatggttttgtcgatgtttaagaagggttttctcagtctacctgatgagaaggttgatgacttatgtgaattgaggagtgatgttgcatctgcatgctagctatatggatggtgaggtctaagaaagattttatcaacttgcgtgggaggttctagctagccgcaggttaagtttgtttaaaaaacatattaatagtatgtatattatgtacatagatgacatatgagaattgagacgtgatccttcatatatgcttactatatatatgcacatgtggcatgtagaaatagccgtgtactgcagagaatgtgtgtaacttgtgtagtatctggtgttgctgcccctacgtacaccctactgaacgtagtcggcttcggttcttcagttctggcgttggatctttgatccggatgccataaagttggttctttcttaacaacaacaagtctacttattttcaatatttatgaaccgtattgatcacaa

SEQ ID NO: 118048 - DNA, 340 bp, Zea Mays
gatgcagtgttcaagggaccggaaggattagagggggcagaaggagcgagatgggttccaggaaagcacacggggttttggtacttgttcttctgcttattgttttgcctgcgctctcgatcggaggaagggagttggcggatgaaaaggatcacaaggagcattccactgcctcttctgaaaagggagcggcgacggctgcaggggtggcgacaaatgattatgggcgctacgatccggctccggcgttttccaagcctcgcttcaagtttatacccaactgactcactgtgctgcttggcttctttgtgccacacgaaggttagacttattaataata

SEQ ID NO: 118049 - DNA, 848 bp, Zea Mays
acgttaatgttgggcgcattgatggataagctgcgttccagtaaccatgttcgctactgattttatagcggcatgttagcttcgctgctggcgcttggaacggtgtcgtcatttaacggtatgttgctggcgggatttgtcgcggggttgtttgcgacaggtgggcaaagcgttttgtatgccctggcaccgttgttttacagttcgcagatccgcgcaacaggtgtgggaacagccgtggcggtagggcgtctgggggctatgagcggtccgttactggccgggaaaatgctggcattaggcactggcacggtcggcgtaatggccgcttctgcaccgggtattcttgttgctgggttggcggtgtttattttgatgagccggagatcacgaatacagccgtgcgccgatgcctgacgtgccttattaggcaggggcgaaagggacttcaccccaatacacctacggcgtttacaggtatactcgctaaaaattattcagcgggtttggaaacaaagatggcaaaacttaccttacaagagcagttgctcaaagcaggattagtcaccagcaaaaaagcggcgaaggtggagagaacggcgaaaaaatcgcgcgttcaggcgcgtgaagctcgggcggcggtagaagaaaataaaaaggcacagcttgagcgtgataaacagcttagcgaacagcaaaaacaagcggcgttggcgaaagaatataaagctcaggtgaagcagcttattgaaatgaaccgaatcaccattgccaatggcgatattggttttaacttcactgacggcaatctgattaagaagatttttgtcgataagctcacacaggcg

SEQ ID NO: 118050 - DNA, 1864 bp, Zea Mays
caccaccgccgtcctcgcgacggcacagacggacgcactcgcgcgcgcgcatacatttacgcagcgaggagctcgaggacgacccccacagcaagcagcgatggcgcacgacggctttctcgggggattccacgagctttcctggcctcttgttcatgctgcagccgccggcgccgcgccgttcgatcccctgctggtacatgtgccgcacgcgcttatgggcgccggtgcggggtggcaacacgaggctgcggtgggcgcgatcgtgccgtcgcagtcgcagtcgcaatcgccaccgccaccgccatcgtcgctcgcggcggccgccgtaggaggagcagatgccgttgaggccgccatgatggagcagctcgcgagcaggctcggcgtcagcgtcccgtcgccgccgtcatcgcggtacgtgtcgtgccacagtacgccggtggcgccgtgcgtgctcgccggggacgcggagcgcgccgaaagactgtcgtgcttcccggcctccggtaggaagctctcgcgcgtggccagcagccagtcgcttctccgcgaacaggctccggcgcccgcgcccgcgccctcgcctggcgctgctgctaaacagcacgcgggcgatggggcgtgcgatggcccctgccgcaagcggaaggcgtcgggcacgagcagcaagcagtccaaggccaaggaagcggtcaccacggctccacccgagtcccgggagactgcagagacgagggccaagaaatgcaagctctccacggacgaggagcggaagccggcggccggagagggatggcgtggcagtggcaagggtaaggagctggtggcggcggatgcggagccacccaaggactacatccacgtccgcgcgcgccggggccaagccaccgacagccacagcctcgccgagcgggtgaggagggagaagatcggcgagcgcatgaagctactgcaggacctcgtgccgggctgcagcaaggtgaccgggaaggccgtgatgctggacgagatcataaactacgtgcagtcgctgcaacggcaagtagagttcttgtcgatgaagctgtcgaccgtcaacccgcgcctcgaactcggcgcggacgacagcttcgtccccagagacgacgccaacaagatgtgcgccgccgcgacgtcctccatctccatggcacagcagccactgccactgccagcagcctaccacgcgctcgagggctcgagcccggcgttctgctacaccaccacgcccccagctcccggcaccgccgcgcggctgggcgttgctgcgtcggacgccaaagccttcgaaatggctcctccttcgtcggcggccaccgtgaaccacgccggcaccgcggagcggcggccactcgaaggacctgctgatgagaacgcgagtccccagatgggggggaggagcttgtgggaagagggcgatgatgatctgcagagcctagtcctgatgggattccgggggcgacacgtgatcattggcggcccgatctgattggcggacggacggacggacggacagttcagtttcaccgatcgccacatgacgacggcaggggttaggctccaatcattggacattctccatgattgtacatagcaacaggactgtcacacgctaatcgcctcacacttgagtttccagctcagcagtagcagaggccaagaaaacacacacacacacacaaaaaaaaggcgaaaagaagacgctttgtttgttgcattgcgtttgggcccccgcacgaatttgcagtttgatctaatgtaatgtaatgtaatgatgcttatactctcataaacatcaagttgacgaaactttatatacatgtgaggcaacagctgctggacg

SEQ ID NO: 118051 - DNA, 2066 bp, Zea Mays
cgcgacggcacagacggacgcactcgcgcgcgcgcatacatttacgcagcgaggagctcgaggacgacccccacagcaagcagcgatggcgcacgacggctttctcgggggattccacgagctttcctggcctcttgttcatgctgcagccgccggcgccgcgccgttcgatcccctgctggtacatgtgccgcacgcgcttatgggcgccggtgcggggtggcaacacgaggctgcggtgggcgcgatcgtgccgtcgcagtcgcagtcgcaatcgccaccgccaccgccatcgtcgctcgcggcggccgccgtaggaggagcagatgccgttgaggccgccatgatggagcagctcgcgagcaggctcggcgtcagcgtcccgtcgccgccgtcatcgcggtacgtgtcgtgccacagtacgccggtggcgccgtgcgtgctcgccggggacgcggagcgcgccgaaagactgtcgtgcttcccggcctccggtaggaagctctcgcgcgtggccagcagccagtcgcttctccgcgaacaggctccggcgcccgcgcccgcgccctcgcctggcgctgctgctaaacagcacgcgggcgatggggcgtgcgatggcccctgccgcaagcggaaggcgtcgggcacgagcagcaagcagtccaaggccaaggaagcggtcaccacggctccacccgagtcccgggagactgcagagacgagggccaagaaatgcaagctctccacggacgaggagcggaagccggcggccggagagggatggcgtggcagtggcaagggtaaggagctggtggcggcggatgcggagccacccaaggactacatccacgtccgcgcgcgccggggccaagccaccgacagccacagcctcgccgagcgggtgaggagggagaagatcggcgagcgcatgaagctactgcaggacctcgtgccgggctgcagcaaggtgaccgggaaggccgtgatgctggacgagatcataaactacgtgcagtcgctgcaacggcaagtagaggtgcgtagagtctgtctcctctgtatcggacattaaagaactctcttgtaaaacaaagtacgagctgtagcttctgaatctgagcaagacggttcttgatttcgcgacagttcttgtcgatgaagctgtcgaccgtcaacccgcgcctcgaactcggcgcggacgacagcttcgtccccagagacgacgtacgtaatttcctcctcctcctactcctcctcaccaccaccactcgaaatgaaatgaagtagtggatgatcttcctttttgatcgcgttgcccatttcttgagaactatatgcgtaacggattgcaggccaacaagatgtgcgccgccgcgacgtcctccatctccatggcacagcagccactgccactgccagcagcctaccacgcgctcgagggctcgagcccggcgttctgctacaccaccacgcccccagctcccggcaccgccgcgcggctgggcgttgctgcgtcggacgccaaagccttcgaaatggctcctccttcgtcggcggccaccgtgaaccacgccggcaccgcggagcggcggccactcgaaggacctgctgatgagaacgcgagtccccaggtacgtacgtacgtacagcaagcttatttgccaagttcgtccatctcgatcgtatcgctagctgtgcgatcgatccactccaaaactgtggacgcgtgacgcgtcaagggcgaagaggtgagaaacctgccgtgaatttcagatgggggggaggagcttgtgggaagagggcgatgatgatctgcagagcctagtcctgatgggattccgggggcgacacgtgatcattggcggcccgatctgattggcggacggacggacggacggacagttcagtttcaccgatcgccacatgacgacggcaggggttaggctccaatcattggacattctccatgattgtacatagcaacaggactgtcacacgctaatcgcctcacacttgagtttccagctcagcagtagcagaggccaagaaaacacacacacacacac

SEQ ID NO: 118052 - DNA, 3590 bp, Zea Mays
aacaagagggagagagagagagggaacagaagcaccgcgcggccggagacgccaaaaatacatcttcccggtccaggcaagaaatcagaattctccgctgaacaatccgtcgcatttgcgccccctttacggcgaatccgacatggggagggcgggatttctcttcctccccctcctgctcctcctcgccttcgccggccccggccccgcctccgcggcgacggccatgaccccggacgcgggcgtcatcttggacctcgccaagtcgctgaccaacccgccgccgtcctggaccggcaccgacgtctgcggcggcgtctccttcagcggcgtcacctgcaacggcgccgcccgcgtcaccggcatcaacctcgccaagctgcatttatccggcaccctttcctcgtccctcgccaatctcaccgcgctccaatcgctgcagctccaaggcaacgcgctggagggcgacctgccctccctggcccagatgggctccctcgagaccctcgttctcgacggcaacgccttctccaccctgccgccggacttcctcgagggtctcccctcgctgctcaagctcagtatggacgacctccctctcgagccatggagcatccccgacgctatcgcggggtgcgcgatgcttcagaccttctcggcctccaatgcctctgtctctggccccttcccggcggttcttgccaacctgacgtcgctacagacgctgcggctgtcgtacaataaccttaccggggtcctgccggtggggttagaggcgttgggctcgctggagacgctgcagctcaacagccagaggtcgaacggcatgctgtcagggccaattgacgttgtggcgaagttgccgagcttgaagacactgtggcttcagtccaactcgttcaccggcccgatcccggagtttgatcccaacacgcagctggagactttcaatgtcagagacaacagcctcaccggaccggtgccaccctctcttgtagggatcacaagccttcaggatgtggcgctgtccaataactttcttcaagggccaaaaccaaaattcgcagctaagactgtggatattgattctgggaacgggttctgtcacgaagaccctgggccatgcgatccactggtgaccactctgcttggggtggcttcagggtttggatacccattgcagctcaagaagtgggcaggcaacaacccatgcgatccatggcctggtctttcctgcatcaaaatggatgtaactcaaatcaaattgcctcgccggaacttgtcagggcttatttcaccggcttttgcgaacttgactagacttcagcggctggatctgtctaacaatcgacttactggggtaataccagatgctttgacgacactgaaaagtctcaattatcttgatgtctcaaataatcgccttactggacaagtgcctgagttcaagcagcatataaagctgatgactgcaggcaactcgtttggggaatcaggtggtgatagtggagggggtggctccaatgttcggtcctcatcttcaaatcctacaggttcacataactcaaagtcaaatgcgggaatgatcgttggaattcttctagttgtcattcttcttgtcatttgtgttgggcttttcctacatcatcgaaggaacaagaatgtggacaagttcagtcctatctcaacaaagagcccttctggtgaatctgaggtgatgaagattcaggtagttgggacaaatggccatagcaacataagtggttctgtaggctcaactgagctttacagtcattcaagtgctgacaacacaagcattgctgacctcttcgagtcccatgggatgcaattaccgatgagtgtgctactaaaggccacaaacaactttgatgaggactacatcttaggtacagggggctttggggtggtttttaaggggactctcaatgacaagctggttgctgtgaagaggtgcgacagtggcactatgggaactaaagggctgcaagaattcatggctgagattgacgttcttaggaaggtgagacatcggcacttggttgcattgcttggatactgcacccatggcaatgagaggctcttggtctatgaatatatgtcaggaggaacactgcgccagcacttgtgtgatcttcagcagagtggttatactcctcttacatggacacagaggatgacaatagctttggatgttgcccgggggatagaatatttgcatggtttggcgcaggagactttcattcatagggatctgaagccttccaacatattgcttgatcaagatttaagagccaaggtttcggactttggattggtcaagcttgcgaaagatacagataagtccatgatgacaagagtagcagggacatttggataccttgcgcctgaatatgccactacaggaaaggtcactacaaaagtagatgtgtatgcatacggtgtgatactgatggagatgattacgggaaggaaagtacttgatgactcattacccgatggcgaaacgcatctcgtaacgagcttccgaaaaaacatgctcgacaaagagaagttcaggaagtttttggaccccaccctggagctcagcgctgaatcttggaacagcctgctggaggtggccgatcttgctcgccattgcacggcgcgggaaccgtaccagcggccagacatgggtcactgcgtgaacaggctttccagcctagtggaccagtggaagccaaccaacattgttgatgatgacgatgaggagggtgggacaagcgagatgggtcttcaccagcacctagaaatatggagatgcgatgatttcactatatcggattcggattcattcagcgcacacaacacatcaaggaagtaccattgacaattagcgaggcttttttttgtcatacatacatataaatgaggaaccatggtgtggcacatcaagaggctccccagtccccacacgtctggatcacgaacagctttgaaggtcaatgtgccagccagtcaggttgtagttagcgcattgaaaacaaggttacttgataatcagcatcttcattcattgaatgtctgctaaccaggctcaaacttgagagggaagtcatgataccagaaaacttgtgctgtatctagcttagcctgtttatacaatttggtcactttggacactgagaaacattttgttcttgaatggtgaagagggaaaagagatgaaagaaaccatagcttcgccgaaggcgagttctggtggttagttttttaggatgtagagggttgccttttgtgtacaaccaaccatgatttcattattatttatctagtatctgtatttgctctgtacaaccaaccgtcaggattgttttcttcaaatacctgaacgtgcgaaacgatgctaccaaaagttcaagttttgcgttagcatgcaatttttttttttcatactggacgtcttgtactggcaagaaccaataaacaaatgtctaagctttagctttgtacagcctgcaaagcaaaagataagatgaatcagagaaatgtccttaggataccaaagaatatttaatgtaacctaacatatc

SEQ ID NO: 118053 - DNA, 2587 bp, Zea Mays
cttatccagagaggctagaacaaacctgaatttcatccccaccgtcgcctcgctcgacctccacctctctttcctcccggcagcaatggaggcggcacccaggtgaggcgagcaagcagccagccctggctccccgatggcgtgcctggcgccgcagttcaagtgggcgccgtcggccgccgcccacatgccttcctcgtcctcgtcctcgtcctactccaggtgctccgcgctccgcgtccactgcgccgtcacctccgccgctgtcgtcgaggaccgcaccaacggcagcgcggcgcagctgaggctcgcttacgcggctccggcgattcagagaaactttgaggcaactctggcatcagaagcacttctaaatgaagaggcggtagtagcagcggcagccgcagaggctgttgctcttgccagagcagctgccgaagctgcccaagaagttgttcagatagtacaaagaaacaaccatcagccggtaattagaccaaaaaagtgtgtggacaactacttggcaaatgaaatccttcgcacagagatgcgatcgagcagtcctgacatgtatgctaataatcctttgatggagtatctggactcttatggtatcatggatgctgaagatgaattagatgcttatgcacagtatactgagaacatagctgtgaaatctgctcgtcaatctgagagaaaagctaggagaactagagcagcaataaaagctagcacaaccctccatgcttcacaaaaggttgcattatcctcaaagaagaagcggtccaagggttcctcgtctagtatgaatcctttaggttcgttgtggaagatgaccggtaggagacttcttacagccaaggaagaggttgaattctcagaaggtattcaggatcttttgaagcttgaggcgatccaagctgagcttatagagtacaatggcggtcagccaaccttctcgcagtgggcaacagcagctggagttgatgagaaaactttgcgcaagcgcttgaattatggtatttattgcaagaacagaatggtaacatctaatgtgagacttgtaatctctattgccagagagtttgaaggccctggaatggacttttatgatcttattcaggaaggaatgcagggccttataaggggagctgaaaaatttgattcatcaaaaggttttaggttctctacgtattctcactggtggatcaaacaagcaatgcgtaaatctgtctcagagcaatcccaaatatttcgcttgcctgctcacatggttgaagcaagctaccgtgtaaaggagtgtacaaaacgacttcgccgtaagcttagaagacgacccaccaatgaagaaattgcagtggacactggtattccaattaaacgagttgaggcagcagtaaacctcccaaaatatagtgtgtcccttgatagcaaaattggttccaccgacatgacatatcaggaggtcacagctgatcccagtgctgagacagctgaagagatgctcaacagaatgtccatgaagaaggacgtacacatggcactagatactctcaccactcgcgagaagcaagttgttgttctgaggtttgggctcgaggatggtcggataagaaccctgcaggagatcggtaacatcatgggtgtgagcagggagagaatccggcagatcgagtctggcgcgttccggaaactaaggagcaagaagaaggtgaaggctttgaaggattatctggtgccagtaggcaattggtgaaccgtttgtttgcagaatttgttttccttttggttcctctttttttttttgaggattctgtacttgtaccattttacgtgggtcctcatgtaaaacacgctatcagaatacttgcatcacaagaggaaagagtagtttagttccgtgggaaatgaagtaaaattcacaatttcttagctgctggttatctcttagaaatgaaatatgtttggacaaaactgtgtaatgcatgaaaactttagaggcgcttcgccatcttaagatgggatctaccctaagcctaaaagaactcatctagttttgtaccacctactaaaacaattctaaaaaaatatataatttatttttcttggctaagttatgtgtttagctactaaccaacaaaagaacaaacttagttcatacataaagaaataaaaaaaagataaatttttgttagggagtaaattgaactagctcaaataggtggaaatgtaaaataaacttaaaaaaatactccatccgttctaatttacaatttgtttgactttttatgctaagttggaccgactcgtcttatttaaaaaatttcataattattgtttagcatataatatactttaagtatgactttgtttttttgttttttattaaaaaaatgaataaaatgagctgatccaacttgatataaaaaatcaaacaaattataatttaggatgaaggaagtactaaaggggtacatggatatcattcataggtaaggcaagagaagtaatttagacgttttagaaatgaaggctgccggtcgttgggctccgtattggggcccaacacgagcgtctaggctagggc

SEQ ID NO: 118054 - DNA, 1589 bp, Zea Mays
gcacacacgcgagcacgcgcccgcactgttcgctcgctccccatctccacacccgccgctctccacagtgctgctatcgagacgtctttctccgattgtatgtaccgagctcctcctgcctgcctgcctgcagtctgcctcatccccttctgttttgcttgcacttgaatagccaccttctgcttcgcgccatacgtatatcttctcttgcggtagctttattgcacatcctgcgggccttcttgcgtggatgctcccctcttggctatttgtttgtttcttgcagaggaattttttcctgaacttgtcctcgccgtcttgaaggtttcttgtttgggagcaggcggaggcgtttctttccttcttcgccggcggcggcatggactgggcagcggcgtccgggtctccgtcgtggggcgcggcggcgacggaccccggtccgaccatgctgtccttcgcaggcccgtcctcctccgccgccgacgccgaggtgcggctccaggatttcgccgcgggtcttgcccagagctcgcggccgactggggcggcgccgggagccgggaggaggtcccgcgcggccgtgggaggtgccggcgcggaggcgtgctccgtcgacggctgccgctctgatctcagccggtgccgcgagtaccaccggcggcataaggtctgtgaggcacactccaaggcgccggtggtggtcgtcggcggacaggagcggcgcttctgccagcaatgcagccggtttcacatgctgtccgagtttgacgaggaaaaaagaagttgccggaagcgtctggatggccataataggcgtcgaagaaagccacagcatgatctgacaaatctagggggtttctttccataccaccaagtgaatcagtttgagttctacccacaaacaattccaacagttggccagaattcggacgccgtgcacttggtgggccgtcagcagcctttctccatatcgttctcaagaacaccagacgagttccctttcccacagggtggcggtagcagtgtgctgcaccacctccatgcagcccgccctggccatcacgctgaaggcagcagccacactggaagcagcacacgcgacaacgctctctccggcacactgggccccgagtgtgctctctctcttctgtcatcgtcgctgcgtcgcccctcaactgctggcgtccccgccgttggccaaccccaggttactgcctcttcgaccactgccgtgtcgcaggctgcaacggcagctgtggccactgctgcattcgcggccagtgctggccaccatgtgtttgttcctgatgctatgtttgaggatccatcacaggcactgccattctcttggcagtaggattgttttgttgtcctgtttttatgtgctcctgttgtgttctcgatcgatactctagtgtctgatggctgggaattcggggtacctgtgcacttgcagactcaggttgtggtccgtcagagatgtatacaagtgacacgacgactagtgctggcatctgaaaggaagtggtagctgctgtgcagagtgtttagccgttaaattcaaatgcgcccgttcaatttttttcttc

SEQ ID NO: 118055 - DNA, 1362 bp, Zea Mays
gcacacacgcgagcacgcgcccgcactgttcgctcgctccccatctccacacccgccgctctccacagtgctgctatcgagacgtctttctccgattgtttcttgtttgggagcaggcggaggcgtttctttccttcttcgccggcggcggcatggactgggcagcggcgtccgggtctccgtcgtggggcgcggcggcgacggaccccggtccgaccatgctgtccttcgcaggcccgtcctcctccgccgccgacgccgaggtgcggctccaggatttcgccgcgggtcttgcccagagctcgcggccgactggggcggcgccgggagccgggaggaggtcccgcgcggccgtgggaggtgccggcgcggaggcgtgctccgtcgacggctgccgctctgatctcagccggtgccgcgagtaccaccggcggcataaggtctgtgaggcacactccaaggcgccggtggtggtcgtcggcggacaggagcggcgcttctgccagcaatgcagccggtttcacatgctgtccgagtttgacgaggaaaaaagaagttgccggaagcgtctggatggccataataggcgtcgaagaaagccacagcatgatctgacaaatctagggggtttctttccataccaccaagtgaatcagtttgagttctacccacaaacaattccaacagttggccagaattcggacgccgtgcacttggtgggccgtcagcagcctttctccatatcgttctcaagaacaccagacgagttccctttcccacagggtggcggtagcagtgtgctgcaccacctccatgcagcccgccctggccatcacgctgaaggcagcagccacactggaagcagcacacgcgacaacgctctctccggcacactgggccccgagtgtgctctctctcttctgtcatcgtcgctgcgtcgcccctcaactgctggcgtccccgccgttggccaaccccaggttactgcctcttcgaccactgccgtgtcgcaggctgcaacggcagctgtggccactgctgcattcgcggccagtgctggccaccatgtgtttgttcctgatgctatgtttgaggatccatcacaggcactgccattctcttggcagtaggattgttttgttgtcctgtttttatgtgctcctgttgtgttctcgatcgatactctagtgtctgatggctgggaattcggggtacctgtgcacttgcagactcaggttgtggtccgtcagagatgtatacaagtgacacgacgactagtgctggcatctgaaaggaagtggtagctgctgtgcagagtgtttagccgttaaattcaaatgcgcccgttcaatttttttcttc

SEQ ID NO: 118056 - DNA, 1343 bp, Zea Mays
gcacacacgcgagcacgcgcccgcactgttcgctcgctccccatctccacacccgccgctctccacagtgctgctatcgagacgtctttctccgattgcggaggcgtttctttccttcttcgccggcggcggcatggactgggcagcggcgtccgggtctccgtcgtggggcgcggcggcgacggaccccggtccgaccatgctgtccttcgcaggcccgtcctcctccgccgccgacgccgaggtgcggctccaggatttcgccgcgggtcttgcccagagctcgcggccgactggggcggcgccgggagccgggaggaggtcccgcgcggccgtgggaggtgccggcgcggaggcgtgctccgtcgacggctgccgctctgatctcagccggtgccgcgagtaccaccggcggcataaggtctgtgaggcacactccaaggcgccggtggtggtcgtcggcggacaggagcggcgcttctgccagcaatgcagccggtttcacatgctgtccgagtttgacgaggaaaaaagaagttgccggaagcgtctggatggccataataggcgtcgaagaaagccacagcatgatctgacaaatctagggggtttctttccataccaccaagtgaatcagtttgagttctacccacaaacaattccaacagttggccagaattcggacgccgtgcacttggtgggccgtcagcagcctttctccatatcgttctcaagaacaccagacgagttccctttcccacagggtggcggtagcagtgtgctgcaccacctccatgcagcccgccctggccatcacgctgaaggcagcagccacactggaagcagcacacgcgacaacgctctctccggcacactgggccccgagtgtgctctctctcttctgtcatcgtcgctgcgtcgcccctcaactgctggcgtccccgccgttggccaaccccaggttactgcctcttcgaccactgccgtgtcgcaggctgcaacggcagctgtggccactgctgcattcgcggccagtgctggccaccatgtgtttgttcctgatgctatgtttgaggatccatcacaggcactgccattctcttggcagtaggattgttttgttgtcctgtttttatgtgctcctgttgtgttctcgatcgatactctagtgtctgatggctgggaattcggggtacctgtgcacttgcagactcaggttgtggtccgtcagagatgtatacaagtgacacgacgactagtgctggcatctgaaaggaagtggtagctgctgtgcagagtgtttagccgttaaattcaaatgcgcccgttcaatttttttcttc

SEQ ID NO: 118057 - DNA, 649 bp, Zea Mays
ctaaaccctagacgccgcccgccaccaagtgaggccgccgtcgggcctgcgcatgttcccctccatcgaaattggcaaccgtcgtcctgtgccccacccctgtagcctctgtcgatcggccgacgctccctcacccgcgcggtcgcgccctctggcactccgttgagcggtaccatcccaccaccagcaccctccgtcgagcggccgccatcctgctgctgatcctcttcgtcgagcacgggcagtccccaactgcctcacgcccttcttcctattcatactgcacctccgcgcggatctccctgtggcgacccgaaagccaaggaagaggagctgtaaatatttgacatattatcaaaatatgttgtaggaagaggagctggaagcaaggatcagattgcttgaagtgtgaaaaaatgattactcgcatgcatgctagctgttggcgtatcacccagcctatggagagattttagtttgctagatgtatatttatacttttgcatgtaatagaactgaaagatcactttaaaatttaggaaacatgtgtatgctattattttatatgtttatcacacgaatcgtgttctaaacaaatatatgttggaattcaaagtcaaagattgatctttttcttttagtaatcaaa

SEQ ID NO: 118058 - DNA, 1914 bp, Zea Mays
caaaaatcctggtcccgtccgtccgtgcgtccgtccgaccatccgtccgtccgcagcaatggtcggcggcatgtcaccgccgcggcggacgctgtcgatggggagcggcggcgccatgggacgccgcgcggcctctgccggcgtgatgggcgacagccccaagcgcgggctgtcccgatcgatgaccatgggcggcgagcgcacggtgaagcggctgcggctgtcccgggcgctgacggtccccgagagcaccaccgtgctggaggtgtgccgccggatggccgcgcggagggccgacgccgcgctgctcacggactcgaacgcgctgctctgcggcatcctcaccgacaaggacatcgctacgagggtgatcgcgcgcgagctcaagatcgacgagacgccggtgtggaaggtgatgacgaggcaccccatcttcgtcctctcggatacgctcgccgtcgaggcgctgcagaagatggttcaaggcaagttcaggcacctgccggtggtggataacggcgaggtggtggccatgctggacatcgccaagtgcctctacgacgccatctcccggatggagagggcgtccgagaaggggaaggcggcgatcgccaacgtcgcggctggcgacgacaagtactccatcgtcgaagctctcaaggagcaaatgttcaggccctgcttgtctgccattattggcgaagactcaacagtcgtcatggtgtcgcctggtgattccgtccttgcagctaccaagaggatggtggaagcgcatgcgacctcagccgtagtggccgtggggagcaagccgcaaggcatcctgacttcaagggatatcttgatgcgcctggtcgctaagaacctgtcagcggacgcgactccggtagagaaggtcatgacccctgaccctgaatttgccacggtcgacatgcctatactggacgccctacggaccatgcaggagcgcaagttcttgcatcttccagtgatggacagagacggctcaatcatttcaatcatcgacgtcattgacatcgcacatgccgcgatctccattgtggagagcagtggcggcggcggcgacggcagcgcggggagcgacgaggcggcatcgtccatgttccagaggttctgggactccgccatggccttgggccccctggacgacgagacggacacccagtcccagatgagcgaggcgtcgaggtcgcagatgatgatgtccgatgtccaccaccaccaccaccaccacgactccgcgggcggcggcagcgaggcggggttctcgctgtcgtccttctccttcaagctccaggacaggcgagggcggatgcaccgcttcagctgtgaggttcagagcttgacgcctctggtgacctgcatcctgcggaggctcggcgccgacatcgaccctgaccgcctaccgcaaatcctgtacgaagacgaggaccgggacaaggtggtgctcgcgtcggacgacgacctcgcggcggcggtggaacacgccaggctcgccggatggaagggtctgaagctgttcctggactactccggcaccaccgggcgcaggaaagcggtggccaccccacgtggcgccatggcggtgggcatgtccagccgggacgcgtgggcggcggcgtacagcggggtcgccgccggggctgccctcgtcactggcatcggcgtcatggcgtacctgcgaagatctgcctagctagtgtggtggcgcggcggcgcggcgcgcatattcgccaatgcaagagcaaggggttcctgtcctgccttcgaatcaccacagaggtgctagtatgtgtggattacgtacccaaccggtgtatgtgtgtattcttttctacacgaacatgtaccagggcacaagttttccattaagaagaaatgggtggaccaaacaaa

SEQ ID NO: 118059 - DNA, 2006 bp, Zea Mays
caaaaatcctggtcccgtccgtccgtgcgtccgtccgaccatccgtccgtccgcagcaatggtcggcggcatgtcaccgccgcggcggacgctgtcgatggggagcggcggcgccatgggacgccgcgcggcctctgccggcgtgatgggcgacagccccaagcgcgggctgtcccgatcgatgaccatgggcggcgagcgcacggtgaagcggctgcggctgtcccgggcgctgacggtccccgagagcaccaccgtgctggaggtgtgccgccggatggccgcgcggagggccgacgccgcgctgctcacggactcgaacgcgctgctctgcggcatcctcaccgacaaggacatcgctacgagggtgatcgcgcgcgagctcaagatcgacgagacgccggtgtggaaggtgatgacgaggcaccccatcttcgtcctctcggatacgctcgccgtcgaggcgctgcagaagatggttcaaggcaagttcaggcacctgccggtggtggataacggcgaggtggtggccatgctggacatcgccaagtgcctctacgacgccatctcccggatggagagggcgtccgagaaggggaaggcggcgatcgccaacgtcgcggctggcgacgacaagtactccatcgtcgaagctctcaaggagcaaatgttcaggccctgcttgtctgccattattggcgaagactcaacagtcgtcatggtgtcgcctggtgattccgtccttgcagctaccaagaggatggtggaagcgcatgcgacctcagccgtagtggccgtggggagcaagccgcaaggcatcctgacttcaagggatatcttgatgcgcctggtcgctaagaacctgtcagcggacgcgactccggtagagaaggtcatgacccctgaccctgaatttgccacggtcgacatgcctatactggacgccctacggaccatgcaggagcgcaagttcttgcatcttccagtgatggacagagacggctcaatcatttcaatcatcgacgtcattgacatcgcacatgccgcgatctccatttgcgtttgcgcgcaacgtgcatgcgatggcacactgcaggtggagagcagtggcggcggcggcgacggcagcgcggggagcgacgaggcggcatcgtccatgttccagaggttctgggactccgccatggccttgggccccctggacgacgagacggacacccagtcccagatgagcgaggcgtcgaggtcgcagatgatgatgtccgatgtccaccaccaccaccaccaccacgactccgcgggcggcggcagcgaggcggggttctcgctgtcgtccttctccttcaagctccaggacaggcgagggcggatgcaccgcttcagctgtgaggttcagagcttgacgcctctggtgacctgcatcctgcggaggctcggcgccgacatcgaccctgaccgcctaccgcaaatcctgtacgaagacgaggaccgggacaaggtggtgctcgcgtcggacgacgacctcgcggcggcggtggaacacgccaggctcgccggatggaagggtctgaagctgttcctggactactccggcaccaccgggcgcaggaaagcggtggccaccccacgtggcgccatggcggtgggcatgtccagccgggacgcgtgggcggcggcgtacagcggggtcgccgccggggctgccctcgtcactggcatcggcgtcatggcgtacctgcgaagatctgcctagctagtgtggtggcgcggcggcgcggcgcgcatattcgccaatgcaagagcaaggggttcctgtcctgccttcgaatcaccacagaggtgctagtatgtgtggattacgtacccaaccggtgtatgtgtgtattcttttctacacgaacatgtaccagggcacaagttttccattaagaagaaatgggtggaccaaacaaatccttcagaccgaagcgagctaggtcgaggaaacccggcgttcggcattgata

SEQ ID NO: 118060 - DNA, 519 bp, Zea Mays
atgtcgctgagccggaattgcgctcccctcgagcgaccacatgaactgcggcttgaacggtggcgaggccttggacagaacatgctgtatggcagggcggtcgccctggttgacggaggtggggcaggacgtttctgggacgcgcccttcttcttcttgtccttagaggaggtggacgacgacttcttcttcttggctggcgcggggatgggggtctcgacgggcttggtctcgggggtcggggccacggcgggcacgggcgccttagcggcaggaggcgttgctgcggggggagtggcgacgggagcaggggtggccggggccggggcggcggccttggtggcgggcacgggatcgggggccttgggctttgccgtggccggcgccgccgcaggtgccggggtggttggcgcggcggccggccccgatgggctggccttggaggaggacttgagcgcggtacagtggtgtcgggagccgttgctgcgtagtgtcgacggggtttgcgcgaagaaataa

SEQ ID NO: 118061 - DNA, 494 bp, Zea Mays
cgagcgtcctagcgacgttttgatatccgagggccgaggccgggatttatttaacatgatcttgaacatcttgaggttgctctgttggttgcatttgatgaactcttgtgtgcgatattgtatcctccagtctggcggagtagagtaatttgagctgttgatgaagggataccaggtaccagctactgattattgttgtagccgagaggccaggccaccaccagtccaggccagagctagcctcggtgcttctgccatgagcactgaggaggagttattggttgctccctgtacacaaatgacggtgtatgtgcttgacgatagttggctgctcctatatatttattcgtctgaggttgtaagctagggttgatgagttgtgattaataatctgtacctggcaatacagcttggtcatgcgtgtatggtggccattggtggctcgtgttggcctgcctgttcttgttgtcgtcggtcgtctgcactcgttggtg

SEQ ID NO: 118062 - DNA, 147 bp, Zea Mays
acatgaagctttttctgctgacatcattgatgaactcagctgacaacactgaatatgcagtgatgcaagcatatgtgcaagctgtcgggactagatcaagtggccgctcagcatattacattattatatatataataaattaataac

SEQ ID NO: 118063 - DNA, 891 bp, Zea Mays
gtcatcaatcaaatactcagacaaccatggggcaccaggcgcagcacggcacggacgacaccgaggagctgcttgcagcccaccggcagctgtggtgccatgccctgggctacgtcaagtccatggcgctcaagtgcgccctggacctgcgcatccccgacaccatcgaccgctgcggcgggagcgccaccctgggcgagctgctcgccgcaagcgagatcccggcgtccaaccacgactacctccgacgggtcatgcgcacgctgacagccatgcgcatcttcgcggtcagccacgacgaccccgccaaggccgacgacgcggccgccatctcttaccagctcaccccggcgtcccggctgctcgtcagcagcagcagcagcagcgtcgacgccgccgccgccggcgccggcgcctcgaaggagaacactactaccccgagcatcctccccaacatcgcccacctggtccgccccaacaccatctccctgctgttcagcatgggcgagtggatgaaggacgagagcgcggcgtccgtgtcgctgtacgagacggtgcaccggcaggggatgtgggcgtgcgtggaggacgacgcggccaacagggccagcttctacgagagcatggacgccgacacccggctcgtgatgcaggccgtggtccgccggtgcccgcacgtgttcgacggcatcaagtcgctcgtcgacgtcggcggcggccgcggcaccgccgccgccgccgtcgtcgccgccttcccgcacatccagaggtgcaccgtcatggacctcccccacgtcgtcgccgaggctcccgccggcaccgccggcctgtccttccacggcggcgacatgttcgagcacatccccgtcggctgtcgcactcatgctcaag

SEQ ID NO: 118064 - DNA, 280 bp, Zea Mays
tttcgtgataacaagaaaagaacacccgaggcatcccgtccatcatggaggtaaaacaaatgatgatcatggatcgagagtcgatcaaatatgcatgtttgtacgtgtttgtgtcataataaatcgatcgatcatgttgtttaccctttttatttcggtatctagttgcatctgtgggcgggctaaaataaatcacggccggccgggcttcatcaagcccatgtatccagctgtgtgtaataatgcaatggaaaacgaaccaaaaagaatgcttccattc

SEQ ID NO: 118065 - DNA, 106 bp, Zea Mays
atattctgaccattttttcagtgatgaaattatgttaagtctgagcttaggaccagttttcagtgatgttttctgtacatttgagcagactacaatttttcagtga

SEQ ID NO: 118066 - DNA, 1191 bp, Zea Mays
atggggcaccaggcgcagcacgccacggacgacaccgaggagctgctggcagcgcaccgcgagctgtggtgccatgccctgggctacgtcaagtccatggcgctcaaatgcgccttggacctgcgcatccccgacatcatccaacgctgcggcggaagcgccacactaggccagctgctcgccgccagcgaggtcccggcgtccaacctcggctaccttcgacgggtcatgcgcacgctgacagccatgcgcatcttcgcggtcgtcggccacggtcacggtcccgacaaggccgacgaccctgcagacgacgacgcgaccgccgtctcctaccggctcaccccggcgtcccgcctgctcgccaccagcgacgacgacgacgacgcctcgaagaataatctgagcatacatcccaacatctccagccacgtccgtcccaaaaacgtctccctcctgttcagcatggccgagtggatgaaggacgagcaggcgctctccgtgtcgctctacgagacggtgaaccgcaagtgcatgtgggcgtgcgtagaagacgacgccgcgaccagagcctgcttctacgaaagcatggacgccgacacccgcctcgtcatgcaggccgtgatccgcaagtgccctgccgtcttcgacgacggcctcacgtcgctcgtcgacgtcggcggcgcccggggcacggccgctgcggccgtcgtcgccgccttcccgcacatccagaagtgcaccgtcatggacctcccccacatcgtcgccgaggctcccgccggcaccggactgtgcttccacggcggcgacatgtttgagcacatcccgtcggctgatgcagttatgctcaaggtatatatatatacaaactggtatcaaatggattggattctgcacgactgggatgacgacaagtgcgtcaagataatggagcgctgcaaggaagcgatcagtggcaaggaagggagaggagggaaggtgattataatagaaacagtgcttggatctcggccagacgacgacgcgacatgcaaggagacgtatgtcttggatctccaaatactgagcttcgtgaacggagccgagcgagaggagcacgagtggaggaggatcttcctagctgctggattccgtgactacaagatcacgcacactcgtggtatcccgtcgatcatcgaggtcttcccatga

SEQ ID NO: 118067 - DNA, 1455 bp, Zea Mays
gctgcaactctcggactgcagcattccatttccaggaaggccacggcggcgagaactcactcgggcgctgccggcgatgtacggcacttccgaccccacagctgcggagcgcacggctttccggcgtgcggagaaacagtacaagctttacaagacactcaacgtcaagggcaggtccaggtccaggtccaggtcaggatgcaggccgtctagcggagagggaggtggcgctgatctgtcagccgtagttgacttccatgctctgcttgccgccgacggggagcttcctgacgggattggtcggcgtgagtgccccggattcgaccgccccgtgttctgcttcttggaccggccagggttctatttcattcctggtgctttatcaactgaggaacaatgctgttggatcagggaaagcttgaaaacatttccacagccacctaataggactaatttgactgcaatatatggttcaatttcggacttactcatcgctgccgaaaatcaacagatattggttgaagcagaaaatcctgatatccaagaaagaaataaacagaataattgtggagggaaaacagaatccaaatacttcaaatttgtggactcagagagccagaaaggggaagagcataggtcaaacgcagcaactacccttgtgaggaagctccggtggagcacccttggtctgcaatttgattggtcaaagcggaactacgatgtatcacttccacacaacaagattccaggtgctctagctagtcttgccaaaaagatggctattccagctatgccttctggagaagaattcaagccagaagctgctatagtgaactattacggtccaagtgacatgcttggtggccatgttgatgacatggaagcagattggacaaaacctattgtaagcataagtttgggctgcaaatgcatctttcttttgggaggaaagactcgagatgaagttccaacagcaatgttcctgcgcagcggtgatatagttttgatggctggggaagcacgagaacgcttccatggtgtaccgcggattttcacagagagtgaccagcaagaaatccctgcactgatttcacaactatctagtggagatgacgtctttatcttggagtatatcaagaattctaggataaatatcaacatcagacaggtctactgaagatcagattggttgcagacttacacatgaaagtttggtgggaaatgctgctttcttgctgcagtcaggtccattatcgtagtatagctcgattaggggcatctggaatagcaactgaggacctgaagggttggaaggtgctacaatagtagtgaaactaaccatatgtgtaacttccattggatgagggtttttttttcaaaaaaaaattttgataacctggcaatgatctcaaaacttatgcaggattgctgatctcgggattagccatccctagc

SEQ ID NO: 118068 - DNA, 1524 bp, Zea Mays
gctgcaactctcggactgcagcattccatttccaggaaggccacggcggcgagaactcactcgggcgctgccggcgatgtacggcacttccgaccccacagctgcggagcgcacggctttccggcgtgcggagaaacagtacaagctttacaagacactcaacgtcaagggcaggtccaggtccaggtccaggtcaggatgcaggccgtctagcggagagggaggtggcgctgatctgtcagccgtagttgacttccatgctctgcttgccgccgacggggagcttcctgacgggattggtcggcgtgagtgccccggattcgaccgccccgtgttctgcttcttggaccggccagggttctatttcattcctggtgctttatcaactgaggaacaatgctgttggatcagggaaagcttgaaaacatttccacagccacctaataggactaatttgactgcaatatatggttcaatttcggacttactcatcgctgccgaaaatcaacagatattggttgaagcagaaaatcctgatatccaagaaagaaataaacagaataattgtggagggaaaacagaatccaaatacttcaaatttgtggactcagagagccagaaaggggaagagcataggtcaaacgcagcaactacccttgtgaggaagctccggtggagcacccttggtctgcaatttgattggtcaaagagaacgatccggtcgaagagcccgaggaattcgcaggagaagcccctgagcagcagtcgtttggtggagcggaactacgatgtatcacttccacacaacaagattccaggtgctctagctagtcttgccaaaaagatggctattccagctatgccttctggagaagaattcaagccagaagctgctatagtgaactattacggtccaagtgacatgcttggtggccatgttgatgacatggaagcagattggacaaaacctattgtaagcataagtttgggctgcaaatgcatctttcttttgggaggaaagactcgagatgaagttccaacagcaatgttcctgcgcagcggtgatatagttttgatggctggggaagcacgagaacgcttccatggtgtaccgcggattttcacagagagtgaccagcaagaaatccctgcactgatttcacaactatctagtggagatgacgtctttatcttggagtatatcaagaattctaggataaatatcaacatcagacaggtctactgaagatcagattggttgcagacttacacatgaaagtttggtgggaaatgctgctttcttgctgcagtcaggtccattatcgtagtatagctcgattaggggcatctggaatagcaactgaggacctgaagggttggaaggtgctacaatagtagtgaaactaaccatatgtgtaacttccattggatgagggtttttttttcaaaaaaaaattttgataacctggcaatgatctcaaaacttatgcaggattgctgatctcgggattagccatccctagc

SEQ ID NO: 118069 - DNA, 537 bp, Zea Mays
ttttcggtgttggaaatagcatatatatttaagtagttgcatcccaattcagatacgctcacaatcaaacaaacacacactcgaaacatttattaagtaggaggtatttgttgcatctatgatctatccatctcattcaaaccaaacccacatgcactccatccatgcatcagcgatggctgcgccctgcagaaaacgggtggcagagacgtttgagctgcaagatatttgcttccttgtactcgctcttctctctcgctgtaagcagatcgacgatgcattgcatgtcgaggacgggcacctccagcgctgctgcgcagcagggaccgtgcaaggatgggacgggatctccatgcttgaggtagtcttcacagctctgcaggatgtctttcttctccttgtcggtacacttcgcattaccgatagccggatgcgaaaaggctactgccaacacgatcacgacaagtgctacttgaccagcaggtagctagcatcttggaaataatagttctgtcgtcgtcgtcgagcagattgtgt

SEQ ID NO: 118070 - DNA, 562 bp, Zea Mays
acacatctatcggtcccccgcctctatcctttctctccgcacaaggtgcccctgccgcccagccgccatgaggaagccgacccgacgacgaggaacctcagcgaaaggcagctccggcggcggtatcagtaaggcggcaacactgccggcgaagcagatggtcttgtccggctaccgtggcaccgtagacgcgtttgactgcctccccgacgacctcgtgctcgccgtgttagccggcatcgcggcgcgcgcccggtgccccgccgacctcgctgcggcggcgctaccgtgagtagcataacaagtctctctgcatgcccgtcgcctttgcccctcgtctttgtgctgactgctgagtcttctgctgtacatgttggccttggccggcggcgcgcatcatgtatgcaggtgcaggaggttccgggacctcgcggcgcaccccgccgtgctgtcgcgtgcgtcggcggcggccgtcgccgtgcccgcgggaaggtggtcggatgcggcgcaccggttcttgcggcggtgcgcggcctccggcaacctccacgcctgctaccta

SEQ ID NO: 118071 - DNA, 1054 bp, Zea Mays
acacatctatcggtcccccgcctctatcctttctctccgcacaaggtgcccctgccgcccagccgccatgaggaagccgacccgacgacgaggaacctcagcgaaaggcagctccggcggcggtatcagtaaggcggcaacactgccggcgaagcagatggtcttgtccggctaccgtggcaccgtagacgcgtttgactgcctccccgacgacctcgtgctcgccgtgttagccggcatcgcggcgcgcgcccggtgccccgccgacctcgctgcggcggcgctaccgtgcaggaggttccgggacctcgcggcgcaccccgccgtgctgtcgcgtgcgtcggcggcggccgtcgccgtgcccgcgggaaggtggtcggatgcggcgcaccggttcttgcggcggtgcgcggcctccggcaacctccacgcctgctacctactcggcatggtgctgttctactgtatcgggggcagagcgacgggggcggcgctactggcgcgctcggcggcgggcgggcacgcggcggcgctgtacgcgctcgccgtggtgcagttcaacggcagtggcggcgacaaggcggacaaggacccccgcgcgggcgtggcgctgtgcgcgcgggccgcgtggctcggccacgtccctgcgctccgcgagctcggccactgcctccaggacggctacggcgcgcgccgcgccgccgcaaccggacgctacttcctgctccacgccgccgcacgcgagctcgtctcctcgcactgccgaaacggcgaagacgacgctgccagcaggttcatggtggagtggtgggcgctgccctccaagacaggagcacaaggcgacggcaacgacgccgacgccgacgcgcgcctgtgctcgcacccgcggtgcgggcggcgggagacgcggcggcacgagttccgtcagtgctcggcgtgcgggtccgccatctactgctcgcgcgcgtgccaggcgctccattggaagcgcgcgcaccgtagccagtgcgcggccgctgctagccggtggctcgccgccgggaacgcgcagtga

SEQ ID NO: 118072 - DNA, 296 bp, Zea Mays
gttggttaggtggtctgagtagcactcctcaggtcctaggttcgactccccgtgggagcgaatttcaggctgtggttaaaaaaatcccctcgtctgtcccacgccaaagcacaggtctaaggctcagccccgggtctaaggctcagccccggtcgtggtcgttctcacatgggcttcgatgccgctgtgtatgggtggggcaggggttcgggggttttcttgacctgtgtgagaaggtcttcttcttaatacaatacccgggggctgtcttaccccccgcaggtcaagttttttaa

SEQ ID NO: 118073 - DNA, 1985 bp, Zea Mays
catgtgggccctctctgcgaacctcgccagcactaatcgagccgccactggcagcatctgaagagaataaaagacagccccacacgcagctcgaatcccggcacgtgagcggcggaggcagggacggccatggcatgcagtgggtgcagctgcgaggcggcggtgggggcgatggcgtcggaggcgtacctggagggggcgccggtgcgggaggcgcgggagctggtggcggagctctgtcggcacttctacgcgcagggatgggtcacgggcaccggcggcagcatcaccgtcaaggtcaacgaccccaccgtgccgctcgccgatcgcctcatcgttatgtcaccctccggtgtgcagaaggagaggatggtagcagaggacatgtatgtgatggctgcagatgggaaagtgctttctgcgcctgtagcaaagccatggccaaacaagcctcctaagtgcacggactgtgctcctctgttcatgaaggcgtatctgatgagaggagctggggctgtcattcacagccatggaatagagacttgcatcgcaacaatgctcatccctggtgcaaaggagttcagagtgacccacatggaaatgatcaaaggaatcaaaggtcatggctaccatgatgaattggtcattcctattattgagaataccccttatgagtatgagctcactgactccctaagtgaggcgattgcagcatacccaaaggcaactgctgtgcttgtaaggaaccacggaatatatgtatggggggagtcttggatcaatgccaagacacaggctgaatgctaccattatcttttagatgcttgcatcaagctctatcagctaggtattgattggacaacccctgaacatggttcaataaacaatccaaggagaccgcacagcattttgagccctgaaatttgtaatggatgtcatgctgctgattcatcaaagtgtgttgtactagacattgaggggacaaccactccaatatcatttgtgactgatgtcatgttcccttatgctcgtgataatgtacgaaaacatctgacttctacatttgactttgaggaaactaaagaagacatcaaactattgcgcatccaaattgaagatgatctacaaaatggagttgctggggctgttccagttccacctgatgagggtggcaaagaagaggttatcaattcattggttgccaatgttgaatcaatgattaaagcagaccggaagatcacatcattgaaacaacttcagggtcatatttggaggattggatttcaaaagaaagagctacagggagttgtctttgaggatgttcctgtggcgctaaagaactggcatgctagtggcataaaggtctacatatactcaagtggaagtagagaagcacaaaggcttctatttggcaatacaacatacggtgacctgcgaaagttcctgtgtgggtattttgataccacaactggaaacaaaagagaaacaaggagttattttgagatctctcagtcactgggcgtggacagtccatctcaaatcttattcatcaccgatgtcttccaagaagccattgctgctaaaaacgctggttttgaggtgataatctccattcgcccgggaaatgccccacttcctgacaatcatggtttccgcactatcaaatcattcagcgagatctgaggaatctggtgatctggacatgtctagatatatgtaattcgcgagtgctttagcccgcgtgccagttcatgcagtagaagcattatagcaccgcagcatggcaaaacgatgtgacgtaacaataagttacatggcgaaataaaaactttggttcgttgtgtatttgtggctcatctacaattggatagtttgcatttccttgttcagcatctgtaggttgtggctgtgatcatttttaggtctcgtttgacattgcttaacttcacgtaaatcagttttttagcttcagctgttttggtgaa

SEQ ID NO: 118074 - DNA, 2201 bp, Zea Mays
ttttccgctcggcacctccccatctacggatctaccgagcatcgaaggcacacgatccaaatatgccttcggcgccgctcgtcgcggctgccatcggcacgcgcgtcagcctccgcccgaacctctcactcctcgccgatcgttgcgctacaccttgcgccctagcccgcgtgcacgccgccatgctcgtctccggccgcctcgccgaggacgctttcgccgcgtcccggctcctggacgcctacgtcgcgctctctccggatcccgctgccgccgcactcgcgctcctctcctccctgccctgcgcgcccaactccttcatgttcaacaccacgctccgcgtgctcgcttcctccccggacccggccaccgcattccccttcttctcccgcatccacggcactggagccctcgtgcccggccggcacacattccccttcctcctgaaggccgccgcgcgccttccgctctctctccccgtcaccgaacagctccacgcgctcgccgtccggcacggggtccacctcgatgcctacgtcgccaatggcctcgttcgggcctactccgtggcgggccttctccgccccgcgcgcagggtgttcgacgaggtgcccgagcggaacgcggccgtgtacactaccatggtctccgcgtacgcgcagaacgggaggcacgaggacgcgatggcggcgttcgtccagatggtccgcgtgggcttcgagccctgcggcgccgcgctggcctcggtgctgtctgcgtgcgcgcggtcgccgtcgggcgggctcgagatgggccgtcacgtgcacgacctaatggtggcacggggcgtggcagttggtcccatcctcggcacggcgctggtcgacatgtacgtcaaaaatggcgccattgaggaggccttggcagtgttcgacgggctgccagagcggcgcgtgccggctgcatggaaccctctcatctcggggctggcgaacctcgggcacggtgagcgtgcactcgactttttcagacggatgcagcgggagggtgtgccaccgaatgcgaccacactcgtcggggcactctcggcgtgctcccacccagggctgctggacgaggcccgccggctgttcaggtccatggagaaggacttcgggatcgttccaggaatccagcactacggatgcatggtggacctccttggccgtgctggcctcttatcggaagcggaggatatgatacgggagatgtcatgcaaggcggacaccgtgatatggggagcactcctgacggcctgcaagaaccacggtgtcattgagattgcggagcgggcagcggtggagatgctgaaactaaatcccagtaaccatggagtgtatgtggtactgtccaacttgtatgccgaggctggtaggtggcaggacgtggacaagctgaggaaggtgatgaagggagcgaggctctctaaaatccctggggcaagcgcagttaatggtgatgggtcactggagcaaccatagttatcgccaccacaaggaaatgtgctggtctagttccccgttgtgctcatgaaagtttatggcaatccccagaaaagatgatgcagataggagaatgatgggtggatcaaatgatcaatattagatatctgacaaatgcttagacaagtacagaacattgtaacacttctgagaatgtgcatatcaccatcattagcccaaattaagcatgataccagtacgtcatcactctactttgttgctaaaaaaaatcctcccagaaatcagacaaagggaggtactatacagttgaaccatcaactcagttctgttctccggcgaattcggtgttttggttactagcaaagcaggctgtatgacggcatgtcttcgatgcggatgacatcgtccagcataagctccctctccagctgggctcgtgtcgacttcagcacctcctggtagtggcaccacaagcatgagatcagtagaacatttgcactttgagttgaaacataggatgaaatgttcatattctcagaacgtacattgaagtccatgtaagatgcattcttgtccagccactgcttgtccatcacaacaaatgcgacacagtagagcagatcaaatgcccactcatcctctgtgtcaaggaaatcaagagcaagttgttggacactgatggcattctttcacatgccagagcaaaaaataaagaaaaaa

SEQ ID NO: 118075 - DNA, 684 bp, Zea Mays
ccacgcctgcgcggtcgcgtccgccatctctcctcgccccattctcatctctcccgcaatccccgcggtctctctcagatcagcgtccgcgacatcctccgccctagatcgccacgctcggctctctccgtgccgccatcaaggggttctcctaccaacaacggacgccatcaacggatggcctcgaatccgccccatcgcctcctaccaacaatggatgccatcaacggacgaggatctccgctgccacctcccgcgtgcgtccctgagattttaaattctgtgttaaacttctggtggatttctataattgaactatgaaggggtgcttccggcttatcttgcccttttgactgaaaaaggtgatgcaagaagtctacgttaggcttacctttgagcattcagttcctgtacttttgattgatatgcacagaaaattggaagattggtttatgcagtcaactggaatattcaaatgctgttgctatttgatctactcaactgaagtaaaaatgaaaattgtttagttttctgtgaaattttctagctgtattcaacaatgtgtttgcttgtttttttccacttacgccaccttatagatgcttttcagaactgaaacagaaagtaaagacccataaatagatacactttcatttactgagctgagggacaagctgcttgccc

SEQ ID NO: 118076 - DNA, 201 bp, Zea Mays
gttccaaaagacaaggacgaacttgccgaactccaggcccggctgaggaagcgtttccctatggatgcatataacaaggcacgtatggagctggaccccaacaaggtgctctcaaacgccaagttggagaagatgttcctagtgttggagcctgctcaccagacaaagtaatctctactactccttcccggcgaggaatgg

SEQ ID NO: 118077 - DNA, 309 bp, Zea Mays
atggctggtaataatggtgggaatatccccaaatttggtgagtggaagaccactgacggaggctccccttataccatgtacttcgacaatgccaggaaacgaaggaacaacagtggcataacagttgcccctgaggcatctccagttcgcacgaacactgtcccaggtggcaaggacggtgtcaagccactgaaccaacaggacggtgccaaccgctcacgaaaccaagccaaagtgagtatactcctaacgaccttttagatctgaggaggagcctggtgaggtttaccggtgtttggaaaaaaaaaa

SEQ ID NO: 118078 - DNA, 767 bp, Zea Mays
atggctggtaataatggtgggaatatccccaaatttggtgagtggaagaccactgacggaggctccccttataccatgtacttcgacaatgccaggaaacgaaggaacaacagtggcataacagttgcccctgaggcatctccagttcgcacgaacactgtcccaggtggcaaggacggtgtcaagccactgaaccaacaggacggtgccaaccgctcacgaaaccaagccaaagctgcacaaggtagctcagtgccaacatggggccagtggaacgaaagcaacagcggggcaggcgcacaccagtatacgcttttcttcgaccagctaagggaggaaaggaagagcgctcctccaacgcctagcgtcgagcaactacaaaaacctcatcagactcgacccactcatcgtgatctctatgaccatgtacccaagggatctaaatgctgtgggttgttttgagagaatagccagcccgccccaatacaacgcaaatgtgatgtgtaaatggcatagttgaatctcacattctccaaatacttcaatatttgatcaaggccttaacaggttgtcaagatggtatacatggatcttgagactttcaacgaccttagtaaaattttgaaagtggtgataatgaatgtgtattcgcatgtgccaaagaactgtttccgtggacaatgagtagtttcatcaatctatatcagcttgctagaaatttacatttgatgtaagcttttataatgatgaatgtgtcaagtgataaa

SEQ ID NO: 118079 - DNA, 533 bp, Zea Mays
cagactttcctaagtttggtaattttccattggatatgccatctaattgcccaacaatgaggacagggtcaaatgactgtggattttttgtaatgagttacatgaagttttatgatcacaatgcaggtgtcatatcttctttcaatcaaccagacaattcccgagacctacgtgctcatgcccttcatcaactcacattccatcgcatcaacaaggcgttgccacttccattagatatccagagatttatgtttgcgcgcaattaatgaactatgtcagaactaagcaatggtgtgggcaatgtaccgtactgtggtattttggccattattgtcagttaacaattttaggaagcttccttatatctgctgtttcagaacaattgtcatgctactttgtcttaggggtgttacccaggttctttctgtgaactttagttggctggatacttatggttatgctgcgaatatgtgaacatcagatgttttcacttctgtgtgctttaaatatgatctgtttttattttatgaaga

SEQ ID NO: 118080 - DNA, 2032 bp, Zea Mays
cccacgcgcaactccattactccgctcgcagccagatctgagtcctcactctgtctcttcctcagtcccggcatcagcgctcaaaccctaacacgccacgcgatcccgatgcgcaggggtctgggcagcgaggcatcgttgcgccggcggcgcgggccggcgcggctttgggtggcagtggcggcgctggtggtcggcaccgtgtgcctcttctcctcctcttcggtcggcctgttgggcgcctcttacagggtccaggatgttgatgtaaataagttgtggagaactgcagattcaaatggttggagagcatcttctgcaccacgcacctactggcctcccccaccaactgaatctgagagcaatggctacttgcgcgtccggtgcaatggtggcttgaaccaacaacgtagtgcaatatgtaatgctgttgttgctgcacggatcatgaatgctacactggtgctgccagaattagacacaaattcattctggcatgatgaaagtggctttgtaggtatttatgatgttccccacttcatcaagacactgaaatatgacgtccgaattgttatgagcattcctgaaatcactacaaatggaaagaccaagaagctcaaaggccagcagcttcggccaccaagagatgcaccggtatcttggtatgcaactgatgctttggagacgatgaagaagtatggagctatatatttaagtccattttcacaccgtttggcagaagatattgataatccagagctccagagattgagatgcagagtgaattaccatgcactacgattcaagccaaatatcatgaaaacaagcagtgagatagtgaacaagctccgctcagaaggccatttcatgtcaattcatcttcgatttgagttggatatgcttgcatttgcagggtgctttgacatattcaaacctcaagagcaaaaaattctgtggaagtacagggaagaacattttgcagaaaaggaacttatccccatgaaaatcaggctcaaaggaaagtgccctttaactccagaagaggtaggttttattctacgtgccatgggatttgacaatagaacacgcatttaccttgcctctggcgagctctttggagggaaacgtttcatgaagccattcaagaccatgtttccacgcttagagaaccacagcacagttggacctggaaagctggaagagaatacccaagggctagcaggatcagcagttgactacatggtttgcctcctgtctgacattttcatgcccacatatgatggcccaagcaactttgcaaacaacctcatgggccaccgtatgtactacggtttccggaccacaatcacgccgaacagaaaggctcttgccccgatactcatcgacaggatggaaggccgccacattggctttgagagaatcaggagggtgatgtccaacacccattttggtgccccccacaagcgcgtccatccagagtctttctacacgaactcatggcctgagtgcttctgccagacggatgccaagaaccatgcagaccggtgtccccctgataacataaatgacgttctggaaagccagttccagagcgaagaagaaatggaagaagcaagagcctctaatcagactgacccatccagccaaatagaagagctgacgatttaactgatcaactagggattactgctcggaagcattttgaacacttggaatggtcatcagagaaatccagatacaactatattcaaggaatgtattaattgatggctcaaactggagcggttgacatgctgaggtgtggtatctggtggtattcagggagagcattgaaccagattttgaataggtctggtcatatatggttttgaggagaaaacaatatgtatgtcaatagttttcctcattgaagagtgaagttgtgcgggttgtgtaggtggcagtgacaaaagtgagaaacctttgcgcaatatggtaccatccggtgtataaaggccccggttaggctggtgccagtgcaccctttgtcttt

SEQ ID NO: 118081 - DNA, 1987 bp, Zea Mays
cccacgcgcaactccattactccgctcgcagccagatctgagtcctcactctgtctcttcctcagtcccggcatcagcgctcaaaccctaacacgccacgcgatcccgatgcgcaggggtctgggcagcgaggcatcgttgcgccggcggcgcgggccggcgcggctttgggtggcagtggcggcgctggtggtcggcaccgtgtgcctcttctcctcctcttcggtcggcctgttgggcgcctcttacagggtccagattcaaatggttggagagcatcttctgcaccacgcacctactggcctcccccaccaactgaatctgagagcaatggctacttgcgcgtccggtgcaatggtggcttgaaccaacaacgtagtgcaatatgtaatgctgttgttgctgcacggatcatgaatgctacactggtgctgccagaattagacacaaattcattctggcatgatgaaaggtatttatgatgttccccacttcatcaagacactgaaatatgacgtccgaattgttatgagcattcctgaaatcactacaaatggaaagaccaagaagctcaaaggccagcagcttcggccaccaagagatgcaccggtatcttggtatgcaactgatgctttggagacgatgaagaagtatggagctatatatttaagtccattttcacaccgtttggcagaagatattgataatccagagctccagagattgagatgcagagtgaattaccatgcactacgattcaagccaaatatcatgaaaacaagcagtgagatagtgaacaagctccgctcagaaggccatttcatgtcaattcatcttcgatttgagttggatatgcttgcatttgcagggtgctttgacatattcaaacctcaagagcaaaaaattctgtggaagtacagggaagaacattttgcagaaaaggaacttatccccatgaaaatcaggctcaaaggaaagtgccctttaactccagaagaggtaggttttattctacgtgccatgggatttgacaatagaacacgcatttaccttgcctctggcgagctctttggagggaaacgtttcatgaagccattcaagaccatgtttccacgcttagagaaccacagcacagttggacctggaaagctggaagagaatacccaagggctagcaggatcagcagttgactacatggtttgcctcctgtctgacattttcatgcccacatatgatggcccaagcaactttgcaaacaacctcatgggccaccgtatgtactacggtttccggaccacaatcacgccgaacagaaaggctcttgccccgatactcatcgacaggatggaaggccgccacattggctttgagagaatcaggagggtgatgtccaacacccattttggtgccccccacaagcgcgtccatccagagtctttctacacgaactcatggcctgagtgcttctgccagacggatgccaagaaccatgcagaccggtgtccccctgataacataaatgacgttctggaaagccagttccagagcgaagaagaaatggaagaagcaagagcctctaatcagactgacccatccagccaaatagaagagctgacgatttaactgatcaactagggattactgctcggaagcattttgaacacttggaatggtcatcagagaaatccagatacaactatattcaaggaatgtattaattgatggctcaaactggagcggttgacatgctgaggtgtggtatctggtggtattcagggagagcattgaaccagattttgaataggtctggtcatatatggttttgaggagaaaacaatatgtatgtcaatagttttcctcattgaagagtgaagttgtgcgggttgtgtaggtggcagtgacaaaagtgagaaacctttgcgcaatatggtaccatccggtgtataaaggccccggttaggctggtgccagtgcaccctttgtcttt

SEQ ID NO: 118082 - DNA, 2102 bp, Zea Mays
cctcactctgtctcttcctcagtcccggcatcagcgctcaaaccctaacacgccacgcgatcccgatgcgcaggggtctgggcagcgaggcatcgttgcgccggcggcgcgggccggcgcggctttgggtggcagtggcggcgctggtggtcggcaccgtgtgcctcttctcctcctcttcggtcggcctgttgggcgcctcttacagggtccaggatgttgatgtaaataagttgtggagaactgcagattcaaatggttggagagcatcttctgcaccacgcacctactggcctcccccaccaactgaatctgagagcaatggctacttgcgcgtccggtgcaatggtggcttgaaccaacaacgtagtgcagtatgattaagacaagaaacttatctctaaggcggcatgattcatcgtgcaatttttatattcatggtaacattgctaaggcatttgagatcactgctgttttgattctgtagatatgtaatgctgttgttgctgcacggatcatgaatgctacactggtgctgccagaattagacacaaattcattctggcatgatgaaagtggctttgtaggtatttatgatgttccccacttcatcaagacactgaaatatgacgtccgaattgttatgagcattcctgaaatcactacaaatggaaagaccaagaagctcaaaggccagcagcttcggccaccaagagatgcaccggtatcttggtatgcaactgatgctttggagacgatgaagaagtatggagctatatatttaagtccattttcacaccgtttggcagaagatattgataatccagagctccagagattgagatgcagagtgaattaccatgcactacgattcaagccaaatatcatgaaaacaagcagtgagatagtgaacaagctccgctcagaaggccatttcatgtcaattcatcttcgatttgagttggatatgcttgcatttgcagggtgctttgacatattcaaacctcaagagcaaaaaattctgtggaagtacagggaagaacattttgcagaaaaggaacttatccccatgaaaatcaggctcaaaggaaagtgccctttaactccagaagaggtaggttttattctacgtgccatgggatttgacaatagaacacgcatttaccttgcctctggcgagctctttggagggaaacgtttcatgaagccattcaagaccatgtttccacgcttagagaaccacagcacagttggacctggaaagctggaagagaatacccaagggctagcaggatcagcagttgactacatggtttgcctcctgtctgacattttcatgcccacatatgatggcccaagcaactttgcaaacaacctcatgggccaccgtatgtactacggtttccggaccacaatcacgccgaacagaaaggctcttgccccgatactcatcgacaggatggaaggccgccacattggctttgagagaatcaggagggtgatgtccaacacccattttggtgccccccacaagcgcgtccatccagagtctttctacacgaactcatggcctgagtgcttctgccagacggatgccaagaaccatgcagaccggtgtccccctgataacataaatgacgttctggaaagccagttccagagcgaagaagaaatggaagaagcaagagcctctaatcagactgacccatccagccaaatagaagagctgacgatttaactgatcaactagggattactgctcggaagcattttgaacacttggaatggtcatcagagaaatccagatacaactatattcaaggaatgtattaattgatggctcaaactggagcggttgacatgctgaggtgtggtatctggtggtattcagggagagcattgaaccagattttgaataggtctggtcatatatggttttgaggagaaaacaatatgtatgtcaatagttttcctcattgaagagtgaagttgtgcgggttgtgtaggtggcagtgacaaaagtgagaaacctttgcgcaatatggtaccatccggtgtataaaggccccggttaggctggtgccagtgcaccctttgtcttt

SEQ ID NO: 118083 - DNA, 2229 bp, Zea Mays
cctcactctgtctcttcctcagtcccggcatcagcgctcaaaccctaacacgccacgcgatcccgatgcgcaggggtctgggcagcgaggcatcgttgcgccggcggcgcgggccggcgcggctttgggtggcagtggcggcgctggtggtcggcaccgtgtgcctcttctcctcctcttcggtcggcctgttgggcgcctcttacagggtccaggatgttgatgtaaataagttgtggagaactgcagattcaaatggttggagagcatcttctgcaccacgcacctactggcctcccccaccaactgaatctgagagcaatggctacttgcgcgtccggtgcaatggtggcttgaaccaacaacatatgtaatgctgttgttgctgcacggatcatgaatgctacactggtgctgccagaattagacacaaattcattctggcatgatgaaagtggctttgtaggtatttatgatgttccccacttcatcaagacactgaaatatgacgtccgaattgttatgagcattcctgaaatcactacaaatggaaagaccaagaagctcaaaggccagcagcttcggccaccaagagatgcaccggtatcttggtatgcaactgatgctttggagacgatgaagaagtatggagctatatatttaagtccattttcacaccgtttggcagaagatattgataatccagagctccagagattgagatgcagagtgaattaccatgcactacgattcaagccaaatatcatgaaaacaagcagtgagatagtgaacaagctccgctcagaaggccatttcatgtcaattcatcttcgatttgagttggatatgcttgcatttgcagggtgctttgacatattcaaacctcaagagcaaaaaattctgtggaagtacagggaagaacattttgcagaaaaggaacttatccccatgaaaatcaggctcaaaggaaagtgccctttaactccagaagaggtaggttttattctacgtgccatgggatttgacaatagaacacgcatttaccttgcctctggcgagctctttggagggaaacgtttcatgaagccattcaagaccatgtttccacgcttagagaaccacagcacagttggacctggaaagctggaagagaatacccaagggctagcaggatcagcagttgactacatggtttgcctcctgtctgacattttcatgcccacatatgatggcccaagcaactttgcaaacaacctcatgggccaccgtatgtactacggtttccggaccacaatcacgccgaacagaaaggctcttgccccgatactcatcgacaggatggaaggccgccacattggctttgagagaatcaggagggtgatgtccaacacccattttggtgccccccacaagcgcgtccatccagagtctttctacacgaactcatggcctgagtgcttctgccagacggatgccaagaaccatgcagaccggtgtccccctgataacataaatgacgttctggaaagccagttccagagcgaagaagaaatggaagaagcaagagcctctaatcagactgacccatccagccaaatagaagagctgacgatttaactgatcaactagggattactgctcggaagcattttgaacacttggaatggtcatcagagaaatccagatacaactatattcaaggaatgtattaattgatggctcaaactggagcggttgacatgctgaggtgtggtatctggtggtattcagggagagcattgaaccagattttgaataggtctggtcatatatggttttgaggagaaaacaatatgtatgtcaatagttttcctcattgaagagtgaagttgtgcgggttgtgtaggtggcagtgacaaaagtgagaaacctttgcgcaatatggtaccatccggtgtataaaggccccggttaggctggtgccagtgcaccctttgtctttcgtccctggcatgtcagctattgactccactcttgtccttactgttttagtgcacaactgcacaactcgcagcgggatatagcttcggcatatagtcacattaacttttctatttcagaattaagtaatttacgtgaatttattttaatgctcagaaaccacataacatgatatttttattaaagtaaaaattacaaagggtatgataattaaaataaaactatatgctaattaaaaaataacataaa

SEQ ID NO: 118084 - DNA, 493 bp, Zea Mays
ctagaatttaaaaaggaagataaaatgctcacattatggcagcccctttaaaccatctctcatgaattaaaattaagcagaagaatgaataaaataagtagctgaattacctcacattgataacatcatcaacttttctagtcagccagtggcacaaagaagaggattcccacaatcgcaacaaccaaaaaactaaaaaacaagagacgcaccttcaatttcaacagtggtctcagcaatgggctacaagcacaaatatgtactaaccagcatgcaagctaacagccaaagaaataggagatcaaatctgtgcggaacgcaattaaatgtaccagtgttgcacctgttcatgataatgaattggaacatcctttcgattacgcatgacacaacatcctttcgatcaaattagtgctaaggaatatgtgttgtttagcatatgcaaaggccaaaggatacatatatactcactgaattttccaaggtagagatc

SEQ ID NO: 118085 - DNA, 277 bp, Zea Mays
tatgtaatgaccttttgttggttcggtgttaatgtgtatagtatcttcaaacagaatctgcaatctgagaatctgtgtatccaaacacctagattctaacgaacagcttttctgcacagctggcgaaccaaacacctaaattctaaccaccagcttttcccaacagccagcttttctccacagccagctattcagaaaagctattcagaaaaaagccgaacccaaacacgccctatgtgtagttaatgctcattggaaagggtgatgacagatggaa

SEQ ID NO: 118086 - DNA, 1505 bp, Zea Mays
gtcagttcatcgccgccgttcaagctctctctatataaaccccgccatggtgcccttagactgcacacaaaagcagtgcatgcactactagctctagcttcgcactactagctctagcttcgccattgcattcgcttactggagtacgtctggtacttgcacaactggctatcatggcgccccacattgtcgtcaacaaaaccgtgatcacattcacagcggtggccctgacgattcttgctgtgacaaccatgatggccgaggcccgagacctgtcatccacctccaccggtggctatggcgaggaagccatgaaagtgaggcatcagcagtggatggcggagcatggccgcacctacagggacgaggctgagaaggcgcaccggttccaggtattcaaggcgaacgccgattttgttgacgcgtccaatgccgcaggtgacgacaagaagagctatcggctggagctcaacgagttcgccgacatgaccaacgacgagttcatggccatgtacactggcttgagaccagtcccggcaggggcaaagaagatggccggtttcaagtacgggaacgtgactctctcagacgccgacgacgaccagcagacggttgactggaggcagaaaggcgcggtcaccggtatcaagaaccagggccagtgtggttgttgctgggccttcgctgcggtggcggccgtggagggcatccaccagatcacgacgggcaacttggtgtcgctatcggagcagcaggtgctggactgcgacaccgacgggaacaacggctgcaacggcggctacatcgacaacgccttccaatacatcgtcggcaacggcggcctcggcaccgaggatgcctacccgtacaccgccgcgcaggccatgtgccagtccgtgcagccggtggccgccatcagcggctaccaggacgtgccgagcggcgacgaggcagcgctcgccgcggccgtcgccaaccagccggtgtcggttgccatcgacgcacataacttccagctctacggtggcggggtgatgaccgcggccagctgcagcacgccgccgaacctgaaccacgccgtcacggcggtaggctacggcacggcggaggatgggaccccgtactggctgctcaagaaccagtggggccagaactggggagagggaggatacctcaggctcgagagaggcgcaaacgcctgtggtgtcgcccagcaagcctcctacccggtcgcatgatgaataaagcatatattctacatatacacgaaggcatgcataaaaatggctagtaaggaataaagcatgcaaacacattgacagtacatacatacatagcttaaaattgaatcacaattgtcatgtacaacactccagatatcatttatttctatttggccttcttttcaaagatcgatattctatatatacatatatgtaagggaacaagtttttatagcataataagtccttcgcacctcgccaattgtctatcctctctctctc

SEQ ID NO: 118087 - DNA, 1395 bp, Zea Mays
aaaccacaatcgatgcaaccctaaaattttaagcaaattattcgcctcgtctcctcgcaaacctctcatctgctcgccgtttccctctcttctttgcgacggcgaaaatggtggagaacggcgtcgagcagcccctgttacagggcggcggccctcctaataacgccgggcacgcaaagccgcctccgggagctaggccgccaaggaggttccgacgctgcaggacggcgccttccaccgacgcggcgcaagaatctcccccgcggagccagcaggagccgagcctgcagcgcggcaccacccagctggcgccgcccaaggagcttctgcggggcgcgcggccgagcttcaggctcgtcggcgtcctgctgctggcgtacctcctggccgggaccgtagcgttctacctcgccatggaccacatgtccggcgaccgcaccgggagccgcgtggtggacgcgctctacttctccgtggtcaccatgacgaccgtcgggtacggcgacctcgtcccgtccagcgacgccgccaagctgctcgcctgcgccttcgccttcgccggcgtggccctcgtcggcaccttcctcagcaaggccgccgactacctcgttgagaagcaggaggcgctgctcttccgcgcgctccacgcccgcaaccgcaaggcgctgcgcgtcgtggaggcaaacaaggtccgctacaagctgtacaccgccgcggcgctcctggctgcggcgctcgcctccggcacagcgttcatggtcgaggtggaagggatgcgccccgtggacgccttctactgcgtgtgcgccacggtgaccacgctcgggtacggcgaccagagcttctcgtccgtggccgggcgcgcgttcgcgacggcctggatcaccacgagcacggtcgtggtggcactcttcttcctgtacgctgcggagctgggcgcggagcggcgccagcgggcgctggcgcggtgggtgctcaggcgccgaaccacctgcacggacctcgaggcggcggacatggacggggaccaccgggtcggtgccgcggactttgtgctgtacaagctcaaggagctggggaagattagccaggaagagatcgcggagttcttggaggagttcgacgagctcgacgccgacaactccggcaccctctctccgcacgacctcatcgtggcacagcccggttagcgcggcaatcactggcagccagcaaggcagtaggcaggtggagtgagccagcgtgcagcgtctagactattcctgaccagcgtgccaaagacgtacagtatagagttgtgttggtaactttggagctgggagcctgggagtgggacacgctgaaagctgcctgtactgccaattctgtagcccagtattgttttcaatattcttt

SEQ ID NO: 118088 - DNA, 170 bp, Zea Mays
tttgatttgattttttatggtaattacgtacaatataaattaagaaattgccttttcaatgtgtatggaaaaatatgcatgcagaaactaatatacgaactccgtgttcaagcataaatcatacagtttttagcgtaaatagtccatgtggtaggtataaaacacaataa

SEQ ID NO: 118089 - DNA, 401 bp, Zea Mays
cggagggtagaagtaggacgaaacagaaaaccctaggaagagaacgcctccgatcgtcgctacagttcgctgcgagatcttggacgccagcatgctccctcctaccacggcgagagatgtgcacaccgtgtgccccagtgacgctcccactgcgactccgattgcgttcttgtgtgttgccagctgcattggtgatagcagaagtaaagaaactttgtaaggtacaggttttttgcttgcgaatgtgcaggttcctatagtatcacagacctcaatgaaaaacgatacatcaaaggatttcagtaagtggagaagtatcctaccgcgattgtcgctatttggctccggtcgccccattcagctaagaaggttaagatgaaagcctgcaaccaggataaaga

SEQ ID NO: 118090 - DNA, 2168 bp, Zea Mays
gcgcggccgcgcggtgaaaagaagcgggccgcgaggggaggaggaacaaaacgactggctgtccgaacggggacgtctggttcctctcattccccttccacctcgctctctctctctcctcccactgctcgccctctctctcttacgcgcgcgtgacaacctccctccctccactgcgcgcggcgcgggagcagcagcggcagcacccaccgactgatcgccggtgggcggggcgggggcgatctgatgcgggcgcggcggtgatggcagcgccatccggcggtgggggcggcggtgcgggggagggctcctcctcggccgccgcagctgcgacgatcggggtccacggggtggaccaagttgcagaggcgatgtggcagatgaatttggaagaagccatggaactggggccatacccagagcgtgttggtgagccagactgtagctattacatgaggactggcatgtgcaggtttgggatgacctgtaaatttaatcacccagcagaccgaaagctggctgttgctgctgcaagaatgaagggagaatatcctcaaagaattgggcagcctgaatgtcaatactatctgaagactggcacgtgcaagtttggagcaacttgcaagtttcatcatccccgagaaaaggctgcaatggcaactcgagttcagttgaatgaactgggctacccactccgcccgaatgaaaaagagtgtgcttattatttaagaacagggcagtgcaagtttggaagcacatgtaagtttcaccattcacaaccatccaccatgatggttgctgtacgtggctctgtttattcacctggacagtctgcaacttctcctggccagcatgcttaccaaggggctgtaacaagctggcccttgtcgagatctgcttctttcattgcaagtccaaggtggccaggtcattcaagttatgcacaagtgattgttcctcccgggcttgttcaggtcccagggtggagtccttatactgcgcaaattggttcttcatcctcggaggaccaacaacggacacctggagctgctcaatactatactggctcacgccaaagtggtactagtataggcgatcaaggaatgttttcatcctaccaagcaggttctgttcctgttggactttatgcagtacagagggagaatttatttccagagagacctgaccaacctgaatgtcagttctatatgaagaccggagactgtaagtttggtgctgtatgcaagttccatcatcccagggagcgaataattcctactcccaattgtgcactgagtccattaggcctacctttgcgcccgggagagccaatatgcagtttctacaatcgctacggcatgtgcaagttcggtccaaattgcaaattcgatcacccaatgggaaatgccatgtacggccaggctccatcgccagctagcgaggccccagctcctcggcgcatgctggcacatgtaccgccgtcgcacccagaagcatcgcctgatggtggttccggaaggtctaggaggattgcccactctgattcccagcaaataccctctggtgaaaggagcgctgagagagaggcgtcctaggccatcctcggtgtcttcgttccccattcttgactggagtaaccatctgcaaccaacaacattcgaggatccgaagctgtacaggtcttttgccccacctctgagctttacataccggagcttgcttcaacgtgtattgcattcaggcaggaaaaagttcttgcctgttcgggatgctcatttgctcccccactgaaacgggaacaaacctaccttatttaaaacatatgtatggatggaacctactcacctctggacattcaaacccattcgagtcatgtgcactggtcccggtgctgtagttatagagctgtctttgcatggacaaagctgttgcgaaactgactggggatgcgcaagcataacctcttttgttaattattgtctcgttttttttttctcggcatttatctctttttcataagggcagccccgcactctgaaagtgtgcgttttgaagattgggaaaataataggttgccatcgtatgctctgtattacccaccatgctttaaactcagttatttgagagtcgtttttatcttggtggtcctgacagggactgtttatttt

SEQ ID NO: 118091 - DNA, 2162 bp, Zea Mays
gcgcggccgcgcggtgaaaagaagcgggccgcgaggggaggaggaacaaaacgactggctgtccgaacggggacgtctggttcctctcattccccttccacctcgctctctctctctcctcccactgctcgccctctctctcttacgcgcgcgtgacaacctccctccctccactgcgcgcggcgcgggagcagcagcggcagcacccaccgactgatcgccggtgggcggggcgggggcgatctgatgcgggcgcggcggtgatggcagcgccatccggcggtgggggcggcggtgcgggggagggctcctcctcggccgccgcagctgcgacgatcggggtccacggggtggaccaagaggcgatgtggcagatgaatttggaagaagccatggaactggggccatacccagagcgtgttggtgagccagactgtagctattacatgaggactggcatgtgcaggtttgggatgacctgtaaatttaatcacccagcagaccgaaagctggctgttgctgctgcaagaatgaagggagaatatcctcaaagaattgggcagcctgaatgtcaatactatctgaagactggcacgtgcaagtttggagcaacttgcaagtttcatcatccccgagaaaaggctgcaatggcaactcgagttcagttgaatgaactgggctacccactccgcccgaatgaaaaagagtgtgcttattatttaagaacagggcagtgcaagtttggaagcacatgtaagtttcaccattcacaaccatccaccatgatggttgctgtacgtggctctgtttattcacctggacagtctgcaacttctcctggccagcatgcttaccaaggggctgtaacaagctggcccttgtcgagatctgcttctttcattgcaagtccaaggtggccaggtcattcaagttatgcacaagtgattgttcctcccgggcttgttcaggtcccagggtggagtccttatactgcgcaaattggttcttcatcctcggaggaccaacaacggacacctggagctgctcaatactatactggctcacgccaaagtggtactagtataggcgatcaaggaatgttttcatcctaccaagcaggttctgttcctgttggactttatgcagtacagagggagaatttatttccagagagacctgaccaacctgaatgtcagttctatatgaagaccggagactgtaagtttggtgctgtatgcaagttccatcatcccagggagcgaataattcctactcccaattgtgcactgagtccattaggcctacctttgcgcccgggagagccaatatgcagtttctacaatcgctacggcatgtgcaagttcggtccaaattgcaaattcgatcacccaatgggaaatgccatgtacggccaggctccatcgccagctagcgaggccccagctcctcggcgcatgctggcacatgtaccgccgtcgcacccagaagcatcgcctgatggtggttccggaaggtctaggaggattgcccactctgattcccagcaaataccctctggtgaaaggagcgctgagagagaggcgtcctaggccatcctcggtgtcttcgttccccattcttgactggagtaaccatctgcaaccaacaacattcgaggatccgaagctgtacaggtcttttgccccacctctgagctttacataccggagcttgcttcaacgtgtattgcattcaggcaggaaaaagttcttgcctgttcgggatgctcatttgctcccccactgaaacgggaacaaacctaccttatttaaaacatatgtatggatggaacctactcacctctggacattcaaacccattcgagtcatgtgcactggtcccggtgctgtagttatagagctgtctttgcatggacaaagctgttgcgaaactgactggggatgcgcaagcataacctcttttgttaattattgtctcgttttttttttctcggcatttatctctttttcataagggcagccccgcactctgaaagtgtgcgttttgaagattgggaaaataataggttgccatcgtatgctctgtattacccaccatgctttaaactcagttatttgagagtcgtttttatcttggtggtcctgacagggactgtttatttt

SEQ ID NO: 118092 - DNA, 1855 bp, Zea Mays
aactgatttatggatatttacattctggaagacactagagaatatagttgcagaggcgatgtggcagatgaatttggaagaagccatggaactggggccatacccagagcgtgttggtgagccagactgtagctattacatgaggactggcatgtgcaggtttgggatgacctgtaaatttaatcacccagcagaccgaaagctggctgttgctgctgcaagaatgaagggagaatatcctcaaagaattgggcagcctgaatgtcaatactatctgaagactggcacgtgcaagtttggagcaacttgcaagtttcatcatccccgagaaaaggctgcaatggcaactcgagttcagttgaatgaactgggctacccactccgcccgaatgaaaaagagtgtgcttattatttaagaacagggcagtgcaagtttggaagcacatgtaagtttcaccattcacaaccatccaccatgatggttgctgtacgtggctctgtttattcacctggacagtctgcaacttctcctggccagcatgcttaccaaggggctgtaacaagctggcccttgtcgagatctgcttctttcattgcaagtccaaggtggccaggtcattcaagttatgcacaagtgattgttcctcccgggcttgttcaggtcccagggtggagtccttatactgcgcaaattggttcttcatcctcggaggaccaacaacggacacctggagctgctcaatactatactggctcacgccaaagtggtactagtataggcgatcaaggaatgttttcatcctaccaagcaggttctgttcctgttggactttatgcagtacagagggagaatttatttccagagagacctgaccaacctgaatgtcagttctatatgaagaccggagactgtaagtttggtgctgtatgcaagttccatcatcccagggagcgaataattcctactcccaattgtgcactgagtccattaggcctacctttgcgcccgggagagccaatatgcagtttctacaatcgctacggcatgtgcaagttcggtccaaattgcaaattcgatcacccaatgggaaatgccatgtacggccaggctccatcgccagctagcgaggccccagctcctcggcgcatgctggcacatgtaccgccgtcgcacccagaagcatcgcctgatggtggttccggaaggtctaggaggattgcccactctgattcccagcaaataccctctggtgaaaggagcgctgagagagaggcgtcctaggccatcctcggtgtcttcgttccccattcttgactggagtaaccatctgcaaccaacaacattcgaggatccgaagctgtacaggtcttttgccccacctctgagctttacataccggagcttgcttcaacgtgtattgcattcaggcaggaaaaagttcttgcctgttcgggatgctcatttgctcccccactgaaacgggaacaaacctaccttatttaaaacatatgtatggatggaacctactcacctctggacattcaaacccattcgagtcatgtgcactggtcccggtgctgtagttatagagctgtctttgcatggacaaagctgttgcgaaactgactggggatgcgcaagcataacctcttttgttaattattgtctcgttttttttttctcggcatttatctctttttcataagggcagccccgcactctgaaagtgtgcgttttgaagattgggaaaataataggttgccatcgtatgctctgtattacccaccatgctttaaactcagttatttgagagtcgtttttatcttggtggtcctgacagggactgtttatttt

SEQ ID NO: 118093 - DNA, 575 bp, Zea Mays
tgagcatataatttcttttggaaagtgtttggttacattattggtgaatttgcatttttattgttttcatacccccttttagtactatctgaagactggcacgtgcaagtttggagcaacttgcaagtttcatcatccccgagaaaaggctgcaatggcaactcgagttcagttgaatgaactgggctacccactccgcccggtttgttctgaatttctattacaattcacaatgtttcatgatatgaatgcatactattgtgccgcctttctatgcaacatttttgcaagatttgtgttgtttacttgaattttattactgcagaatgaaaaagagtgtgcttattatttaagaacagggcagtgcaagtttggaagcacatgtaagtttcaccattcacaaccatccaccatgatggttgctgtacgtggctctgtttattcacctggacagtctgcaacttctcctggccagcatgcttaccaaggggctgtaacaagctggcccttgtcgagatctgcttctttcattgcaagtccaaggtggccaggtcattcaagttatgcacaagtga

SEQ ID NO: 118094 - DNA, 240 bp, Zea Mays
atggggatagaggagcagaggaagcgccggccaccagcaaagaaggaagggggcatcggccatggcgacgagcgagctgaagcagagagcggggcgctgctccgcgcttgctgcaacaactgctccaagcgatgggtggagagcgatgtaggaatacaagacagtggaggcgtttgcttgggagccgagcacgacctgggaagtgagcgaggggcagagggcgccgacgagcttcgctga

SEQ ID NO: 118095 - DNA, 1213 bp, Zea Mays
caactttgcacagtctgcgcaccctgccacgacgagatggcttcctgttcctcatcgccacggccacccaccatccctctcctcctcctcctcctcttcctcctcctccacttctcctccgtcctcgccgcaccagctcctccagccttgtcacaacaggctggtaccggcggcggcaatgcgacggattcggcggcggcgtggacgccgcggctgaggaagacgttcttggacggcggcatggagcgctggcgcgggcggcggctggtggggcggttccaggtgtgcgcggtgtgcacctgctgcgggggcccgcacgggatgtgcatcccggcgccctgctgctacgccatcaactgcaacatccccaaccgccccttcggcgtctgctccttcaccccgcgcacctgcaactgcctcacctgccacctctagctagcgctcgccgccctggatccatggttttgcttgtctagctggtcgtgtcgtttcgttgtcgatggaagggatattcgtgattcgttcatttgggggacagattcgacgaagagttcatcctgccctaaaactgcttgtttgtagccatgactcacagttagtagcagtatggtgatggttggattaatccagcttttttttttctgcacttgcttggtgctcttcaacttcaactgtagatattatcaagtcctggcatctttttttttgtggccccagggtagtagactagtagtcatgaacttggtttcacggttcttgattctgcacatggcaatgccagttttccacaattttccagcgcggtttaataaaattattcaggtattttaattagcattattgttgaggtttttaatccaagggtaaaaaaactgccagatcaatcaacatggatggaaatggcccactatcccaccagcagcctattcaagtcttgatgaagtgcactaatgcgtctttaatgacaaacaaaaacaaatgaaaagctagcgctaaatcgttaaaaaaacaaatagaacccgatctgtaatggttgcataaagtgccctcttctcttgttgtccttaaattcttgtacctacaagcccgatctcttcttcaattaaagtagccaatggagtggttggccattgccagttttttttttttacaaacttgttttcgtctcaagcccttctctctctctctctcttgagtgttgacaatacgttca

SEQ ID NO: 118096 - DNA, 399 bp, Zea Mays
atggcttcctgttcctcatcgccacggccacccaccatccctctcctcctcctcctcctcttcctcctcctccacttctcctccgtcctcgccgcaccagctcctccagccttgtcacaacaggctggtaccggcggcggcaatgcgacggattcggcggcggcgtggacgccgcggctgaggaagacgttcttggacggcggcatggagcgctggcgcgggcggcggctggtggggcggttccaggtgtgcgcggtgtgcacctgctgcgggggcccgcacgggatgtgcatcccggcgccctgctgctacgccatcaactgcaacatccccaaccgccccttcggcgtctgctccttcaccccgcgcacctgcaactgcctcacctgccacctctag

SEQ ID NO: 118097 - DNA, 787 bp, Zea Mays
aatccgaacggcctagcccactccaacgcgcactcttctaggcccatctcacggtctcacctcctatgttccttagcgatcgcaacaaaaccgcacgccctctctctagcccgcgcagtcttcagcacgcacaccaatcgcccacaagcgctcgcaggagaggtcgaaaccctagcttttgcggcggcggcgagagaagatgatctacgacgtgaactcccccctcttccgttccttcctcagccagaagggcggcgccgacaagaggaaaatggaggagcataaaccaaaggagcagaggcccaaggctaacgagaacaagcctgtgatgaacgaatgaatatctccagaagctttgttcaatgtgcaaccaagtccgatgtccgtttgctctggtcagcttaaaaccaacgcttccaataatcctatattggtgacttagtttccccttatagtgttatttgctcggcttgaacatggcaacggaaatgaaacttgaactacctatggtactgtcatcaatttgagactcccatggttgacaacttttgtgcagctctcctgttacagccgtcgtggttggtacagaattgtgggatgcgtcatgttttcatgcttgcttgcttcacattcttgccctattgtaatgattgagcaagcagtatctactgtaggtcataggacggatcttcggccgttgcatagcatcgaaatccgtagctctgtttgttgcatggagtcatcgtcatggtctaatttgttttggctccccaaatttttgcgctgt

SEQ ID NO: 118098 - DNA, 853 bp, Zea Mays
ctcgccgcgacttaattcgtcgtcgcgccgttcgccgtcgagtctcgctacccatctcgaagtcccctgctgtcagcctccgcacatgtcctaagccgctgtagccagtttgccttcatctcgtggtggtgttgcactgccgtcgagtcccgatatcgatctggttgtcgtcgaagtgcagcttagtttaatgctcgccaaggattcgatcaaagattttattcggagactgtcgacgttctcgcaagcttgatgtcggacctgctttggatgagaagtcccttatgttcgagagaggcgaggcctgtaagcgctctcttgggactcaaccaaatatctaaactggaaaaccgtcatcgcgcttgcggatatcgaatcaaatcagtattggtacgttaattaatcacgtgatgcggaagacaagccaagtcgaccccaagcgcgggctaatctgcaagctgaagctgatgaatcaacctgaagatggttaaatcaagcaagtgctcggtcgaagcatactcgtcaagcggacgtcacctaacaacactaacctagtgttactcaggcaagccccggtgcatttgccacctccttgatgcttttaaaatctttctcacttgcttgatgcattaggtgataggagttgattgctaaaacagttcctgcattaccttccttgaatttgattaccttccttgatcacccgttttacaaaaagattttgatgcttagccttgctttagaaaaacaaaatgttttgttttacaaaaagatgatgtggcaaaagtgggtgggatgtttttgaaaataaaatttgatggtggatccatcatggccttgatgggttcaacat

SEQ ID NO: 118099 - DNA, 959 bp, Zea Mays
gctcaaagttccaggcccgatgccactatctctatatatggatatgatgcctcacatattgcctttttgttgggaatcctgatctcctttcatttaaaatacgtgaccgcattgctctgctgtgactgcctaatgcattgtctccatttcagttcctaattccattttgtaccttctgtcctaggctaccaactcgacattttggtatggcggttacgggcttacagctagggtgggtttacttggtgctatcaaataaagacccaaatgtttacccacgggggatggaatcttttcttaggttcttggcactttgcccagtgattgcatcgtgccacttggattggctcgatgctttctgatgcgcttgttgtccaaagttcctgccctgatgcctctagatacaaagcttttgatcaacttgaaggactagaagttgcttggaaccagatcaaagttggagatttacttcggaacaatgatgatttggagaggctgagatcagaagtgtggttgcttaaaaccctcaagcataaaaacataataaagttctacaattcatggcttgacaaaagaagcaacaatataaatttcatcatggaggttttcacatcagggatgttgcgccagtaccggattaagcacaagaaggtagacattagagctttaaagaaatggtcaaggcaaatcttgagtggtcttgtctacctgcacaaccatgatccaccaatgatccatagagacttaaaatgtgacaatatatattcgtgaatggaaaccagggtgaagtaaagattggagaccttggtttagcgactatcctggataatgcacgttcagctcatagtatcattggtaagcaattcatttgattattgttccattagaaatttatagtttttcgtgtatgtaacctctgtttcttcttaggtacaccggaattcatggcaccagaactc

SEQ ID NO: 118100 - DNA, 1658 bp, Zea Mays
cgcttgtggtttcacgcgagcgcacccaggccagcagtgcgccccgctgattcctctccggccgtcccgacgttatccaactcctgaacacctctctctcgccacctcacctgaacacctgctcgccccacccattccctccgcatggccggcctccgccctcgcgccgccgtagcttcgaattgcctccgaccggcaattcggcgaggcgcccgtcacgcatcgggggcagcgtttggatactacacctgctggcagctacagggaaatattttgaattggagatctatatccgcaactaaaaagctctggagtacagtagctagtgcaaagcctgatgattctaaatttgaaagtgtggatgcaccacttgagccccaaacatgtgaaggcagcttcttgtgtggtctgttgaagaacctgccacacatttttctagctgcagcagcaaagcagttgcaagaactgtcttaccaaagagaagagagcttaaaacgctgggagcatagtattggttctaaagaggattgccttcacaggaggattgctgaactcaaggaacacgagtgtcagagagctattgaggacgtcatgtacatgttgattgtttataagttttttaagattgaagttccaatggttcccaatctatcgaaactcataagcaacagaaggttacagttatggccaccaagggagacagatcttgaatccattcatggacctgaggtgctagagctaattagggaacacttgaccagcattatcagatgggtgcacagaaatggtcccaagatcaatcgttcaacacttcgcattaaaagactgcaatttgttcggatatattctgcttcaataatgtacggatacttcctgaaatctgtcagcatcaggcatcgattggagctgaccctcactcgctcagaaggagtgcctccgattcaatttctgaatgctcaactcacaaataaacaagagcaggaaggggccattggaggctctagtgaagcttcgtcttctttgagaccaagttctgtggtcaacccacacgacttgaggggctacataatgggattcgatccaaagaccttgcagctttgcgcgaagctgcgctcatcggaagcttctaatctcatcgagaggcacagctgggctctttttgggggcgacatggaactctcccaggagaatgatgaagcggttatacttgatccttcatccctgaaaagactactgcttgaagccatcgcattcggttccttcctctgggacgtcgaggattatgtggacgagatcttcaagttatcggatagctgaagaaactgctacagaaagctcctacagcctttgtggttgtggatagatgaagccagctgaaaagaggagctgcagttcttttctctagatttgtatatatggctggctgttatgtacatgcatatacatcttcatctcaagtttgctttttggagggaagcttggacgtgccctacaagtttttttttgtaagttatgtcatcttacactagtacacaatagcatcagcctatcaacgcagaggacgtgtgacataattttatggtcccaaaataactgggcattttgctaatctagaacgacattattttggaatgaaatgagttgtatcagcatttgta

SEQ ID NO: 118101 - DNA, 1463 bp, Zea Mays
gacagtaacatcacatcttttatttcaaacttcactaagtaaacattacaatctgcagtgtaagaaactgccgctgctaagtgtgcttctcttgtctctcagatcaatagcagcagcaggcgggcagctgctgcttactcatgcagccaaacactacactattattaggtaccattaacattatttttaaaataaacttacttagatttaaaatgatttaagtcatcaagaaacgagataagttgctttggaacggtgggacggaggagaaaacaacttggactccattcctgtccatattgagggcactgtcaagtgacatgatatccaaagcttgtgccaggcaggcatcgtgaccacatgagctgccaaaaccccatgatggcacggcacctgaggaatagccgcttctctgaactttcgataagaaaacaatttcagaaaagttccagttagtacaaaccattcggtcgtggtaaaagtaacatttgaaggaaacctcatcctctccccatttgagatattccctcgctcgctcagcagcaggaggcagcggctgctgtcaacaacaactggctgtccgacaccgcatttaagcttcaccctcccctcgggcctcctccactaaaactcggatagatctcagtgcagtgcttccctgttccctccatcaagaaacagcaaagatccagtgcagagagagagagaagcgccatggcactctgaacaagaaaagaaagagctagagagatctcagtcagccagtctctcacaacacaatgccggcaaccaccaagccgatcttgctcccaagggcgtgggcagcagcgccactcctcctcctgctgctgctcgtcctgcacgggagaggaggccactgcgtcggcatggaggcggcggagctggagatggactcggaggcgcaccggcggctgctgtgggaggcgaccacggggcggaggtacatcagctacgacgccctgcggggcgacgtggtgccgtgctccaggaccggggtgccctactacaactgccggatctcgaccaccgccaacccctacacccggggctgcgagagcatcaccaggtgcagggacgcggatccctaggctcttgctttgcttgctccgtcgccttgcaaagggaagtgggtgtggggctgctgctcctcgctccttcgacgctgcagggcggtgttgctgcaaatgcttactaaatgaagtgtattttattctgtcttcttcttttttctttcttcctctttttttttcttggtcgtccttcctcctttgccgggatatttagtaagtgtagtaatgaagcactaatactaatggatgaatctcgtgtgcaagatgttgatgagcaatgctacagattaccggagagacttcattgagctttcagattcttcaaaaaaaatgtttttggggaatatgcaactgatgaggtgatattttttt

SEQ ID NO: 118102 - DNA, 484 bp, Zea Mays
cagccgcatgggccttacgtgaggctcggcccgttggcttacaagccacaagccatgctgccgcggtgggtttctgcctgagtggggagcgtagggcaaggcctggacacgtgtcggcaccggacccttacttgcgccggggtcttctccgtcctgggaccctgccaaggctcggacctcacttagggggacctggcatgtctcctcaggagctccgggttcgtactcacaggggtccgacgtccctctgcggaggtccggacccaacggtgtttcctcgaacgtattatccttccttgccacgtggtgcccttaggcctgcccatgtggtggggtcgggtgccgctctccgtgtgacctggaggtgccgtagggtgcagcgccttcatactgtagaagagggtaccactgattcagggtaccgacagaaacattggtgcaaaaataaatattagttgtatttaagtttggtacaagtattatg

SEQ ID NO: 118103 - DNA, 879 bp, Zea Mays
atgtctgcgtccgcgctctccaaggcgagttctccgcccagatcgccgcaatccctgctctctcctcgccccatcctctcgatctgcgttcgcgccgcgctctccatggaaggcgaatcaaatcgccgcaatccttgctctctccccagattcccatccgcgttcgcgccgcgctctccattgaaggcgaatcaaatgccccggatcgacgcaccggctctcgatctgcgctctccacggaaggggagtccccttgccaccgaccggcctcaccccaccatcggcgacacccgtcccccttcaatctcgactgcagctggcgatcaccgcatatggcgtcccaaggccatcgccgcaaggtccccaagctcgaccgtagctccatggtcttcctcccgaggtgacaagtccccttcccccgcgggaacactcctcttcctcggctgtccttctccctcccaaggtgcctcctcgccgaattccctccacgtggcttcaaattttgcgggagatggtgcttgtgagaattctccgcggattggaagaggatatcttgcaccagagtacaccattcaagggcagctgaacaaaaagcgcgacgtctacaactttggtgtgctgttgttggagattgtcagtggcagatgccacactgatcccagattacccgttgacgagcagttcctcctagaaaagacactctatgagttcgatgatctcgagagcatcattgataggacgctaaagcgcgattttgacaccgaggaagcactctggttgcttaagataggtcttgtcatcatgctcgagcactgccgcaccggaccttgttggggatttcctcgattaaaatataagctccttgatatggttctataa

SEQ ID NO: 118104 - DNA, 1119 bp, Zea Mays
aatagattgattccatcattggtcaccaatgtctcagatccgcgcatctcacctgacgtcttcacccaccaacggcactccggtatggcgactcaccaaccccccaccaatcccccgcccagatccgacggccgctaatcgccgcgtccgcaaaccaacggtctggcgccgtcgtctcttcccataaaaccctccccacccctgcctcccaaccgcgccgtcttctccctcactcccgttccatttccccatctcccagatccaattcgcgagttctccctcctctgccgccatggcgctctctgtggagaagacctcgtctggacgggagtacaaggtcaaggatctctcgcaggcggacttcggccgcctcgagattgagctggccgaggtcgaaatgcccggcctcatggcgtgccgcgccgagttcggcccgtccaagcccttcgccggcgctaggatctcggggtctctccacatgaccatccagaccgccgtcctcatcgagaccctcaccgcgctcggcgccgaggtccgctggtgctcctgcaacatcttctccacgcaggaccacgccgccgccgccatcgcgcgcgactcggccgccgtgttcgcctggaagggggagaccctcgaggagtactggtggtgcaccgagcgctgcctcgactggggcgaggcgggcggccccgacctcatcgtcgacgacggcggcgacgccacgctgctcatccacgagggtgtcaaggccgaggaggattacgagaagaccggcaagatccccgacccggagtccaccgacaacgctgagttcaagatcgtgctcaccatcatccgcgacgggctcaaggctgaccccaagaagtaccgcaagatgaaggagaggcttgtcggcgtctctgaggagaccaccacgggtgtcaagaggctctaccagatgcaggagaccggcgccctcctcttccctgccattaacgtcaacgattccgtcaccaagagcaaggtgattcttgcttgcctttctttggatccatttcctttcagatctgacgttcttgttgtgtggatctagatcctgcatgactagcagtgtgagatttacttgtttattgatgccgc

SEQ ID NO: 118105 - DNA, 2131 bp, Zea Mays
aatagattgattccatcattggtcaccaatgtctcagatccgcgcatctcacctgacgtcttcacccaccaacggcactccggtatggcgactcaccaaccccccaccaatcccccgcccagatccgacggccgctaatcgccgcgtccgcaaaccaacggtctggcgccgtcgtctcttcccataaaaccctccccacccctgcctcccaaccgcgccgtcttctccctcactcccgttccatttccccatctcccagatccaattcgcgagttctccctcctctgccgccatggcgctctctgtggagaagacctcgtctggacgggagtacaaggtcaaggatctctcgcaggcggacttcggccgcctcgagattgagctggccgaggtcgaaatgcccggcctcatggcgtgccgcgccgagttcggcccgtccaagcccttcgccggcgctaggatctcggggtctctccacatgaccatccagaccgccgtcctcatcgagaccctcaccgcgctcggcgccgaggtccgctggtgctcctgcaacatcttctccacgcaggaccacgccgccgccgccatcgcgcgcgactcggccgccgtgttcgcctggaagggggagaccctcgaggagtactggtggtgcaccgagcgctgcctcgactggggcgaggcgggcggccccgacctcatcgtcgacgacggcggcgacgccacgctgctcatccacgagggtgtcaaggccgaggaggattacgagaagaccggcaagatccccgacccggagtccaccgacaacgctgagttcaagatcgtgctcaccatcatccgcgacgggctcaaggctgaccccaagaagtaccgcaagatgaaggagaggcttgtcggcgtctctgaggagaccaccacgggtgtcaagaggctctaccagatgcaggagaccggcgccctcctcttccctgccattaacgtcaacgattccgtcaccaagagcaagtttgacaacctgtatggttgccgccactcgctccctgatggtctgatgagggccactgacgttatgatcgccggaaaggttgccgtggtctgcggatacggtgatgtcggcaagggttgtgctgctgccctcaagcaggctggtgcccgtgtcattgtgaccgagatcgaccccatctgtgccctccaggctctgatggagggtcttcaggtccttcccttggaggacgttgtctctgaagctgacatcttcgtgaccaccactggcaacaaggatatcatcatggttgaccacatgaggaagatgaagaacaatgccattgtctgcaacattggccactttgacaatgaaattgatatgctcggccttgagacctaccctggcgtcaagcgcatcaccatcaagccccagactgaccgctgggtgttccccgagaccaacactggcatcattgtccttgctgagggtcgcctgatgaaccttgggtgtgctactggccatcctagctttgtcatgtcctgctcattcactaaccaggtcattgcccaacttgaactgtggaaggagaagagctctggcaagtatgagaagaaggtgtatgtgctccccaagcaccttgatgagaaggttgctgctctccacttgggcaagcttggtgccaagctgaccaagctcaccaagtctcaggccgactacatcagcgtgccgatcgagggtccctacaagcctgcccactaccggtactaggcacacggcttgcagctcactcgggccgttgtgtgctatgaagttcgctacactggcctgtcagttatcttttgcatgcatatgcattatcatatacgcactgaggggggagggaaggagctgtttgcttttgctgaagaataatggtgtagtcggctggggtgaggcgatgtgcgttgccagatacagttttgtcttgttgactctacttatctgattatcatttgtaagcgatttgctcaagttatttgtcgtttatgaataacttgctttcctcaagagcatacttaaagacggatcctgatttgcgttgattttggttgcttgagtaccgagtttgactgttcgagttgcgttcaccaagttcgcggagatgctatt

SEQ ID NO: 118106 - DNA, 1014 bp, Zea Mays
accgttccatgccacaacaagacccagaacccacaatctttctttgtgcacagaaagaagaaagaacctatggcacagtcgtcgtccgcctccgtcaagctgctggttctggttgtcctccctgcgctcctcctgttcctcgtccaagcgcaaggtatataacacagcttctatgctgctgcgattcttccggccgcatggtggtggcggtggctgtggcggttgttgacccacatggcacggcggcggtgtggtgcgtgtgcaggggctcggccagcggcggcgaacacgacgaccccgacccccgccaccaccaccgggtgcgcggcgtcgagcgtgacggtgtcgcagtccaacacgggcgacagggccgggtacgacccggtgttcgaggtgacggtgagcaacgcctgccgctgcgccgtccgcgccgtgcgcctccgctccgagggcttcgccagctcggtgcccgtggacccgcgcctgttccgccgcgccggccgcgactacctcgtcgccgacggccgccggatcgagcccggcgccgacgcgcgcttccgctacgcctgggaccgcgccttccggatgaccgccgccgccgtgcgcgacgactgctcctgatggagtgagtgagtgcggtagctcctgcctgcaacgagtgaattgcagtagctcctgtccttcgtgagagagagagactcgctctgtcgtgatccacagggaatttacctcggttttacgcttgtttattagcgcttcttcttaacgtattggctagttcgctggatcatacttcgaataaaaaaactccctctgccgcccgaacaaacaaaaaagtatgtttttttttcagtatcgtaaacaaagtcaatggttcacagtactgtctgtcctgcgtcgtagacattgatgctcctcttcttaactgtttaaacttgttgtaatgagctttcactgtacgttaataacaaacagtactggggccggccgatggcatgttgtgctcggtagcaa

SEQ ID NO: 118107 - DNA, 903 bp, Zea Mays
accgttccatgccacaacaagacccagaacccacaatctttctttgtgcacagaaagaagaaagaacctatggcacagtcgtcgtccgcctccgtcaagctgctggttctggttgtcctccctgcgctcctcctgttcctcgtccaagcgcaaggggctcggccagcggcggcgaacacgacgaccccgacccccgccaccaccaccgggtgcgcggcgtcgagcgtgacggtgtcgcagtccaacacgggcgacagggccgggtacgacccggtgttcgaggtgacggtgagcaacgcctgccgctgcgccgtccgcgccgtgcgcctccgctccgagggcttcgccagctcggtgcccgtggacccgcgcctgttccgccgcgccggccgcgactacctcgtcgccgacggccgccggatcgagcccggcgccgacgcgcgcttccgctacgcctgggaccgcgccttccggatgaccgccgccgccgtgcgcgacgactgctcctgatggagtgagtgagtgcggtagctcctgcctgcaacgagtgaattgcagtagctcctgtccttcgtgagagagagagactcgctctgtcgtgatccacagggaatttacctcggttttacgcttgtttattagcgcttcttcttaacgtattggctagttcgctggatcatacttcgaataaaaaaactccctctgccgcccgaacaaacaaaaaagtatgtttttttttcagtatcgtaaacaaagtcaatggttcacagtactgtctgtcctgcgtcgtagacattgatgctcctcttcttaactgtttaaacttgttgtaatgagctttcactgtacgttaataacaaacagtactggggccggccgatggcatgttgtgctcggtagcaa

SEQ ID NO: 118108 - DNA, 953 bp, Zea Mays
gggatgatgaagtaatattgtattatctatgtattgaccaagcatgagtttaaaattatgatttgatgttttcaattatttatatgatgaacatagttcagaaatatatcgagataaatctcaatcaatatattgattatttctaggaaacacatgtcggtatgagggcaccattgtcgagtacatctcatatgtaatctaaaagatggcacctccaacgatgggttgctgcaaggcagggttcatcaaagagaactggttgtatggcagcaattgttgttgctgctgcaggaaggtagcgaccaatgggttagccactgccaatggattaagtaactgttgtcgctgttgtaggtacgtaggtgcattgcccaccgcgagcgggctagatgaaagtagttgtaggtagacggcagggttcaccatggctagttgactgagcactggcataaactgttgcagctgttgttgttgctggtatgcagctacgttcgccagagcaagtgggttggatgcaagcagctgctgttgcaagtaggtgacagggttcaccacggctaggtggctcagtgatggcagaaactgttgttgttgttgttgcgttgcaatggtttgtagggttagatgtgccaaggattgttgttgcaattgggcaattggttgttgtaaggcgctcgccgcaagcgctagttgtagcctgtaggcttgcacggctggatgttcgaagcccattgaagtaactggtgggaggaactgtggaatactggcactaggagcaagtgagcactgtggaataatgaacgcatttgttgcgctcactaaaagggcaagaagcgcaaggagggctaatatcttggtagccattggtgttaggtcgttgctagtgcgcttcgcttggtgtgtttttgaatgctgaaaatattatgggagatgtattaactactgatttggga

SEQ ID NO: 118109 - DNA, 886 bp, Zea Mays
gggatgatgaagtaatattgtattatctatgtattgaccaagcatgagtttaaaattatgatttgatgttttcaattatttatatgatgaacatagttcagaaatatatcgagataaatctcaatcaatatattgattatttctaggaaacacatgtcggtatgagggcaccattgtcgagtacatctcatatgtaatctaaaagatggcacctccaacgatgggttgctgcaaggcagggttcatcaaagagaactggttgtatggcagcaattgttgttgctgctgcaggaaggtgcattgcccaccgcgagcgggctagatgaaagtagttgtaggtagacggcagggttcaccatggctagttgactgagcactggcataaactgttgcagctgttgttgttgctggtatgcagctacgttcgccagagcaagtgggttggatgcaagcagctgctgttgcaagtaggtgacagggttcaccacggctaggtggctcagtgatggcagaaactgttgttgttgttgttgcgttgcaatggtttgtagggttagatgtgccaaggattgttgttgcaattgggcaattggttgttgtaaggcgctcgccgcaagcgctagttgtagcctgtaggcttgcacggctggatgttcgaagcccattgaagtaactggtgggaggaactgtggaatactggcactaggagcaagtgagcactgtggaataatgaacgcatttgttgcgctcactaaaagggcaagaagcgcaaggagggctaatatcttggtagccattggtgttaggtcgttgctagtgcgcttcgcttggtgtgtttttgaatgctgaaaatattatgggagatgtattaactactgatttggga

SEQ ID NO: 118110 - DNA, 1303 bp, Zea Mays
gcatggcactatatttcacccacgacgcagctagcgtgataccgcgcgtgtaggcattctacgagcagctcggtcttgtcgttggagagatgaagaagaacaccatgagggatttcttgggtttcttgttcggagtagctgccgcggcggcctgcttcggcctgctcctgctgcatgttccatgcccccgtggcctcttgcccgcacagcaaggcctcatcatcttgggtaggagtactactaacggaacaaacgctgatcccactcccagcaccaagaaacctggcatcgcccctgctccagctccaggtgacgacaagctggaggcgctgctgaggcgagcgtccatggccgaccttgacaagaccgtcatactaaccttcgcgagccaagcgtggacggctccgggctcactccaggacctcttgctccagagcttccgcctgggcgtggggacggagccccttctcaagcacttggtcatcgtcgccgacggcgccaaggcgtacgaacagtgccagctcgtgcacccgctctgctaccacctcgaagccggcggcgtcgactacgccgcacagcaatcgtacatggccaagggctacctcgagatcgtgtggcgcaagttcctgtcccaggcccgggtcctcaacctcggctacagcttcgtcttcaccgacatggacatcatctggctgcggaacccgctgctgcgcatccccatcggcgccgacctggccatgtcgtgcgacaagtactacggcgacaacccctacgacctcgacaagctggccaacaccgggttcatgtacgtgaaggcgagccccaggatggtggccttctacgagagctggtacaaggcgcggctgtcctaccggtacacgcacgagcagtatgtgttccagcaggtgaaggacaagctgccggcgcagcacggcatacgggtgcagttcgtggacacggcgtacttcaccggcttctgtcagctacgcaaggattttaacaaggtatgcacggtgcatgcgaactgcctcgtcgggctcaagtccaagcaggagaagctcactcaagtcttagacgagtggaaggagttcaagaagaaggctgctttgctaggcagcaataccactactgccctaactcactgaacaattaacatcttcactgggggcggatctatctaggaaaagtgtagttgtttaaagccattctacgtttttaaacatatatagatgaataattcaaaatacagcataagatgcaatttttcaatacaaataaactaatagttcttctgtggcgccaa

SEQ ID NO: 118111 - DNA, 1483 bp, Zea Mays
ttcatccccatctcttcctcaagctctagccgaactccctcacgccatcctctttcctggtgttcatccctgcggcaaccaccacttgggcgctcctctccctgcccctcccatggcggctccccctggatccctccctgcgcggcccctctcccgtggatggtgccgccccttcctgcagcacgtcgtgctccctcccctggcgccctcgtccccaacgccggaaatgccgctgctgctccaccagccgctactgctcctgaacgccagtgccgaccaccatctcccatggcgcaggagctccccaatctcctcttgccagggcgccgtcgctgagctcgccctgccccagccatggacgccgtcgggccacccgtctcctatctcccctcgccctcatcctctggctgctgccccttcctattcctggtggctgagtcttcttccatggatgctggctgtgctgccctccctggtgctcacctctgccccctgcgttggatggccggttgctcctgccctaggtttgtcaagcgctaactctgctccatctatccctgctcgaatcttgctgattggccctgcgcagattatcctcatgcccggccgcggtacaacagcaacagccatgaaaccccatcgtgtcgcgccctcgacgtgttcgacggaatatcgcagcacgtgccgacccgatctgcagccctggttgcgaggacgtcgaaccccgctaccgtcgacgttgtgcctcgcgcttcaccaatgcgatgaaatgtctgagcgaatagacggcatgcgacccgagtttgattctgccaggttgtttgatgtgtattttactcattgtgatttagttgatgtgtttgtatgtaatactggtgttgctgtcatgctttatgagcccagatataagcacagtgtcagcagactagaaagggagcctggggttaaatttaagcatatctctgcgccacaacctactgatgtagcacaatctgctggcagtgaagctgcagatgccattgcgagtgtgtcagacagtgttattcctatcttcaggcagcaagcagagcagttgctaagctcttccagtctgtctgcagctgacttgcttgtcaaagcacttgcgaaggcagttttggaactaacagaaatatgtgtcttagggttacacggacataaagaaaagatcattgttatctttcttggaggattacagtacactacatcttcaaactggcagaccgatgtggtcacctgggtttgctataacattccggtgatcgtgtttcttcatcgtcggggtcatatttgttcccattggtgttttcttcagtttgacgtcggcaacgtggtcatggtgaccggcgggaggaacaccgggtgtgtaggagtgatcaagaactgggagaagcacaagggcatcttcgaggaaaacatagaatggaattcaaatttggtggtcctaaaagtgtggagactttaa

SEQ ID NO: 118112 - DNA, 1640 bp, Zea Mays
ttcatccccatctcttcctcaagctctagccgaactccctcacgccatcctctttcctggtgttcatccctgcggcaaccaccacttgggcgctcctctccctgcccctcccatggcggctccccctggatccctccctgcgcggcccctctcccgtggatggtgccgccccttcctgcagcacgtcgtgctccctcccctggcgccctcgtccccaacgccggaaatgccgctgctgctccaccagccgctactgctcctgaacgccagtgccgaccaccatctcccatggcgcaggagctccccaatctcctcttgccagggcgccgtcgctgagctcgccctgccccagccatggacgccgtcgggccacccgtctcctatctcccctcgccctcatcctctggctgctgccccttcctattcctggtggctgagtcttcttccatggatgctggctgtgctgccctccctggtgctcacctctgccccctgcgttggatggccggttgctcctgccctaggtttgtcaagcgctaactctgctccatctatccctgctcgaatcttgctgattggccctgcgcagattatcctcatgcccggccgcggtacaacagcaacagccatgaaaccccatcgtgtcgcgccctcgacgtgttcgacggaatatcgcagcacgtgccgacccgatctgcagccctggttgcgaggacgtcgaaccccgctaccgtcgacgttgtgcctcgcgcttcaccaatgcgatgaaatgtctgagcgaatagacggcatgcgacccgagtttgattctgccaggttgtttgatgtgtattttactcattgtgatttagttgatgtgtttgtatgtaatactggtgttgctgtcatgctttatgagcccagatataagcacagtgtcagcagactagaaagggagcctggggttaaatttaagcatatctctgcgccacaacctactgatgtagcacaatctgctggcagtgaagctgcagatgccattgcgagtgtgtcagacagtgttattcctatcttcaggcagcaagcagagcagttgctaagctcttccagtctgtctgcagctgacttgcttgtcaaagcacttgcgaaggcagttggttacacggacataaagaaaagatcattgttatctttcttggaggattacagtacactacatcttcaaactggcagaccgatgtggtcacctgggtttgctataacattccggtgatcgtgtttcttcatcgtcggggtcatatttgttcccattggtgttttcttcagtttgacgtcggcaacgtggtcatggtgaccggcgggaggaacaccgggtgtgtaggagtgatcaagaactgggagaagcacaagggcatcttcgaggtcatcgacgtgctacttggagtttttgcatgctatgtctagttttctcctatttgttgtacaggaaaacatagaatggaattcaaatttggtggtcctaaaagtgtggagactttaattcatataaagttaggcttaacattagtgcaaacagttgtattttagtttagatttagagtacacttatgtatgtgttgtttgacaatgtttatttatgatatattgaatggtacttattt

SEQ ID NO: 118113 - DNA, 116 bp, Zea Mays
agtgtttttgactacctatctttgtttgataatcattggggaaaatgtgcttatggccctcataccctagaacactaccttaacttagcctatgtacccacccctaggggttttgt

SEQ ID NO: 118114 - DNA, 1270 bp, Zea Mays
gatccaacagggaattctagacgccgccggaaggcacgagggggcggggcgacgagggtatggtctcctccatcgcctccctccctgcacggagcattccagacgccgcctgaagccacgaagaggccaacacgaggagggtatggtatcctccatcgcctccctccatctcgcccccgaggcgaatcgagaggcctcggtccccgctagtccggcgagatccgagcgcggccaaatcgagtcgggattcgtggtagctgcagctcagcgaggcaagatccggacggcgagccgaggaatccacgcagcggctagctccaataaacccatggcgccactggcacgtgttctccactgatggtggacacctccacctcccccaattccgccgctgccggcggcggcaccatcatcgacgacctccacggcttcctccgccacggtctacacacccactcctccgtcctctgcgcccacgccttcctcttccgccgtggcctcctcctcggccaccccgtccccgccggcctcctcatcgcctccgcctgctccgccgcctcaacgcccgctcacatcctccgcctcattcgccacctacctcctcccctaccgctcttctccctcgatgctgcactccgcgccctaagccctcgcatccctttctccgccctcctctccctcttcgcggccctcctccgctcccaccacccgctattccccgaccacttctccttcccgcctctcctctctgctgccgcctctgccacctctccacgggcagctcctccgccgcggcctcctcttctcttcgccgccccacgctgccaacgccctcttccacttttatgccactgccggcggcatcttgtccgcccgctacctgttcgacgaaatgccattcagggacatcgcgtcctgcaacaccctgatgacggccttagccagaacacccggtggcttggatgtcgcacgccaggtttttgagggaatgcacttgagaaatgtggtgtcatggaacgtcatgattaacggatacgtcaaggcgaatcagcctgacaacctgtgcgtttttgcgtcgttttgaggatgataacctgttggggcagccacatcatgtgctagctccaatcgaacgaacgagcaaagcaagggggataagaacaagcgagcgagcgagcgaacggacagaagtggtaagtcgggcaaaagcggcgggtcccgggatttgatgaaaaaaaaacaacggacagaagggggatttgatttgatg

SEQ ID NO: 118115 - DNA, 417 bp, Zea Mays
tcagggctcattcctctctaccgcctcaattgccgtgaccagcttcagcaatctttggtcgttgtgcagggaagtacttgatgcccacgaggtcaccaactctgctgataacctggtaatatatgggggttgcacagacaggaaacacgtcctccctagtgtgcgaagctgaaatgcagaaacgtgctcttgcgagaaggagaggagtcacaggaaacgccacagtgataacggcaacctgcagctagcacaaaaaattctgtcaattgctattcggatcttcagagtgtttcgtcgacaaactctagcactaataaccttttgtctaaagcactcccgagaaaacgcaggaatcttggccggattgtagagcattatgggcatgacaggagagtcgttgtcaccaagaacctcaaa

SEQ ID NO: 118116 - DNA, 210 bp, Zea Mays
atgaaggttgatatctctggtgttaatgtagagaagtttgatgacaagtactttgcaaccaaggacctgccacaactcaagaaggacgaccagaaggcggtggacgctgagctgatcaaagctattgaggttgtgccgaatctgaaaacttaccttggtgcatggttctctctcagggacggcgacaagccccatgagattgttttctag

SEQ ID NO: 118117 - DNA, 1464 bp, Zea Mays
catcaaactaacaaccatggcgcaccaggatgccggtgtcggcggcaaagatcaccgcgagctgcaggcgcagcacaccaccgacaccgaggagctgctggcagcccaccgcgagctttggagccatgccctgggctacgtcaagtccatggcgctcaaatgcgcattggaccttggcatccccgataccatccaacgctacggcggaggcgccaccgtaggcgaactcgccgccgccagcaacctccccgcatccagcctccccttcctgcgtcgactcatgcggacgctgacagccatgcgcatcttcgcggtccaccgtgatgacgatcccagcgacgaccctgctgatgatgcagccgccgttgtctcgtaccagctcacggcgacctcccgcctgctcgtcaacggtggctcctatttcagcatacgcccaaacatttccgcccttgtccatcagggtgccgtctcccccatgttcagcatgagcgagtggatgaagcagcaccaccaccacgcgcccgacatgactctccacgagatggtgcacggcgaaccgtgtgggagtctttccgagccaaccccgcgatcagagcctggttctacgacgccatggacgccgatgcccgcctcgtcatgcacgtcgtgctcagcgagtgccctgccgtcttccacggcctcgcttcgctcgtcgacgtcggcggcggccatggcacagccgcggctgccatcgccagggccttcccacacatcaagtgtaccgtcatggacctccctcacgttgtcgctgaggctcccgcgggcactggactgtgcttcctcgccggcgatatgttcgaccacatcccaccggctgacggtattctgctcaagtggattctgcatgattgggatgatgcgaagtgcattaagataatggaacggtgcaaggaagcaatcggtggcaaagaaaggggagggaaagtcattataatcgacaccgtgattggatctaggccaaatgaggaagatatgatacgcagggaggctcaagtcctgtgtgatctaggtatgatgacaacgtcgaacggagctgagcgagaggagcacgagtggagaaggatcttcctagcagctggatttcgtgactacaaaatcacagacacacgaggtatcccgtcaatcatcgaggtctatccatagtgagaattgagagagagagagagagagagagcatcttatcctatcctttatacgtataaatccttattaattgcaaaaaagctcaattctcagccttccataccatctcaagtggcattagtactagcagctagccatcagattatgttgtatcagcatcatcatcaagccattcattgtcgatcctctatctgatatgcgtcgatgtctgcactgttggaatacggtctgaattctgacatgagttttataaagatttgtttcatggactgcagtccgttc

SEQ ID NO: 118118 - DNA, 1734 bp, Zea Mays
catcaaactaacaaccatggcgcaccaggatgccggtgtcggcggcaaagatcaccgcgagctgcaggcgcagcacaccaccgacaccgaggagctgctggcagcccaccgcgagctttggagccatgccctgggctacgtcaagtccatggcgctcaaatgcgcattggaccttggcatccccgataccatccaacgctacggcggaggcgccaccgtaggcgaactcgccgccgccagcaacctccccgcatccagcctccccttcctgcgtcgactcatgcggacgctgacagccatgcgcatcttcgcggtccaccgtgatgacgatcccagcgacgaccctgctgatgatgcagccgccgttgtctcgtaccagctcacggcgacctcccgcctgctcgtcaacggtggctcctatttcagcatacgcccaaacatttccgcccttgtccatcagggtgccgtctcccccatgttcagcatgagcgagtggatgaagcagcaccaccaccacgcgcccgacatgactctccacgagatggtgcacggcgaaccgtgtgggagtctttccgagccaaccccgcgatcagagcctggttctacgacgccatggacgccgatgcccgcctcgtcatgcacgtcgtgctcagcgagtgccctgccgtcttccacggcctcgcttcgctcgtcgacgtcggcggcggccatggcacagccgcggctgccatcgccagggccttcccacacatcaagtgtaccgtcatggacctccctcacgttgtcgctgaggctcccgcgggcactggactgtgcttcctcgccggcgatatgttcgaccacatcccaccggctgacggtattctgctcaaggtactactccatctttctcatctattttacaatacaaacaaatttatatcaagtatatatgccatttagtttcagccaaaataatttatatagtgttatctattaaattgcatgatggccggctgtacgcgcgtgtatgcttcgattcgttctgtgcatctttctgcagtggattctgcatgattgggatgatgcgaagtgcattaagataatggaacggtgcaaggaagcaatcggtggcaaagaaaggggagggaaagtcattataatcgacaccgtgattggatctaggccaaatgaggaagatatgatacgcagggaggctcaagtcctgtgtgatctaggtatgatgacaacgtcgaacggagctgagcgagaggagcacgagtggagaaggatcttcctagcagctggatttcgtgactacaaaatcacagacacacgaggtatcccgtcaatcatcgaggtctatccatagtgagaattgagagagagagagagagagagagcatcttatcctatcctttatacgtataaatccttattaattgcaaaaaagctcaattctcagccttccataccatctcaagtggcattagtactagcagctagccatcagattatgttgtatcagcatcatcatcaagccattcattgtcgatcctctatctgatatgcgtcgatgtctgcactgttggaatacggtctgaattctgacatgagttttataaagatttgtttcatggactgcagtccgttcatcctatatatctcttataaatcgacatggaaagaaagatgacatcgttgtattttctttgttctgtaaactctccacgtacggtaaaagattaacggcgt

SEQ ID NO: 118119 - DNA, 998 bp, Zea Mays
gcgccacctcggagcccaggatttctaatctaatctaatccaaaacccttccggtctttgctgcggctgccctgctccatttgcagctagcttagctttggtttcctctgcttctcattctcccgtgcacttccagttcctgcccagcttgcagggctgctccaatggccaccttgtccgccatctctgccaacgtcggctactgcaaggcaccaaccctgagctggaagggaagcggagtaccaggccggattgtggtctccatgtccaccacccgaagaggcctcgtctccctaagacgacgatcccctcggtttcgcgtctacgcggcgaaggcggagacggtgagcaaggtgatggacatcgtgaagcagcagctggcgctggcggcggacgtggggctgacggcggagaccaagttcacggacctcggcgccgactcgctggacacggtggagatcgtcatgacgctggaggaggagttcaagatcaccgtcgaggaggacaatgcccagagcatcgccaccatccaggacgccgccgacctcatcgacaagctcgtcgaccagaagccacgagacagcgactgattgtcgacgcgacgacacccaaatccaatccatcgatcaccgctcgtacgtgcatgtgaatgctccgttattgtactgtaattgagttttttttatctctagctagagatatttatgaacacagatggaagagaagagttgatgatacctaccatcgtcatcgatcgttgccaagggtttccatctgttctgttttcatctttcccagccgagctagctagctacctagcgtcgtcgtcgtcgtcgaccgacgacagagtgacggacatcggcttagctctccttttaatttccctcgaattttagctgtgtctgatgggccgggttgtgtcgtttcaaggctttgttttttgttaggagaagacggttgatgaacatgttacgcgctagtgcacatggtattgtttg

SEQ ID NO: 118120 - DNA, 3703 bp, Zea Mays
atggcgcgcgagcagccgcggtcggcggtggttgcggcgggcggagatttggtcactgctgccgggggcgggggcgaggggtcggatagggactcttcggggtccatagaggagattacggctgacgacttcaagaaggactcgtcgtcggcgttgggcggcgcggcggcggcggcggggccgagatctaggtcttgggtggccccgcccgccgtgggttacatggcccggaactttcgctatgccttcaatagctttgcgtggtcgcaggccgtgcggaataagccgctggggctacaaccgcctgccccagacgacgacgaggtggagcacgccgtggacgtctccgacggagagaaggaagagggcgagattgaggagggggaggctgtggaggccttggcctcgcctgctcctgcgcagcctgagaccatcgatttggactccgacgccccggagaagtcagagtcggtggctatcgatggaagtgccagtgttgtgcctgtcccagctgctgaggaagaggaggtgaaccttgatcagcgtgtggggagtatactggaggagctcgagatggtctccattgaggaagctgagaagtatatgggcatatgcttcatgtttttccttgaacaaaggctttgtttcaggtcgttcgagggtgcatgcgcacgactgcatacctgcttcgagaacctgaagcctctgttccaggaactggagaacgggagcccgatggctatccttgaacccctcatgcagcaggcgtttattggaattgacacactcaccactgtggcgaatttgtataacttgccgaggagggagcagaataagacaacacttttgaagttgttgttccacataaaaaacagatattcggacatgctgacgcctgagcagcgagaagagatggacagccgcgtgaggaagttagtttttggagagaaagacaatgtcagtgacccaagtaccagttgtggcaccagtgcgataaatgtttcagctccatctgggcaggtttcaaacacaggaggactgccatttgaatcaggtgcagcaaatctatttagtagcttgccaaggttggaagtacctgccaaaaggaatagtcccttgttgaatcttcatgcagattatgatgagaacagcttaccctcgccaacccgggacaatgcaccgccttttcctgcgctaaagcctattggttttggagcatttccaatggtacctgagaaactatctttcctagacagagttgagcctacaaagaattcgttatatccacccttaaatgatcctctgaaggctgtctcttcctatcagcagaagtatgggcagaaatctgtatatccaagtgatgatctaccaagtccaactccatctggtgatgagggtaaacctgcagataaaggtggtgatatatttagtgatgtttccagcttccctgttccaaagagtattgtattaccaagtacaagtcagatgcctgcttctcaacctagcacagtcagcagcagcagtattagttatgcttcaagtacaagtcagatggctgcttctcaacctatcacagtcagcagtagcggtattagttatgcgtctggtccacctggttttgctaaacaaattgagcagtcgactgcaggtccgaatcatgcaataaaggcagcatccaaaagtagagatccgaggctcagatttttgaaccgtgattctgctggtgctacagatgtaaattggcgtgcaaatttttcagaactgaaggatgggaacttgggtggagtttcagttggtaaccgtaaacagaaagcagttgatgatcctcaggtggatgacaatgcgttaaaaagatttaggggcggaattgcgaatcagagagacatgcagcctacggggaaccccaatcagcttatgaacatcagggctcctacacatagtagcagtatcaatatgaaaactttgcaacctcctcaaactactgctccacatgtcagtgcggctcctgctgtcccattgcctcctatgttgttaaaggacattgctgtgaacccagcattgcttatgcatttgatccaaatggaacatcaaaagaagtcagcatcagaaagtcagggtggcatgtctagtgggatgaccaacaatggaattgcaggcatggttttcacacctggcaatgctccgaagatcacagaagctgcacaagtcccatctgttaggccacaggttccagtgcagacacctcctttgaactcacaaaatgatggtggaatcgttcgcatgaagccccgtgatccacggcgcatcctacacaataacatagcacagaaatctgatgcaatgagcttggagcaagtgaaaaataatggaactacacagccagactctcagggcaccaaggaccagactactccagtgccttctcaaccagccttgccgtctagcattgcaaggccattcagcagcgcaaaacatgttgatcctgtctctaattcacagttagctgctacagctattatggctccgacacaagctttgagtagcgtaaataaggtggatccaagactagcagttgaacagaatggacaaaatgctgatgcaacaacaaatggtgcttctgcaacaacacttgaagctacacagcctgttagtccatggggtgatgttgatcatctccttgatggatatgatgaccagcaaaaggctctgatacagaaggaaagggcaagacgaataacagaacaacacaaaatgttctcagcacggaagctatgcttggtgcttgatttggatcacacccttcttaattctgcaaagtttatagaagtggaaccaattcatgaagagatgttacggaagaaagaggagcaagacaggactttgcctgaacgtcatctctaccgttttcatcatatgaatatgtggacgaagctgaggccaggaatatggaactttcttcagaaggctagtaacctgtttgagttgcatttatacactatgggaaacaaactgtatgctactgagatggccaaggttcttgatcctactgggaccttgttcgctggacgagtcatatcaagaggtgatgatggtgatccttttgacagtgatgaacgagtgccaaaaagtaaagatctggatggggtactgggtatggaatctgcagttgtgatcatagatgattctgtaagagtctggcctcataacaggcacaatttgatagttgtagagagatacacctatttcccctgcagcaggcgtcaatttggccttcctggaccatcacttctagagattgacagagatgagaggcctgaggatggtacccttgcttcttcacttgcggtcattgagagaatccaccacaattttttttcacatcctaacctcaatgaggctgacgtgcggagcatactagcatctgagcagcgaaggatacttactggttgccgtattgtctttagccgggttttcccggttggagacgccagccctcacttgcatcctctgtggcagactgcagaacagtttggtgcagtctgcacaaacctggttgatgatcgggtcactcatattgttgcaaactcccctgggacagacaaggtgaattgggcattatccaaaggcaaattcgtagtgcatccaggatgggtagaagcttcagctctgttgtaccggcgcgccaacgaacatgactttgcag

SEQ ID NO: 118121 - DNA, 1790 bp, Zea Mays
ccactaccgcgacatcactcactccgccctctacacctcgcgctcccaccgcccggtgtcagatctcgccgccgcgatgggctccgcccactcgtccgtctccaccactggcggcgaagacgaagaagacgacgaggatccgtccgcgtcagccgtctcctccgcgggcgcacaggcgccaccgcccgctctgtcgccgtcgccggtccgcgtgcccccggcctccgcgtccaaagtgctggagcaggagcccgaggtgctgccgtgcctcgccgcggactcgccgctctcgccgcagccctcggcggcgggcaccccgcgcctcctcgcgggtcccggcatcaaggtctgggacccctgccacgttctcctgcccccgccgccgccgtctccgcacgcagggaggcaggttgacgccgcggccatcgaggtcgttgtggtcagccacggcgagtgcgcagccgcgatgcgcccggaccttgtcggcggccggtggccggccacggcgctcacggcgcgcggggagcgtcaggctcgcgcgctcgctgtgttcctgcgctcccgcggcgccaggctcgccgccgcctatgcgtctccgcttgaccgtgcgcgcgccaccgctgctctcgtctgtcgggaacttgatttcccagaggagcagatccaactatcagatgctttgactgaaatgagtcaaggtcagtgggagggctgcccaaaatccgaaatttataccccagaaatggtcaatctgatggaaagcacccaacctgatttctctgcaccatccggggagtcactcagacaggtacagtttcggatgatggaattcctcaaccggacagtcctaagactaccagaaaaggtggcaatgggggacacactgtcacaacaaaatgagttgaaggggttctctcggcagagctccagcaattctgtccaagatggccctccttgggattcgctttacaggctcaaccgacatagcctccaacgaaagaaatctgggaaaagccgactccagtttgtcacttcaggggacaatgaagctgaagatgatttctcccctaaagaagtaaatcagaggcatctccttcatgaaggaagtgttggcagctcagcagcgacctccattgctattttcagccacgtgacccccatccggtgcctcatcgcaggcctgctagactgcaaccctataatgtccaagagaatatgtatagacgattcctcggttacggttcttgagcattcgctgaagacaggatggcagataaaaaggctgaatgatactgcacatctcaggcttctctagctgatcagtgtgtcactgtaaagaaactatctgatagcattctgcaaatcagatgctgaaaccacttgctgcacgcatgtactatgcggccatcacaagtgtggtctcgtcactgtatttcaattgtacctatcgaatgtttctactcaatgtagaagggttggcctgtactggcgttgtgtagtatttgttgttatttttatcaagattatttctcaaattgtagttttccatcagtgtctagttactttttcttggtgggtagttagtggggacacatattagcgcaccattctttttggcagaatatttagcaagtttgtatacttcaggggtatgcagaatgaagtgctgttgcaaacttgctgtgtaactgccaatggcacaattgtttgtattttgcactataatgttgcacaaaatgtcggattgcaatcctctatccaaatgttttctacctctgtttggaacaatg

SEQ ID NO: 118122 - DNA, 175 bp, Zea Mays
tctttatgaaaaattaaatagagagtcaaatagagagacaaaaaatgaagagtctattggagatgctcttactaggctatcttaaacatctctcctatcccactttttatctcaacttcttatttcacactacagtgccatatgcacgatctgctattctgctagccaaccttgc

SEQ ID NO: 118123 - DNA, 237 bp, Zea Mays
atggcgcacgccatgtcgcgcgcgggcccgcgagacaacgactacgacaactacgacgacgacgcgggcgactccgctaccagcaacggggtggcgaggtacgacggcgggcggagccccctccgcgggtacgggtacggcggccggagcccgctgcactacgctgcggccggcggcggcggagccaaggacaagtacttcggtatcgctcttcctaagttttggatgtttttgtag

SEQ ID NO: 118124 - DNA, 2470 bp, Zea Mays
cttcgtagttcgaaaccaaaacgaagaacaaggcgtaacgcaaaagtcaaactaaagtcaacgcggcggcggttaggcgcccacccacccaccccaaagcccgatggatgcgccccgcggcggccacgcgcggcggccgggcccctccggcgaggcggcgaaccagcgccgcgcggccgcggctcaagcgatggcgcgcatggaggagatgatgctcgcgcacgcaggcgccgccggcgagttcagcatcatcctcgacgcccctctgccttcgctgcagcagtaccgccgccaccccacgccgccgtcgggggccccctcggcctcgtccgccaactcctccccgttccgacgcggcggcggcggagggcgggacgagggagtccccgcgcgcttgcgccgcgacgggagcggccacgacgccctcggcgacccggtcaccgccgcgcgcgcctctcgccacggcgcggccgatggaacgggcgcaggcgccgcacggccgcgagcgggtggcgcgcgccgcgagcgcgagcaggagaagcccgtagaggcgccggtgcggctgacggacccgcggagcgtgcggaggcctgtctctcgcggcgagacgcctcccccgacggccgccgaggtgagacgcgtggcggatcaggaggaggaagaagagacgcctcttaagctgctggcgcgcggcgggcggagctcaagcgcggctaggcctgcagaagcctcgcaagcgtcagagacggtccctacggccgcaaggccgtcgagccggcggtcgaggcgggacgtcggcgcgaagcaaggtttgtctgaggtaacgtcgaacgtggactccgacgtggagagtgtcgggcgccggagcagccgagggagcgaggacggtggggatgagcgggtgtcgttgcccatgccactggcagccgtcgtcgccagagaccggagcaggagcaattcgcccgcgataagtcggaatggtgtggactcagctgcagcgaatcgcactccatcaacaggaaggtcaacctttgcacctccagttggcgttagtgtgaggcctctacaagctgtggaaattcccaatgggacacctagggatagaagggctgtttatcccgatcctactttcgcccagtccacacggtcacgggactcacatgacagttcaacactgacagaagagcttgaaatgctaaaagatgagaatgtaaatcttctggagaagcttgggctagcagaagagaaacttagacaatctgaagcccggacaacagagctcgagaaacaggttgctaatcttggcaatgggttatctatggaagtaaagcttatgaaaaggagggaggaaatgcttgtaagaaaggagcaagagataagaaaagctcttatatccaagaatggtaaaagcgaggaactcaccactcttcagcaacagctacagtctgcaagagaagaagcatcggctgctgtgaagaaactcaaagaagctgaatccgaaacacaagagttacatacaatgacacgcaggatgatcttaagcaaagaagaaatggaagaggttgtcatgaagaggtgttggttagcccgttattggggtttggctgtccaatatggcatctatccagacatctcaatgtcaaaacatgaatactggtcttcacttgcacctcttccatttgagtatgtaacatctgctggacagagagccaaggatggatccgaagcagaaggtaatggtttggaagacgtggacaagcttgttcatgatttgactgttacagcaggggaaggcaacgtagaaaccatgcttgctgttgataaaggacttcaagaactagctttcctgaaggtggaggatgcggtactttttgcccttgcccaacaccatcgtactaatgttgctggagcagctgatccagatattaaatcatctggggatgaaaaattcactgaggcatttgacctaagcaaggaggaggaagaagatgtacagttcaagcaggcttggctcatatttttctggaggagggctaagaccaacaacgtggaagaagatattgccgaggagcgattgcacatgtggatcgatcgacacggccagcaaccaacgtcacatgacgctgtggatgttgagcaaggcatacacgagctgaggaagcttggcatcgagcagctcctgtgggagctctcccgccacgaggcgaaccttgccaaagacagtccatctgatgtcgaggacctgacctaacagtaacagcctgagcggacgacggtggccatctcccacccaaatgcagtccaggctccagccatatatttgtatatcatacagataactgggacatgtaaacattttttgtggttttggtttttcagctttgtcacaaacagttcactgactctccccgatgtacataacttccaccccccgcttttgttgtttgtaaaaggcagcttgaggtgtgca

SEQ ID NO: 118125 - DNA, 94 bp, Zea Mays
tcaccctcatcattaacaacttccacagatctagattatccacatttcagacattttctctctcccgcatgctccttcatgaaaagtgtcacac

SEQ ID NO: 118126 - DNA, 1362 bp, Zea Mays
aggctcccagcaacccttggcataactcgctcgttcgtacacgagaagtcgagaacaagcatccatcctagctcactcttccacctgtctttctcagcctctctctattcctcttcactctctcgaatagatagagagacccgaggtagagcaagacctcgatcaacgagtgaagcaaagggcagcatgatgcaccggcttgtcgtcgaagctaggagaagagcagccccggtggcgatggccgccggcggggtggcgggcggcgagcggtggatgtcgtcgtcggcagccagcaaaggaaggctagtagggaagattgcgctgatcaccggaggcgcgagcgggctgggcaaggccgcggcccgcgagttcatcgaggaaggcgcgggggccgtagtcctcgcggacatcaactccaagctgggcctcgagacggcccacgagctgggcccggacgcccacttcgtgcactgcgacgtggccgtcgaggacagcgtcgccgcggccgtggacgccgccgtggcgcgccacggccggctggacgtcatgctcaacagcgccggcgtagtgggcccgctgaccccaggcacgtcgcgggtcgccagcctggacctggcgcagttcgactccgtcatgtccgtgaacgtgcgcgggacgctggccgggatcaagcacgccgcgcgcgccatgctggcggcggcgcccgcgggggcaggaggaggaggaggaggagcaggagggtcgatcctctgcatggcgagcgtcagcggcatcctcggcgggctgggcacgtacccgtactcggtgtccaagttcgccatcgcggggatcgtcaaggccgcggcggccgagctgtcgcgcctcggcgtccgcgtcaactgcatctcgccgtacgcggtgcccacgccgatggtgctgggccagttctccgcgatgctgggcggggcagccgacgaggcgcaggtggcggccatcgtcaggggcctcggggagctcaggggcgccacctgcgaggccgtcgacatcgccagggccgccgtgtacctggcctccgacgacgccaagtacgtgtctggccacaaccttgtggtcgacggtggcttcacgagctacaagcacatgaacctgcccttccctaccaagccacatgagtgacttaattgccagaagcttgtgattcaggtgtcattctgctactgtttgatttgtacaaaactgcacctaaccgcgaggaagaagagagtgggagttgttgtcatcttggttgtaagtgactttaattttcagcccatgcaactacgcaatgatccgcatggattcagtagaaaagaaagtggctacgcagttgctgctttcttcctt

SEQ ID NO: 118127 - DNA, 1861 bp, Zea Mays
atttcatttgcatgcatgtcctcccaacactcgccgtacgttaccattatcatccttgattcatgtccacatcatacatggctcactagaatgtaccagtatctgcttctgctctatagaactgtgagcaagagcaagccacgtcagttgtagtgccatggctgaagcagcgccccacttcgtgctcgtgccgatgctggcgcagggccacttgctccccatgctggacctggcgcgcgtcctcgccagccacggcgcccgtgccacggtggtgctgacgcccgtcaacgccgcgcgcaacagggacttcctggagcaggccgcgggggcggggctcaccatcaacttcgccgagctcgcgttcccggggccagcgctcggcctcgccgcgggctgcaagagggtcgacatgctgcaagacctctccctcatcgtcccgttctacgatgccgtgtggctgctcgccgagccgctcgaggcgtacctcctctcgctgccccggatgccggactgcctcgtctccgactcgttcatggcgtggactgccagcgtcgcgcggcggcacggcatccttcggttcgtggtccacttctcgcccgcgtcctacgtcctcgccgcgcacatcctcgaaacgcgcggcgtctacgaccgcgccgccgacgacttcgaaccgttcgaggtgccggagttccccgtacgcgccgtggtgaacagggctacggcgcaaggggtcttccagtggcctgcaggcatggagaggttccggcgcgacacgctcgatgccgaggccaccgccgacgggatactgttcaacacgtgtgctgccctggagggcgcgttcgtggagcgcttcgcttcggaggtcggcaagaagatttgggcggtcggaccgctgttcctcctcggttccggttccgacgccggcgggatggccgggagaggcaaccgcgcggcggtggacgccgaccaaatcgtgtcctggcttgacgcgcgtccggcggcgtccgtgctctacatcagcttcggcagcatcggccgtctgttcccggctcaggccgccgagctcgccgccggactggaggcgtcgcgcctgccgttcatctggtcggccaaggagacggcgcccggcctcgacgcggagttcgaggagcgcgtgaaggaccggggcctcgtcgttcacgggtgggcgccgcagatgaccatcctgtcgcaccctgccgtgggcggcttcctgacgcactgcggctggaactccatcctggagagcctctgctacggcgtgccgctcatgacctggccgctgttcgtcgaccagttcctgaacgaggcgttggtcgtggacgtgctcggcgccggcgtccgctccggcgccaaggtgccggtgacgcacgtgacggtcgtgaagccaggggaggtgctggaagtgcaggtctggagggacggcgtcgagagggcggtcaccgacctcatggacgagggccccgcgggcgcggcgaggcgggcgagggccaaggagctcgggcaacagatgagggccgcaatggcgaagggtgggtcgtcggacaccgatgtgagggacttggttcgccacgtcgttgaggtcgcgcggaaaaagggggagcacgaggacacggctcttgctggaggtgaccacgtgatcacgagcaaggaaaaggcaatgaacggcaccggtggaaaacactactgatgaaattcgtgtggtacggtcgttttagctgaaagaatctctcgagttaagctagctactagccacgcaacccaacttgcatgtaccagcagcaatgacatattatgctatcgtgttttttgtgcgacaattttccatccgaattcaacaata

SEQ ID NO: 118128 - DNA, 387 bp, Zea Mays
atggcgacaaaccagatgaatgcacaatgttgcaaacaaatcattttcgacattttgccacatctatcagtggtactctgtttgtttggatcagaggaagctcacgcagaggtcggagagggtgaattccatggatctgcatatgacatagccatgaacaatgccatatcagataaaagcagatggagcttccgtaggaggtctacaaggcaccgagttttgaagaactctgatatctcagaacctgagactcttagttccagcaaagcaaaggctgacattacaccgagcaacaatgtttatacttcaacatattcctatgcctcggagaagcctctgcaacaagacaagccagatgaagaaggtagtcctatactcatcatatga

SEQ ID NO: 118129 - DNA, 680 bp, Zea Mays
accggaacaatggcaggacgtaacgcatcacatatggcgatggcgagcagatcctccacgaccggaacggcggtgctgtgctttcttgtggtggtctccctcttcctggccccgtcgttgttcgttgccggaactgaagcagcagcggcctacggtgcaggtgcaggtgcaggcaggaagatgaagcaggcagctgcgggagctgtggcgacgaagcaggatggctacggctaccctgcaaccagttcaccagcgggatacccggcggtgccttgttgccctcatccacctgagggcggtcggggttaagagagagcccagctgcagctagacttcatgtgcatgatattgcagaattaccgtctctgaatacagatacagaaactagcatttatatacgaatcatatattatctatatcctcatgccatgagagatgtgtatcactctcgctaaataattagcagctacgacgcgcctgcctgtcacactgtgctactattctatattcctgctccctctctctatatatacatacacacatatgtgtgtgtgaaataaagattagcttggagcaccgcgcatcaatattctcacgggtgtttgaatacatttggatgtccatattagggcttcttcggttattcccaatacacatggattggatgggattggaaaaaa

SEQ ID NO: 118130 - DNA, 1540 bp, Zea Mays
cagccctgccagccgcctagccatcctcagtcggcagccgctacaatgtcacccagactccagactccggccagagtccagagccgccaggacgccaggtacgccgccgggcgccggccccctcctccctcttctcgccggaggaaatggagccactcgctctcccctcgggctcctcgcacccgacccgcccgcagccgcagccgtagccgcacccgctcctccaccatctcccgtccaacaggttccgggatcagcttttgtggcaggcgtccggatgggtttactgttcttgctcaaatccgtgtggattttgcatggccccgtcccgaaaatgccacaggccagccggttcggaaaccgtaccgcacgacgccgtcgccacgctcctcctggggatgcatttgctgcgcgtcctgaacctaccgtgacgagggcattctcagagccttgcaattttgcaaggctgctgcctgtccgttcagttcttctgtagtagtagtagttctgtatctttgtgtgtgtgcatcccgagttttctctgctgtcgtattacctttcagttttcctaataaattattaggcttgcttgtcctattcccactcttcttctggtcgcgctcaagcatggaaccagaactctgggagcaatgggtatttccttttttttcaaattgctggttgcatttggtagtagagtacaacaacgtacacgtgggtttctctggatagaaacactgggatccaagtccttgagattcggttcaaaatttgaactatcaacacacataggagtgcgaaatattcccagagcatcctccttgtcaaatcgggccctttaagtgtctgccagaattccgaactcaaagttttgcctgcattgtgggctcctgcaactatgcttttgttttaatctacatgtctcatgtccaactgagaaatattcgtctaccagctgttggcagcatttgctattatccttttacaagcacaagaaatcgggttcatatattttgtggctagcggttttaggtaccctgcatgagcgccttattgtgcatactaaatgcatttaagcgtggtgggtgcagttgatcacatgttatatcgacagaaattctagttaattagagttgactgcttgagccaatagtttattacttcaggtagcatatagttcaatattatgttttttttgtattttgtatctgttctaatttctacaattgagaactactgtgtctaatatccatgaggtttgtgtttcctacagaccttgaaggaagcaattgaaatcaataactctgttcctcaaggattgagcagttctatatttacaaagaggccagatattatttttaagtggctcgggccccatggtagtgattgtggtatagtgaatgtgaacatacctactaatggtgctgaaattggtggagcatttggtggagaaaaagcagctggtggtggacgagaagcagggagtgattcctggaagcagtacatgaggagggcgacttggagggaggtcctagagtag

SEQ ID NO: 118131 - DNA, 369 bp, Zea Mays
atggcgaagaacatcgcgctcttgctgctgctattcaccgtttgcaacccaggatgcgcagccgcaggtgcctgcagcctctcagacctcgccgtaacgcagaccgcggtgccctcgaaggcgaacgtctacgcggtgacggtggagaaccggtgcatctgcacacaggcgaacgtcaagctggcgtgtgacgggttcagctcctccgtggccgtcgacccgggcgtgctcagcgtggacggcaagctctgcaccctcaacggcgggcgccccatcggcatgggcccggagtacgccgtcaagttctcctacgcctcgccgtcccagttcgccttcaaacccgtgtcgtcatccattgcctgctcttga

SEQ ID NO: 118132 - DNA, 707 bp, Zea Mays
ctctccctataccaccgcacccctgatgaagtgatgagtcatgaacacatgcctgtttgagcgagcaggatgcgcagccgcaggtgcctgcagcctctcagacctcgccgtaacgcagaccgcggtgccctcgaaggcgaacgtctacgcggtgacggtggagaaccggtgcatctgcacacaggcgaacgtcaagctggcgtgtgacgggttcagctcctccgtggccgtcgacccgggcgtgctcagcgtggacggcaagctctgcaccctcaacggcgggcgccccatcggcatgggcccggagtacgccgtcaagttctcctacgcctcgccgtcccagttcgccttcaaacccgtgtcgtcatccattgcctgctcttgattaactcatcgaggccagccttagctgttgctctgccatactcacgttcttttccacggcgatttgatgtttcgatcgaacaatattttgacggtgaataattcatcgggagagacatttttgattgatttctgtgaccagatatgcatgaatggacaaaataactattcaaaaaccgaatgtgacaatgtcatttcatagttagaagaactcggacatggttctagatacaaacactgtccgttctatcctctattccaatttttgactttttcactaaatttaactggctcgtttatttaaacttttgtgaaaaaaaata

SEQ ID NO: 118133 - DNA, 554 bp, Zea Mays
gacagaggacaaatggagacctcgaagatggtgaagaacatcgcgctcgtgctgctgctgttcagcatttctaaccaaggaaacgcagccggtgcctgcagcctctcagacctcgccgtaacgcagaccgcggtgccctcgaaggcgaacgtctacgcggtgacggtggagaaccggtgcatctgcacacaggcgaacgtcaagctggcgtgcgatgggttcagctcctccgtggccgtcgacccgggcgtgctcagcgtggacggcaagctctgcaccctcaacggcgggcgccccatcggcatgggcccggagtacgccgtcaagttctcctacgcctcgccctcacagttcgccttcaagcccgtgtcgtcttccattgcctgctcctgattaactcgtcgaggccttagcagctcgcactgctgccatcctcttattcttttccacggcgatatgatgtttcgaacaattgacggtgaataattcatcgggagtgacatttttgattgatttctgtcactagatatgcatgtattgtcaaaatattactg

SEQ ID NO: 118134 - DNA, 2047 bp, Zea Mays
agagagaactcagaccactccgctggtccgcccgctgtcctctgcacctctgctaccccaacaaaaccaggacgacgcctcgcgcggcgctgtcatgctcccgccgttcggcaacccgctctgggtaccggaggacgtcgacgaccagcagcagcaccacgcgccgccgccgacgcccatggggttggggccggggcaggggcacgatgaacagaacctcctggccctggcctccgccgccgccatgggggccggcggtattttcagctcgccagcggtgctcgacgacgactggtacttcgaccccgtggctgcggccgccgccgccggcgctcaggggcagctgctcctggcaccgccgggcccagcgcccgacgccgggtcgcagatgttctcgctcttcaacgtcggcggcgccgcgacgttcgacgtccatgggttcgacctcggcctcggcggcggaggcggtggcgacctggtcccgtttgccggcgcggggaatgcgtcgaattccgcgtccttttccctggtaccggcagggaacgccggcggcttcctcggctcgttcggcggcttcggtacagcgccggcgcaaatgccggactttggcgggctcggcgggttcgacatgttcaacagcggcgccggctcctcctccgcggcgccccctcctcctgcctcggtgtcactgacggcgcccttctctgggcgcgggaaggccgccgtgctccgcccgctggagatcttcccgcccgtgggcgcgcagccgacgctgttccagaagcgcgcgctccgccgcaacgccggcgaggaggacgacgacaagaagcgcaaggtggaggccgtcgccgcggccgcgggggcttcctcgggcggcggcggtgacacggtgctggacgacgccgacgacgacgacggcgggagcatcgacgcgtccgggctcaactacgactcggaggacgccaggggcgttgaggacagtgggaagaaggacggcaaggactccaacgccaacagcacggtgactggcggcgccacgggcgacgggaagggtaagaggaaggggttgccggccaagaacctcatggcagagcgccgtcgccggaagaagcttaatgaccggctctacatgctccggtccgtcgtgcccaagatcagcaagatggacagggcctccattctcggcgacgcaatcgagtacctgaaggagctgctgcagaagatcaacgatcttcagaatgatctggagtcgtccccttccacggcctcgctgcctccgacgcccacaagcttccaccctctgaccccgacgctgcccactttaccgtctcgcgtgaaggaagagctgtgcccaagcgcattgcctagccctacttctcagcaaccgagggttgaggtgaggatgagggaaggccgggcagtgaacatccacatgctgtgcgctcgcaggcccggtctcctgctctctgccatgagagcgatcgaaggcctcggcctcgatgtccagcaagctgtcatcagttgcttcaatgggttttccttggacatcttcaaggccgagctgtgcaaggaaggccctgggcttctgccggaggagatcaagtccgtgctcctgcagtccgctgggttccatggcggcgtgatgccgtgagctaggacaacaagaccgctgaaaaagagacagagagagagagaaaagaaagaacaatgtagctaaggggaagtttacatgaactggtgtttccagtctcagggttggttttcgtcttttaacagtttgagaccgttacagacctgctagtcttcctttaattagtctgatagagtagaaaataatgccggtgttctccttcctggtctgttctagttcttggtacatgcttttgccctgttcagttagctagctctatctcatgaaattccgaatcgaaatcaggtgccagtcaaatccgtgtcaggctctgttcggttgttatggatttgagctctggattgattcctagccggattacttctctaatttatatagattttgatgagctggaat

SEQ ID NO: 118135 - DNA, 774 bp, Zea Mays
attagtttgggttgcccacagcttccgcgatccacagaaaatacatcgccatttccccaatttaccgctgacaccctccacaaaccgcgaatttcctccccggctcctctccctcctccccagtcaatccccacacagtctcggccgggccctcgcgaggccgccgtggaaggacccccagcgatgggctccggcgaggaggacacaggaggcggaggaggggcggtgcggggcgcggtgctgaaggcgctcgtggttgtcggcggcgtcctgctgctccgccgcctgcgccgctccactacccgatgggaccacgcgcgagccgtcgccgacgcgctctccggagaaaagttctcgagggagcaggcgaggaaggatcctgacaacttcttcaatttgagaatgctcacatgtcctgcaaccgagatggtggatggttcaagggtgctttactttgagcaggcattttggagatctccagaaaagccttttagacaaagattctacatggtaaagccctgtccgaaggagatgaaatgcgatgttgagttgagttcatatgcaattagggatgctgaagagtacaagaatttctgtgaccgtcaaaaggatcagaggccacaggcagaagaagtaattgcagtatgtcatttcgaacacaatcttacttttcagactgtttgtttctgaagtttcccccttcatttacttatgcctgttaatggctaaactctggagggacagctgcaaatgaaatgaaggaaatatttacaa

SEQ ID NO: 118136 - DNA, 1776 bp, Zea Mays
tttttttttactttttttttatgaactattggtgtgcactgttaacagaattagaggatatctctcaggagtattatctccttaacaaacgcacgcgtatctggtgtaatctgttatgggcaaccgggagctgcgcctcccttgatcaccgcaagtcggttgtacatgaattgtaatcatctctataaatagatagagccacagccgtattgtgcgtggcgtcccaaacattttcacatggtaatagagccaagatccaaccaataaacaatggccaccctttcttctaccacctcctccctcacctcctccagcgcttccaccatacaatctactcctgctcctctccatcagatcgttaccatcaaattaaccaagaagaattttctcttatggcgtgcgcagctgcttccttatctccgaagcaacaaactcatgcgcttcctcgatggatctcaacccatcccgcccgcaatggttcctgcgtcaacaagcgccggtgccgaactcattgtcaacccgacctatgagacctggtatgatcaagaccagcagctactgggcggtcttctgtcctcgatgacggaagaagtacttgctgatgttcagtccgcgacaacggccaaggaggcgtgggattctctcctgcgcatttatgcctcctccacgcgggctcgcacggtgcaaatccgtgttgagttggccaacatcaagaagcgggatctcacggccgcgacgtacttcgccaaggtcaaggcgctcgctgccgagatggcagccgcgggcgcccctcttggtgatgaagatataatctcatatttgcttgcaggacttgccaccgactacgatgcctttgtgacctcgatcaccactcgaagtgatcgcctttccctggatgaggtttattctcatctcatggtgtttgaggctcgactccaacgcaaccaggcggagatgcagatgcatctcaattcctcggccaactacgctcgtcgcggcggcaacaacttgcgtggtcgcggtggccctcgtggtcgcggcggtcgcggaaactactcgcatggtggttcttcgtcgcgtcctacagatccgcctggtgctcgacgtcctgccaccaccaacaacaacagccggcccctttgccagatctgtggcaaaataggccacactgcggtacgctgctggtaccgtcatgatgactcctacaacgaagatccaccgatggccaatgtcgcctctacgttgccttcatacaagcttgacaactggtacggggacacaggcgccacagaccacatcaccaacgaacttgatcgccttgcggtccgagaacgctacaacggcaatgaacaagtccaagtgggcaatggtgaccggcaaacgaggagatgccttctggaagggcaatgtgaaggtggtctctatcccctgacgatctctagcgcacaagacctgacgcatgcattggctgcccgcaaaataaatcgtgatcaatggcatgctcgcttaggtcatccagcttcgcaaacagtccagtccatcttacgtattaataatattatgtgttctagtgagtctttttcatcagtttgtaatgcttgtcagatggctaaaagccaccaacttccatattctaggtctatgaataatgcttcagctcctcttgaattaattcactccgatgtttggggtcctgccgctacatctgttggtggttatcgttattatattagttttcttgatgatttcagtaaattctcttggatttatcttctt

SEQ ID NO: 118137 - DNA, 4502 bp, Zea Mays
tttttttttactttttttttatgaactattggtgtgcactgttaacagaattagaggatatctctcaggagtattatctccttaacaaacgcacgcgtatctggtgtaatctgttatgggcaaccgggagctgcgcctcccttgatcaccgcaagtcggttgtacatgaattgtaatcatctctataaatagatagagccacagccgtattgtgcgtggcgtcccaaacattttcacatggtaatagagccaagatccaaccaataaacaatggccaccctttcttctaccacctcctccctcacctcctccagcgcttccaccatacaatctactcctgctcctctccatcagatcgttaccatcaaattaaccaagaagaattttctcttatggcgtgcgcagctgcttccttatctccgaagcaacaaactcatgcgcttcctcgatggatctcaacccatcccgcccgcaatggttcctgcgtcaacaagcgccggtgccgaactcattgtcaacccgacctatgagacctggtatgatcaagaccagcagctactgggcggtcttctgtcctcgatgacggaagaagtacttgctgatgttcagtccgcgacaacggccaaggaggcgtgggattctctcctgcgcatttatgcctcctccacgcgggctcgcacggtgcaaatccgtgttgagttggccaacatcaagaagcgggatctcacggccgcgacgtacttcgccaaggtcaaggcgctcgctgccgagatggcagccgcgggcgcccctcttggtgatgaagatataatctcatatttgcttgcaggacttgccaccgactacgatgcctttgtgacctcgatcaccactcgaagtgatcgcctttccctggatgaggtttattctcatctcatggtgtttgaggctcgactccaacgcaaccaggcggagatgcagatgcatctcaattcctcggccaactacgctcgtcgcggcggcaacaacttgcgtggtcgcggtggccctcgtggtcgcggcggtcgcggaaactactcgcatggtggttcttcgtcgcgtcctacagatccgcctggtgctcgacgtcctgccaccaccaacaacaacagccggcccctttgccagatctgtggcaaaataggccacactgcggtacgctgctggtaccgtcatgatgactcctacaacgaagatccaccgatggccaatgtcgcctctacgttgccttcatacaagcttgacaactggtacggggacacaggcgccacagaccacatcaccaacgaacttgatcgccttgcggtccgagaacgctacaacggcaatgaacaagtccaagtgggcaatggtgaccggcaaacgaggagatgccttctggaagggcaatgtgaaggtggtctctatcccctgacgatctctagcgcacaagacctgacgcatgcattggctgcccgcaaaataaatcgtgatcaatggcatgctcgcttaggtcatccagcttcgcaaacagtccagtccatcttacgtattaataatattatgtgttctagtgagtctttttcatcagtttgtaatgcttgtcagatggctaaaagccaccaacttccatattctaggtctatgaataatgcttcagctcctcttgaattaattcactccgatgtttggggtcctgccgctacatctgttggtggttatcgttattatattagttttcttgatgatttcagtaaattctcttggatttatcttcttcatgatcgttctgaggctccacaaattttcttgcaatttcaagctcatgttgaacgccttttagattctaaaattaagtgtgttcaatctgattggggtggtgaatatcaaaagactcataacacattctttaaaaagttaggcattgctcatagagtatcttgtccgcatacccaccagcaaaatggagctgctgaacgcaaacatcggcatattgttgaaactggccttgctttacttgcccatgcctccatgccccttaaattctgggatgaagcttttctcactgctaccttcttaatcaaccgtttaccaacccgggtcattgataataaaagtcctcttgagcgcctcttcaatatttcacctgattattctacacttcgtgtctttggttgtgcgtgttggcctcatttacgcccttataataaacataaactttcttttcgatcaaaagaatgtgtttttcttggctatagtcctttacataaggggtataaatgtcttgatttgtcatctggccgtgtttatatttcacgcgatgtcatttttgatgagtccatatttccttttgctaagcagctgacgacttcatctcacattgattcatcaggcagcagtgttaatagttctgttgatcgtttgtgttattctctgcctactcacctcttgtccacagaaaattcccctgctgcagaaccatcttcgggatcgacgctcgtacttctcccgcgcggattgccttcggactttgagctgcaattgcccccaacaaatcctgccacatctggggtcgtgcatgctacggctggtactgcgctggaaaccgcgtcggattctcttgcgcccagtagcacacctgagtccttacctgatggacgcattcatgaggaagcgaggaccgccgcgcctacggggaccgctggacccgactcgtcctctgcaccaacaactgctgctgcttcttctgatccggtgcatggtgctgtctcggatcatgtgttggtgccctcttcaacggctaatggtgctacaaatgaagataattctcatcactacggtacgcgattgaaaaataatattcgcaaacccaagatcagaacagatggcactgttggctattctgcaattgttacatattctgtcactcgtactgctaatttggaaccatcatctcatgtgactgcactaaaagatccaaattggaaacaagctatggttgatgagtacaatgctcttatgttcaacaaaacttggcacctaattcctcctgatccctcactcaatgtcattgactgcaaatgggtgtttcgcataaaagaaaaaccggatggctctattgatagacataaagcacgattagtggcaaagggttttactcaggagtatggcattgattatgaagaaaccttcagtcctgtggtcaaacatactacaattcgaattttgctatctcttgctgttattagaggctggtctatcaggcaaattgatattcagaatgcatttcttcatgggtttcttgaggaggatgtttatatgcatcaaccacccggcttcattgattttcagcatccagactacttatgcaagttagataaagctctgtatggacttaaacaggcaccacgggcatggttttctcggttgagcaataagttgcttgagttgggattttctccatccaaggctgatgtctccctttttatcttccataaggagggtttatgcatctatatgctcatatatgtcgatgatattattattatcagctcttctgctccggctactgacaagttaattgcacaattaagggatgattttgctgtcaaagaccttggccaacttcattatttcttaggtattcaagttcatcatacatctgatggtctgtatctcactcagaagaaatacattcatgatttattgtgtcgaaccaatatgcttgaggccaaaggcgtatccacaccaatggtatctgccgaaaagcttgtgaagacagggggtatattgctctcgtctgaggatgctaccagatacagaagtgttgtaggtgctctccagtacctatccttgacccggccagatatctccttctgtgttaatcgggtttgtcagtttatggcttctcccacagtagatcattggacagcagtaaaaaggatcttacggtatcttcgggcgaccatggacatgggtctttggttcaccagatcatcatctttcctcttaagcgcatttagtgatgctgattgggccggcaatcttgatgatcgacgtagtactggcgggtatatcatttttcttggtggcaatccggtctcatggagttccagaaaacaatcaactgtctctcgttcaagcaccgaagctgagtataaagcggtcgccgacgccactgcagaacttatttggattcaagtgttgatgcgagaacttggcattactctcagccgtgcacctagtctctggtgtgataatattggtgcaacatacttgtgtgccaatccaatctttcatcgccgcatgaagcatgtagaagttgattatcattttgtccgggagagggtcacccgtcgccaacttgaagtccgctctatatcgtcgaaagatcagctggctgatatcatgacaaagtcgctctccagtacgccattccaagttatgcgggacaatctgcagctagcgccactacctccagattgaggggggggtgttaacagaat

SEQ ID NO: 118138 - DNA, 124 bp, Zea Mays
cggctgcggcttctacagtatttttctctctatggattgcagctgcagcagtccaaacagctgcaacagtgtcggcttgcagccagccgaacacgcccaatgctttaaaggttcatcccaataa

SEQ ID NO: 118139 - DNA, 1575 bp, Zea Mays
cattccctgcactactccattctagttactgagctagcagagatggcaattgacctgaaccttcaggaaacgatgagccttattacggaaaagcaccagggaaggctcatcgccggtgcagtgctgctggtcaccaccatagtctccttcatcaagctcctcctcatgtggtccgactccagagtccgtagccgcagtcgactgccgccgaccatcccggccgtgcctatcatcggtggactgatccggttcatgcgcggccccatctcaatgatccgggaggagtacgcgcgcctcggcagcgtgttcaccctcaacgccctcggctacaggatcaccttcctgatcggccccgaggtgtcggagcaccttttcaatggcgccgagtctgagatgagccagcgggaggtgtaccgcttcacggtcgcggcgttcgggcgaggggttgcgtttgatgtgccctactccttgaggctggagcagatccggatctttgccgaggggctccgtggcaacaagctccgaggctatgccaccctcatggtttgtgaggccgaggagtacttctcaaagtggggtgagagcggcacggttgatctaaagcatgagctggagcaggtgatcctacggatcaccagtcgatgcttgctggggagggaggtgcgtgagaatctcttcgacgacgttgccacactcttccacgacctgtgcaacgggatgcagccggtgagcgtcatcttcccctacctcccgatccccgcgcactggcggcgcgaccgggcgcgccaacggctgagggagatgttcggcaccatcatcagggcacggaaggcctccgggcggtccgaagaagacatgctgcagcgcttgatcgactacaggtacaaggacgggcgcgccaccacggaggacgagatcgccgggctactcatcacggtgctcttcggcgggcagcagaccagctctatcacctccacctggaccggggcctacctgctccagttccgacgctacctggcagcggccgtggaggagcaggaggaggccatctggcgtcacggagataggatcgaccatgacgtctttgcggagatggacgtcctgtaccgatgcatcaaggaggctctccggctccagccgccggtggccataatgttccgctggtcgcactccgacttcgccgtgaccacgagggaaggcgaggagcttgtcgtccccaagggccagatggtggcggcgtcgccggccgtcgccaacaggctcccccacgtctacaaggacccagacttgtacgacccagagcggttcgcgcctggaaggagcgaggacaaggcggcaggtgccctgtcctacatctccttcggtggcggcaagcactggtgcctcggcgagttcttcgcctacctggagatcaagacggtgtgggcgcacctgctcaggaacttcgagatggagctggtgtccccgttcccggagaacgagtggaactccatgctcgtcggcgttaagggcaagctgatggtaaagtacacgaggcgcaagctcgtcgtcgtcgatggcaaataatatggcccc

SEQ ID NO: 118140 - DNA, 356 bp, Zea Mays
ggtaaaaccaaaacacttaaatgccaaaccagtaaaaccagcgaattagctgagcaaaagtattataatgcaacgtgggttctcaggctggcagcagtctcatttcctgaacgagcactgcttcaaatgctaaaggccagctcaggatcatgccacaattatcttctgagctactgcacagatagactagatgtcatcttcaagggttgctttcttcttgagattgtacttatttgattctcttttgtagctttgtaccatcagccaccataaggattggactttaggttatgctattctgattgtgcaacgaactttagagttccaacaaagcatgtgcaaactaatgctttata

SEQ ID NO: 118141 - DNA, 475 bp, Zea Mays
agatcgagcaacagcggcgttatgaagtcgcccactgccaagcaggcacttgctgcagccctctcagctctgctgatccttctcttctttgtcctgctctgtggcccttcttcttcttcttcatcgccgtcgtcccagccgttgcagctgcaaccgtctgttgtgagagtgaggagcagaaggcttctgtcgacgcaatgccgtgactcctgctcgacgcctgtgggcgggttcagccaagccttcaaggcaccggccacggtgttgttcgagagcttgaagacgacgcccaagagcaggtccaacccatcccataattaggccgggagttagcttagttcctccatgttcttctcactctagctttgttcttctgtactgtagtggatcacttctgctggtcaggatgtacacattgcgggggcaaagctagctagctagcttgactgcagctcggcatgtatatatgtacttt

SEQ ID NO: 118142 - DNA, 366 bp, Zea Mays
atgtcggaagcatcttcaactgctctgagccgactcagtcttggcttccgccgactcagtcttctcggcctcagcagcatgtccggcagcttgaggtttcgatacttcttcttcatcactatcatcctcaaaatcatccattcccataccacccattccaccaagaccacccaagccagccatatcacccatgccacccataccacccataccgccaaaattctacaaaaaaaacaaagaaaaatatcaaaccagtttgccccaatgtcaaggcatcccttagaagaaaaactggtgaaggaattatttaccgagaagtccatcccatccaagttgacatcagcacctaaaagaagagatagatga

SEQ ID NO: 118143 - DNA, 420 bp, Zea Mays
atgtcggaagcatcttcaactgctctgagccgactcagtcttggcttccgccgactcagtcttctcggcctcagcagcatgtccggcagcttgaggtttcgatacttcttcttcatcactatcatcctcaaaatcatccattcccataccacccattccaccaagaccacccaagccagccatatcacccatgccacccataccacccataccgccaaaattcgagaagtccatcccatccaagttgacatcagcaccatcatcatcttcgtcaacccatttgtcccaatcaactttcacaaagtgaggtgccctttgatcatctcgaacaagtttcttccaccatttggcctcagctttttctacaatacagaatatggacctgacacccacacttattttgctagcctgttatattaa

SEQ ID NO: 118144 - DNA, 676 bp, Zea Mays
cactcaggcgcaccacgcacaggaaagagtgagagggaggcggccgtaaccgcaatggcgacgctgccgcagcggttcaagctgctggcgacgcggtgcgcggcgggggcgccgagcccgtcacgcagccccgcgccggcctacgcgggagccgccagccccgggtaccgcctgcgccgccgggtccggggcgctgggaccaccaccgccaccgccaggcgccgcggccgcctgcgccgcttcttgagccgccgcggcggcggtgccgcggccggggcagaggcgctagcggccgcgcggcaggaggacgacaggaagccgctcttcggcggccgaccgggcggcggccgcacgctgcgggatctgttcgtcgcgtccccggaggccgggcgccgccgcggcgggtgcagctgcgactgcggcgacgacgaggatgacgacggcggaagggtcggcggtgccggtgcggatcccggcggcggcggcggcggcggcgcgtggctagggggccggaggttcagctccggcgggctgcggagcctgctgatgcgacggagctggcggccggtgctggtggccatccccgaggcggatggcaacaagatcgagctcggcgccatcgaggaataaagtacaaagagtggaaacggctggggggtggggattcttgccgtcg

SEQ ID NO: 118145 - DNA, 219 bp, Zea Mays
atggacaactggagaaagccttacatagcaatggaccacagattcaacagcttcgtcttcgtcttctaccgtcagatagccgcgtctctcctcatggtgcccacggtagtccttctcgagagatgtgatttgttcaatctgtggcaggagaaatgcaagatccatgtcgtccgcgttgctcttcaagatctttgtgtgcgccttgatcgggttcaatga

SEQ ID NO: 118146 - DNA, 2483 bp, Zea Mays
gtcctggtcttctgcgagaagcacacgaagcaaccggggcacctccgcctgcgcctcccctctcagctactctgtttgtacgcggccgcatccatttcgtctgcccaggaatggaggaagaatatctgcagtgagggactgaggggatcccaagttccaaacaaaactcaccgaggaaaatcattttccgacatggtgaggacgagaaggaggttggtgctgctgctgctcctcctcggcctcacggtgctttccccgctcgcgctctacactagccgcctctccgtggcgcttaactctatacaagcgcgggttttccctggagagatcacgaatcagggccgtggcgtcaaggcagataagctgaatgcgcttcctctgcaaacagtgagctccttgaaagaacctgtcgacattgtcttctcagaggagctgactgaatctaagagccaagaattgcgattgccaaaggtaggtgcgcacaagagccgcgtgctctctgaagtcacggttgctgatgatgatacatcatcgaaagataatgaagtgattgagcaagtaattacgctggaagcacaggatggtggcttggtgaagggagcaggtgtttcagatgagcaggagaaaaacattggatcactgcagcaatcttcttctgaggaaagttcacaggacactatgcctaaacagacacctgcaaaggttgttgcggagaactcccaatcagctagaacagacggtaaaactaaaaccactgttctacctgatatgcggatccgaaatatcaaggatcagttaatcaaggcgaaggtataccttggtcttggatccattagagcgagttctcaatatcttaaagacctacggcagaggatacgggaagttcaaaaagtgcttggtgatgcatccaaggactctgatctaccaaagaatgcacatgaaaaggttaaagcactggagcagatgctgattaagggaaaacagatgcaggatgattgttctattattgtaaaaaagcttcgagctatgcttcattcagcagaggagcagctgcatgcacacaaaaaacagactgtttttctgacacaacttgcagctaaaacccttcctaaaggtcttcactgcctccccctgagactagctaatgaatacttttcattggatcctgttcggcagcagttcccaaaccaacaaaatctcattaacccaaaactgtatcattatgcgttgttctcggataacatactagcaacagcggttgttgttaactcaacagtgttaaatgctaagcatccttctgatcatgttatccacatagtaactgacaaactgaattatgctccaatgagaatgtggttcctctctaatcctccggggaaagcaacaattgaagtacagaatattgaggagtttacatggctaaatgacagctacagtccagtactcaaacatcttgggtcccaatccatgattgattactactttggaacgaatcgtgcaaactcagattcaaacctaaaatatcgaaacccaaagtacctgtcaatcctcaatcatctccgcttttacctacctgagatttatccaaagcttgacaagatggtctttcttgatgatgacatcgtagtaaagaaggatctggctggcctttggtcaatcaacatgaaggggaaggtaaacggtgccgttgagacttgtggagagagtttccatcgctatgatcgatacctgaatttttcaaatcccattatcaccaagagttttgacccacatgcttgtgtttgggcttttggaatgaatgtgtttgacctggctgaatggaggcggcagaacataactgaaatttatcactcgtggcagaagcttaatgaagatagatcactctggaaacttggtactctccctccgggtttggtcacattctggaacaagacatttcccctcagccggtcatggcatgttcttggtctaggttacaatccccatgttaacagcagagacattgagcatgctgcagtcatacattacaatggcaacatgaagccctggttggagattggtctacccaagttccggagctactggtccaagtatctggattatgaccaatctttccttcgggaatgcaacatcaatccatgaaggaacctggtgcttttagtcccttctgacataaccaatagcctgttttctgtcgatgtgcgctttagtgtagtcagcatagtactctcttgctttagatatcagttgttaacaagatttcttattgcctgtgcttcttgtcagaccctttgcataattgcaggaatatctgttatgtttttagagtacatgctttggagcagggcaaactttagatagtgcaatgctcttatgcgatatcgcctttatgtactgaacgtttgctgcaatcctgtaatttggaagcaaactttcccaacaatttaataggtattcaattgggtatcatattgcattgcacc

SEQ ID NO: 118147 - DNA, 2462 bp, Zea Mays
ctggtcttctgcgagaagcacacgaagcaaccggggcacctccgcctgcgcctcccctctcagctactctgtttgtacgcggccgcatccatttcgtctgcccaggaatggaggaagaatatctgcagtgagggactgaggggatcccaagttccaaacaaaactcaccgaggaaaatcattttccgacatggtgaggacgagaaggaggttggtgctgctgctgctcctcctcggcctcacggtgctttccccgctcgcgctctacactagccgcctctccgtggcgcttaactctataccgcgggttttccctggagagatcacgaatcagggccgtggcgtcaaggcagataagctgaatgcgcttcctctgcaaacagtgagctccttgaaagaacctgtcgacattgtcttctcagaggagctgactgaatctaagagccaagaattgcgattgccaaaggtaggtgcgcacaagagccgcgtgctctctgaagtcacggttgctgatgatgatacatcatcgaaagataatgaagtgattgagcaagtaattacgctggaagcacaggatggtggcttggtgaagggagcaggtgtttcagatgagcaggagaaaaacattggatcactgcagcaatcttcttctgaggaaagttcacaggacactatgcctaaacagacacctgcaaaggttgttgcggagaactcccaatcagctagaacagacggtaaaactaaaaccactgttctacctgatatgcggatccgaaatatcaaggatcagttaatcaaggcgaaggtataccttggtcttggatccattagagcgagttctcaatatcttaaagacctacggcagaggatacgggaagttcaaaaagtgcttggtgatgcatccaaggactctgatctaccaaagaatgcacatgaaaaggttaaagcactggagcagatgctgattaagggaaaacagatgcaggatgattgttctattattgtaaaaaagcttcgagctatgcttcattcagcagaggagcagctgcatgcacacaaaaaacagactgtttttctgacacaacttgcagctaaaacccttcctaaaggtcttcactgcctccccctgagactagctaatgaatacttttcattggatcctgttcggcagcagttcccaaaccaacaaaatctcattaacccaaaactgtatcattatgcgttgttctcggataacatactagcaacagcggttgttgttaactcaacagtgttaaatgctaagcatccttctgatcatgttatccacatagtaactgacaaactgaattatgctccaatgagaatgtggttcctctctaatcctccggggaaagcaacaattgaagtacagaatattgaggagtttacatggctaaatgacagctacagtccagtactcaaacatcttgggtcccaatccatgattgattactactttggaacgaatcgtgcaaactcagattcaaacctaaaatatcgaaacccaaagtacctgtcaatcctcaatcatctccgcttttacctacctgagatttatccaaagcttgacaagatggtctttcttgatgatgacatcgtagtaaagaaggatctggctggcctttggtcaatcaacatgaaggggaaggtaaacggtgccgttgagacttgtggagagagtttccatcgctatgatcgatacctgaatttttcaaatcccattatcaccaagagttttgacccacatgcttgtgtttgggcttttggaatgaatgtgtttgacctggctgaatggaggcggcagaacataactgaaatttatcactcgtggcagaagcttaatgaagatagatcactctggaaacttggtactctccctccgggtttggtcacattctggaacaagacatttcccctcagccggtcatggcatgttcttggtctaggttacaatccccatgttaacagcagagacattgagcatgctgcagtcatacattacaatggcaacatgaagccctggttggagattggtctacccaagttccggagctactggtccaagtatctggattatgaccaatctttccttcgggaatgcaacatcaatccatgaaggaacctggtgcttttagtcccttctgacataaccaatagcctgttttctgtcgatgtgcgctttagtgtagtcagcatagtactctcttgctttagatatcagttgttaacaagatttcttattgcctgtgcttcttgtcagaccctttgcataattgcaggaatatctgttatgtttttagagtacatgctttggagcagggcaaactttagatagtgcaatgctcttatgcgatatcgcctttatgtactgaacgtttgctgcaatcctgtaatttggaagcaaactttcccaacaatttaataggtattcaattgggtatc

SEQ ID NO: 118148 - DNA, 368 bp, Zea Mays
ctaccggcgcagcggttcaaccccgccgaggagtaccaccagcagtacctcgagaagggcgggcaatctgccacctcgtcatctccttcgtccctcgttgtccagttgcgctacgactgtacattcgaatcaaaatacgacatcatcttcaacctaatcagtagattggaatgggacctgttcactcggatctgaagatgaagaaatcggtgagtgatttccccctctcttctctagcccaccccctcatctctagctggtcctgcggtcgggattcggttggcgcaaacttgctggcacagtcaaatgcggccacgcaccttcaacagcccggttccgaacagtgttgggccacaacaccagctcgg

SEQ ID NO: 118149 - DNA, 600 bp, Zea Mays
atggtgaccgacacgcccagaggcttgccgcagatgatcagcgcgctcccacgaaccccaattgcacttccactggaatcagcacggtggcgcagagggaaaccacggcggcgggcagagagcgacggtggcgctgtctcccttctctctattcctctcgatgtgttcgatggctctcggggtgccaagcttgttccgtctcagcacatggagaggggggctggtaacaatgctggggttttatgcccctgtgggcggagtccgcacccgagggattcggctaattctccaacaaattcggttgaagaccctaacaaccccgtcgagcggttaagcgcctgcggttcccaaccagtgcagcgtagcatacacacagcttgcattcgaggcccggagataaatgctccccttgacaaagatgaggtagacaaggctcctgaaaaagaggaagaaattaacaaggcaggggaaaaagatgaaaactggatttcgatgatagtgaggaagatctccttagttcccaagaacttgaggtgtttgtcagaggaatgggagttatgctggaagaaatacaagatgaaggaattgagaaaattgtga

SEQ ID NO: 118150 - DNA, 775 bp, Zea Mays
tcaggtgaagtttcattgccaggaggaaaggtcgaggagggtgatgctgatgatgtagcaacagcgttaagagagtcaaaagaggagattggacttgatccagctctggtaactgtggttgcctctcttgaacacttcttgtccaagcatcttctggtagttgttcctgttgttggcatactgttagacagacaagcatttaaacctgctcttaatattgctgaggtagacgaaatatttgatgtacccctggagatgttcctcaaggatgagaacaggacatcggaggagcgagaaaagatgggccagacattcacagttcattacttcacttatgagaacggaatccagaagtacttaatctggggtctgaccgcccgcgtcttgatccatgctgcttcagttgtatacgagcgaccgccagactttacagagcgaagagcgcatttcaaattgccaaagttcacaaaggactgctcttcaatgctagcaggacctgctaaacattagtgcacactgcctacgctgctatctcagctacatgctatttggagtacaggatgttgcaccaacatagtttatagaatcgaagagacgtccaaatcacttgatgtcatatgaatttagattctttcgacaaaacactatagtggcatttatgttcagaacaatgttcatatatgaattatgatgcaccacaaatcatccatgttgatgctgttaatgacatggagcacttgctcggatgcaataatgcaattggctcgtatataca

SEQ ID NO: 118151 - DNA, 731 bp, Zea Mays
caagctttagataaatgcaacaaggcagcttgagctcgtaaacaagccgagccgaactgaattggctcgtcatgcagccctgtggtctatacattactgtacagaatagcaaactatgatagtttggtgtactagtagaactagcaattgcaaatagcaaatggtctttgtcattttcatttgatgcatttaccccatggccaatttgcgttgaatggcacaggatgagaacaggacatcggaggagcgagaaaagatgggccagacattcacagttcattacttcacttatgagaacggaatccagaagtacttaatctggggtctgaccgcccgcgtcttgatccatgctgcttcagttgtatacgagcgaccgccagactttacagagcgaagagcgcatttcaaattgccaaagttcacaaaggactgctcttcaatgctagcaggacctgctaaacattagtgcacactgcctacgctgctatctcagctacatgctatttggagtacaggatgttgcaccaacatagtttatagaatcgaagagacgtccaaatcacttgatgtcatatgaatttagattctttcgacaaaacactatagtggcatttatgttcagaacaatgttcatatatgaattatgatgcaccacaaatcatccatgttgatgctgttaatgacatggagcacttgctcggatgcaataatgcaattggctcgtatataca

SEQ ID NO: 118152 - DNA, 295 bp, Zea Mays
aagggttggagacccatatttatagccctagaggctgcactaccataccttctcacacacactacacaacaggattgtcctctagatgctaaagagactacagaggacagtcaaaagcgactgttgtcctctagatgctaaagcgactacagaggacagtcaaaaagtgactgctgtcctctagatgctaaagagactacagaggacagtcaagctgtcctctagatgctaaaggactacagaggacagtcaaaagtgactgctgtcctctagatgctcaagacttattccatca

SEQ ID NO: 118153 - DNA, 501 bp, Zea Mays
aagcttattgtatttgcagatgtatagtgctcagatgggatctcaaatgggaccccagttcacccgtccgtcacaatctggatagacccccaacaccaacgaaacacagggttctgagaccggacaaggaaactcacagatggacatgcagtggtcgatgcctcctagaggacagattcttcctcctccacaaccaggtatgggatattggccgccaccaccatggggatatcctacacatccaatggggccttggggacgccccccatggccaacacagccacttccatcaccagcggattctggctctcatcaagtgactcctccccctcacgctgactttgcggacagatgtctcaattctagtggtggagctacgaacaacaatccgatgtcctgatcgagagcgatggagctaatgttgaacttgtgtgtttgaacttgtgaactaaaaatgtgaactatggatgtgaacttatttgaatttgtgaacttatgtat

SEQ ID NO: 118154 - DNA, 2710 bp, Zea Mays
atggcgccgccgccgagctcttggtggggcagcgaggagcagcgcggcacgccggtggtggtgaagatggacaacccctactccctggtggagatcgacgggccgggcatgccgccctccgacaaggcccggggcaagaacgcgaagcagttcacgtgggtgctgctgctgcgcgctcaccgcgccgtggggtgcgtggcctggctcgcgggcggcttctggggtgtcctgggcgccgtgaaccgccgcgtgcgccgcagccgcgacgccgacgacgagcccgacgccgaggcctcgggccgtggccgggtcatgctgcggttcctgcgcgcgttcctgctgctctccctggccatgctggccttcgagaccgtggcgcacctcaagggctggcagttcccgcagcacctgatgccggggaacctgcaggagctggaggagcagctgcagcacctgccggagcacctgcgccacctccccgagaacctccgccagctgccggaccacctccgcgtgcccgagcggcaggagatccagggctggctgcaccgcgcgtacgtggcctggctggagttccgcgtcgactacatcgcctgggccatccagaagctgtccaccttctgcatcctgctcttcatggtgcagtccgtggaccgcatcgtgcaatgcctcgcgtgcttctggatcaagatccgcggcatcaagcctcgtatccccgcgtccgccggcggcaagccccgtggaggaactactggaaggaagagagtggacgacgttgagaacggtgacgccgacgacgaccgctacttccccatggtgctcgtccagatgcccatgtgcaacgagaaagaggtctacgagacgtcgatctcgcacgtgtgccagatggactggccgcgggaccggctgctgatccaggtgctggacgactcggacgacgaggtgtgccagatgctgatcaaggcggaggtgaccaagtggagccagcgcggcgtcaacgtcatctaccgccaccgcctgtcgcgcaccggctacaaggccggcaacctcaaatccgccatggcctgcgactacgtcaaggactacgagttcgtcgccatcttcgacgccgacttccagcccaacccggacttcctcaagctcaccgtgccacacttcaaggagaacccggagctcggcctggtccaggctcgctggagcttcgtgaacaaggacgagaaccttctgacgcggctgcagaacataaacctgtgcttccacttcgaggtcgagcagcaggtcaatggcgtctacctcaacttcttcggcttcaacggcacggccggcgtgtggcgcatcaaggcgctggaggactcgggcggctggatggagcgcaccaccgtcgaggacatggacatcgccgtccgcgctcacctcaacggctggaagttcatattcctcaacgacgtcaaggtcctctgcgagctgccggagtcttacgaggcttacaggaagcagcagcacaggtggcactccggccccatgcagctcttccgcctctgcatcccgaccgtctttaggtccaagatcccgttctggaagaaggcgaacctggtgatgctcttcttcctgctgcggaagctggtgctgcccttctactccttcacgctcttctgcgtgatcctgccgctcaccatgttcgtgccggaagcggagctgcccatctgggtcatctgctacatccccgtgctcatgtccatcctcaacatcctgccggcgcccaagtccttcccgttcatcatcccctacctgctcttcgagaacaccatgtccgtcaccaagttcaacgccatggtgtccgggctgttccagctgggcagctcctacgagtggatcgtcaccaagaaggcgggccgcacctcgtcggcctccgacatcctcgcgctcgccgaggccgacgcccacgcccacgcgccggcgccggcggccaagctcgtgcgcggcgtctccgagggcggcctccaggagtggggcaggctgagggagcaggaggccgccgagtgggccaacaaggaggacgccgccgcggctctggctgccgccgcggccccggccacgcccaagaagagcagcaacaaggccaagaagccgccaaaccggatcttcaagaaggagctcgcgcttgcgtgcctcctcctcacggccgccacgcggagcctgctctccaagcaggggctgcacttctacttcctgctcttccagggcgtcacgttcctcgccgtcggcctcgacctcatcggcgagcaggtcagctagccggccgccgccacagaagaataaacttaaattagcggccggctcggcatgcacggcctgcaagccacatgcacagggcatgcgtgcaggcggtgtaaccatgcatcaccgtggcagtggatcgacggatcggattaatttttagactttcttccgttaattttatccttttgatattttttgttcagagatcaacaaagagtctgtgtggtgaactctactcttctgtagctagtgcttctttgttggtatattgctagcgctactaggggaggcagtccggttgttccttacattcatatatcagtactacttcatgcatgtattcagtagccttgttttctttcaaacattacattatgatcgatatggtgtaacagaaacattttaatggataaatcaatcttgtatcctt

SEQ ID NO: 118155 - DNA, 162 bp, Zea Mays
taaatccgacttgaaaccacgaaatcgacgacgccttttagctcagcatttcaccgaaaatagggtgagtgctgcgtcgaatcacgcttcatcttcatccacatcgagaattctccggtcgtgtactgatttattttcttccgcgcctaatcttctcggatc

SEQ ID NO: 118156 - DNA, 126 bp, Zea Mays
gttccttagctgtgcttattatctacttagttatgtttggtcttatttccctattgtttccattaacttacacgatttaagtggacaaagttcaacaaaatgtgcctaaatccaatagcggtttaa

SEQ ID NO: 118157 - DNA, 660 bp, Zea Mays
aattttattttggccatgtcgtcgtcttcgccttccctcctctcatcgcggctactctccccagccatcctcttcacaaagaagccggcttccctgcgctccatttcctctgcgacagcgagacacggggttcgggtggtggtagccgcggcgtcagcggccgcagcgtcaccagtgtccgcggcgcgggtgcgaccgtcggcggcggaggtagcgcggactgtcgtggagcttgccgcgtccgggactctctccatggtgggcccagacggctggcctctcggcgtcggcgcgcacttcgtcgcggattctgccggtgcacccgcgctctgcctgtctgccgctcgggtcgccgcgcccgatgcgccggccagcttccacgtcgaggtgaggggacgctgaccggctcctcataaaggttgcgtttttagggggatacaatcctgtgctaaggcagtgtcaagcccgggaaagattcagttttccttttcatcttctgatctggcgttccgtattgtgctgacgatgtgaattgctcacggattctagaattggatgaaatagcttgcatttcggtatgctaaaggttgcgtttttagggggatacaatcctgtgctaaggcagtgtcaagcccgggaaagattcagttttccttttca

SEQ ID NO: 118158 - DNA, 1179 bp, Zea Mays
aattttattttggccatgtcgtcgtcttcgccttccctcctctcatcgcggctactctccccagccatcctcttcacaaagaagccggcttccctgcgctccatttcctctgcgacagcgagacacggggttcgggtggtggtagccgcggcgtcagcggccgcagcgtcaccagtgtccgcggcgcgggtgcgaccgtcggcggcggaggtagcgcggactgtcgtggagcttgccgcgtccgggactctctccatggtgggcccagacggctggcctctcggcgtcggcgcgcacttcgtcgcggattctgccggtgcacccgcgctctgcctgtctgccgctcgggtcgccgcgcccgatgcgccggccagcttccacgtcgagtttcgacagagtggggctaggacaccacagtgcactatgcttggtgccttaactaagcctagtgatgaatctgtgttgaagaagctttctactaggtggcaaaagaaatttggggaagagattgatcaagatcttttgtatttaatatctgttgaccggatcttgcacatggaagatttcaatgaggatggcatgtgggtagttccatcagactacaccagtgcagaacctgatcctctacgcaattttgctgaaaacatcgtggaggaatttaacaacaaaaatgctgaagacgtccgtaggatatacaacatatatgtcgaatcagatttacaggtggcagacgtgaagatgatatgggttgacaggctaggtttcgatctccacgctcattctgcggaaggcgttttggctgttcgggtcccttttcctagggaggtctccgacgagaagggggtgaaatcgtcgttcaacatgatgtctcatcatgcgtgggaggtggagaagagctacgcgagcccagagtttgagaaggtgcagttcttgaagaaggtcagatagcattgcgaattctgtttccgtggtggacgatctttcgttattgagaggagtgatagtttgaagttttgtttcctttatcatgaactgtttgtcttgtatattggtcatatttttttgtgcctaatacattggatgcaattggcatcttgaattatctgctagtaatttatttgagaagggcaatgagttttgaccgtaagaataactctgggccatgagatgacaagtaaa

SEQ ID NO: 118159 - DNA, 971 bp, Zea Mays
ttttgctaaagacatgaattctgtagggaattagccagtggctataatggcagtgtgtccaccctgggcatattcttgtatacaataatgtaaataattacacttttccaccatttcataatatttttttctctgtctcattctgaggctctgagccaccattgctttccatgcttgactgtagttttgtttttgtttttttaaccaaagctctcatggttggaccaatgctttgtgttgtgccttgttaaattgtgcagaagctttctactaggtggcaaaagaaatttggggaagagattgatcaagatcttttgtatttaatatctgttgaccggatcttgcacatggaagatttcaatgaggatggcatgtgggtagttccatcagactacaccagtgcagaacctgatcctctacgcaattttgctgaaaacatcgtggaggaatttaacaacaaaaatgctgaagacgtccgtaggatatacaacatatatgtcgaatcagatttacaggtggcagacgtgaagatgatatgggttgacaggctaggtttcgatctccacgctcattctgcggaaggcgttttggctgttcgggtcccttttcctagggaggtctccgacgagaagggggtgaaatcgtcgttcaacatgatgtctcatcatgcgtgggaggtggagaagagctacgcgagcccagagtttgagaaggtgcagttcttgaagaaggtcagatagcattgcgaattctgtttccgtggtggacgatctttcgttattgagaggagtgatagtttgaagttttgtttcctttatcatgaactgtttgtcttgtatattggtcatatttttttgtgcctaatacattggatgcaattggcatcttgaattatctgctagtaatttatttgagaagggcaatgagttttgaccgtaagaataactctgggccatgagatgacaagtaaa

SEQ ID NO: 118160 - DNA, 104 bp, Zea Mays
gattctttgaaaatgtgcaggatgttaaggagtgccaaaatttgatgtatatcaataactttccagtgcagttaagtatctaattgttacttgacaatcaccaa

SEQ ID NO: 118161 - DNA, 1118 bp, Zea Mays
atctcattggtatcctgtgagccacgtcgaagaagttgtccccaagaatcatgcagagaatgccgtcatgtgagtagagagaggagaagccaccaccgtggaactttgcctgcgtaaccgttcagggcatgaggactagcctgggagcttcatggcatccccatgttagttctcttggtcgttccaaggaggagtcacggccggtgaagctaggattgcttgtcggagcaattcaccgcctcggatttgtgtgctaccgtgggcggaggtctatgctacataatcactggacgttgggcaaggactcgccggagatcgccgccgcgcctagctaccaaaggaggaaggagcatcatgcgccgttgatctccacggagatggcttagattatatataatttatatcggttcagtggtgtgttctgcttcgtcgatcatggatccgacgcgtggggtgacgtaccggttcgtgaagaaggggatcgaaatcctggctgtcgatcttgaatcgaactaccgatagatgcatggacttaagtcgtcgtgccttttgcataaaacccctttgagttttaaggaactaaaccaccgtccattatattataaagagtcttacgcgggagtcctgattttttcatattatccctctaactcttattaaatggaacccacagttcatgtttttttaaatataaaattaaattccaaggaaatgatttcttttataaaaataaacctagaaaattagataattcataactttcttggttttaactctgtttttagtgattctcgaacctatggcttcgtgtcgttgcgtagaatattactatgttgtttgtttccatgtttagtgtaatattattttatttattctttgtctatttgtatgtattgttgtgatagaaaagcgaggttacgagaaacctgaagccaaacttggagaagtacctgtagttgcatcaaaaagacaagtgtgtccttgatcacattcttgacctaataatattaatgttcttaccttgcatgcactgttaggttaaattgatggaacctaataggttacctagtcttgtttaccctataccttgcttataaatgaattattaattttgggta

SEQ ID NO: 118162 - DNA, 2645 bp, Zea Mays
cactattcattcgaaccagtttgtccggaccaggacccgatgctgtcaaaaagtaagcagccacagtatgaaagggaagcgtttttccctttccttggggcgggtcggagaccaggcgccaggcggagcagagcgcgcggggcgcggcggggccggaacacgcgcgcactatgcccagcccaactgctacctgaccggcaccggcaccggcaccggcacgggctgtgcgacgctgccgcctttgcacgtgacgtgcgctctctgctctgctcccttggccgccggtgtgtactgtacgagtcctacgtccaaacagatgagaaggaagcgaagcactgcactgcacacgccgccttgggccttggctcggctggctgctcgcggctgcgctgcatattataaagcccgcgccagctcttgccgacccgagcgcagagcttgctgcttgccttgccttgcctttgcctgccaatccaatccagtcctgcacctgctcgggcggctagtagctggccaaagctccggtgccagcttcgactcgagtgcggttgcaggctgcctgtctagtcaactcgctcgccggctcgtcgctcctccagggagggagggagtgtgtgtgtgtctagcagacagagatagaatacgagagatagagagagaggccatggacgatgcagagagatcccaggcgccgcccgagagctgcgtggactggcgcgggcgcccctgccggccgcgccacggcggcatgcgcgccgccgccttcgtcctagtgttccaggcgtcgcagacgatggcgctggcggcggtggggagcaacctcatcaccttcgtgttcggggagctgcacttcccgctgccgcaggcggccaacgtggtgaccaacttcgtcggcaccgtcttcatcctctcgcccctcggcggcttcctctccgactcctacgccggctgcctgcgcacgctgctggccttcgccgccgtcgagctcgcgggcctggtactactggcggtgcaagcgcatctcccgcagctgaggtcggcgccgtgcaacatgctgaccatggagggcagctgcgagcgggccggcggcaccagggccgccgtcttcttcgtggcgctgtacctggtggcgctcggcgccggctgcgtcatgcccaacatgaccgcgtacggcggcgaccagttcgcggcgggggagaagggcgccaagcgcctctccacctacttcaacctctcctacctgggctactgcgtcgccgaggtcgccgcgctgacggccgtggtctgggcgcagacgcgcttcgggatggccgtcggcttcggcctcgccgccgccgccctgggcgccgggctcctcgccctcgcgtcaggcgcggcggtgtaccgcaacaagcccccccggggcagcgtcatcttcactcccattgcaagggttttcgttgctgcgttcagcaagaggaagcagatctgcccttccggctcctccaaccctgcccacaccgcggccggagatgcggcggctgtcgtcgacggcggcgacttccgccacgccaacaagttcaggttcttggacaaggcgtgcatcagggacgcggcggacacggtgccggagagcgagtggcggctgtgcacggcgggcgaggtgcggcagaccaagaccctgctggccgtgctgcccatcgtggcgtgcaccgtcgtcaccaacaccgtgctggcgcagctgcagacgttctcggtgcagcagggcagcgccatggacacgaggctggcgccgtcatccttccgaatcccgccggcgtcgctgcaggccatcccgtacgccatgctgctggcgctggtcccggcctacgagctcctgctggtgccgctcgcgcggcggctcacgggcgcgcgggccgggatcgccccgctccagcgcatcggcgtcggcctctgcctcgtcgcgctgtccatggcctccgccgcggccgtcgagcgcaggcgccgggacgccgccgtgccggcgtccggcgggcggcggcagcagcagctgtccgtgctctggctcgtgccgcagttcttcgtcttcggcctgtcggagctgttcaccaacgtgggcctcatggagttcttctacgagcaggcgtcgtcgaccgccgggacggcggcgcacatgcaggccttcttcatggccttcttctactgctccttctcgttcgggttctacctcagctcggtgctcgtgtcgctggtgaacagggccacggcgggcggcggccgccctggctggctcggcgacaacgacctcaacaaggacaggctcgacctgttctactgggtgctcgccgcgctcagcgtcctcaacttcttctgctacctgctgtgcgcgaggtggtataattctggtgccgccggctctgggcctgatggggctgcccccggtggcgaggtcgcctctgaggaggaggacgatggcaaggggctcatctgaacatcactggaacgaccatggcactaaaaagctgatgtatatggcaaccattcgtacgcacggcacatccctctcttcttacaaagcatatattatatttatataacaaggcctcctatatatacaagagccgtagataataatattagcatgcacacaaggttgccacgatgat

SEQ ID NO: 118163 - DNA, 1776 bp, Zea Mays
gtcatgctgagccaaatgtttttttttagattttatcgaatcgattcaaataaaacgcatagcttacgtttcttcaagccccccgtttttttttaaaaaaaatcgaccgttttttttaccagggcctggtactactggcggtgcaagcgcatctcccgcagctgaggtcggcgccgtgcaacatgctgaccatggagggcagctgcgagcgggccggcggcaccagggccgccgtcttcttcgtggcgctgtacctggtggcgctcggcgccggctgcgtcatgcccaacatgaccgcgtacggcggcgaccagttcgcggcgggggagaagggcgccaagcgcctctccacctacttcaacctctcctacctgggctactgcgtcgccgaggtcgccgcgctgacggccgtggtctgggcgcagacgcgcttcgggatggccgtcggcttcggcctcgccgccgccgccctgggcgccgggctcctcgccctcgcgtcaggcgcggcggtgtaccgcaacaagcccccccggggcagcgtcatcttcactcccattgcaagggttttcgttgctgcgttcagcaagaggaagcagatctgcccttccggctcctccaaccctgcccacaccgcggccggagatgcggcggctgtcgtcgacggcggcgacttccgccacgccaacaagttcaggttcttggacaaggcgtgcatcagggacgcggcggacacggtgccggagagcgagtggcggctgtgcacggcgggcgaggtgcggcagaccaagaccctgctggccgtgctgcccatcgtggcgtgcaccgtcgtcaccaacaccgtgctggcgcagctgcagacgttctcggtgcagcagggcagcgccatggacacgaggctggcgccgtcatccttccgaatcccgccggcgtcgctgcaggccatcccgtacgccatgctgctggcgctggtcccggcctacgagctcctgctggtgccgctcgcgcggcggctcacgggcgcgcgggccgggatcgccccgctccagcgcatcggcgtcggcctctgcctcgtcgcgctgtccatggcctccgccgcggccgtcgagcgcaggcgccgggacgccgccgtgccggcgtccggcgggcggcggcagcagcagctgtccgtgctctggctcgtgccgcagttcttcgtcttcggcctgtcggagctgttcaccaacgtgggcctcatggagttcttctacgagcaggcgtcgtcgaccgccgggacggcggcgcacatgcaggccttcttcatggccttcttctactgctccttctcgttcgggttctacctcagctcggtgctcgtgtcgctggtgaacagggccacggcgggcggcggccgccctggctggctcggcgacaacgacctcaacaaggacaggctcgacctgttctactgggtgctcgccgcgctcagcgtcctcaacttcttctgctacctgctgtgcgcgaggtggtataattctggtgccgccggctctgggcctgatggggctgcccccggtggcgaggtcgcctctgaggaggaggacgatggcaaggggctcatctgaacatcactggaacgaccatggcactaaaaagctgatgtatatggcaaccattcgtacgcacggcacatccctctcttcttacaaagcatatattatatttatataacaaggcctcctatatatacaagagccgtagataataatattagcatgcacacaaggttgccacgatgat

SEQ ID NO: 118164 - DNA, 2011 bp, Zea Mays
aacaacctgaagaacggagttcccaaaggaaagccccacaaaacctcggttgctccccttggcccttgccatcctcgttcctatcgccagttcgccacctcctttgctctcgcctcgcgcgcgctcccccccgcgcatcgtgccgttcgccaccgcaccgcgccgatggaggtcgccgccgtgcccagatccgccgcggcctgccgtgcggcgcccctgctcccggccgtccgagccgctgcgtgccacctggccctgccccggcgcgcgttctccgcatccgtcgcggcggcaccggcgccgcgccgcctcgccgctcgtcgcgctgcggatggtgacagcgtggagacggcgccggaggcggtccccattgagaaaaggttccctcccttcccgagcgtcatggacatcaaccagatccgcgagatcctcccccacaggtgagtgccggaagcttgattcctcgtccttggggttgctcaaacatgtttggcattgcaatcccacgacacaactcaggttgatgcaacagcttgaaaatatttgacattttgaccatgcaattcctttgcaaatatgagtatacactgcttttaactctgttgttccacactcacacctctagatcccagcagttgtagtcatgtaaaggactagcggcccgtgttcatagagcatacgtctacacgttgttaatgttaagaggctatcccaggtttggagttgaagcattgacataatgagaacagtttagcagttttgtctccttgtgagctgatgtagagtcagtttgtttctaaacaatggaaagaaacaatcagaaaatgtgatgacagacaaggtggatagttgatgtaaacctgaaatctaatgcaacttcagtcgactgcttactcaaaagtccaaagaagagttttgatacaaaacccaaaggcttctgcaatttcactactgtcttagctgtggaggctgctggagtcaccacgattccatctccatatcaacccctgatacatagtactttagcctgcatttctttatggattccagatatttgatctgttttcttgtgctatatgcaactgtaccctggatctcatatatatctgtgacaagttttacttgctactgaaaaggatgctgtccaaaatggaaatcaagtagcatgcctcattgatttcatgatgtgttgtgctctagagatcgataagcattatcatttaaataaccatgcacctgtttaaaactatttaatacctatgcatgtgggtatgcatgttaggttcccattccttttggttgatagagtaattgaatacaaggctggagaatatgcagtggggatcaagaatgttacaataaatgataatttcttcccaggacattttcctgaacgccccataatgcccggtgtcctcatggtcgaggctatggcccaggttgggggtctggtgatgctgcaacctgaagttggtggatctcgagacaacttctttttcgccgggattgacaaagttaggttcaggaagccagtgattgctggcgatacactgatcatgaggatgacactgactaagtatcagaagaggtttggactcgccaagatggaaggaaaagcttatgttggtggtgacctagtttgtgaaggggagttcctcctagtcagcgcaaccgagtagtgcaaagacacttcatgattctctgggaagaatcattggttggaatcagatctggttggatgtttgaaagaaccgagttttgaactaattatacaatcggcagttgaggcgatcctttacctgttcttaagcatgttgttgagtccatgtggtgatttctatcggttaccaagggcccaaggctgaatccacgccatgttatgttgcaattgaggattacaatatattgggtaattgtttgatggaataaacgataatgcttttgtagtttcttgccttttcttgcctgaaccttctcatttaccaggtgaccatacaaaattcttagtttc

SEQ ID NO: 118165 - DNA, 1161 bp, Zea Mays
gaagaacggagttcccaaaggaaagccccacaaaacctcggttgctccccttggcccttgccatcctcgttcctatcgccagttcgccacctcctttgctctcgcctcgcgcgcgctcccccccgcgcatcgtgccgttcgccaccgcaccgcgccgatggaggtcgccgccgtgcccagatccgccgcggcctgccgtgcggcgcccctgctcccggccgtccgagccgctgcgtgccacctggccctgccccggcgcgcgttctccgcatccgtcgcggcggcaccggcgccgcgccgcctcgccgctcgtcgcgctgcggatggtgacagcgtggagacggcgccggaggcggtccccattgagaaaaggttccctcccttcccgagcgtcatggacatcaaccagatccgcgagatcctcccccacaggttcccattccttttggttgatagagtaattgaatacaaggctggagaatatgcagtggggatcaagaatgttacaataaatgataatttcttcccaggacattttcctgaacgccccataatgcccggtgtcctcatggtcgaggctatggcccaggttgggggtctggtgatgctgcaacctgaagttggtggatctcgagacaacttctttttcgccgggattgacaaagttaggttcaggaagccagtgattgctggcgatacactgatcatgaggatgacactgactaagtatcagaagaggtttggactcgccaagatggaaggaaaagcttatgttggtggtgacctagtttgtgaaggggagttcctcctagtcagcgcaaccgagtagtgcaaagacacttcatgattctctgggaagaatcattggttggaatcagatctggttggatgtttgaaagaaccgagttttgaactaattatacaatcggcagttgaggcgatcctttacctgttcttaagcatgttgttgagtccatgtggtgatttctatcggttaccaagggcccaaggctgaatccacgccatgttatgttgcaattgaggattacaatatattgggtaattgtttgatggaataaacgataatgcttttgtagtttcttgccttttcttgcctgaaccttctcatttaccaggtgaccatacaaaattcttagtttc

SEQ ID NO: 118166 - DNA, 947 bp, Zea Mays
gtcatatgcccatgtctccttaacagtatgtctttatttttcttttcaccttttctttgccattctgctgataggaattgatttcctcacaagttttctgatataaactgactattgtgaaccatagctacccaacatatggacatgtagcagtatgttcagcagtgtaaactttcatacaggttacgccatttgatctatgactgatgtctactatgtaatggaatctgaatcagtatattagattacccaaaccagctgatatatatataatgcctacattaatgcttagtttgtatcctgttgaccccatgcctggattcagtaactcacattagaaactatttgcacctttatccacaggctatggcccaggttgggggtctggtgatgctgcaacctgaagttggtggatctcgagacaacttctttttcgccgggattgacaaagttaggttcaggaagccagtgattgctggcgatacactgatcatgaggatgacactgactaagtatcagaagaggtttggactcgccaagatggaaggaaaagcttatgttggtggtgacctagtttgtgaaggggagttcctcctagtcagcgcaaccgagtagtgcaaagacacttcatgattctctgggaagaatcattggttggaatcagatctggttggatgtttgaaagaaccgagttttgaactaattatacaatcggcagttgaggcgatcctttacctgttcttaagcatgttgttgagtccatgtggtgatttctatcggttaccaagggcccaaggctgaatccacgccatgttatgttgcaattgaggattacaatatattgggtaattgtttgatggaataaacgataatgcttttgtagtttcttgccttttcttgcctgaaccttctcatttaccaggtgaccatacaaaattcttagtttc

SEQ ID NO: 118167 - DNA, 1253 bp, Zea Mays
ctcccctcaacctagcgccgccactcgcgcccaccacgccgccgcaccgccgctggtgaacggatctgtccatcccatacaccagccatgtcctaacacactgacacacacctggtggaggaggaggcgccacctccgtccgccggcggcgcaggggaggagccggccatcctcagggcggcgcggggctccagcaagctgcgcatcgaggggtcactgagcttcaagcgggcgcaggccgcactgcaggtggagaccgagatctccattcggaccgccgccatgcccgcgccgggaccgggacccctgcctaggggaacccccgagaggaacacacaacaacgtctcaccagtcagccaccaccgcgctccatttcctttctctctctcggctcctccgctctcttgcccgagttgctagcttccctgcccgcctcctcccgtccccatggacagacagccccccacctccgcttccatagcatccgagctaaggtcaactcctccgtcggtggagcgagagcggggaagagatgggagggtcccggatccgagctgagctgtgctccccgcgcgaccgacacccaggtctcgtcgtcccatgcaaatctgctcctcctcctgaggtaaaattttggatagtttggtggtttagctgcacaagccctctatatgtaacattcttgtcttgaactcggtgtaccctgttattctgtttgcagataaggtgaccctgaccccttctttcttatacattggaaattataggccatccatggatccgtggcacacaggaagttaagattaatctagacatgataatctacaggcttatgagggcttacataagttcatcttctctacggaaatctgcattgagggtaatacttttgtaggttgcttgtactattttgcaagaatcatcatctttcgtttctgttggatcttggatgatcaataactgaagcctccatttttaagtgtattttattgataatgttttatctgcatcacctagcaaatggttgctttgtttttggatttatgtgatcctcttatgctttttcctcttataaatatatgtagtatgtactgctctgtaaataaaaacactgaatgattgtggtctgtccgtctgtgcacaatccatgctttctattcagcttaatgcaaatctggtataccctatgcatatctgttataacaagtgttattcagtatgttccttgcttgcctttcaccttaaaaattag

SEQ ID NO: 118168 - DNA, 1778 bp, Zea Mays
ctcccctcaacctagcgccgccactcgcgcccaccacgccgccgcaccgccgctggtgaacggatctgtccatcccatacaccagccatgtcctaacacactgacacacacctggtggaggaggaggcgccacctccgtccgccggcggcgcaggggaggagccggccatcctcagggcggcgcggggctccagcaagctgcgcatcgaggggtcactgagcttcaagcgggcgcaggccgcactgcaggtggagaccgagatctccattcggaccgccgccatgcccgcgccgggaccgggacccctgcctaggggaacccccgagaggaacacacaacaacgtctcaccagtcagccaccaccgcgctccatttcctttctctctctcggctcctccgctctcttgcccgagttgctagcttccctgcccgcctcctcccgtccccatggacagacagccccccacctccgcttccatagcatccgagctaaggtcaactcctccgtcggtggagcgagagcggggaagagatgggagggtcccggatccgagctgagctgtgctccccgcgcgaccgacacccaggtctcgtcgtcccatgcaaatctgctcctcctcctgagataaggtgaccctgaccccttctttcttatacattggaaattataggccatccatggatccgtggcacacaggaagttaagattaatctagacatgataatctacaggcttatgagggcttacataagttcatcttctctacggaaatctgcattgagggctcttgcaaaggcactgacgacagatcaactcttctacctaagagagcagtttacattattcggtccaaacaagagtggccatatatcattgcaaaatatgaagacggccttgatgaaaaattcctcgggtgcaatgaatgattctaggattcttgactttgttaactcaatatgcaatatccaatatggcatgattgattttgaagagttctctgctgcggccattagtgtatatcaaatggaaggcctggagacctgggaagaacatgctcaacaagcatatgaattgtttgacaaggttggaaaggggttgctgaaggactagaatgctcagaagcttgcgttgcagcactggctggaagcggtgagagaaacacgatctaaataaacagttttgtagtttacacatcctttttgcgaatctataaacagttagtttcatagtactagattttcaaaccgaaagcaagcaacctttcttctactggccgcacttgaagaaatcttatatcagtttgaggaaaaactccaagctgaaagagaggaagctactaggaagcaggaagagttgcaagcacaactacaagctcaacaggtcgcacttgaagaaaaccaaagtttgttgcgccaggcccaagaggaagtgaaggggatgcataccaagtttgaagagaccaatgcactgctacgagctgtcttgaaacttcagaaagattgaggtagggatgcataccaagtctgaggatgatgcctttgcttaaggtttttctaccttgctagaacatatctgtggttagaactttgtcagaactacgtgcaatctgtttgaatgcttcaaacctttgtggtggaacctttgtatgtttgaacctctgttgtggaagaactagtgtgctggaattgtgtatgacttgtgatgagaatgttgtgtatgatggcttttctgtgtattatgattctgtgagctatcatgagagctcagtgtgtcgtc

SEQ ID NO: 118169 - DNA, 2149 bp, Zea Mays
cccctgttggcctccttgctgctgagatcaagttccaacaaggggtcactgagcttcaagcgggcgcaggccgcactgcaggtggagaccgagatctccattcggaccgccgccatgcccgcgccgggaccgggacccctgcctaggggaacccccgagaggaacacacaacaacgtctcaccagtcagccaccaccgcgctccatttcctttctctctctcggctcctccgctctcttgcccgagttgctagcttccctgcccgcctcctcccgtccccatggacagacagccccccacctccgcttccatagcatccgagctaaggtcaactcctccgtcggtggagcgagagcggggaagagatgggagggtcccggatccgagctgagctgtgctccccgcgcgaccgacacccaggtctcgtcgtcccatgcaaatctgctcctcctcctgagataaggtgaccctgaccccttctttcttatacattggaaattataggccatccatggatccgtggcacacaggaagttaagattaatctagacatgataatctacaggcttatgagggcttacataagttcatcttctctacggaaatctgcattgagggtaatacttttgtaggttgcttgtactattttgcaagaatcatcatctttcgtttctgttggatcttggatgatcaataactgaagcctccatttttaagtgtattttattgataatgttttatctgcatcacctagcaaatggttgctttgtttttggatttatgtgatcctcttatgctttttcctcttataaatatatgtagtatgtactgctctgtaaataaaaacactgaatgattgtggtctgtccgtctgtgcacaatccatgctttctattcagcttaatgcaaatctggtataccctatgcatatctgttataacaagtgttattcagtatgttccttgcttgcctttcaccttaaaaattagaataaatgattgtcctatggttgttctatttttccattctactgatccttatttcctgggactgcatttttgttgggatgacattgtttcttgctattattgtgaacaaaggacacttcaagaaactgttatacaggacctgctaattagctatttaagtttttcaggctcttgcaaaggcactgacgacagatcaactcttctacctaagagagcagtttacattattcggtccaaacaagagtggccatatatcattgcaaaatatgaagacggccttgatgaaaaattcctcgggtgcaatgaatgattctaggattcttgactttgttaactcaatatgcaatatccaatatggcatgattgattttgaagagttctctgctgcggccattagtgtatatcaaatggaaggcctggagacctgggaagaacatgctcaacaagcatatgaattgtttgacaaggttggaaaggggttgctgaaggactagaatgctcagaagcttgcgttgcagcactggctggaagcggtgagagaaacacgatctaaataaacagttttgtagtttacacatcctttttgcgaatctataaacagttagtttcatagtactagattttcaaaccgaaagcaagcaacctttcttctactggccgcacttgaagaaatcttatatcagtttgaggaaaaactccaagctgaaagagaggaagctactaggaagcaggaagagttgcaagcacaactacaagctcaacaggtcgcacttgaagaaaaccaaagtttgttgcgccaggcccaagaggaagtgaaggggatgcataccaagtttgaagagaccaatgcactgctacgagctgtcttgaaacttcagaaagattgaggtagggatgcataccaagtctgaggatgatgcctttgcttaaggtttttctaccttgctagaacatatctgtggttagaactttgtcagaactacgtgcaatctgtttgaatgcttcaaacctttgtggtggaacctttgtatgtttgaacctctgttgtggaagaactagtgtgctggaattgtgtatgacttgtgatgagaatgttgtgtatgatggcttttctgtgtattatgattctgtgagctatcatgagagctcagtgtgtcgtc

SEQ ID NO: 118170 - DNA, 213 bp, Zea Mays
cagaagcgtatgagtaagcttgaagaaatccggcaagaaaaagaggcagctgcagctgttactatagggactgctgttgctactactgccactccaaccgtgaatgctggagcgacaactgctgatgctactccgaagagtggacgatccggtgaaagaggcagagggggtcggaagaaggccaaggtacccacggagcagccagtgccactg

SEQ ID NO: 118171 - DNA, 314 bp, Zea Mays
cacttgtattttaacaacttatgattgtatcgtgacaaaaaccatgggttgctaataatttgcacatttatttacagttatcagatgatgcagcagatcttctcagaaacttggtaaattccccaaacagtcttatgttgggtaaaggggccttcttcattcatgtcaataacatgttatttcaagtactaaaagcggcacactgtcgtgggaatgaagggggcggggcagggaaacgaagggggcagggcggggaaatgatgtggtgcaggattgagcaggggattgaaaaggggtttgagcaggggaactaa

SEQ ID NO: 118172 - DNA, 123 bp, Zea Mays
gaaaatactatggtttttagcaatactgttgcattcttgaaaactttgtttttaaaaccatggtattctagataccatagtatttttggagtattggaaacttcactccaacccatagttttc

SEQ ID NO: 118173 - DNA, 558 bp, Zea Mays
accctttccccccctgaccactacacctgggggcacgcccagcgtgattcccctgttctcctcccggtttcgctcgcccccttgttcctcttccagctgctcatctgtcagccgttgcttgctcccgcgatcttcctctaccacacccacacacactccctagccctagcgaaagcatcaaacacgctgttcggcgctgtcgttgcaaggtttggggttcttgctcgaaacgcagccctacccggcgacctattaatccctccctccttcccctgtatcggtctgtttcctttctcctcctcctccaaaagcagctcctttctcgggggtccggccacttccaggagttcttgcctgcgaagcttgctccgttctttcgcctgcttgccctcactcctctatcgccttggcctgcttattgcccagacagtttctgcttgaccccacgattcttcactgatgattcacagaaagcttggcgagcacgtacataacttgccgatcggacagttgatggacggctcgcccaaaccgtacaagtccacaataatttctccc

SEQ ID NO: 118174 - DNA, 2388 bp, Zea Mays
gtttcttttcttccccactcctctcgtcgcgtccaataaaaaggggggaagagcattttcccttttttttgctcccctcccccctcgcttctcccgaatttgatgcttaaaccctcgccgggaggaggactccacgcgcgagcccgcccgcgccacctaccgccgcgcccggatccccgccatggccgccgcgccgcaccgggcccaggtccccgctgatagcacggctccgttgcagacggggcctgtacttgagaataacccctccaagagtgcaaacgccaaggaccagattctttctggtacagagaatgtgactacaggcaatgcacgtggcgctagctccttgagatcgccaaacggcccaccagagaaggctagctctgtcggaaaagctggagagcaaccttatctctaccagcaaaatgtgtatgcaccacagccacaaccactctatcctggaggatacatgaacccttcaggacaatgggaggaatatccccattatgtgaatatggaggggctccattccgtatctcccggaatctacaatgacaaccagtccctcatgctatctgctggatatgcaaacaacccccaaatgatgtatggagcatattctcctgtttccactgctggagatggccaacaatacttccctgtgcactattccttctcaaatccttactatcaaccaccagcttctcctagcatgggatattcaaactccgcaactggaatgtcccaaggagaccctatgctgcagcaagagtatttccttcctgatggccttctatattcacccacaccagggtatcatcaaccattcagctcatttgacagagcactgacacagccaaataatgctcctgggttgtttggtcaagggagtctaccactggcttctggaatgcatcatggatcgatgtatggtcctggatcctacaagggacgccagtatggtagcaaatttggtggcactactccaagttggagttctgctggccgcagatttggtactttcgacttgagtggcaatcaacaaagggggagcatgtcatttggtagtcataatggctctctggagtttatgaatgagcaaaaccgtgggccacgtgctacaaaaccaaagatacaagacacagagaactcaggagatgagaaaagcgagaaaactgttcctctaattgatagtgaactgtacaatcgctctgattttatcactgagtacaaggatgccaaattctttgtaataaagtcctacaccgaggaccatgtacataggagcattaaatataatgtttgggctagcacagccagcggaaacaggaagctggattctgcttaccgtgcggccagagagaaagaagagcattgccctattttcttgtttttctcggttaatggaagtggccaattctgtggcgtggctgagatgattggacctgtcgattttgacagaagtgttaattactggcagcaggataagtggagtggccagttcccagtgaagtggcacataattaaggatgtaccgaacaaccttctgcggcacatcattcttgagaacaatgacaataagcctgtcacaaatagcagggacacccaggaggtgaagctggaacagggcctccagatgctaacgatcttcaagagccatgaggctgagacaacaattgtggaagatttcgacttctatgagcagcgggagaaagccttgcaggagaacagacgtcaacagcatgctgccagcaccgatacccagaaactggtggataccaaggctcaagatgctgtggccgacatatcagatgcatttgccaaggccgtccagttgaagaatactgagaacagtgggacaacccccaaaactgagggtgcttcagctgaaaagggttccgctgccacagccaaggttgaaggaagtgcaaacctgaacacaggccctgtggaggaaagcagttgattcgtttcccttctatctgcaaatttggagcagcagatgaatagcatggtgcgatgtgaaggtcagaaaggggaaggtgtgttgaatatggtcgtgcccccgtcagttgtacaacatcataggctttcttttatggccatttaggttataaaatttcaatatcatagttccaaaattgttgttcccggttgtcttcgttcctgttctgttttgcttccgtcttccatgttcctgtgtcgtaccatgaatgatggttcaatttagtgggtttaggcataagaagctgcagaattatgccgcggtaaaagttgcattttctgcagctgaatgtgatactctgcactgtctccatccttgtgtaatttcagagatcctttctctagtgtatcttcgtcttgttgctttcaacatgtacagttctg

SEQ ID NO: 118175 - DNA, 956 bp, Zea Mays
ggcattcccattcccacccgtccatccatcctccgaagctcctcggcagacaagcagcagcgagagaaagcaagcaaggcagaggcagttgtgttgctggtcggtccgtccatggcgcccaagagaccagtgtcggcggcggcggcggcggagcagccgaggctgcgcggcgtgcggaagcggccgtggggccggtacgcggcggagatccgcgacccggtgcggaaggcgcgcgtgtggctgggcaccttcgacacgccggagcaggcggcgcgggcgtacgacgccgccgcgcgcaagctccgcgggcccggcgccgccaccaactaccccgccccggagccgacggcggaggcgttggcggaggctccagcggcgagcgggagcgggagcgccgtggtgtacgagtcgtcgtcggcgtcggcgtcggcgtcgtcgtgctccctgccgctggcggccccgtcgctggacctcagcctggcgctgccggctgcggcggcggccgcagagccgtaccagctgttcgcggacccggcggcggcggccgccgtgacgccggcgctgctgcacttcttgccgcccaagagcgaggagcagcagagctactctgggtcatcgtcgctgtcctcgtcgtcgtcgtctgtagtgttcgacgcggcgccgcccgtgggcctgcggctggacctcaacctggcgctgccgccggccgagatggtgatgtgattgctgccgtccaggaggctaatcgattgctcagttaattagtcaccattagtagctaatcgatcaaggcagccgtcaggcagaggtgtaaataggatgcagatttgctcggttttcgttgactgtgatggcatggtttgtttcttcgctgcgagtcacgcaacaatgcaaaagcaaaatgaaaagagagagggagagggataattatgccccagcggctctcattttattcc

SEQ ID NO: 118176 - DNA, 1683 bp, Zea Mays
caaatattctagaattgaagtacataataatctgtcgtgacaatctactcagtgcctatgccgtgacattccctttctaccaagaagccaactcgtaaaagagacctcaccagataagctacgacagcattttaacatcgtttgaagtaggaacctcacccagattcattgaaccgccagctctgccatcttatccttgccacgtgaagtgacgttcttggcgaccccatcaatctcctcgatttggatgtccacgagcttattgagctgttgctcctgcgtcctgagatcctctggctgctgctcaacaacgcttcctgttagttccagaggcactgccaaggatctcccccttcatgaggtcatatatgcaggccctgaagttgtccatgctcttatgatcctgagagtcgaggcttaggaagatcagaatttcccagcaccggaggaactgtttcttctttatcttcagcttctaacgaacagtctccatcaggtcagccggtggaaccattctcaaactttgggccctttttgacaggttggtctccttcagagacgagacaatagcaccaagtgcaggtttgatcggatcaaacatgagcaaacggaggcagtcaacggatgatctcacatactgcagcaataacaatatacacaaagacgggagagagaagagagatggcggaagcgacgccgtacgaggagcagcggcggaggcaggtggaggcgaacaaacggaagctggaggagctgcagctccaccacctctctgctgccatcagagaggccgccgccgccgccaagccctcgctggtcaagaagcggaaggcgcgggtgcctctcgacgtcgccgacgccgtgatggagccagtacggcggtccggccggctcgccaacctcccggataagcccgtgtaccgcgagaaggttcccgattttgggatgaagattaggaggacgtacggatcggtgagaagagatctgaccaaccgggtgtacgcgaccgacgatgcgaggagctacgccatctctaaggcggaggatctggagcaagagctggactccagcttccccatcttcatcaagcccatgacccagtcccatgtcaccgggggcttctggctgggccttccgattcatttctgccggaagtatctgcccaagcgtgacgagatgatcaccctggtggatgaggatgatgacgagtccgacacgctgtacctcgcaatgaagcgggggctcagtgctggatggagagggtttgccgtccagcagaagctggtggatggagattgcctggtcttccagctgattgagcaaacaaagttcaaggtctacataactagagcaagttcctactacgaaagcgaggactgatgaaactagtagcttgtaatctggtgattggagctcagttatggaggtggctgcgttggacaagcttgcatctgggaatcgctggggtgtcttgaaactttttggtggcagaaagttagctgatgtatgaaacccagtatctcctaccaattgttgctgatttgtgtacttcttgggcttaccacttgcacggttcagaaacctgcactatgtaagggggttgttggtggcagctaacctcgttttgtaaatgattggtgcccgtccatgtttctcttagcgttcaatctggcctgttagttc

SEQ ID NO: 118177 - DNA, 1776 bp, Zea Mays
agcattttaacatcgtttgaagtaggaacctcacccagattcattgaaccgccagctctgccatcttatccttgccacgtgaagtgacgttcttggcgaccccatcaatctcctcgatttggatgtccacgagcttattgagctgttgctcctgcgtcctgagatcctctggctgctgctcaacagtttgttcatcctcatccccaatctcatgtgtccaatacacagcaaaagatgcctccttattgaaactggttggcatctgcaacagacgcttcctgttagttccagaggcactgccaaggatctcccccttcatgaggtcatatatgcaggccctgaagttgtccatgctcttatgatcctgagagtcgaggcttaggaagatcagaatttcccagcaccggaggaactgtttcttctttatcttcagcttctaacgaacagtctccatcaggtcagccggtggaaccattctcaaactttgggccctttttgacaggttggtctccttcagagacgagacaatagcaccaagtgcaggtttgatcggatcaaacatgagcaaacggaggcagtcaacggatgatctcacatactgcaggtcaagaagcggaaggcgcgggtgcctctcgacgtcgccgacgccgtgatggagccagtacggcggtccggccggctcgccaacctcccggataagcccgtgtaccgcgagaaggttcccgattttgggatgaagattaggaggacgtacggatcggtgagaagagatctgaccaaccgggtgtacgcgaccgacgatgcgaggagctacgccatctctaaggcggaggatctggagcaagagctggactccagcttccccatcttcatcaagcccatgacccagtcccatgtcaccgggggcttctggctgggccttccgattcatttctgccggaagtatctgcccaagcgtgacgagatgatcaccctggtggatgaggatgatgacgagtccgacacgctgtacctcgcaatgaagcgggggctcagtgctggatggagagggtttgccgtccagcagaagctggtggatggagattgcctggtcttccagctgattgagcaaacaaagttcaaggtctacataactagagcaagttcctactacgaaagcgaggactgatgaaactagtagcttgtaatctggtgattggagctcagttatggaggtggctgcgttggacaagcttgcatctgggaatcgctggggtgtcttgaaactttttggtggcagaaagttagctgatgtatgaaacccagtatctcctaccaattgttgctgatttgtgtacttcttgggcttaccacttgcacggttcagaaacctgcactatgtaagggggttgttggtggcagctaacctcgttttgtaaatgattggtgcccgtccatgtttctcttagcgttcaatctggcctgttagttcaatttttaatagctacttccatcatgccaccagtattggctttgtcaactgggctaggctggccatttctcattgtgaggaacatggttgatgggcagagaattgcggaggtcgtggagggaagaggtgagacgacgagggactgggtgccaccgccgaaactgtagtcatcgctggagaggaactggccattgctgttgtagcctgcaggcgcaggaggatgcggcggcacagacaggaggggcagactctgttgtatggttttcgcttagatttttttggtagcagttgtatgttctatatac

SEQ ID NO: 118178 - DNA, 1443 bp, Zea Mays
gcgtcctgagatcctctggctgctgctcaacaacgcttcctgttagttccagaggcactgccaaggatctcccccttcatgaggtcatatatgcaggccctgaagttgtccatgctcttatgatcctgagagtcgaggcttaggaagatcagaatttcccagcaccggaggaactgtttcttctttatcttcagcttctaacgaacagtctccatcaggtcagccggtggaaccattctcaaactttgggccctttttgacaggttggtctccttcagagacgagacaatagcaccaagtgcaggtttgatcggatcaaacatgagcaaacggaggcagtcaacggatgatctcacatactgcagcaataacaatatacacaaagacgggagagagaagagagatggcggaagcgacgccgtacgaggagcagcggcggaggcaggtggaggcgaacaaacggaagctggaggagctgcagctccaccacctctctgctgccatcagagaggccgccgccgccgccaagccctcgctggtcaagaagcggaaggcgcgggtgcctctcgacgtcgccgacgccgtgatggagccagtacggcggtccggccggctcgccaacctcccggataagcccgtaaggttcccgattttgggatgaagattaggaggacgtacggatcggtgagaagagatctgaccaaccgggtgtacgcgaccgacgatgcgaggagctacgccatctctaaggcggaggatctggagcaagagctggactccagcttccccatcttcatcaagcccatgacccagtcccatgtcaccgggggcttctggctgggccttccgattcatttctgccggaagtatctgcccaagcgtgacgagatgatcaccctggtggatgaggatgatgacgagtccgacacgctgtacctcgcaatgaagcgggggctcagtgctggatggagagggtttgccgtccagcagaagctggtggatggagattgcctggtcttccagctgattgagcaaacaaagttcaaggtctacataactagagcaagttcctactacgaaagcgaggactgatgaaactagtagcttgtaatctggtgattggagctcagtgaacattacacaattttcagaatggctgccatgatgttaaccggtttccttcttcatccactcagttatggaggtggctgcgttggacaagcttgcatctgggaatcgctggggtgtcttgaaactttttggtggcagaaagttagctgatgtatgaaacccagtatctcctaccaattgttgctgatttgtgtacttcttgggcttaccacttgcacggttcagaaacctgcactatgtaagggggttgttggtggcagctaacctcgttttgtaaatgattggtgcccgtccatgtttctcttagcgttc

SEQ ID NO: 118179 - DNA, 1392 bp, Zea Mays
gtgattatgagaactcaaaaagacgacagtcacaataaagcaaatagacaaaagggacatcgattttactcgtggttcggctaatgactactccacattgtaatgacatcctttgggtcaagggttgcactcaatatgtgatccaaagattaaacctaagtgctatatttttttcctcatatcaaattccgtttgtgataaatctttataagttagagtctcccacatcttacataaataatcttaataaaaaacggagtaaaaaaacacaagaacataaccgcagcaataacaatatacacaaagacgggagagagaagagagatggcggaagcgacgccgtacgaggagcagcggcggaggcaggtggaggcgaacaaacggaagctggaggagctgcagctccaccacctctctgctgccatcagagaggccgccgccgccgccaagccctcgctggtcaagaagcggaaggcgcgggtgcctctcgacgtcgccgacgccgtgatggagccagtacggcggtccggccggctcgccaacctcccggataagcccgtgtaccgcgagaaggttcccgattttgggatgaagattaggaggacgtacggatcggtgagaagagatctgaccaaccgggtgtacgcgaccgacgatgcgaggagctacgccatctctaaggcggaggatctggagcaagagctggactccagcttccccatcttcatcaagcccatgacccagtcccatgtcaccgggggcttctggctgggccttccgattcatttctgccggaagtatctgcccaagcgtgacgagatgatcaccctggtggatgaggatgatgacgagtccgacacgctgtacctcgcaatgaagcgggggctcagtgctggatggagagggtttgccgtccagcagaagctggtggatggagattgcctggtcttccagctgattgagcaaacaaagttcaaggtctacataactagagcaagttcctactacgaaagcgaggactgatgaaactagtagcttgtaatctggtgattggagctcagtgaacattacacaattttcagaatggctgccatgatgttaaccggtttccttcttcatccactcagttatggaggtggctgcgttggacaagcttgcatctgggaatcgctggggtgtcttgaaactttttggtggcagaaagttagctgatgtatgaaacccagtatctcctaccaattgttgctgatttgtgtacttcttgggcttaccacttgcacggttcagaaacctgcactatgtaagggggttgttggtggcagctaacctcgttttgtaaatgattggtgcccgtccatgtttctcttagcgttcaatctggcctgttagttc

SEQ ID NO: 118180 - DNA, 393 bp, Zea Mays
gtcccagctccggatcgcttcacgggccaggaagcagcacccgcgctacgcgcctgatgcgcgtagccaatgccggcgctcgtgtccgccgccatggccagagccgctgcgcccatcctcctccaccttctgctcctcctcgctgacctcggccccgccgccgcggtgcgcttcaactacgcctcgctcaccctcggcagcctgaggctgctgggcgacgcgcacctcaagaacggcatcatccgcctatcccgggacctgcccatcccgacctcgggtgccggtcgcgcgctgccgattgccaggatgacgtgacgaaggtggcatgcgacgcagccgatggagacggggacaccgattgccaggacggcgtgacgaaggtggcatgtggtg

SEQ ID NO: 118181 - DNA, 2273 bp, Zea Mays
gggtggggttggcagcttgcagcaggcccatggcgctatcagccgttacgattgggttggacgtgcccttgccgaccgagcctttcgttctatcctcgccgccgccgtcgccgtcgccgccgtctcgtatccctcggagattctccattcccgcctctccggccgccgcagattaccaaatacggtgaaccgtgtggtccagtggaattttgcacctcattgtactttgaaggcaaataaagccattctccaatctgaaggcgaaacaaggagtgcacatctttgttgtagagggcaaagtttgctcagctgctgctggacattggagagcgcagtggtggttgtacgcctgaaaggaattctttgtaaatttcccctatatctggttctgttatcatcattattttccttgcgttagacaataatgtcggagaacgaattagcagtaataaaaccagaggcattgaaaacttatatttggcttcagtgctttgatggctccatacaacaagtggaggaagaagttgcgatgttctgccctatgatatgtctggaaatagtgaaaaatgggacaggatcatctaagaatcatgctatagtactaccagaaagagttagtccggcaagtttgagtttgattcttaattattgtcgctttcatcaggtccctgggcgctcaaacaaggagcggaagtcatttgatgaaaagtttgtccggatagacacagaaaaactctgcaagttggcttccgcagcccttggtctgcagttaaggccactagttgatcttacttgtggagcgcttgctcgaatcattggaggaaagacacccgatgaagttagagatattttccatttaccagatgacttaacagaggaagagaaactagagccactaaaaaatgtaaatgatgatcctacgattcgattattgaaccgattgtatgcaaagaagcggaaagaactgcaggaacgccagaaactaaaggatgtccaaacacaagagcaaaaagatgagagatctttggatgaattactttgttttataaatggacatggagattccagaggtgggaaagcgtctaagaataagaaaaggaataaaagaaggaaagatcaagttaagaatcccacaaaagcggactctgaacctgtaaataaggagggagcttcctgtgtggttccgtgcaaagaagatagtaataacctctctaggcatccttgccaaagtccaaatttgcaagatgatgttgagtaccccttcgacaatgctgaccttgatgatggacttgatcctgcaatgagggaagagcttgataggtgagggcattagatgtcttataggttgatgcatgtaggctcttcgctgtgatactggcctgtttttcaattgaaaaaggcctgtttttgtatgcgacacagcaaaatttctaatgtttatatgctggcattttaataagtacaggctgatttctggacgtaaaatcgatgaattctgttacttgcttccactcttcattcaagttctgcttgaaacttgtggttgctgtctgttccgtcgcttgatctccaggctgtgtttttaggatgctattaaaccacatttactgttgagatgcatgaaacagtgccctgttttgttataacaaccgactgttgttgacaatacagagaagtggcggaatttgagatgaagctgaaattagcttggtctgaaagaatggttctgggacaggatcaaccaatggaatcggatgttgatacgcggtggtaatggttctatgacagcggattctctgttagttttttttttcgcgtagaattttcttgatgaggtcttcttttgctgttagagtgggcagaaaaccttagctggaaggagttttgttcgagagatacaggatgacattgcgaggtgcaatagtcatgttctgtgatttgtatgtaaccctgctcttcaagagagtagtgtccaaccgtatgttaccccaaaaaaagggtggagtgactggaaaccggaagttttgaatctatgtatgttcattaattttgacaggaactatcttgtgaatgattcaaagggaaaatgctgtgttgttggaagttgggcggaaacaatgagtccgttggtttaatggtgctccaatttttttttctatccccgtttgaatctcactctcggtttgttgagttgttcttagagtaaaccccctgtccaaaagcagttcacaaatatattacatcgtcaattttttttcaaaaattttgagcac

SEQ ID NO: 118182 - DNA, 1609 bp, Zea Mays
cttgcagcaggcccatggcgctatcagccgttacgattgggttggacgtgcccttgccgaccgagcctttcgttctatcctcgccgccgccgtcgccgtcgccgccgtctcgtatccctcggagattctccattcccgcctctccggccgccgcagattaccaaatacggtgaaccgtgtggtccagtggaattttgcacctcattgtactttgaaggcaaataaagccattctccaatctgaaggcgaaacaaggagtgcacatctttgttgtagagggcaaagtttgctcagctgctgctggacattggagagcgcagtggtggttgtacgcctgaaaggaattctttgtaaatttcccctatatctggttctgttatcatcattattttccttgcgttagacaataatgtcggagaacgaattagcagtaataaaaccagaggtacatctcctgttgcacttcctgttaattagagattaaatgttgcattcttatcttgattgcatcatttgggcctaaatcaactaatcaagtttattggtgaactctgacaggcattgaaaacttatatttggcttcagtgctttgatggctccatacaacaagtggaggaagaagttgcgatgttctgccctatgatatgtctggaaatagtgaaaaatgggacaggatcatctaagaatcatgctatagtactaccagaaagagttagtccggcaagtttgagtttgattcttaattattgtcgctttcatcaggtccctgggcgctcaaacaaggagcggaagtcatttgatgaaaagtttgtccggatagacacagaaaaactctgcaagttggcttccgcagcccttggtctgcagttaaggccactagttgatcttacttgtggagcgcttgctcgaatcattggaggaaagacacccgatgaagttagagatattttccatttaccagatgacttaacagaggaagagaaactagagccactaaaaaatgtaaatgatgatcctacgattcgattattgaaccgattgtatgcaaagaagcggaaagaactgcaggaacgccagaaactaaaggatgtccaaacacaagagcaaaaagatgagagatctttggatgaattactttgttttataaatggacatggagattccagaggtgggaaagcgtctaagaataagaaaaggaataaaagaaggaaagatcaagttaagaatcccacaaaagcggactctgaacctgtaaataaggagggagcttcctgtgtggttccgtgcaaagaagatagtaataacctctctaggcatccttgccaaagtccaaatttgcaagatgatgttgagtaccccttcgacaatgctgaccttgatgatggacttgatcctgcaatgagggaagagcttgataggtgagggcattagatgtcttataggttgatgcatgtaggctcttcgctgtgatactggcctgtttttcaattgaaaaaggcctgtttttgtatgcgacacagcaaaatttctaatgtttatatgctggcattttaataagtacaggctgatttctggacgtaaaatcgatgaattctgttacttgcttcca

SEQ ID NO: 118183 - DNA, 1992 bp, Zea Mays
cttgcagcaggcccatggcgctatcagccgttacgattgggttggacgtgcccttgccgaccgagcctttcgttctatcctcgccgccgccgtcgccgtcgccgccgtctcgtatccctcggagattctccattcccgcctctccggccgccgcagctgtatgctgcaagcctgccttgtcttcttccatcacctccagcggcccagcgtgcacgcaaactcccacccactgatggctggccctaccgtcgctgccgccctacctcgtctcctcctacggcgacgagcacccccatacgcgctgccctgtctccccttcctgctattaccaaatacggtgaaccgtgtggtccagtggaattttgcacctcattgtactttgaaggcaaataaagccattctccaatctgaaggcgaaacaaggagtgcacatctttgttgtagagggcaaagtttgctcagctgctgctggacattggagagcgcagtggtggttgtacgcctgaaaggaattctttgtaaatttcccctatatctggttctgttatcatcattattttccttgcgttagacaataatgtcggagaacgaattagcagtaataaaaccagaggcattgaaaacttatatttggcttcagtgctttgatggctccatacaacaagtggaggaagaagttgcgatgttctgccctatgatatgtctggaaatagtgaaaaatgggacaggatcatctaagaatcatgctatagtactaccagaaagagttagtccggcaagtttgagtttgattcttaattattgtcgctttcatcaggtccctgggcgctcaaacaaggagcggaagtcatttgatgaaaagtttgtccggatagacacagaaaaactctgcaagttggcttccgcagcccttggtctgcagttaaggccactagttgatcttacttgtggagcgcttgctcgaatcattggaggaaagacacccgatgaagttagagatattttccatttaccagatgacttaacagaggaagagaaactagagccactaaaaaatgtaaatgatgatcctacgattcgattattgaaccgattgtatgcaaagaagcggaaagaactgcaggaacgccagaaactaaaggatgtccaaacacaagagcaaaaagatgagagatctttggatgaattactttgttttataaatggacatggagattccagaggtgggaaagcgtctaagaataagaaaaggaataaaagaaggaaagatcaagttaagaatcccacaaaagcggactctgaacctgtaaataaggagggagcttcctgtgtggttccgtgcaaagaagatagtaataacctctctaggcatccttgccaaagtccaaatttgcaagatgatgttgagtaccccttcgacaatgctgaccttgatgatggacttgatcctgcaatgagggaagagcttgatagagaagtggcggaatttgagatgaagctgaaattagcttggtctgaaagaatggttctgggacaggatcaaccaatggaatcggatgttgatacgcggtgagtgggcagaaaaccttagctggaaggagttttgttcgagagatacaggatgacattgcgaggtgcaatagtcatgttctgtgatttgtatgtaaccctgctcttcaagagagtagtgtccaaccgtatgttaccccaaaaaaagggtggagtgactggaaaccggaagttttgaatctatgtatgttcattaattttgacaggaactatcttgtgaatgattcaaagggaaaatgctgtgttgttggaagttgggcggaaacaatgagtccgttggtttaatggtgctccaatttttttttctatccccgtttgaatctcactctcggtttgttgagttgttcttagagtaaaccccctgtccaaaagcagttcacaaatatattacatcgtcaattttttttcaaaaattttgagcac

SEQ ID NO: 118184 - DNA, 1482 bp, Zea Mays
atggcgctatcagccgttacgattgggttggacgtgcccttgccgaccgagcctttcgttctatcctcgccgccgccgtcgccgtcgccgccgtctcgtatccctcggagattctccattcccgcctctccggccgccgcagattaccaaatacggtgaaccgtgtggtccagtggaattttgcacctcattgtactttgaaggcaaataaagccattctccaatctgaaggcgaaacaaggagtgcacatctttgttgtagagggcaaagtttgctcagctgctgctggacattggagagcgcagtggtggttgtacgcctgaaaggaattctttgtaaatttcccctatatctggttctgttatcatcattattttccttgcgttagacaataatgtcggagaacgaattagcagtaataaaaccagaggcattgaaaacttatatttggcttcagtgctttgatggctccatacaacaagtggaggaagaagttgcgatgttctgccctatgatatgtctggaaatagtgaaaaatgggacaggatcatctaagaatcatgctatagtactaccagaaagagttagtccggcaagtttgagtttgattcttaattattgtcgctttcatcaggtccctgggcgctcaaacaaggagcggaagtcatttgatgaaaagtttgtccggatagacacagaaaaactctgcaagttggcttccgcagcccttggtctgcagttaaggccactagttgatcttacttgtggagcgcttgctcgaatcattggaggaaagacacccgatgaagttagagatattttccatttaccagatgacttaacagaggaagagaaactagagccactaaaaaatgtaaatgatgatcctacgattcgattattgaaccgattgtatgcaaagaagcggaaagaactgcaggaacgccagaaactaaaggatgtccaaacacaagagcaaaaagatgagagatctttggatgaattactttgttttataaatggacatggagattccagaggtgggaaagcgtctaagaataagaaaaggaataaaagaaggaaagatcaagttaagaatcccacaaaagcggactctgaacctgtaaataaggagggagcttcctgtgtggttccgtgcaaagaagatagtaataacctctctaggcatccttgccaaagtccaaatttgcaagatgatgttgagtaccccttcgacaatgctgaccttgatgatggacttgatcctgcaatgagggaagagcttgataggtgagggcattagatgtcttataggttgatgcatgtaggctcttcgctgtgatactggcctgtttttcaattgaaaaaggcctgtttttgtatgcgacacagcaaaatttctaatgtttatatgctggcattttaataagtacaggctgatttctggacgtaaaatcgatgaattctgttacttgcttcca

SEQ ID NO: 118185 - DNA, 1803 bp, Zea Mays
cttgccgaccgagcctttcgttctatcctcgccgccgccgtcgccgtcgccgccgtctcgtatccctcggagattctccattcccgcctctccggccgccgcagattaccaaatacggtgaaccgtgtggtccagtggaattttgcacctcattgtactttgaaggcaaataaagccattctccaatctgaaggcgaaacaaggagtgcacatctttgttgtagagggcaaagtttgctcagctgctgctggacattggagagcgcagtggtggttgtacgcctgaaaggaattctttgtaaatttcccctatatctggttctgttatcatcattattttccttgcgttagacaataatgtcggagaacgaattagcagtaataaaaccagaggtacatctcctgttgcacttcctgttaattagagattaaatgttgcattcttatcttgattgcatcatttgggcctaaatcaactaatcaagtttattggtgaactctgacaggcattgaaaacttatatttggcttcagtgctttgatggctccatacaacaagtggaggaagaagttgcgatgttctgccctatgatatgtctggaaatagtgaaaaatgggacaggatcatctaagaatcatgctatagtactaccagaaagagttagtccggcaagtttgagtttgattcttaattattgtcgctttcatcaggtccctgggcgctcaaacaaggagcggaagtcatttgatgaaaagtttgtccggatagacacagaaaaactctgcaagttggcttccgcagcccttggtctgcagttaaggccactagttgatcttacttgtggagcgcttgctcgaatcattggaggaaagacacccgatgaagttagagatattttccatttaccagatgacttaacagaggaagagaaactagagccactaaaaaatgtaaatgatgatcctacgattcgattattgaaccgattgtatgcaaagaagcggaaagaactgcaggaacgccagaaactaaaggatgtccaaacacaagagcaaaaagatgagagatctttggatgaattactttgttttataaatggacatggagattccagaggtgggaaagcgtctaagaataagaaaaggaataaaagaaggaaagatcaagttaagaatcccacaaaagcggactctgaacctgtaaataaggagggagcttcctgtgtggttccgtgcaaagaagatagtaataacctctctaggcatccttgccaaagtccaaatttgcaagatgatgttgagtaccccttcgacaatgctgaccttgatgatggacttgatcctgcaatgagggaagagcttgatagagaagtggcggaatttgagatgaagctgaaattagcttggtctgaaagaatggttctgggacaggatcaaccaatggaatcggatgttgatacgcggtggtaatggttctatgacagcggattctctgttagttttttttttcgcgtagaattttcttgatgaggtcttcttttgctgttagagtgggcagaaaaccttagctggaaggagttttgttcgagagatacaggatgacattgcgaggtgcaatagtcatgttctgtgatttgtatgtaaccctgctcttcaagagagtagtgtccaaccgtatgttaccccaaaaaaagggtggagtgactggaaaccggaagttttgaatctatgtatgttcattaattttgacaggaactatcttgtgaatgattcaaagggaaaatgctgtgttgttggaagttgg

SEQ ID NO: 118186 - DNA, 1754 bp, Zea Mays
tgtgttctctgcgtagaaactaccatttgcattgagaagattagtttctataaatggttccttgactaggtggcagctatggaaaccacggagcagagttgggagtgctcttacatacatcacatccgggccttctttcctcgcttcctctgcgcaccgaaattctcgctgacggtgattcggcagaaaaaaaaaactgacgggtagcgaatctgttctgttctacgcccatttggcgagcaacgacatgagccccgcgccgaggaacagggcgacgtacgccgccagctggagcttggcgttcgtctgcagcctcgggttgctgaagtccgcggcgaggagatcgaccagggacatgtacaccaggatccctgcggcggccgcgttgaagacgccctccacgaccagggcggtggcgccgtgcctgctgtagccggaagcgatggcgatgcccagcgcgatgcccgcgggagcggtgagcgagaagaaggccgccatgaccacggccgccctcgccttgaactctgcctggataggtatcgacggattgtgctcagggaaaaggacaggttgtttgtttgttttttcttcatggcatggcgtgtgttcttgtcgaggaggtgccccaagtgggcgttcggaatgctgggaaggtgctcacctgagagatcaccctgtgcctgatggacacggcgacggcggaggcatcctgaggcgaggcaccggcgtggccgtgccctccgtgggcgtgcgtgtgcgcgtgcacgtggcccgcgggctcggcggcggcgccctcctcgtccgcgggcgccgcgcggccctggcctccgtcgacggcgtcgtcgtcgacggggcgcgccttgcggatgtgcgcgcgctggtagtagcccgcggcggcggagtcgaccatcatggtggccatggcagagcacatggcgacgagtcccgcgtaggggaacccgccggccctggcgccgccgccgcaggggggcgcgagcgcgtcgaaggccgcgggcaggatgtgcaccatgccggtggcgaggatgacccccgcggcgaacgccttgacggcgaagaagacgtccccgtcggggcgcagcgccgaggcggagcggcccagcagcgggaccagcacccccgccgcgcccgacgccaggatggacgccaccgcgacgagcttcagccgcagcgccccgcgcgcgtcctcctccttgatcgccgccgcctcgccgccgccacaatcgcaccccacgcccgccgctgccgccgcgccgaccccgggcgtcacctgaacgaggagcagtagcacagcgagccacgccggcagagacgggggaagaggaacccgaactcgcgtggcgtccatggcgtgcgcgcacgtgcgcctggcgtgggagagagggccggtgcggtgagtgacggagggagggagtcggcgccgcgcgcgcgctgagctatataaagctccgcggccgcgagtgtggtgacatggtgagctcacactccggcaacgccgctttgaagcgtggtgggccctgagcagtgtgcaccgtccgatctgggtgtgtgggcacgctctccaactggcagcaagtgttggtgttgccgtggaccttttgtcgtgattgtttggaaaaaaacggatcaggtttgccaccttggttccagaaacgctttaattttttttttcatcccaaaaaatggtgggagttcatctgcattctgatgtacttcataaaaaaacgaaaaataag

SEQ ID NO: 118187 - DNA, 615 bp, Zea Mays
atgggcaagtcaagcaagaaggcggccgccgtggctgcagcgccagcggcggtgcccaaggggaagaagcgggaggcggaggacgagatcgagatggccgtgagcgcgaagaagcagaaggcggcgccaccggcgaaggccgtgccgacgtccaagaaggacgccaaggaggacgccaagtccaagaagcagccgccccccaagaaggctgagaacagcagcagtgactctgaagaggaccccgagtccgaagaggagaatttttataatttgattgagtcggggagggcagacggagatgaggagtttgacgaggacgaggaggacgggttcgagttcggtgacgctgacgaggcgatgcaatgcgtggtgatggcggaaagcagcaccaccgccgcggcgctgcgtgctcacacgcaggactacgaggcgctagctgcgcacaagcgcaaggcccttgccgaggagcaaccccagagggaggagggtcccaaaaggccaagaccggaccaactttcagaagcagaagcagcaaccatgttcgaccaactgatggaaggctttggtcttaggcgtaaaagaaggtcaaaagatgtatgctacaccgtttcttaa

SEQ ID NO: 118188 - DNA, 2391 bp, Zea Mays
tggactcattggctagtattttacaggaaaaagggggatgcttctctggcaagacactgcattttaaaagcaatgaacgcagatccagaagatgtagatctgaagtatctttgtggttatatgtatcacaacctttgtgaatatcagaaagctgcagaaatatatgaacaaatagtcagaatttatcctgccaatagtgctgttcgtaaagtagcagcccagatgtacagagagtgtggtcaaattgacaatgctattaatttgttgaaagactatgccgatactcaaactttcaacattgactggagcgttctagatttattgatatcactttatctaagaaataatgtttttagtgaagcactaaagcagatcaagagggcacaactacatttgggatctcaacagaaactaccagtacaattgcaggcaaaagaagtaatctgccatgcatattgcggtgacatgaaacatgctgagattttccttcgtgatgtgcgtttggagccatcaaaagaaaacattgatgtgctcaaggaactcgcaagcaatttagaaaaaatgggacgatatgagtatgcagtaaagttttacctgctaattgaaaatgttgctactcaaaatgatggtggtttatgctttgatcacaaagaaatgggtagttggtatgtcaaagctgctcagtgctacatgatcttaggggacaaaaaaaatgctattccttatttttataaagcgttacaaagcatgaaggacaatattggtatacgattgaccttatcctcccttcttattgatgacgacaagacagatgaagctgccactttgctttctcctcccaaaattccagagttgcagtctgctaatactccagaccaacagaaaccttggtggtgtgatgggaaagttaagatggcgcttgcaaaactttattacaataaaggaaatttggaagattttgtggacacaatttttcatcctattctagaaactttgaatgttgaatatgctaatcgaaaggtcaagtcaatgagaaagcttccaaacattgttctgcatgaaagagtcaaagtattgggtgagcaacggccagatagtgtatttcaaggattaaggccaatagcatcacctgatgaattacaaaaggcaaacagagcaaagaaattaattgagaaaaggaccgctgcaaatgaagagttaaaacatgattatctgccaagaacaaagcaagttcctcctgttcctggtctactgacaaatgtggagcatcatcagcttgtgttaaatctttgtcgaacattagctttgctgcagcgatattgggatgcactgcagattatcaaccgaaccctcaaacttggaaatgacgcactcactggtgacaaaaaagaggaactcagatccttgggtgctcaaatagcttatagagctccagatcccagtcatggctttaagtatgtccgttacgttgttcagcagcacccatattctcttgccgcatggaattcctactataaggtggtatcaagaatagaggacaggtttccacatcatttcaaatatctccttcggacaagagaagcgaatcctgactgtgtgcctccaataatcatatccgggcatcgatttactgctataagtcagcatcagtcagctgcccgggattaccttgaagcttataagctggacccagaaaaccctcttattaatctatgtgtaggcactgccttgattagtttggcccttggcttcaggcttcagaataagaaccagtgcatcgtccaagcttttgctttcctgtacagataccttcgcctttgtgataacagtcaggaagcctcgtacaacattgctcgagcgtatcaccacattggcctgaataccttggcagctgtttactacgacaaggctttgtcaaccgaggagaaggatcatcccatccccaagcttccgtacgaggctggttcacgtgcgccagaggatctgaggccagggtattgtgatgtgcgaagagaggcagcgttcaatctgcatctaatctatatgaagagtggagctaccgatcttgcgagacggatcctaaaaacttactgcactgtctaaaagctggtatcgggcaatgttgttgggatcggatatcagatccttcaaggctccttgcattagcttaggatcaagctagtctataaagctagaacattggtgtaatatgtcactagtgactttagatgtgtagctgaagagttaacaacgtgcttgatccagatttaaacgtatattctggtttcacaatgctgtgttatagtcaaatggttcagcgatgctttgcttcatgtgatttattggcaattcattattatttttctctcaaacgcacaggagaacgcatag

SEQ ID NO: 118189 - DNA, 1163 bp, Zea Mays
tcttttttagtattatcctaactattaagtgttcccttttctgtcttttatcttttcagctttgtcgaacattagctttgctgcagcgatattgggatgcactgcagattatcaaccgaaccctcaaacttggaaatgacgcactcactggtgacaaaaaagaggaactcagatccttgggtgctcaaatagcttatagagctccagatcccagtcatggctttaagtatgtccgttacgttgttcagcagcacccatattctcttgccgcatggaattcctactataaggtggtatcaagaatagaggacaggtttccacatcatttcaaatatctccttcggacaagagaagcgaatcctgactgtgtgcctccaataatcatatccgggcatcgatttactgctataagtcagcatcagtcagctgcccgggattaccttgaagcttataagctggacccagaaaaccctcttattaatctatgtgtaggcactgccttgattagtttggcccttggcttcaggcttcagaataagaaccagtgcatcgtccaagcttttgctttcctgtacagataccttcgcctttgtgataacagtcaggaagcctcgtacaacattgctcgagcgtatcaccacattggcctgaataccttggcagctgtttactacgacaaggctttgtcaaccgaggagaaggatcatcccatccccaagcttccgtacgaggctggttcacgtgcgccagaggatctgaggccagggtattgtgatgtgcgaagagaggcagcgttcaatctgcatctaatctatatgaagagtggagctaccgatcttgcgagacggatcctaaaaacttactgcactgtctaaaagctggtatcgggcaatgttgttgggatcggatatcagatccttcaaggctccttgcattagcttaggatcaagctagtctataaagctagaacattggtgtaatatgtcactagtgactttagatgtgtagctgaagagttaacaacgtgcttgatccagatttaaacgtatattctggtttcacaatgctgtgttatagtcaaatggttcagcgatgctttgcttcatgtgatttattggcaattcattattatttttctctcaaacgcacaggagaacgcatag

SEQ ID NO: 118190 - DNA, 2095 bp, Zea Mays
atggccgaacacacaagctcgatttcagggcagattcgttgtatatgcacgtacgcgtgtgcgattccaggatggacgtttgtccattgggcccgcaatttcggcggcgacagaaatggacgggataaagattccgtcacgtccccgtcgtccggcaccacccagagcttgtccctctcgcgtgttgcttcctcggttcctccccagctcaaacttccaagaacccgtgaagtgaagtgaggaggtcggcggaaccggaacccaggcgatacgagatgatcgcaaacggcctccgcaaatccagtgctgcctcctcccaggttagcaagctggtgaaatacattgctagtgctggaagcttgcaaggggggcacagtttatcagagccgtctgccagacattacagctctgaaccttcacttcaggcgacagaagaaaatgggtttaaggggcacagcatgctggctccattcacagcgggatggcagagcactgatgtacacccattggttatagagagatcagagggttcttatgtctatgacagcaatgggaagaagtatattgatgctcttgcaggactgtggtgcacagctttaggtggtaatgagcctcgactagtcaaagcggcaactgagcaattaaacaaattaccgttctaccattccttttggaaccgtacaaccaaaccctcattggatctcgcaaatgatattctcagcatgttcaccgcaagggagatgggaaaggtgttcttcacaaatagtggttcagaagcaaatgactcccaggttaaactagtgtggtattataataatgcactgggaaggccagacaagaagaaatttattgctcgctcaaaatcgtaccatggatcaaccttgattgcagctagtctatcaggtctgccagcgcttcatcagaagtttgatctaccagcaccttttgtcctgcacacagactgccctcactactggcgattccgtcttcctgatgagacagaagaagagttttcaactagacttgccaataatttggagaatcttgtcctcaaagaaggacctgaaacaattgctgctttcattgctgaacctgtgatgggcgctggtggtgttatccttcctccaaagacctattttgagaagattcaggcagttctgaagaagtatgacatcttgttaattgcggatgaggtcattactgcatttggaagactagggacaatgtttggatgtgatatgtataatattaaaccagatcttgtttccatagccaaggctctttcttctgcatatatgccaattggagcaattctcgttagcccagaaataacggatgtaatctattctcagagcaataaacttggttcttttgctcatggctttacatactcgggacatcctgtttcttgtgccgttgctgtagaaaccttgaagatatataaggaaaggaatattgtagaacacgtcaacaaaattgctccaaggttccaggagggaatcaaggccttctcaggcagcccaattgttggggagatacgcggtctgggactgatacttggaactgaatttgtcgacaacaaatctccaaatgatccatttccagctgaatggggtgttggttcgatatttggcgcggagtgcgagaagcgtgggatgctcatcagggtggctggggacagcatcatgctgtcacccccgctgatcatgactcccaatgaagtcgaagaaatcataagcaaattcggcgatgctctgaaggctacagaggaacggattgtagaactgaaatccaggaagaattagccgatgctgctggttgtaacgacagtgaggatggtgatggcagtgtccaatatacagtgtattttcaaactttatttcagtaaagtgctgggctggaatcttgtagtcggttgcatagcgacagttgttccttgttatggagcaataagtaatgcatctgcttaatcagagtagcatacccttgggtttgtgctggtacaggtttttcaaatgaacatagcttggtataatgtagggccatagtacccccccacccccccccccccccccccacacacacacacaaaacg

SEQ ID NO: 118191 - DNA, 1988 bp, Zea Mays
aagattccgtcacgtccccgtcgtccggcaccacccagagcttgtccctctcgcgtgttgcttcctcggttcctccccagctcaaacttccaagaacccgtgaagtgaagtgaggaggtcggcggaaccggaacccaggcgatacgagatgatcgcaaacggcctccgcaaatccagtgctgcctcctcccaggttagcaagctggtgaaatacattgctagtgctggaagcttgcaaggggggcacagtttatcagagccgtctgccagacattacagctctgaaccttcacttcaggcgacagaagaaaatgggtttaaggggcacagcatgctggctccattcacagcgggatggcagagcactgatgtacacccattggttatagagagatcagagggttcttatgtctatgacagcaatgggaagaagtatattgatgctcttgcaggactgtggtgcacagctttaggtggtaatgagcctcgactagtcaaagcggcaactgagcaattaaacaaattaccgttctaccattccttttggaaccgtacaaccaaaccctcattggatctcgcaaatgatattctcagcatgttcaccgcaagggagatgggaaaggtgttcttcacaaatagtggttcagaagcaaatgactcccaggttaaactagtgtggtattataataatgcactgggaaggccagacaagaagaaatttattgctcgctcaaaatcgtaccatggatcaaccttgattgcagctagtctatcaggtctgccagcgcttcatcagaagtttgatctaccagcaccttttgtcctgcacacagactgccctcactactggcgattccgtcttcctgatgagacagaagaagagttttcaactagacttgccaataatttggagaatcttgtcctcaaagaaggacctgaaacaattgctgctttcattgctgaacctgtgatgggcgctggtggtgttatccttcctccaaagacctattttgagaagattcaggcagttctgaagaagtatgacatcttgttaattgcggatgaggtcattactgcatttggaagactagggacaatgtttggatgtgatatgtataatattaaaccagatcttgtttccatagccaaggctctttcttctgcatatatgccaattggagcaattctcgttagcccagaaataacggatgtaatctattctcagagcaataaacttggttcttttgctcatggctttacatactcgggacatcctgtttcttgtgccgttgctgtagaaaccttgaagatatataaggaaaggaatattgtagaacacgtcaacaaaattgctccaaggttccaggagggaatcaaggccttctcaggcagcccaattgttggggagatacgcggtctgggactgatacttggaactgaatttgtcgacaacaaatctccaaatgatccatttccagctgaatggggtgttggttcgatatttggcgcggagtgcgagaagcgtgggatgctcatcagggtggctggggacagcatcatgctgtcacccccgctgatcatgactcccaatgaagtcgaagaaaagcctgattgccctcttagatcataagcaaattcggcgatgctctgaaggctacagaggaacggattgtagaactgaaatccaggaagaattagccgatgctgctggttgtaacgacagtgaggatggtgatggcagtgtccaatatacagtgtattttcaaactttatttcagtaaagtgctgggctggaatcttgtagtcggttgcatagcgacagttgttccttgttatggagcaataagtaatgcatctgcttaatcagagtagcatacccttgggtttgtgctggtacaggtttttcaaatgaacatagcttggtataatgtagggccatagtacccccccacccccccccccccccccccacacacacacacaaaacg

SEQ ID NO: 118192 - DNA, 2000 bp, Zea Mays
aagattccgtcacgtccccgtcgtccggcaccacccagagcttgtccctctcgcgtgttgcttcctcggttcctccccagctcaaacttccaagaacccgtgaagtgaagtgaggaggtcggcggaaccggaacccaggcgatacgagatgatcgcaaacggcctccgcaaatccagtgctgcctcctcccaggttagcaagctggtgaaatacattgctagtgctggaagcttgcaaggggggcacagtttatcagagccgtctgccagacattacagctctgaaccttcacttcaggcgacagaagaaaatgggtttaaggggcacagcatgctggctccattcacagcgggatggcagagcactgatgtacacccattggttatagagagatcagaggtgttgcactcttgcatttgtgcaagcttccgggttcttatgtctatgacagcaatgggaagaagtatattgatgctcttgcaggactgtggtgcacagctttaggtggtaatgagcctcgactagtcaaagcggcaactgagcaattaaacaaattaccgttctaccattccttttggaaccgtacaaccaaaccctcattggatctcgcaaatgatattctcagcatgttcaccgcaagggagatgggaaaggtgttcttcacaaatagtggttcagaagcaaatgactcccaggttaaactagtgtggtattataataatgcactgggaaggccagacaagaagaaatttattgctcgctcaaaatcgtaccatggatcaaccttgattgcagctagtctatcaggtctgccagcgcttcatcagaagtttgatctaccagcaccttttgtcctgcacacagactgccctcactactggcgattccgtcttcctgatgagacagaagaagagttttcaactagacttgccaataatttggagaatcttgtcctcaaagaaggacctgaaacaattgctgctttcattgctgaacctgtgatgggcgctggtggtgttatccttcctccaaagacctattttgagaagattcaggcagttctgaagaagtatgacatcttgttaattgcggatgaggtcattactgcatttggaagactagggacaatgtttggatgtgatatgtataatattaaaccagatcttgtttccatagccaaggctctttcttctgcatatatgccaattggagcaattctcgttagcccagaaataacggatgtaatctattctcagagcaataaacttggttcttttgctcatggctttacatactcgggacatcctgtttcttgtgccgttgctgtagaaaccttgaagatatataaggaaaggaatattgtagaacacgtcaacaaaattgctccaaggttccaggagggaatcaaggccttctcaggcagcccaattgttggggagatacgcggtctgggactgatacttggaactgaatttgtcgacaacaaatctccaaatgatccatttccagctgaatggggtgttggttcgatatttggcgcggagtgcgagaagcgtgggatgctcatcagggtggctggggacagcatcatgctgtcacccccgctgatcatgactcccaatgaagtcgaagaaatcataagcaaattcggcgatgctctgaaggctacagaggaacggattgtagaactgaaatccaggaagaattagccgatgctgctggttgtaacgacagtgaggatggtgatggcagtgtccaatatacagtgtattttcaaactttatttcagtaaagtgctgggctggaatcttgtagtcggttgcatagcgacagttgttccttgttatggagcaataagtaatgcatctgcttaatcagagtagcatacccttgggtttgtgctggtacaggtttttcaaatgaacatagcttggtataatgtagggccatagtacccccccacccccccccccccccccccacacacacacacaaaacg

SEQ ID NO: 118193 - DNA, 333 bp, Zea Mays
atgtcctcagaagcacatgtcgaggacgcagcagcagcagatggcggcgcagcatcctttccagaaaccgtcgccgccgcggctgctgctggtggtggttgtctgctgctggccgtagtacgccgcgccgccgtcctgggccgttggcgggtacgccggcggtggcgcgacgtacgccggcggaggcgcgccgtaggcctgttggcccggcggtgggtagcccgcttggtagctcatgatcgtgatcggtgggtcgcgtcggtcgatcagatcagctgcaaaaacagtaacgagctagctagctgtatgtgctgcaactgcgtgtgtagatga

SEQ ID NO: 118194 - DNA, 907 bp, Zea Mays
gcctgtcgttgtctcaatagctcaatcctcattccttcaggcttcagggttctcaatgatcggcggcactgcccttaccaccacacgccgcctccgtcttctgtgaaagatcaagaattcgccgccgtctcagctgatcttcgcgcgtgcagtctacctgttcgacgagatgcctacgaaggtcacgaagccgtgggtgccggttaactggaccggggaagcatcgtcatcacgcgggcactcggtaggaggtgggggactcgaactcgagcccgccgctgaccgcctcagcgcgctgcccgacgtgctcctccaccacgtcatgtcgttcatgaaggcgtgggacgcggtacgcacgtgcgtgctctcgcggcggtggcgcgacctctgggcctctgcgccctgtgtggacatccgtgtggggaggtatagcgaaccgccccaggacttttccaagttcgtgtaccggctgctgcttgctagggaggcccttgcgccgataaacactctcaggctgcggtcaccaactgattacgacgaggatttcgacaattctgatgttaagatgtggatccgccatgcaatcagactgaatgcttgcgctattcagctaactggtcatcccaatttgtctgcggagcttgattctatagacttggtctctcaccacctcaaaatcttgaaactggcctatactttagtgcttgatagcttcaccagacagctctcgtctcggtgcccttctttggaggaactagagctcaaggactgtttggtagagtgccgcgagattacatctgtctctctgaagaggttgaccatggtcaagtgcacttttgcaaagaacttctttgttaatgctccaaaccttgtgtttgtgcagtgcatcgcaccagatacttgggtc

SEQ ID NO: 118195 - DNA, 1811 bp, Zea Mays
gcctgtcgttgtctcaatagctcaatcctcattccttcaggcttcagggttctcaatgatcggcggcactgcccttaccaccacacgccgcctccgtcttctgtgaaagatcaagaattcgccgccgtctcagctgatcttcgctctacctgttcgacgagatgcctacgaaggtcacgaagccgtgggtgccggttaactggaccggggaagcatcgtcatcacgcgggcactcggtaggaggtgggggactcgaactcgagcccgccgctgaccgcctcagcgcgctgcccgacgtgctcctccaccacgtcatgtcgttcatgaaggcgtgggacgcggtacgcacgtgcgtgctctcgcggcggtggcgcgacctctgggcctctgcgccctgtgtggacatccgtgtggggaggtatagcgaaccgccccaggacttttccaagttcgtgtaccggctgctgcttgctagggaggcccttgcgccgataaacactctcaggctgcggtcaccaactgattacgacgaggatttcgacaattctgatgttaagatgtggatccgccatgcaatcagactgaatgcttgcgctattcagctaactggtcatcccaatttgtctgcggagcttgattctatagacttggtctctcaccacctcaaaatcttgaaactggcctatactttagtgcttgatagcttcaccagacagctctcgtctcggtgcccttctttggaggaactagagctcaaggactgtttggtagagtgccgcgagattacatctgtctctctgaagaggttgaccatggtcaagtgcacttttgcaaagaacttctttgttaatgctccaaaccttgtgtttgtgcagtgcatcgcaccagatacttgggtccctgtgttcaagaactttggggtgctggtaacaggtagtgtgatgcttgatgactctttactgagccgtgactttaaaaagtaccaatacgatgatgatgaatatcctcaaacaagtgatgatgatgatgacaacaacagtacatttgcccctgctaaatatgttcctgattctgatgacagtgatgaaatcctcagtgatgattctgaattcttagatgatttttatgatgagcattttgatgatatcaaggacaattatgattatggaagtgatatcaatagtgatagtgaaacctatgagtacagtgagattgcaaatgactatggagataaccagtttggaacccgtgataatgaacttgatcacactaggggcagtaaagatcatggttgcagtgcaaaacatatcattaatgattataaaaattttggtggccaaaatgttcttcattgcctttcaaatgctcgacatctagagctgttaggtcattctggagaggtcattatgaggagagaatcgttaaattgtccaacttttagcaacctgaagactttggccctgggagaatggtgtatcagtacggttgctgacttcgacatattacttgtcttgcttcagcattcacctagtctggagaagctttatcttcagcttgaaatgaaccgtgacatcaagaaggcattggtaagaggtatagaaccaaaggggggatcatttgcttgcaaacatcttagtatggtgaagatcagatgcaccaaggacgattcaagagtccatatgttggcgcagttgtttaggtctaatggcttgccgctcgagaagatttatgtccgtcggagtgggagtttctatcttcgtatcttgaaggaggagaggggtattgccatcgatgaactgcgtagatcttga

SEQ ID NO: 118196 - DNA, 2114 bp, Zea Mays
ctcattccttcaggcttcagggttctcaatgatcggcggcactgcccttaccaccacacgccgcctccgtcttctgtgaaagatcaagaattcgccgccgtctcagctgatcttcgcgtaagtcttccctccgttctgtcctctcgacagtccctgcaaaaatccgccgcggagctctgatctgatttgtgcacggtgatctcgtccatcccaggcgtgcagtctacctgttcgacgagatgcctacgaaggtcacgaagccgtgggtgccggttaactggaccggggaagcatcgtcatcacgcgggcactcggtaggaggtgggggactcgaactcgagcccgccgctgaccgcctcagcgcgctgcccgacgtgctcctccaccacgtcatgtcgttcatgaaggcgtgggacgcggtacgcacgtgcgtgctctcgcggcggtggcgcgacctctgggcctctgcgccctgtgtggacatccgtgtggggaggtatagcgaaccgccccaggacttttccaagttcgtgtaccggctgctgcttgctagggaggcccttgcgccgataaacactctcaggctgcggtcaccaactgattacgacgaggatttcgacaattctgatgttaagatgtggatccgccatgcaatcagactgaatgcttgcgctattcagctaactggtcatcccaatttgtctgcggagcttgattctatagacttggtctctcaccacctcaaaatcttgaaactggcctatactttagtgcttgatagcttcaccagacagctctcgtctcggtgcccttctttggaggaactagagctcaaggactgtttggtagagtgccgcgagattacatctgtctctctgaagaggttgaccatggtcaagtgcacttttgcaaagaacttctttgttaatgctccaaaccttgtgtttgtgcagtgcatcgcaccagatacttgggtccctgtgttcaagaactttggggtgctggtaacaggtagtgtgatgcttgatgactctttactgagccgtgactttaaaaagtaccaatacgatgatgatgaatatcctcaaacaagtgatgatgatgatgacaacaacagtacatttgcccctgctaaatatgttcctgattctgatgacagtgatgaaatcctcagtgatgattctgaattcttagatgatttttatgatgagcattttgatgatatcaaggacaattatgattatggaagtgatatcaatagtgatagtgaaacctatgagtacagtgagattgcaaatgactatggagataaccagtttggaacccgtgataatgaacttgatcacactaggggcagtaaagatcatggttgcagtgcaaaacatatcattaatgattataaaaattttggtggccaaaatgttcttcattgcctttcaaatgctcgacatctagagctgttaggtcattctggagaggtcattatgaggagagaatcgttaaattgtccaacttttagcaacctgaagactttggccctgggagaatggtgtatcagtacggttgctgacttcgacatattacttgtcttgcttcagcattcacctagtctggagaagctttatcttcagcttgaaatgaaccgtgacatcaagaaggcattggtaagaggtatagaaccaaaggggggatcatttgcttgcaaacatcttagtatggtgaagatcagatgcaccaaggacgattcaagagtccatatgttggcgcagttgtttaggtctaatggcttgccgctcgagaagatttatgtccgtcggagtgggagtttctatcttcgtatcttgaaggaggagaggggtattgccatcgatgaactgcgtagatcttgatccgattcctattaaaaacagaaatgtgcgatgtgacaaatatgtactctttttcagtaccttgtagacctgtttcagctctagttgatgattggaacatcatttatgcagagaacttgcagggcatgtggcgatagaatgcatgattgtctcgcacatctctattaagttgtcttgtcagctgatatcgtttgaagaacaaagttcagattcgagcaccttggt

SEQ ID NO: 118197 - DNA, 1331 bp, Zea Mays
ctgcgcactgcttctccccacggcgcacgccagccgtcagcccgtcaccgattgttctggctcctgcgcgccgccagccccgcttgttctggctcctgcgcgccgccagccgtcagcccgtcaccgattggagatccttggacacctgcgcgccgccagcccgtcaccgcttggagacccgcgcagccgcgcttccctgcgcgccgccagccgtcgccgatccgtggccgcgtccgccgccgccagccctaaggtcgcgccgtcagccagcccgtctgccgtcgtgaggaatttttctggtaatcagcatggcactgtcatcaatgtttaagagaataaatgtgaaagatttgacctccaaggtttcagtctataccagtgctacaggtgatgactttggcagcttaccatattattttatccacttaactacatctgcctaaagaatacatgcttccagagttatctggtggactaaacatgatatttaggcgctgggccacgaaaaggactgctggatcaacaaaaaatggtcgcgattccaatccaaagtatttgggggtaaagaagtttggtggagaggtaccactttcaaataccccattctgattctttaaaagaaaggcattatctttaagcatatagtgagaagcactctccatgattagcatctaaatagctaatttgacagttccagtccattgcactaatcatgtggtcagcggcttgcttcaagtttttcctttggcacttaagcagttgacacatagtaacatatacttggctccagtactatgattcagtatatttatcaactattcgttggtcacttaatcttctacatttttatcttatgataccaaaggttggacatattgaactcttaccgctgctatgctcctcatctgatgacagttcttattttctcagaaagtactaccagggaacatcattgtccgccaaagagggacccgcttccatcctggaaactatgttggcatgggcaaggatcatacacttttctgcctgaaagaaggcaatgtacgctttgagcgcaacaaactctcaggcaggaaatgggttcatgttgatccagttgctggtcatgatcttcaccccatttacgcagatggttttgctactacatccgacactgagccaatgcaataaatgtgcttggggatttgggctgtcattttgttccaactcattcagctgccattttacagtttcatgtgtaaactttagcaggcttgaacgtagctggatcttttctttgtaatcataactactttgaataatataagttatacactgtaagctttgttctc

SEQ ID NO: 118198 - DNA, 934 bp, Zea Mays
ctgcgcactgcttctccccacggcgcacgccagccgtcagcccgtcaccgattgttctggctcctgcgcgccgccagccccgcttgttctggctcctgcgcgccgccagccgtcagcccgtcaccgattggagatccttggacacctgcgcgccgccagcccgtcaccgcttggagacccgcgcagccgcgcttccctgcgcgccgccagccgtcgccgatccgtggccgcgtccgccgccgccagccctaaggtcgcgccgtcagccagcccgtctgccgtcgtgaggaatttttctggtaatcagcatggcactgtcatcaatgtttaagagaataaatgtgaaagatttgacctccaaggtttcagtctataccagtgctacagagttatctggtggactaaacatgatatttaggcgctgggccacgaaaaggactgctggatcaacaaaaaatggtcgcgattccaatccaaagtatttgggggtaaagaagtttggtggagagaaagtactaccagggaacatcattgtccgccaaagagggacccgcttccatcctggaaactatgttggcatgggcaaggatcatacacttttctgcctgaaagaaggcaatgtacgctttgagcgcaacaaactctcaggcaggaaatgggttcatgttgatccagttgctggtcatgatcttcaccccatttacgcagatggttttgctactacatccgacactgagccaatgcaataaatgtgcttggggatttgggctgtcattttgttccaactcattcagctgccattttacagtttcatgtgtaaactttagcaggcttgaacgtagctggatcttttctttgtaatcataactactttgaataatataagttatacactgtaagctttgttctcatggttaacttcagatttcaaata

SEQ ID NO: 118199 - DNA, 942 bp, Zea Mays
ctgcgcactgcttctccccacggcgcacgccagccgtcagcccgtcaccgattgttctggctcctgcgcgccgccagccccgcttgttctggctcctgcgcgccgccagccgtcagcccgtcaccgattggagatccttggacacctgcgcgccgccagcccgtcaccgcttggagacccgcgcagccgcgcttccctgcgcgccgccagccgtcgccgatccgtggccgcgtccgccgccgccagccctaaggtcgcgccgtcagccagcccgtctgccgtcgtgaggtactgaggaatttttctggtaatcagcatggcactgtcatcaatgtttaagagaataaatgtgaaagatttgacctccaaggtttcagtctataccagtgctacagagttatctggtggactaaacatgatatttaggcgctgggccacgaaaaggactgctggatcaacaaaaaatggtcgcgattccaatccaaagtatttgggggtaaagaagtttggtggagagaaagtactaccagggaacatcattgtccgccaaagagggacccgcttccatcctggaaactatgttggcatgggcaaggatcatacacttttctgcctgaaagaaggcaatgtacgctttgagcgcaacaaactctcaggcaggaaatgggttcatgttgatccagttgctggtcatgatcttcaccccatttacgcagatggttttgctactacatccgacactgagccaatgcaataaatgtgcttggggatttgggctgtcattttgttccaactcattcagctgccattttacagtttcatgtgtaaactttagcaggcttgaacgtagctggatcttttctttgtaatcataactactttgaataatataagttatacactgtaagctttgttctcatggttaacttcagatttcaaata

SEQ ID NO: 118200 - DNA, 1007 bp, Zea Mays
ctgcgcactgcttctccccacggcgcacgccagccgtcagcccgtcaccgattgttctggctcctgcgcgccgccagccccgcttgttctggctcctgcgcgccgccagccgtcagcccgtcaccgattggagatccttggacacctgcgcgccgccagcccgtcaccgcttggagacccgcgcagccgcgcttccctgcgcgccgccagccgtcgccgatccgtggccgcgtccgccgccgccagccctaaggtcgcgccgtcagccagcccgtctgccgtcgtgaggaatttttctggtaatcagcatggcactgtcatcaatgtttaagagaataaatgtgaaagatttgacctccaaggtttcagtctataccagtgctacaggtgatgactttggcagcttaccatattattttatccacttaactacatctgcctaaagaatacatgcttccagagttatctggtggactaaacatgatatttaggcgctgggccacgaaaaggactgctggatcaacaaaaaatggtcgcgattccaatccaaagtatttgggggtaaagaagtttggtggagagaaagtactaccagggaacatcattgtccgccaaagagggacccgcttccatcctggaaactatgttggcatgggcaaggatcatacacttttctgcctgaaagaaggcaatgtacgctttgagcgcaacaaactctcaggcaggaaatgggttcatgttgatccagttgctggtcatgatcttcaccccatttacgcagatggttttgctactacatccgacactgagccaatgcaataaatgtgcttggggatttgggctgtcattttgttccaactcattcagctgccattttacagtttcatgtgtaaactttagcaggcttgaacgtagctggatcttttctttgtaatcataactactttgaataatataagttatacactgtaagctttgttctcatggttaacttcagatttcaaata

SEQ ID NO: 118201 - DNA, 977 bp, Zea Mays
atttgcatcgcgcattcgcgccggtctggccaatctctagttctctactgcacggtgaccgatcaacgacagtcgacagttgcagtgcagccggtgagcttagatgacgcgcgtcccctaaaagcaggatctggcataaggctacgtgctggtttacagttacagctcaggcttaccatttctttaaccaattcgcttcttgttctttaaaagttcagagttcaagagttcagtttagagagagagagggggagagtgatttgccgacttgccagttgccgcacaaagctcctctagcacctctgtgtggccgacttgtccccggtatcaccaagtctgcaggcctccccagtcgtcgccggcgagggaacgcgccgcccgtgacgccgcgggttgttggcgccggcgttgaggccacaagcgcgccagcatcaggacctcacaggtgattcaatcctgaaggcatcaactatgttcaattttcaagaaatgtcttgctgttttacgtgtgcgacgggcatggaacgaaataatgaaaacgaaggaggaagcaaggtgaggattttttcctacagtgagatgaggaaagctacgcatgattttagtggagcaaacaagattggcgagggcggtttcggctccgttttcagggggaagcttaaagatggaacgatcgtcgcggtgaaagtcctttctgctaattcaaggcagggtgttcgagagttcgtaaccgaacttacagcaatttcagatatcgtgcatgaaaacctaattacattggttggttgctgtgccgaagggtcccagaggattcttgtgtacaattatctcgagaacaatagtctttcatatacacttctaggtgacattgttaccaagccaacactttaacaatccaattttctagtagctatgtgtcatgtgtgtaccctcatatggtattgcaggttcgggccggagcaacattcggttcaact

SEQ ID NO: 118202 - DNA, 1801 bp, Zea Mays
atttgcatcgcgcattcgcgccggtctggccaatctctagttctctactgcacggtgaccgatcaacgacagtcgacagttgcagtgcagccggtgagcttagatgacgcgcgtcccctaaaagcaggatctggcataaggctacgtgctggtttacagttacagctcaggcttaccatttctttaaccaattcgcttcttgttctttaaaagttcagagttcaagagttcagtttagagagagagagggggagagtgatttgccgacttgccagttgccgcacaaagctcctctagcacctctgtgtggccgacttgtccccggtatcaccaagtctgcaggcctccccagtcgtcgccggcgagggaacgcgccgcccgtgacgccgcgggttgttggcgccggcgttgaggccacaagcgcgccagcatcaggacctcacaggtgattcaatcctgaaggcatcaactatgttcaattttcaagaaatgtcttgctgttttacgtgtgcgacgggcatggaacgaaataatgaaaacgaaggtgaccagttttgaggaagcaaggtgaggattttttcctacagtgagatgaggaaagctacgcatgattttagtggagcaaacaagattggcgagggcggtttcggctccgttttcagggggaagcttaaagatggaacgatcgtcgcggtgaaagtcctttctgctaattcaaggcagggtgttcgagagttcgtaaccgaacttacagcaatttcagatatcgtgcatgaaaacctaattacattggttggttgctgtgccgaagggtcccagaggattcttgtgtacaattatctcgagaacaatagtctttcatatacacttctaggttcgggccggagcaacattcggttcaactggagagcccgtgtcaagattgctgtaggcgttgctcgtgggcttgcttatcttcacgatggaattcggccccctataattcatcgagatataaaggcgagcaacattctccttgacaaggacctcaccccaaagatctctgatttcgggctggcaaggctcctccccccaaacgcaactcatgtgagcactagggttgcaggaacaataggatacctggctcctgaatacgctgtgagggggcaagtgacgaagaaatcggatatctatagtttcggcgttttgctactggaaattgttgctggtagatgtaactacaacagtagattgcctcagggagaccagtttctgcttgagaagacatgggcatactacgtgcagggaaagctagagaaggtcatagacgccgaagcaggggaggacctgaacgtcgaggaggcatgccgtttcttgaaggttggcctactatgcgcccaagacgcgatgaagctgcgtccgaacatggccagcgtcgtcctgatgctgataggagagaagggaatctccgtggacaggatcaccaagccagccgtgatcggtgacccgtacctcgaccggaggccaagcaacgcagactctaccacgatgaagtccttcgccacgaccgaagctttaacgtcatcagaggcaaacacggagtggtctctgtgatggggggaaaaaacgtcatcatcgatggagatttgtttttgtggatgctgcagttgccaaacaaataccgcatcgcttctgttgattatgtttgtttgttatttttgtgtgtgtgtatatatacttgaaatggaaccacgggagtgaaacgaggattgaatatgctttacccatctttggtacaagtagaatcgtttgtgtttctatc

SEQ ID NO: 118203 - DNA, 1789 bp, Zea Mays
atttgcatcgcgcattcgcgccggtctggccaatctctagttctctactgcacggtgaccgatcaacgacagtcgacagttgcagtgcagccggtgagcttagatgacgcgcgtcccctaaaagcaggatctggcataaggctacgtgctggtttacagttacagctcaggcttaccatttctttaaccaattcgcttcttgttctttaaaagttcagagttcaagagttcagtttagagagagagagggggagagtgatttgccgacttgccagttgccgcacaaagctcctctagcacctctgtgtggccgacttgtccccggtatcaccaagtctgcaggcctccccagtcgtcgccggcgagggaacgcgccgcccgtgacgccgcgggttgttggcgccggcgttgaggccacaagcgcgccagcatcaggacctcacaggtgattcaatcctgaaggcatcaactatgttcaattttcaagaaatgtcttgctgttttacgtgtgcgacgggcatggaacgaaataatgaaaacgaaggaggaagcaaggtgaggattttttcctacagtgagatgaggaaagctacgcatgattttagtggagcaaacaagattggcgagggcggtttcggctccgttttcagggggaagcttaaagatggaacgatcgtcgcggtgaaagtcctttctgctaattcaaggcagggtgttcgagagttcgtaaccgaacttacagcaatttcagatatcgtgcatgaaaacctaattacattggttggttgctgtgccgaagggtcccagaggattcttgtgtacaattatctcgagaacaatagtctttcatatacacttctaggttcgggccggagcaacattcggttcaactggagagcccgtgtcaagattgctgtaggcgttgctcgtgggcttgcttatcttcacgatggaattcggccccctataattcatcgagatataaaggcgagcaacattctccttgacaaggacctcaccccaaagatctctgatttcgggctggcaaggctcctccccccaaacgcaactcatgtgagcactagggttgcaggaacaataggatacctggctcctgaatacgctgtgagggggcaagtgacgaagaaatcggatatctatagtttcggcgttttgctactggaaattgttgctggtagatgtaactacaacagtagattgcctcagggagaccagtttctgcttgagaagacatgggcatactacgtgcagggaaagctagagaaggtcatagacgccgaagcaggggaggacctgaacgtcgaggaggcatgccgtttcttgaaggttggcctactatgcgcccaagacgcgatgaagctgcgtccgaacatggccagcgtcgtcctgatgctgataggagagaagggaatctccgtggacaggatcaccaagccagccgtgatcggtgacccgtacctcgaccggaggccaagcaacgcagactctaccacgatgaagtccttcgccacgaccgaagctttaacgtcatcagaggcaaacacggagtggtctctgtgatggggggaaaaaacgtcatcatcgatggagatttgtttttgtggatgctgcagttgccaaacaaataccgcatcgcttctgttgattatgtttgtttgttatttttgtgtgtgtgtatatatacttgaaatggaaccacgggagtgaaacgaggattgaatatgctttacccatctttggtacaagtagaatcgtttgtgtttctatc

SEQ ID NO: 118204 - DNA, 2202 bp, Zea Mays
accaccttccgtcgccagctcctagaaacccctcctgcccaaaaaccctagcagccactagggtttctccgctcccacccggcctcctccctctctcctccgatgggcaagtcaagcaagaaggcggccgccgtggctgcggcgccagcggcggtgcccaaggggaagaaacgggaggcggaggaagagatcgagaaggccgtgagcgcgaagaagcagaaggcggcgccaccggcgaaggccgtgccgacgtccaagaaggacgccaagaagtccaagaagcagcctccccccaagaaggctgagagcagcagcagtgactctgaagaggactccgagtccgaagaggaggttaagaaggtacagccaaagaaggcgcctgctcccaagattgctaaacaagagtccagtgatgatgacaccagcgatgagacctctgaatctgatgaggaacctgcaaagaagcctgctgctaaacccttggctgcagttgcgaaaaatggttcgaagacagtcaagcaagagagcagcagcgatgaggacagttctgaagatgagtcggatgacgacagtgatgatgaacctgcaaagaaggctgctgctaaacccttgggtgccgttgctaaaaatggtttgaagaaaggcaagcaagaaagcagcagcgatgggagcagttctgatgatgagtcagacgatgataaacctgctgccccactaaagaaaacatctgtggctgttgcacaaaagaaaaagggagattcttctgagagtgactctgatgatgactcagatgaggaagtgcctccaaagtcaaaggctccagcagcaactatcaaaaaggaagattccagtgaaagtgagtcagagagtgattctgaggttgaggatgcaagtaaaactcagcctgctaagagagctgcttcaaaaatgaaagatgaatcaagtgatgactcagacactgatgaggatgaagaacctcctcaaaagaagcagaaggaagcactttcagctgcaaaaaaagaaagcagcagtgaggatgaagatgacagtagtgaggaaagttcggatgatgagccaacaaaagttgaagaaaagaaggctccaaaagtatcagaaaacagtggatcggaggatgaatcttctgaagacgagagtgataaagacagtgaagagcctgctaatactccaaagaaggctgctgtgcacgcctctgaaaagaaaactgctaccaaagaacctaagacgcctactggctcccaaagtgaatcaacggaggtgaatacactttttatgggaaatgtcccctggaaagctgaatttgatgatgtgaaagaattttttgaggacgttggtgaggttgttgatgttcgttttcctacacatgatgatggcaatcgtaaaggattttgctatgttgaatttgtttcagctgaagctgctgcaaaggcatataaagagaagcaatcaaaggagctgcatggtcgtgaagtaagacttgacttcgctaaaggaagaagtacacaaactcctcgcagcggcaatgatggatctttccagaaggctgctcggggtaacagcagctcaatatttatccggggctttgataaaaatctttcagaggatgagatccggagctctctcgaacaacattttagtgattgtggtgagatgacaagggtctctatcccgactgatcatgaatctggtgcaataaaaggaatggcttacatagacttcaaggatcaggactctgtgtctaaagcccttgagctcagtggctctgacattggtggtggctatgagctttatgttgatgaagccaaaccaagaggcgatggccagcgtggtggtggtagatctggtggccgttctggtgggagatttggtgaccgttctggtggccggcgtggtggtggtagatttggtgaaagatctgggggcagggatggtggcggcagattcggtggccgacgtggtggtagggatggcggccgaggacgtggtggccgtggctttggtaacaagcacagcgctggcactcccagtgcaggtacaactcatcctgtaattgtgaagttcactgcattttggtttgagcaaaaaaattgccgccctgtggtttctggcttcaaaaagcttgaggtcactgctgtactacctcttatttgcacaggaaagaagactacttttggtgatgattga

SEQ ID NO: 118205 - DNA, 2372 bp, Zea Mays
accaccttccgtcgccagctcctagaaacccctcctgcccaaaaaccctagcagccactagggtttctccgctcccacccggcctcctccctctctcctccgatgggcaagtcaagcaagaaggcggccgccgtggctgcggcgccagcggcggtgcccaaggggaagaaacgggaggcggaggaagagatcgagaaggccgtgagcgcgaagaagcagaaggcggcgccaccggcgaaggccgtgccgacgtccaagaaggacgccaagaagtccaagaagcagcctccccccaagaaggctgagagcagcagcagtgactctgaagaggactccgagtccgaagaggaggttaagaaggtacagccaaagaaggcgcctgctcccaagattgctaaacaagagtccagtgatgatgacaccagcgatgagacctctgaatctgatgaggaacctgcaaagaagcctgctgctaaacccttggctgcagttgcgaaaaatggttcgaagacagtcaagcaagagagcagcagcgatgaggacagttctgaagatgagtcggatgacgacagtgatgatgaacctgcaaagaaggctgctgctaaacccttgggtgccgttgctaaaaatggtttgaagaaaggcaagcaagaaagcagcagcgatgggagcagttctgatgatgagtcagacgatgatgttaaacctgctgccccactaaagaaaacatctgtggctgttgcacaaaagaaaaagggagattcttctgagagtgactctgatgatgactcagatgaggaagtgcctccaaagtcaaaggctccagcagcaactatcaaaaaggaagattccagtgaaagtgagtcagagagtgattctgaggttgaggatgcaagtaaaactcagcctgctaagagagctgcttcaaaaatgaaagatgaatcaagtgatgactcagacactgatgaggatgaagaacctcctcaaaagaagcagaaggaagcactttcagctgcaaaaaaagaaagcagcagtgaggatgaagatgacagtagtgaggaaagttcggatgatgagccaacaaaagttgaagaaaagaaggctccaaaagtatcagaaaacagtggatcggaggatgaatcttctgaagacgagagtgataaagacagtgaagagcctgctaatactccaaagaaggctgctgtgcacgcctctgaaaagaaaactgctaccaaagaacctaagacgcctactggctcccaaagtgaatcaacggaggtgaatacactttttatgggaaatgtcccctggaaagctgaatttgatgatgtgaaagaattttttgaggacgttggtgaggttgttgatgttcgttttcctacacatgatgatggcaatcgtaaaggattttgctatgttgaatttgtttcagctgaagctgctgcaaaggcatataaagagaagcaatcaaaggagctgcatggtcgtgaagtaagacttgacttcgctaaaggaagaagtacacaaactcctcgcagcggcaatgatggatctttccagaaggctgctcggggtaacagcagctcaatatttatccggggctttgataaaaatctttcagaggatgagatccggagctctctcgaacaacattttagtgattgtggtgagatgacaagggtctctatcccgactgatcatgaatctggtgcaataaaaggaatggcttacatagacttcaaggatcaggactctgtgtctaaagcccttgagctcagtggctctgacattggtggtggctatgagctttatgttgatgaagccaaaccaagaggcgatggccagcgtggtggtggtagatctggtggccgttctggtgggagatttggtgaccgttctggtggccggcgtggtggtggtagatttggtgaaagatctgggggcagggatggtggcggcagattcggtggccgacgtggtggtagggatggcggccgaggacgtggtggccgtggctttggtaacaagcacagcgctggcactcccagtgcaggaaagaagactacttttggtgatgattgatgatgaacgcggaggatgcggcaaaaggatccaatgaaattgtgtttttttggtcttgttgtggtaccgtaactggaatttggtattttttgtctactatttactgtagtggtttctggattttccttgtgttgcctatgctgcaatacaccgttttgttgttgcgatacatctgtagtttggttttgttatccacctgtcgtttataagaagcggctgtactcaggctactatgccgaactgaaatgggaatggagcaaaacgaaatcttagttctgaagcgactaaaa

SEQ ID NO: 118206 - DNA, 2371 bp, Zea Mays
accaccttccgtcgccagctcctagaaacccctcctgcccaaaaaccctagcagccactagggtttctccgctcccacccggcctcctccctctctcctccgatgggcaagtcaagcaagaaggcggccgccgtggctgcggcgccagcggcggtgcccaaggggaagaaacgggaggcggaggaagagatcgagaaggccgtgagcgcgaagaagcagaaggcggcgccaccggcgaaggccgtgccgacgtccaagaaggacgccaagaagtccaagaagcagcctccccccaagaaggctgagagcagcagcagtgactctgaagaggactccgagtccgaagaggaggttaagaaggtacagccaaagaaggcgcctgctcccaagattgctaaacaagagtccagtgatgatgacaccagcgatgagacctctgaatctgatgaggaacctgcaaagaagcctgctgctaaacccttggctgcagttgcgaaaaatggttcgaagacagtcaagcaagagagcagcagcgatgaggacagttctgaagatgagtcggatgacgacagtgatgatgaacctgcaaagaaggctgctgctaaacccttgggtgccgttgctaaaaatggtttgaagaaaggcaagcaagaaagcagcagcgatgggagcagttctgatgatgagtcagacgatgatgttaaacctgctgccccactaaagaaaacatctgtggctgttgcacaaaagaaaaagggagattcttctgagagtgactctgatgatgactcagatgagtcaaaggctccagcagcaactatcaaaaaggaagattccagtgaaagtgagtcagagagtgattctgaggttgaggatgcaagtaaaactcagcctgctaagagagctgcttcaaaaatgaaagatgaatcaagtgatgactcagacactgatgaggatgaagaacctcctcaaaagaagcagaaggaagcactttcagctgcaaaaaaagaaagcagcagtgaggatgaagatgacagtagtgaggaaagttcggatgatgagccaacaaaagttgaagaaaagaaggctccaaaagtatcagaaaacagtggatcggaggatgaatcttctgaagacgagagtgataaagacagtgaagagcctgctaatactccaaagaaggctgctgtgcacgcctctgaaaagaaaactgctaccaaagaacctaagacgcctactggctcccaaagtgaatcaacggaggtgaatacactttttatgggaaatgtcccctggaaagctgaatttgatgatgtgaaagaattttttgaggacgttggtgaggttgttgatgttcgttttcctacacatgatgatggcaatcgtaaaggattttgctatgttgaatttgtttcagctgaagctgctgcaaaggcatataaagagaagcaatcaaaggagctgcatggtcgtgaagtaagacttgacttcgctaaaggaagaagtacacaaactcctcgcagcggcaatgatggatctttccagaaggctgctcggggtaacagcagctcaatatttatccggggctttgataaaaatctttcagaggatgagatccggagctctctcgaacaacattttagtgattgtggtgagatgacaagggtctctatcccgactgatcatgaatctggtgcaataaaaggaatggcttacatagacttcaaggatcaggactctgtgtctaaagcccttgagctcagtggctctgacattggtggtggctatgagctttatgttgatgaagccaaaccaagaggcgatggccagcgtggtggtggtagatctggtggccgttctggtgggagatttggtgaccgttctggtggccggcgtggtggtggtagatttggtgaaagatctgggggcagggatggtggcggcagattcggtggccgacgtggtggtagggatggcggccgaggacgtggtggccgtggctttggtaacaagcacagcgctggcactcccagtgcaggaaagaagactacttttggtgatgattgatgatgaacgcggaggatgcggcaaaaggatccaatgaaattgtgtttttttggtcttgttgtggtaccgtaactggaatttggtattttttgtctactatttactgtagtggtttctggattttccttgtgttgcctatgctgcaatacaccgttttgttgttgcgatacatctgtagtttggttttgttatccacctgtcgtttataagaagcggctgtactcaggctactatgccgaactgaaatgggaatggagcaaaacgaaatcttagttctgaagcgactaaaactattactagaggc

SEQ ID NO: 118207 - DNA, 2532 bp, Zea Mays
accaccttccgtcgccagctcctagaaacccctcctgcccaaaaaccctagcagccactagggtttctccgctcccacccggcctcctccctctctcctccgatgggcaagtcaagcaagaaggcggccgccgtggctgcggcgccagcggcggtgcccaaggggaagaaacgggaggcggaggaagagatcgagaaggccgtgagcgcgaagaagcagaaggcggcgccaccggcgaaggccgtgccgacgtccaagaaggacgccaagaagtccaagaagcagcctccccccaagaaggctgagagcagcagcagtgactctgaagaggactccgagtccgaagaggaggttaagaaggtacagccaaagaaggcgcctgctcccaagattgctaaacaagagtccagtgatgatgacaccagcgatgagacctctgaatctgatgaggaacctgcaaagaagcctgctgctaaacccttggctgcagttgcgaaaaatggttcgaagacagtcaagcaagagagcagcagcgatgaggacagttctgaagatgagtcggatgacgacagtgatgatgaacctgcaaagaaggctgctgctaaacccttgggtgccgttgctaaaaatggtttgaagaaaggcaagcaagaaagcagcagcgatgggagcagttctgatgatgagtcagacgatgatgttaaacctgctgccccactaaagaaaacatctgtggctgttgcacaaaagaaaaagggagattcttctgagagtgactctgatgatgactcagatgaggaagtgcctccaaagtcaaaggctccagcagcaactatcaaaaaggaagattccagtgaaagtgagtcagagagtgattctgaggttgaggatgcaagtaaaactcagcctgctaagagagctgcttcaaaaatgaaagatgaatcaagtgatgactcagacactgatgaggatgaagaacctcctcaaaagaagcagaaggaagcactttcagctgcaaaaaaagaaagcagcagtgaggatgaagatgacagtagtgaggaaagttcggatgatgagccaacaaaagttgaagaaaagaaggctccaaaagtatcagaaaacagtggatcggaggatgaatcttctgaagacgagagtgataaagacagtgaagagcctgctaatactccaaagaaggctgctgtgcacgcctctgaaaagaaaactgctaccaaagaacctaagacgcctactggctcccaaagtgaatcaacggaggtgaatacactttttatgggaaatgtcccctggaaagctgaatttgatgatgtgaaagaattttttgaggacgttggtgaggttgttgatgttcgttttcctacacatgatgatggcaatcgtaaaggattttgctatgttgaatttgtttcagctgaagctgctgcaaaggcatataaagagaagcaatcaaaggagctgcatggtcgtgaagtaagacttgacttcgctaaaggaagaagtacacaaactcctcgcagcggcaatgatggatctttccagaaggctgctcggggtaacagcagctcaatatttatccggggctttgataaaaatctttcagaggatgagatccggagctctctcgaacaacattttagtgattgtggtgagatgacaagggtctctatcccgactgatcatgaatctggtgcaataaaaggaatggcttacatagacttcaaggatcaggactctgtgtctaaagcccttgagctcagtggctctgacattggtggtggctatgagctttatgttgatgaagccaaaccaagaggcgatggccagcgtggtggtggtagatctggtggccgttctggtgggagatttggtgaccgttctggtggccggcgtggtggtggtagatttggtgaaagatctgggggcagggatggtggcggcagattcggtggccgacgtggtggtagggatggcggccgaggacgtggtggccgtggctttggtaacaagcacagcgctggcactcccagtgcaggtacaactcatcctgtaattgtgaagttcactgcattttggtttgagcaaaaaaattgccgccctgtggtttctggcttcaaaaagcttgaggtcactgctgtactacctcttatttgcacaggaaagaagactacttttggtgatgattgatgatgaacgcggaggatgcggcaaaaggatccaatgaaattgtgtttttttggtcttgttgtggtaccgtaactggaatttggtattttttgtctactatttactgtagtggtttctggattttccttgtgttgcctatgctgcaatacaccgttttgttgttgcgatacatctgtagtttggttttgttatccacctgtcgtttataagaagcggctgtactcaggctactatgccgaactgaaatgggaatggagcaaaacgaaatcttagttctgaagcgactaaaactattactagaggcaatgccatcgttttagttgcata

SEQ ID NO: 118208 - DNA, 1416 bp, Zea Mays
tcaggatgttccattgttcacattgtatttcttctgttaataggaagcactttcagctgcaaaaaaagaaagcagcagtgaggatgaagatgacagtagtgaggaaagttcggatgatgagccaacaaaagttgaagaaaagaaggctccaaaagtatcagaaaacagtggatcggaggatgaatcttctgaagacgagagtgataaagacagtgaagagcctgctaatactccaaagaaggctgctgtgcacgcctctgaaaagaaaactgctaccaaagaacctaagacgcctactggctcccaaagtgaatcaacggaggtgaatacactttttatgggaaatgtcccctggaaagctgaatttgatgatgtgaaagaattttttgaggacgttggtgaggttgttgatgttcgttttcctacacatgatgatggcaatcgtaaaggattttgctatgttgaatttgtttcagctgaagctgctgcaaaggcatataaagagaagcaatcaaaggagctgcatggtcgtgaagtaagacttgacttcgctaaaggaagaagtacacaaactcctcgcagcggcaatgatggatctttccagaaggctgctcggggtaacagcagctcaatatttatccggggctttgataaaaatctttcagaggatgagatccggagctctctcgaacaacattttagtgattgtggtgagatgacaagggtctctatcccgactgatcatgaatctggtgcaataaaaggaatggcttacatagacttcaaggatcaggactctgtgtctaaagcccttgagctcagtggctctgacattggtggtggctatgagctttatgttgatgaagccaaaccaagaggcgatggccagcgtggtggtggtagatctggtggccgttctggtgggagatttggtgaccgttctggtggccggcgtggtggtggtagatttggtgaaagatctgggggcagggatggtggcggcagattcggtggccgacgtggtggtagggatggcggccgaggacgtggtggccgtggctttggtaacaagcacagcgctggcactcccagtgcaggaaagaagactacttttggtgatgattgatgatgaacgcggaggatgcggcaaaaggatccaatgaaattgtgtttttttggtcttgttgtggtaccgtaactggaatttggtattttttgtctactatttactgtagtggtttctggattttccttgtgttgcctatgctgcaatacaccgttttgttgttgcgatacatctgtagtttggttttgttatccacctgtcgtttataagaagcggctgtactcaggctactatgccgaactgaaatgggaatggagcaaaacgaaatcttagttctgaagcgactaaaa

SEQ ID NO: 118209 - DNA, 183 bp, Zea Mays
atttccatcctttctgtttcaacaaagaaaacgtttaggtatcggtcataatgtttttatacctttcaccgctgttacgctagaaatccaaggttccacacgagctcctgttctacgacgtggtgacaggaccgctaggggattggctccaggtgtaggtagggtcaagtccgcaggggtcat

SEQ ID NO: 118210 - DNA, 85 bp, Zea Mays
caatctgtatctgaaccgcaatatggacatgtcaatctaccatgtgtactccaaccggtaaaaatagcatacgccatgaagtcat

SEQ ID NO: 118211 - DNA, 97 bp, Zea Mays
atatcacgtaaaatctaaagggaaggactggacagcactactgatcctccaactggtttccaaaaataacagtattgtatgtttcagacatatttga

SEQ ID NO: 118212 - DNA, 483 bp, Zea Mays
atgacagtcaggcctgcctgtctactagaaacttgtaggttccctaatttactgtcctcccttgtccttatcaaatgtgcaactctttcatcagggatggcaacccgtagtgaagcctcttttcgcgttggtgaccttgagctttctatcaagttttatgagaagaggagcagtctcattctcattctcatgcatgggatgaagctcctaaggaagaaggatgtacctgactacaaggttgccattggcaccaacgacgtgtacaagagtgccgaggcggttgacttggcgaccaaagaactagtaggtggcaagatcctgcggcagcctgggccgctgcctgggatcaacactaagatcgcctcttttgtcgatccagatggctggaaagtggttctggttgacaacaccgacacttcgtcagggaactccagtgagaaccggaccggggcacccagtatgcaaattaagaaggatgtttga

SEQ ID NO: 118213 - DNA, 103 bp, Zea Mays
ctaggttccccagacgtgacaccacaaatggaacaagatctctcaatttcaatgcacagtacaagcataggaatggatctacttcaaaactagataattaaag

SEQ ID NO: 118214 - DNA, 3273 bp, Zea Mays
tgcagaggcatttctttgttccagtagctaatcatgttgccttactttgtgtgcagctactgtgcatgccttcaaggatattctgaccagcctccctaagcctggaggtggtgaatatggaaagttctacagccttcctgcactaaatgatccaaggattgataagctgccgtactccgtccgtattcttcttgagtcagctatccgtaactgtgataacttccaagttaccaagaatgatgttgagaaaataattgactgggaaaacacatctccaaagctggccgagataccattcaagccagctcgagttcttcttcaggacttcactggagttccagcagttgttgatcttgcagctatgcgtgatgcgatggccaagttgggcagtgatgcgaacaagattaacccattggtcccggtggatcttgttattgatcactcagtgcaggtggatgtagcaaggtcgcagaatgccgtacaagcaaacatggaactggaatttagtcgcaacaaggaaagatttggtttccttaaatggggctctagtgctttccaaaatatgctagttgttcctcctggttctggtattgtgcaccaggtcaatcttgagtatcttggcagagttgttttcaacacagatggcattctctatcctgacagcgtagttggtactgattcacacaccactatgattgatggtttgggtgttgctggctggggggttggtggtatagaagcggaggctacaatgcttggtcagccaatgagcatggttttgcctggtgttgttggcttcaagttaactgggaagttacggagtggtgtcacggccactgatcttgttcttacagtaacacaaatgctaaggaaacatggtgttgttggcaaatttgttgaattctatggtgaaggtatgggtaagctgtctttagctgacagggccacaattgcgaacatgtcaccagaatatggagctaccatgggcttctttcctgtggaccatgtgacattggattaccttaaactgacaggccgcagtgatgaaactgtgtcaatgattgaagcatacctgcgagccaataaaatgtttgtggactacaatgagcctccaacagagagaatatactcatcttatcttgagctgaaccttgatgaggtggagcctagcatgtctggcccaaagaggcctcatgatcgtgtccctttgaaggaaatgaaatcagattggcatgcttgcctggacaacaaagttgggttcaagggttttgcagtgccaaaggagcagcaggataaggttgtcaaatttgactttcatgggcagccagcagaaatgaagcatggtagtgttgttatagcagcaataactagctgcacaaacacctcaaatcctagtgttatgcttggtgctggtcttgtagctaagaaagcttgcgagttgggtcttgaggttaaaccatgggtgaagacaagccttgcccctggatcaggagttgtcacgaagtacttgcttcagagtggtcttcaagaatacctcaaccagcaaggattccatatcgttggctatggctgtaccacttgcattggaaactctggtgatctcgatgaatctgtatcaactgccattacagaaaatgatgttgttgctgctgctgttttgtcgggtaaccgtaacttcgagggtcgtgtgcaccctttaactcgggctaactatcttgcttcgccacctcttgttgttgcttatgcacttgccggaactgttgatattgattttgagaaagagcccattggatttggaaaggatggcaaggaagtctacttcagggatatatggccctcgacagaagaaattgcgcaggttgtccaatccagtgtgctgcctgacatgttcaagggcacctatgaggctatcacaaaaggcaacccaatgtggaaccagctaactgtcccagaagcatcactctactcatgggattccaaatccacttacattcatgagcccccttactttaaggacatgaccatgtccccacctggcccctctacagtgaaagatgcctactgcttgctgaacttcggggacagcattactacagatcacatttcacctgcaggaagcatacacaaagacagtcctgctgccaagtatttgatggagcgtggtgtggaccggaaggacttcaactcatatggtagccgtcgtggtaatgatgaagtaatggcaaggggaacgtttgcaaacattaggatcgtgaacaagtttttgaacggagaagttggacccaagaccattcatgttcctactggggagaagctttctgtttttgatgcggccatgagatacaaatctgagggccatgctactataatcctcgctggcgctgagtatggaagcggcagttctcgtgattgggctgctaagggtccgatgctcctgggagttaaagctgtaattgccaagagctttgagcgtatccacagaagcaacttggtggggatgggaatcattcctctgtgcttcaaagctggtgaggatgctgattcacttggcctcactggacatgagcggtacagcatcgatctccctaccaacctcagtgagatccgtcccggccaggatgtgactgttactaccgacaatgggaaatctttcacttgcatcgttcgctttgacactgaggtggagctggcgtacttcaaccatggaggcatcctcccttatgtcatccgcaacttggcagctgcgcataactgaggcaagatcacacaccgtttgacccacaatggcagtggcaggctccatgttcccagggctagcgacctggttctcaatgtagtgacatttgtgatggatctaggggtctctttgtcgattcagcccataaataaagtgtgaaataaaagccgcaggtggaggcaggaacctgctgattgagggaacagttttgcctgtgtttggttacatgaaatatctgtttcacagatgtgtagagcatggtgtaaatgcttcctgtgctgttactttcgtttcgacaaattgattatgctgtagcccttcaggtttcatctagacatttcggtgtcttggagcacattcttttttctgatgttggtaatgttttctgtaggctagtagtagccaatattatgtttggtttatatccccctctaataatctttattactttacaagaaattgttgcttggagggcaaacgttgctcacggtttagcttgatcagagctgaaaatttgatccagctgttgagcccga

SEQ ID NO: 118215 - DNA, 1605 bp, Zea Mays
ctactgtgcatgccttcaaggatattctgaccagcctccctaagcctggaggtggtgaatatggaaagttctacagccttcctgcactaaatgatccaaggattgataagctgccgtactccgtccgtattcttcttgagtcagctatccgtaactgtgataacttccaagttaccaagaatgatgttgagaaaataattgactgggaaaacacatctccaaagctggccgagataccattcaagccagctcgagttcttcttcaggacttcactggagttccagcagttgttgatcttgcagctatgcgtgatgcgatggccaagttgggcagtgatgcgaacaagattaacccattggtcccggtggatcttgttattgatcactcagtgcaggtggatgtagcaaggtcgcagaatgccgtacaagcaaacatggaactggaatttagtcgcaacaaggaaagatttggtttccttaaatggggctctagtgctttccaaaatatgctagttgttcctcctggttctggtattgtgcaccaggtcaatcttgagtatcttggcagagttgttttcaacacagatggcattctctatcctgacagcgtagttggtactgattcacacaccactatgattgatggtttgggtgttgctggctggggggttggtggtatagaagcggaggctacaatgcttggtcagccaatgagcatggttttgcctggtgttgttggcttcaagttaactgggaagttacggagtggtgtcacggccactgatcttgttcttacagtaacacaaatgctaaggaaacatggtgttgttggcaaatttgttgaattctatggtgaaggtatgggtaagctgtctttagctgacagggccacaattgcgaacatgtcaccagaatatggagctaccatgggcttctttcctgtggaccatgtgacattggattaccttaaactgacaggccgcagtgatgaaactgtgtcaatgattgaagcatacctgcgagccaataaaatgtttgtggactacaatgagcctccaacagagagaatatactcatcttatcttgagctgaaccttgatgaggtggagcctagcatgtctggcccaaagaggcctcatgatcgtgtccctttgaaggaaatgaaatcagattggcatgcttgcctggacaacaaagttgggttcaagggttttgcagtgccaaaggagcagcaggataaggttgtcaaatttgactttcatgggcagccagcagaaatgaagcatggtagtgttgttatagcagcaataactagctgcacaaacacctcaaatcctagtgttatgcttggtgctggtcttgtagctaagaaagcttgcgagttgggtcttgaggttaaaccatgggtgaagacaagccttgcccctggatcaggagttgtcacgaagtacttgcttcagagtggtcttcaagaatacctcaaccagcaaggattccataaataaagtgtgaaataaaagccgcaggtggaggcaggaacctgctgattgagggaacagttttgcctgtgtttggttacatgaaatatctgtttcacagatgtgt

SEQ ID NO: 118216 - DNA, 2377 bp, Zea Mays
gttgagaaaataattgactgggaaaacacatctccaaagctggccgagataccattcaagccagctcgagttcttcttcaggacttcactggagttccagcagttgttgatcttgcagctatgcgtgatgcgatggccaagttgggcagtgatgcgaacaagattaacccattggtcccggtggatcttgttattgatcactcagtgcaggtggatgtagcaaggtcgcagaatgccgtacaagcaaacatggaactggaatttagtcgcaacaaggaaagatttggtttccttaaatggggctctagtgctttccaaaatatgctagttgttcctcctggttctggtattgtgcaccaggtcaatcttgagtatcttggcagagttgttttcaacacagatggcattctctatcctgacagcgtagttggtactgattcacacaccactatgattgatggtttgggtgttgctggctggggggttggtggtatagaagcggaggctacaatgcttggtcagccaatgagcatggttttgcctggtgttgttggcttcaagttaactgggaagttacggagtggtgtcacggccactgatcttgttcttacagtaacacaaatgctaaggaaacatggtgttgttggcaaatttgttgaattctatggtgaaggtatgggtaagctgtctttagctgacagggccacaattgcgaacatgtcaccagaatatggagctaccatgggcttctttcctgtggaccatgtgacattggattaccttaaactgacaggccgcagtgatgaaactgtgtcaatgattgaagcatacctgcgagccaataaaatgtttgtggactacaatgagcctccaacagagagaatatactcatcttatcttgagctgaaccttgatgaggtggagcctagcatgtctggcccaaagaggcctcatgatcgtgtccctttgaaggaaatgaaatcagattggcatgcttgcctggacaacaaagttgggttcaagggttttgcagtgccaaaggagcagcaggataaggttgtcaaatttgactttcatgggcagccagcagaaatgaagcatggtagtgttgttatagcagcaataactagctgcacaaacacctcaaatcctagtgttatgcttggtgctggtcttgtagctaagaaagcttgcgagttgggtcttgaggttaaaccatgggtgaagacaagccttgcccctggatcaggagttgtcacgaagtacttgcttcagagtggtcttcaagaatacctcaaccagcaaggattccatatcgttggctatggctgtaccacttgcattggaaactctggtgatctcgatgaatctgtatcaactgccattacagaaaatgatgttgttgctgctgctgttttgtcgggtaatgatgaagtaatggcaaggggaacgtttgcaaacattaggatcgtgaacaagtttttgaacggagaagttggacccaagaccattcatgttcctactggggagaagctttctgtttttgatgcggccatgagatacaaatctgagggccatgctactataatcctcgctggcgctgagtatggaagcggcagttctcgtgattgggctgctaagggtccgatgctcctgggagttaaagctgtaattgccaagagctttgagcgtatccacagaagcaacttggtggggatgggaatcattcctctgtgcttcaaagctggtgaggatgctgattcacttggcctcactggacatgagcggtacagcatcgatctccctaccaacctcagtgagatccgtcccggccaggatgtgactgttactaccgacaatgggaaatctttcacttgcatcgttcgctttgacactgaggtggagctggcgtacttcaaccatggaggcatcctcccttatgtcatccgcaacttggcagctgcgcataactgaggcaagatcacacaccgtttgacccacaatggcagtggcaggctccatgttcccagggctagcgacctggttctcaatgtagtgacatttgtgatggatctaggggtctctttgtcgattcagcccataaataaagtgtgaaataaaagccgcaggtggaggcaggaacctgctgattgagggaacagttttgcctgtgtttggttacatgaaatatctgtttcacagatgtgtagagcatggtgtaaatgcttcctgtgctgttactttcgtttcgacaaattgattatgctgtagcccttcaggtttcatctagacatttcggtgtcttggagcacattcttttttctgataaaaaaagggaaacaaaggcaaaggagaaccgaaaaacgacgaaacgggg

SEQ ID NO: 118217 - DNA, 145 bp, Zea Mays
ctaaatttgaaatgaaaacccaaaactcagatttgaaatttggggccaaattgggatttagccttaaatttaaattcggatttgaaaataagaaagagagaaatattctaaaatacaaaacaaaaaaaacttataaaatctaaac

SEQ ID NO: 118218 - DNA, 1813 bp, Zea Mays
gagaaatctcaatccaaagagagccttctccaccgctcttgctcgtccaaccttctccatcgtctcaccttaggtttcgctccccgccgccgccgccatgatgccgcagcagcagcagcccggcatggcccctcctcctccacaggccgcccccggagcgccgccacactggggcggcatcccgccgcctatggcccctcagcatcagtacgcgccaccaccgacccatcaggccccgcccccgccgcagatgtggggccaggcgcccccgcccccgcccccgcctcaggccgcgtacggtcaggcgcccccgccgccccaggccgcgtatggccaggcgctcccaccaccccaggccgcgtacggccaggcgcctcccccgccacaggccgcctactacggggcggtacccgcgcccgcggcggtggccgcggcacctgtcgggcccagcgaggtcaggacgctctggatcggggatctgcagtactggatggacgataactacatctacgggtgcttcgcatccacgggggaggtgcaaaatgtgaagctaattcgtgacaagcatactggacaacttcagggctatggttttattgaattcataagccgcgctgctgctgaaagagttcttcagacttacaacgggacaatgatgccaaatgttgagttgccattccggttgaattgggctagtgctggtgaaaaacgtgatgacacccccgactatacaatatttgttggtgatttggctgctgatgttacagactatgtattacaagagacatttagggcacattacccttctgtgaagggtgcaaaagttgtaacagacaagctgacaatgcgcacaaagggttatggttttgtgaagtttggtgatcctaatgagcaagctcgtgcaatgactgagatgaatggcatgctatgttcttctaggcctatgcgtattgggcctgctgcaaacaagaaagctactgttgttcaggagaaaggataccaacaggctcttcatataggacttgagctgcgatgcgtgtcttgtgtaatgcatgacctctgttagtaccaagtgctcagggagttcagtctgacaatgatcctaacaatacaaccatttttgttggtggtcttgaccccaatgtcactgaagatatgttgaaacaagttttcaccccttatggggacgtagtccatgttaagattcctgttggcaaaagatgtggttttgttcaatatgctaacagatcttcggcagaggaggcattggtaattctgcaaggcaccttggttggagggcagaatgtgaggctttcatggggtcgcagcccttcaaacaaacaagttcagcctcaacaggactccaaccagtgggccggggctaatgctggatattatggctacggtcaaggctatgaggcctatgggtacccccagtctcaggaccctaatatgtataattatggagctggagcttatgctggctatccaaattaccaacaacaaccagtagcacagcaaccgccgcagcaacagtgagaggtccagtgacgctactgtcatttgggtgattgacgtggaaatatttatgagttgtaagatgagcttcggatgcaagctggattaggtatacagacatgattttcgtagtactcagattctgagttgccctcgtatcagagcttgtggtcccaatagcctgcagctgcagctaaaacgatctattttggtagcggaatgttttatctgcttattttgtaccgtgtcttccgctactgcggcggagccttgataacttgctatgttggatttt

SEQ ID NO: 118219 - DNA, 2063 bp, Zea Mays
gagaaatctcaatccaaagagagccttctccaccgctcttgctcgtccaaccttctccatcgtctcaccttaggtttcgctccccgccgccgccgccatgatgccgcagcagcagcagcccggcatggcccctcctcctccacaggccgcccccggagcgccgccacactggggcggcatcccgccgcctatggcccctcagcatcagtacgcgccaccaccgacccatcaggccccgcccccgccgcagatgtggggccaggcgcccccgcccccgcccccgcctcaggccgcgtacggtcaggcgcccccgccgccccaggccgcgtatggccaggcgctcccaccaccccaggccgcgtacggccaggcgcctcccccgccacaggccgcctactacggggcggtacccgcgcccgcggcggtggccgcggcacctgtcgggcccagcgaggtcaggacgctctggatcggggatctgcagtactggatggacgataactacatctacgggtgcttcgcatccacgggggaggtgcaaaatgtgaagctaattcgtgacaagcatactggacaacttcagggctatggttttattgaattcataagccgcgctgctgctgaaagagttcttcagacttacaacgggacaatgatgccaaatgttgagttgccattccggttgaattgggctagtgctggtgaaaaacgtgatgacacccccgactatacaatatttgttggtgatttggctgctgatgttacagactatgtattacaagagacatttagggcacattacccttctgtgaagggtgcaaaagttgtaacagacaagctgacaatgcgcacaaagggttatggttttgtgaagtttggtgatcctaatgagcaagctcgtgcaatgactgagatgaatggcatgctatgttcttctaggcctatgcgtattgggcctgctgcaaacaagaaagctactgttgttcaggagaaagtaccaagtgctcagggagttcagtctgacaatgatcctaacaatacaaccatttttgttggtggtcttgaccccaatgtcactgaagatatgttgaaacaagttttcaccccttatggggacgtagtccatgttaagattcctgttggcaaaagatgtggttttgttcaatatgctaacagatcttcggcagaggaggcattggtaattctgcaaggcaccttggttggagggcagaatgtgaggctttcatggggtcgcagcccttcaaacaaacaagttcaggactccaaccagtgggccggggctaatgctggatattatggctacggtcaaggctatgaggcctatgggtacccccagtctcaggaccctaatatgtataattatggagctggagcttatgctggctatccaaattaccaacaacaaccagtagcacagcaaccgccgcagcaacagtgagaggtccagtgacgctactgtcatttgggtgattgacgtggaaatatttatgagttgtaagatgagcttcggatgcaagctggattaggtatacagacatgattttcgtagtactcagattctgagttgccctcgtatcagagcttgtggtcccaatagcctgcagctgcagctaaaacgatctattttggtagcggaatgttttatctgcttattttgtaccgtgtcttccgctactgcggcggagccttgataacttgctatgttggatttttcccgagtgttatcgcatgaatgttgtcatttgccttggtgccatgttggtgttggcaaacgagcgagcagaacctgcagatcgagcagtacctgagcaccattttaacatggtttaacctttttagctggctcttgttaggattggtacattttcactgagtagggcacctagccgaaccgctcggttttcggtgttggcattttgagaagttcggtcatccgtgtcggctttctgttttgttaggtttgtatcgtagatagtactatacgtagaggtgtttgaaatagtgatgagataagaaatgagataaaagagttgttggataca

SEQ ID NO: 118220 - DNA, 1860 bp, Zea Mays
ctcaatccaaagagagccttctccaccgctcttgctcgtccaaccttctccatcgtctcaccttaggtttcgctccccgccgccgccgccatgatgccgcagcagcagcagcccggcatggcccctcctcctccacaggccgcccccggagcgccgccacactggggcggcatcccgccgcctatggcccctcagcatcagtacgcgccaccaccgacccatcaggccccgcccccgccgcagatgtggggccaggcgcccccgcccccgcccccgcctcaggccgcgtacggtcaggcgcccccgccgccccaggccgcgtatggccaggcgctcccaccaccccaggccgcgtacggccaggcgcctcccccgccacaggccgcctactacggggcggtacccgcgcccgcggcggtggccgcggcacctgtcgggcccagcgaggtcaggacgctctggatcggggatctgcagtactggatggacgataactacatctacgggtgcttcgcatccacgggggaggtgcaaaatgtgaagctaattcgtgacaagcatactggacaacttcagggctatggttttattgaattcataagccgcgctgctgctgaaagagttcttcagacttacaacgggacaatgatgccaaatgttgagttgccattccggttgaattgggctagtgctggtgaaaaacgtgatgacacccccgactatacaatatttgttggtgatttggctgctgatgttacagactatgtattacaagagacatttagggcacattacccttctgtgaagggtgcaaaagttgtaacagacaagctgacaatgcgcacaaagggttatggttttgtgaagtttggtgatcctaatgagcaagctcgtgcaatgactgagatgaatggcatgctatgttcttctaggcctatgcgtattgggcctgctgcaaacaagaaagctactgttgttcaggagaaagtaccaagtgctcagggagttcagtctgacaatgatcctaacaatacaaccatttttgttggtggtcttgaccccaatgtcactgaagatatgttgaaacaagttttcaccccttatggggacgtagtccatgttaagattcctgttggcaaaagatgtggttttgttcaatatgctaacagatcttcggcagaggaggcattggtaattctgcaaggcaccttggttggagggcagaatgtgaggctttcatggggtcgcagcccttcaaacaaacaagttcagcctcaacaggactccaaccagtgggccggggctaatgctggatattatggctacggtcaaggctatgaggcctatgggtacccccagtctcaggaccctaatatgtataattatggagctggagcttatgctggctatccaaattaccaacaacaaccagtagcacagcaaccgccgcagcaacagtgagaggtccagtgacgctactgtcatttgggtgattgacgtggaaatatttatgagttgtaagatgagcttcggatgcaagctggattaggtatacagacatgattttcgtagtactcagattctgagttgccctcgtatcagagcttgtggtcccaatagcctgcagctgcagctaaaacgatctattttggtagcggaatgttttatctgcttattttgtaccgtgtcttccgctactgcggcggagccttgataacttgctatgttggatttttcccgagtgttatcgcatgaatgttgtcatttgccttggtgccatgttggtgttggcaaacgagcgagcagaacctgcagatcgagcagtacctgagcaccattttaacatggtttaaccttttt

SEQ ID NO: 118221 - DNA, 1480 bp, Zea Mays
gagagccttctccaccgctcttgctcgtccaaccttctccatcgtctcaccttaggtttcgctccccgccgccgccgccatgatgccgcagcagcagcagcccggcatggcccctcctcctccacaggccgcccccggagcgccgccacactggggcggcatcccgccgcctatggcccctcagcatcagtacgcgccgcagatgtggggccaggcgcccccgcccccgcccccgcctcaggccgcgtacggtcaggcgcccccgccgccccaggccgcgtatggccaggcgctcccaccaccccaggccgcgtacggccaggcgcctcccccgccacaggccgcctactacggggcggtacccgcgcccgcggcggtggccgcggcacctgtcgggcccagcgaggtcaggacgctctggatcggggatctgcagtactggatggacgataactacatctacgggtgcttcgcatccacgggggaggtgcaaaatgtgaagctaattcgtgacaagcatactggacaacttcagggctatggttttattgaattcataagccgcgctgctgctgaaagagttcttcagacttacaacgggacaatgatgccaaatgttgagttgccattccggttgaattgggctagtgctggtgaaaaacgtgatgacacccccgactatacaatatttgttggtgatttggctgctgatgttacagactatgtattacaagagacatttagggcacattacccttctgtgaagggtgcaaaagttgtaacagacaagctgacaatgcgcacaaagggttatggttttgtgaagtttggtgatcctaatgagcaagctcgtgcaatgactgagatgaatggcatgctatgttcttctaggcctatgcgtattgggcctgctgcaaacaagaaagctactgttgttcaggagaaagtaccaagtgctcagggagttcagtctgacaatgatcctaacaatacaaccatttttgttggtggtcttgaccccaatgtcactgaagatatgttgaaacaagttttcaccccttatggggacgtagtccatgttaagattcctgttggcaaaagatgtggttttgttcaatatgctaacagatcttcggcagaggaggcattggtaattctgcaaggcaccttggttggagggcagaatgtgaggctttcatggggtcgcagcccttcaaacaaacaagttcagcctcaacaggactccaaccagtgggccggggctaatgctggatattatggctacggtcaaggctatgaggcctatgggtacccccagtctcaggaccctaatatgtataattatggagctggagcttatgctggctatccaaattaccaacaacaaccagtagcacagcaaccgccgcagcaacaggtgagttttttttttggtacttgattgtcttgtcattatattctgttccaatttgtcactaga

SEQ ID NO: 118222 - DNA, 879 bp, Zea Mays
tggcttgttatatgacctgtagtcaattttatagatgacttactatgtgattcgtcccaataaaatgggaaacgatagagtgtcatatacattacattcactttcgattaaggacatggtggtagagccacactaggaacacaattacaattatagttcagaaacatagaacatttattttattatgggtcgtagcctaggaaaaagtaaatacatggagtagtatgtaaaatgcaaataaatttctataatatcaaatgatgaacccagacttcattgttttagtagtggttgttctcccaaaactgagcttgaagccaatcgattgtccccttttgcacctggaaggccttggccaagacatcatctgagataggtggctttgatccaaagactgcattcgcaatagtaataactccagggttctggctgcttagtgcagcgatcgcgactgctggcttgtcatggaccgggttgaactggaagtggataagtccttgggggaatacaaacacatcgcccttgttgaggaccttggtaaatagcttgttgttgttgttagcttggttggaggtgacaaatccaacatagagtttcccctcaagcacggtgaggatctctgtggcacgtgggtgggtgtgtggaggattttgacctaagggtgcgtagtcaatgcgagccaacgagatgcccaatgtgttgagtcctggtaactgcatggcattgatcaaagtaacgttggatcccaccttgttcttggtgtcccttggttggtcaaggctgccatttggttttgcactcgcttttgtgtttgtgctctctgaattcagcaagggatcttcttagcttgcggtgtttgagtgtgtctatctttttgat

SEQ ID NO: 118223 - DNA, 1208 bp, Zea Mays
ctagctagccactcaaacacacacacaaaaagagaaagaatacacaaaaagaaaagaaagaacacacaaagcatggtcggttgatttaaaacgttgaaatatggtaactgtattgtgtcatcagcaggttcaggctgctagagactatttctaaaggtctgctgatatgttcaaccaaagaattattcagccacacgtcgccacatacgctgtggcaggctatataacctcaccatgcccatacatgcccaaagcatcaacaacatacacacaagcacaacaaagctaagaagctccatagctaaattcaaatattacaaacacaaaaggggagtgcagaaccaaaatgactgcctcgaccttccttctcgttgcttttctagcattggtcacttctcaggccattgcctctgatcctagcccgctccaagacttctgtgttgccgacaaagactctccagtgaaggtgaatggatttgtttgcaaggaccctatggctgtgaacgctgacgacttcttcaaggctgcaaaacttgaccagccaagggacaccaccaaaagcaaggtgggatccaacgttactctgatcaatgtcatgcagctgcctggactcaacacgttggggatctcgttggctcgcattgactacgcaccattaggtcagaatcctccacacacacacccacgtgccactgagatcctcaccgtgcttgaggggacactctacgtcggatttgtcacctccaaccaagctgacagaagcaacaagctatttgccaaggttctcaacaagggcgatgtgtttgtattcccccaaggactaatccacttccagttcaacccagtacatgacaagccagcagtcgccctcgctgctctaagtagccagaaccctggagctattactattgccaatgcagtctttggatcaaagccacctatctcggatgatgtcctagctaaggcctttcaggtgcaaaaggggacaattgattggcttcaagctcagttctgggagaacaaccactactgaaaaaatcaagtctaagttcaacatatgagaataaagaaatgtacttgtattttacatactactctatgtgtcaacctttttctaggttgcgactgataataaaataaatgttactctgtcatactagatatgaaacattaacttagtttagtaatacatgaacagtcggttatta

SEQ ID NO: 118224 - DNA, 1304 bp, Zea Mays
aagggattactataaatcttcaatacgcagttcgctggtacctagccactcaaatacacaaaaagaaaagaaataacacataaaaggcatcgtaggtttaaaccgctgaaataagataactctattgtgtcgtcatcagcaggttcaggttgctagagactatttctccaggtcggttgataggttcaaccaaagacttgttcagctattaatacgtacacgtcgcaacatgcgctcgggcaggctatataaacctcaccgtccccatgcccaaagcatcaacaaccatagacacaaacacaacaagctaataagaagctaggtagctgaatattaagagagcacaaacacaaacgcgagtgcaaaaccaaatggctgcctcgacctacttccttcttgttgcttttctagcattggtcacttctcatgccattgcttctgatcctagcccgctccaagacttctgtgttgccgacaaagactctccggtcaaggtgaatggatttgtttgcaaggatcccatggctgtgaacgctgacgacttcttcaaggctgcaaaacttgaccagccaagggacaccaccaagagcaaggtgggatccaacgttactttgatcaatgtcttgcagctgcctggactcaatacgttgggcatctcgttggctcgcattgactatgcgcccttaggacagaatcctccacacacacacccacgtgccacggagatcctcaccgtgcttgaggggacactctacgtcggatttgtcacctccaaccaagctgacagaagtaacaagctatttgccaaggttctcaacaagggcgatgtgtttgtattcccccaaggactaatccacttccagttcaacccgatccatgacaagccagcagtcgcgctcgctgctctaagtagcgagaaccctggagctattactattgccaatgcagtctttggatcaaagccatctatctcggatgatgtcctagctaaggcatttcaggtgcaaaagggtacaattgattggcttcaagctcaattttgggagaacaaccactattgaaaaataaatcaagttatggttcattgtatggggatataatgatttatttatattttacatactactctatgtatttatttttctagactttcagctgataataaaataaatggattgtatttatgaactataattgtaatgtgtcccaattgtggttctaccaccatgtccttaatcgaaagtgcatgtaatgtatatggcactctctcgtttcccattttattgagatggttcatatattaa

SEQ ID NO: 118225 - DNA, 993 bp, Zea Mays
tgcccaaagcatcaacaaccatagacacaaacacaacaagctaagaagctacgtagctgaattctgagagtataaacacaaaagcgagtgcaaaaccaaatggctgcctcgacctacttccttcttgttgcttttctagcattggtcacttctcatgccattgcttctgatcctagcccgctccaagacttctgtgttgccgacaaagactctccggtgaaggtgaatggatttgtttgcaaggatcccatggctgtgaacgctgacgacttcttcaaggctgcaaaacttgaccagccaagggacacctccaagagcaaggtgggatccaacgttactttgatcaatgtcatgcagctgcttggactcaacacgttggggatctcgttggctcgcattgactacgcaccattaggtcagaatcctccgcacacacacccacgtgccactgagatcctcactgtgcttgaagggacactctacgtcggatttgtcacctccaaccaagctgacagaagcaacaagctatttgccaaggttctcaacaagggcgatgtgtttgtattcccccaaggactaatccacttccagttcaacccagtacatgacaagccagcagtcgcgctcgctgctctaagtagccagaaccctggagctattactattgccaatgcagtctttggatcaaagccacctatctcggatgatgtcctagctaaggcctttcaagtgcaaaaggggacaattgattggcttcaagctcagttttgggagaacaaccactactgaaaaaatcaagtctgagttcaacatatgagaataaagaaatgtacttgtattttacatactactctatgtgtttacctttttctaggttgcagctgataataaaataaatgttcattatttatgtactataattgtaattgtgtccctattgtggctccaccacattgtccttaatcgaaaagcaaatgtaaggtatacgacagt

SEQ ID NO: 118226 - DNA, 1236 bp, Zea Mays
ccatctccatgcccaaagcatcaacagcatttgtagacacaagctaagaagctccgtagctaaattcaaatattacaaacacaaaagtggagtgcagaaccaaaatggctgcctcgaccgtccttctcgttgcttttctagcattggtcacttctcatgccattgcctctgatcctagcccgctccaagacttctgtgttgccgacaaagactctccagtgaaggtgaatggatttgtttgcaaagaccctatggctgtgaacgctgacgacttcttcaaggctgcaaaacttgatcagccaagggacaccaccaaaagcaaggtgggatccaacgttactttgatcaatgtcatgcagctgcctggactcaacacgttggggatctcgttggctcgcattgactacgcaccactaggtcagaatcctccacacacacacccacgtgccactgagattctcaccgtgcttgaggggacactttacgtcggatttgtcacctccaaccaagctgacagaagtaacaagctatttgccaaggttctcaacaagggcgatgtgtttgtattcccccaaggactaatccacttccagttcaacccagtacatgacaagccagcagtcgcgctcgctgctctaagtagccagaaccctggagctattactattgccaatgcagtctttggatcaaagccacctatctcggatgatgtcctagctaaggcctttcaggtgcaaaaggggacaattgattggcttcaagctcagttctgggagaacaaccactactaaaaaaatcgagtctgagttcaatatatgagaataaagaaatgtacttgtattttacatactactctatgtgttaacctttttctaggttgcgactgataataaaataaatgtttagtatttatgtactataatcgtaagtttgtgcctattgcggttccaccggtgtgtccttaatcaaaaagtgaatgtaactatatctatattttttgtaactatatcgtgttactccacatgttggtttggtgtggaactgacagacgatattataccccacaagacgaacaagcattgctaactatatctatattttttgtgagttgactctttctgtgcatatgtacgtatagtagcaaaagcttgggttgtgccagaagcaaagagaccaattaagaagcacattgaatttataagactggtatggcatgtataaaaatattaaatgcaa

SEQ ID NO: 118227 - DNA, 86 bp, Zea Mays
gttggcggagcttcgggaggcgtgtggtgggtggtcgtgccctggcggatggcgctacgggcgacggtggcttcgatggagcttcg

SEQ ID NO: 118228 - DNA, 1295 bp, Zea Mays
attttgcattttattaaacaaattttaaaatttggatcactaagtgattactagaaatcttcaatacgcagttcgctggaacctagccactcaaacacacaaaaagaaaagaaagaacacacaaaaggcatcgtagatttaaaccgctgaaataagataactgtactgtgtcgtcatcagcaggttcaggctgctagagactatttcttcaggtcggctgataggttcaaccaaagacttattcagctactgatacgtacacgtcaccacatgcgctctggcaggctatataaacctcaccgtccccatgcccaaagcatcaacaaccatagacacaaacacaacaagctaataagaagctaggtagctgaatattcagagagcacaaacacaaacgcgagtgcaaaaccaaatggctgcctcgacctacttccttcttgttgcttttctagcattggtcacttctcatgccattgcttctgatcctagcccgctccaagacttctgtgttgccgacaaagactctccggtgaaggtgaatggatttgtttgcaaggatcccatggctgtgaacgctgacgacttcttcaaggctgcaaaacttgaccagccaagggacaccaccagtaaggtgggatccaacgttactttgatcaatgtcttgcagctacctggactcaacacgttgggcatctcgttggctcgtattgactatgcgcccttaggacagaatcctccacacacgcacccacgtgccacggagatcctcaccgtgcttgaggggacactctacgtcggatttgtcacctccaaccaagctgacaaaagcaacaagctatttgctaaggttctcaacaagggcgatgtgtttgtattcccccaaggactaatccacttccagttcaacccggtccctgacaagccagcagtcgcgctcgctgctctaagtagccagaaccctggagctattactattgccaatgcagtctttggatcaaagccacctatctcaaatgatgtactagctaaggcctttcaagtgcaaaaggggacaattgattggcttcaagctcagttttgggagaacaaccacaactgaaaaaataaatcaagttacggttcattgtatgggaatataatgtttatttacattttacatactactctatgtatttgttttttctagactttcagctgataataaaataaatggattgtatttatgtactataattgtaattgtgtcccaactgtggttctaccaccatctccttaatcgaaagtgcatgtattgt

SEQ ID NO: 118229 - DNA, 979 bp, Zea Mays
gtcgccacatgcgctgtggcaggctatataacctcaccatctccatgcccaaagcatcaacaacatacacacaagcaaaacaaaaagctaagaagctccgtagctaaattcagatattacaaacacaaaaaaggagtgcagaaccaaaatggctgcctcgaccttccttctcattgcttttctagcattgatcacttctcaggccattgcctctgatcctagcccgctccaagacttctgtgttgccgataaagactctccggtgaaggtgaatggatttgtttgcaaggaccctatggctgtgaacgctgacgacttcttcaaggctgcaaaacttgaccagccaagggacaccaccaaaagcaaggtgggatccaacgttactctaatcaatgtcatgcagctgcctggactcaacacgttggggatctcgttggctcgcattgactacgcaccattaggtcagaatcctccacacacacacccacgtgccactgagatcctcactgtgcttgaggggacactctacgtcggatttgtcacctccaaccaagctgatagaagcaacaggctatttgccaaggttctcaacaagggcgatgtgtttgtattcccccaaggactaatccacttccagttcaacccagtacatgacaagccagcagtcgcgctcgctgctctaagtagccagaaccctggagctattactattgccaatgcagtctttggatcaaagccacctatctcggatgatgtcctagctaaggcctttcaagtgcaaaaggggacaattgattggcttcaagctcagttctaggagaacaaccactactgaaaaaatcaagtctgagttcaacatatgagaataaagaaatgtacttgtattttacatactactctatgtgttaacctttttctaggttgcgactgataataaaataaatgttcagtatttatgtactataattgcaattgtgtc

SEQ ID NO: 118230 - DNA, 2158 bp, Zea Mays
ttacatagcccgccgccaccgaaccagttgcttgccgccggcctccaccagctgctagccgtcggccaggccctccgccatcaggaagctgttcgttgccggccccgctctccaccagcctgaagccccgttctccgccgcagccccgttcggctgctactgctgcagcagctttcatccatccaggcatccggcgacaagcagttgcatattctcataacagtggccttgcctatcagctcaacagggcaacaggcctgagcggctgccttggctggggactggggtgaccgtgacctacaggttgagtctgacgggcttttttctacacaatttgcttgttcaaattgctttgtatttttttttctctggacgcaaatctttgactggcggagaagaggagcaggaggagcgttcgctggcgaagagccgaagacagagagctcgagcgagaaagaacaagggcaaatgagggactccagctccggtccagcagattacgagcggcgttaagggcttaaggcaagtgtgtgtgagtgtgtctcggtcccatatctgaaagagtgcaacgttgatgaacaaaagtgaaaacggccatattggtagtctcatttttgcaataagctcatcaaaaagatgcttcttcctcgaaagcttctcccatggcggcgccccgctcaggacgcccaggccctggcaggccgcctcctgcgctcctcttcatcctcctttgaccccgacgacgacgaccctccgttcacgcgggttcctaagctcccacctcgggcgccatcgacgccgccgccgaagcccaaggccctggcgggcaagatcaggcccgatgagcctgcgcactccgaccttccctttgacttccggtactcgtactcggagacagacccgacatggaggcccatcggtttccgcgagcccacccggttctcgcccttcggccccggccgcctcgaccgcccatgggacggcacagccgcggcacgcgtcggcgattatgctagtggcgacgagaggatccgggaggaggttctcggggaacctctgtcggaggaggaggtggcggcgctggtggagaggtaccggcacagtgattgctcacggcagatcaatttggggaaaggtggggtaacacacaatatgcttgatgacatccacaaccattggaaacgtgcagaggctgtgaggatcaaatgtctgggagtgccaacgctcgacatggacaacatttgcttccatctcgaggtcataatacggataaaacaggcggcaaagtcgtatcccgcagcataaacatcattatactgtaccgcggtcggaactatgacccccagaaaaggcctggcgtaccattgatgctgtggaaaccgttagctcctatctatcctaagctcgtgcaaaacgttgctgaagggttgactttcgaggaaacaaaagagttgaggaacagaggattgaattctccaccacttacaaaactgactaggaacggtgtctatgttaatgttgttgataaagtgagagaagcgtttaagactgtggaagttgtccggctagattgcactcatgttgggactactgactgcaagaaaattggtgtgaagttgagggatttggttccatgcattcctatattatttaaagatgaacagattatactatggagagggaaggttcgccaagagcgttctgtttcagcagagtgcagttccagcccacaatgatgcacgcatctgccggtgattcacaggagttattattgcgctgcgatattgatgatggttcgggcggattgctgtctgtggaccgtggtgggggcgaggggcgaggccgctcaccagtgattcagtgaagaagaaaacaaaccaacacatttgtgtaatcaactttgatgaaacttcaattgaggagcggcacaaacatggtgaatatggcacttagatgcattgtttcgatgaatccagggtttgtgaatttagaccgtttgagaaagtttttgtagaataaagctcagcctgttcatttgtttaatctttatcggctgtttttacattgttttgtttctatcaattgtagctacaataattcgaacaactgactttaatataaagcgaacaactctactgttttttaatgaatatatata

SEQ ID NO: 118231 - DNA, 2416 bp, Zea Mays
ttacatagcccgccgccaccgaaccagttgcttgccgccggcctccaccagctgctagccgtcggccaggccctccgccatcaggaagctgttcgttgccggccccgctctccaccagcctgaagccccgttctccgccgcagccccgttcggctgctactgctgcagcagctttcatccatccaggcatccggcgacaagcagttgcatattctcataacagtggccttgcctatcagctcaacagggcaacaggcctgagcggctgccttggctggggactggggtgaccgtgacctacaggaggagcgttcgctggcgaagagccgaagacagagagctcgagcgagaaagaacaagggcaaatgagggactccagctccggtccagcagattacgagcggcgttaagggcttaaggcaagtgtgtgtgagtgtgtctcggtcccatatctgaaagagtgcaacgttgatgaacaaaagtgaaaacggccatattggtagtctcatttttgcaataagctcatcaaaaagatgcttcttcctcgaaagcttctcccatggcggcgccccgctcaggacgcccaggccctggcaggccgcctcctgcgctcctcttcatcctcctttgaccccgacgacgacgaccctccgttcacgcgggttcctaagctcccacctcgggcgccatcgacgccgccgccgaagcccaaggccctggcgggcaagatcaggcccgatgagcctgcgcactccgaccttccctttgacttccggtactcgtactcggagacagacccgacatggaggcccatcggtttccgcgagcccacccggttctcgcccttcggccccggccgcctcgaccgcccatgggacggcacagccgcggcacgcgtcggcgattatgctagtggcgacgagaggatccgggaggaggttctcggggaacctctgtcggaggaggaggtggcggcgctggtggagaggtaccggcacagtgattgctcacggcagatcaatttggggaaaggtggggtaacacacaatatgcttgatgacatccacaaccattggaaacgtgcagaggctgtgaggatcaaatgtctgggagtgccaacgctcgacatggacaacatttgcttccatctcgaggataaaacaggcggcaaagtcgtatcccgcagcataaacatcattatactgtaccgcggtcggaactatgacccccagaaaaggcctggcgtaccattgatgctgtggaaaccgttagctcctatctatcctaagctcgtgcaaaacgttgctgaagggttgactttcgaggaaacaaaagagttgaggaacagaggattgaattctccaccacttacaaaactgagtaagttggaacattgtttttttttataaccatttgggtttgggttatatgggcctcactttgccatcgtatagttgtgttgtcaagctgtttctttcatcaaagaagagtctttctgtgttgagcagctaggaacggtgtctatgttaatgttgttgataaagtgagagaagcgtttaagactgtggaagttgtccggctagattgcactcatgttgggactactgactgcaagaaaattggtgtgaagttgagggatttggttccatgcattcctatattatttaaagatgaacagattatactatggagagggaaggttcgccaagagcgttctgtttcagcagagtgcagttccagcccacaatgatgcacgcatctgccggtgattcacaggagttattattgcgctgcgatattgatgatggttcgggcggattgctgtctgtggaccgtggtgggggcgaggggcgaggccgctcaccagtgattcagtgaagaagaaaacaaaccaacacatttgtgtaatcaactttgatgaaacttcaattgaggagcggcacaaacatggtgaatatggcacttagatgcattgtttcgatgaatccagggtttgtgaatttagaccgtttgagaaagtttttgtagaataaagctcagcctgttcatttgtttaatctttatcggctgtttttacattgttttgtttctatcaattgtagctacaataattcgaacaactgactttaatataaagcgaacaactctactgttttttaatgaatatatatatgtggagctctaccaactaccaacagttgtctgtttttttatgatttttatatatcatataaatagatattaaattatgtataaatagatattaaaatatgtatttaaatataattattgtttatttttaaatactaaggtatgtgtagtttgatggttagccctaaattaatagagtaggagacgtgtgctcaaatgcttaatttgcagtattttattttttatataattattggttattttt

SEQ ID NO: 118232 - DNA, 2288 bp, Zea Mays
ttacatagcccgccgccaccgaaccagttgcttgccgccggcctccaccagctgctagccgtcggccaggccctccgccatcaggaagctgttcgttgccggccccgctctccaccagcctgaagccccgttctccgccgcagccccgttcggctgctactgctgcagcagctttcatccatccaggcatccggcgacaagcagttgcatattctcataacagtggccttgcctatcagctcaacagggcaacaggcctgagcggctgccttggctggggactggggtgaccgtgacctacaggaggagcgttcgctggcgaagagccgaagacagagagctcgagcgagaaagaacaagggcaaatgagggactccagctccggtccagcagattacgagcggcgttaagggcttaaggcaagtgtgtgtgagtgtgtctcggtcccatatctgaaagagtgcaacgttgatgaacaaaagtgaaaacggccatattggtagtctcatttttgcaataagctcatcaaaaagatgcttcttcctcgaaagcttctcccatggcggcgccccgctcaggacgcccaggccctggcaggccgcctcctgcgctcctcttcatcctcctttgaccccgacgacgacgaccctccgttcacgcgggttcctaagctcccacctcgggcgccatcgacgccgccgccgaagcccaaggccctggcgggcaagatcaggcccgatgagcctgcgcactccgaccttccctttgacttccggtactcgtactcggagacagacccgacatggaggcccatcggtttccgcgagcccacccggttctcgcccttcggccccggccgcctcgaccgcccatgggacggcacagccgcggcacgcgtcggcgattatgctagtggcgacgagaggatccgggaggaggttctcggggaacctctgtcggaggaggaggtggcggcgctggtggagaggtaccggcacagtgattgctcacggcagatcaatttggggaaaggtggggtaacacacaatatgcttgatgacatccacaaccattggaaacgtgcagaggctgtgaggatcaaatgtctgggagtgccaacgctcgacatggacaacatttgcttccatctcgaggataaaacaggcggcaaagtcgtatcccgcagcataaacatcattatactgtaccgcggtcggaactatgacccccagaaaaggcctggcgtaccattgatgctgtggaaaccgttagctcctatctatcctaagctcgtgcaaaacgttgctgaagggttgactttcgaggaaacaaaagagttgaggaacagaggattgaattctccaccacttacaaaactgactaggaacggtgtctatgttaatgttgttgataaagtgagagaagcgtttaagactgtggaagttgtccggctagattgcactcatgttgggactactgactgcaagaaaattggtgtgaagttgagggatttggttccatgcattcctatattatttaaagatgaacagattatactatggagagggaaggttcgccaagagcgttctgtttcagcagagtgcagttccagcccacaatgatgcacgcatctgccggtgattcacaggagttattattgcgctgcgatattgatgatggttcgggcggattgctgtctgtggaccgtggtgggggcgaggggcgaggccgctcaccagtgattcagtgaagaagaaaacaaaccaacacatttgtgtaatcaactttgatgaaacttcaattgaggagcggcacaaacatggtgaatatggcacttagatgcattgtttcgatgaatccagggtttgtgaatttagaccgtttgagaaagtttttgtagaataaagctcagcctgttcatttgtttaatctttatcggctgtttttacattgttttgtttctatcaattgtagctacaataattcgaacaactgactttaatataaagcgaacaactctactgttttttaatgaatatatatatgtggagctctaccaactaccaacagttgtctgtttttttatgatttttatatatcatataaatagatattaaattatgtataaatagatattaaaatatgtatttaaatataattattgtttatttttaaatactaaggtatgtgtagtttgatggttagccctaaattaatagagtaggagacgtgtgctcaaatgcttaatttgcagtattttattttttatataattattggttattttt

SEQ ID NO: 118233 - DNA, 1611 bp, Zea Mays
aaagatcttgcaaagtgttgtgctcaacagatcacagagaacatcctaggagaaataggagatagaaacttctctattcttattgatgaatcacgtgatgtatctgttaaagaacaaatggcggtgatattgagatatgtgaataatcaaggccatgtgatggaacggtttcttgccctcaagcatgtcaaggatactacatcagatgccttgaaggaagctatttttggccttcttgatcaccatggattatctatatccaagatcagagggcaaggatatgatggagcatcgaatatgcgaggtgaatttaatggcttacaaagaaagatacttgatattaatccacatgcctattatgttcattgttttgcacatcaactccaacttgtggtggtttctattgctagtagtgcttgttgccaatcggttcatgacttctttgagtacattcacttaattgtcaccaccacaagctcatcttgcaagagaagggatgctctaaaagaaaaacaccaccagaatattttagaaaaactagaaagaggtgaaattttatctggtagaggtgtgaatcaagaaactaaccttgctagacctggtgacacaagatggggttcacattatttaacattgctttgattagagacaatgtgggactcagtattgcatgttcttaccattgtgcatgaagatggtcgtgtaccaacacaggcagcgggattgattgaaaaaatggagagcttcaaatttgttttcattttaaaattgatgttgaaaatgcttgcaatcacaaatgagctctctcaaaccttgcaaaggaagaatgccaacattgttcatgctatggagttgcttgatgttgtgaaaacccgaatggctacaatgaggacagatagtggttgggagtcattctttcaaagcgtgaaagaattctgtgctcaaaagggtattcctgtggtagatatggatgaagaagtgcctattagaggtcgttcaaggcgagatggcttcacaatcacaaaccttcactactaccgcactgagatattctttgttgttcttgataaaatcaacactgagttatgccatcgctttaatgaagtttctagcgagttgcttgtttgcttttcttgcctcgatccaaagaacttattttgcagttttgatattgagaaacttgttcgacttggtactctatatgataaggatttttcagttattgaatgtgcaatgttaagagagcaacttgagacatacattgtccacgtgcgaaggcatgctgcttttggtacttgtgaagatattgcatctctatctatgaagatggttgaaactaaaaagcatcttgtgttccctttggttttcaagctaattgagttggccttgttattacctgtctcaacagcaagtgttgagagaatattttcggcaatgaacatcattaagagagaattgcgtaacaaaattgaaaatgattggatgaatgatttgatggtttgctatacggagaaagagatattcaaatcccttgatgatgagactattactagaagattccagcgtcttaaaactagaagaatgcaattgcctcgagtcacaactacaaga

SEQ ID NO: 118234 - DNA, 650 bp, Zea Mays
gaaagcatcgctgaaacgagatcctcgccgtttcgcgaacaaatcggtgactgtctcctgctatctccccctttccgccacttcgctccgctcccatgcctcctgccccctctcgccgtggaggcaccccaaaccctagcccctgaaaccctagatcctcctcccctgttccgatggcgggggccgcggcgtccccagcggcgggccacgtggtggagcggttccggtcgcgactgcgcgaggaagcgggcggcggcgagccgggcgccgccgcggtcgtgcacgtgtacgcggaggcgctccgtgagctaaccttcaactgcaagccggtcatcaccgagctcaccatcatcgcgggccagcacgccacgctcgccgccgggggaatcgccgacgccatctgcgcccgcgtcgccgaggtcgttctgctacttctgctctcctatcaggggtgttactcttattttgtcattaaggtggcccgccttacgatttctggggcataaggaagcttgggcttggagcgtcgagtagtctgggcgcttttgccgtgtagtcactagggtttgaggattggtgtgcttgttgtgaaacgtggattgctgtgcttggttttgaaatgtgagaaatcccataaaatggacggaaaa

SEQ ID NO: 118235 - DNA, 1585 bp, Zea Mays
ccctttccgccacttcgctccgctcccatgcctcctgccccctctcgccgtggaggcaccccaaaccctagcccctgaaaccctagatcctcctcccctgttccgatggcgggggccgcggcgtccccagcggcgggccacgtggtggagcggttccggtcgcgactgcgcgaggaagcgggcggcggcgagccgggcgccgccgcggtcgtgcacgtgtacgcggaggcgctccgtgagctaaccttcaactgcaagccggtcatcaccgagctcaccatcatcgcgggccagcacgccacgctcgccgccgggggaatcgccgacgccatctgcgcccgcgtcgccgaggtgccaccagatcagatattaccatctttgtatctgctagatagtattgtgaagaacataggtggggaatatgtagagcattttgcaactaggttgcgaagtgtatttgttgatgcatactacagagttcatccaaaccagtatacttcaatgaggcgcctctttcgtacctggtggccagtgttcccttcttctgtgcttcgcagcattgaggatgaccttcaattttcttcctcggagaataaccgccccaccacatcaacaaatctgcatcaaacagagtcgttatctcctaggccatctcatggcatacatgtaaatcctaaatacctggaagcacaacataagttcaagcaggccaatgtggtgcaccagccagcagctcgggacactaggcaaatgactgatgtgcaggaggatctgataaatggattagcatcgaatagttcgtgtgaacggccttcaattttccagaaatcttctttacagtatgctgatgatcctgatcaacaagagacgtttcggcctcttgctggaacaagggcagcatcaccacatctcttgagtacacatgcatctgatatgaatctagatgggccattagtcaattcaaggagaaacttgtccatatcaccacctcttgatgtgttctctaggaatgtgtcccccaagagagcactagagaggctgccaccatctcattctgtattgggacctgatcccagaaaattcactgatcgaaatggcaggttaagatggggtttggatgatggtgcacaacggcctacaatcagtatgcttgatgaagagtacaggaagcaaagtgcaagggaacttattgatgcatatgggaattgtcaaggacgagatgctgatgaacgacttcctaaagtgcagcgcctggatccaaatggtatggctagcagatctagtgcacgaaattggttaacttccgaggaagaagagtattcatgggaggatatgagcccaactttgactgatcgagtcagtagcagcatgccatcttttcctcctggaaccatgagaactggatttcctggggcaaatgcagggttactggaatctgatgttgggaggcacaatttcccaagccaagctactagattatcggttgatggttcaccgtttaatcttgaagataggttttcaactgcaagtgtatgattgtctgatctctctttaaataatagtgaatcacagcattagcataaca

SEQ ID NO: 118236 - DNA, 1184 bp, Zea Mays
atgcacgctgcggatttcgccttcctcaagcaccctaagatgtgtgcgctgccgccccaaccccacttaccaccccaccgggcacgccatgacagggagccaccacagccggtggtggctgatgcagttccagtgcgcgctcatggctgcaccgcccatgtcgatccccatcaagaagttgtcctggaagaagagcacccgcatccgttggcctccaccgacgccaccacctcgcctgtgaaccagttctcgttgaggtcccagccaaagagcaagttgatgcactatcaaaggaattgtttgcgctttcaaccgtcacaggatctttcaaggcagtgtaaaacttgtggccttcgatttaaatgccaagaggagcatcgtgctcacatggactggcatgttacaaaaaataggaattcaaagaaccgtaagcaatcttcacgtaaatattttgtcacggtggaggaatggttaagagctgcagaaacagtaggaaacgatggagttcctgcttttgtgccctcagacccagtcccagatagaaaggaagagagagaaattgctgttcctgcggatgaggagcaaacagcctgtgcattatgtcaagagccatttgaagatttctacagtgatgagactgatgagtggatgtatagaggtgcggtctacatgaatgcaccagacggtaatattgatggtctggaaaggtcacggttgggacctattgtccatgctaaatgtcgatctgggcccagcaatacttagggtgggcatggctgggatgacttgatagcttttttttccgttgcggctgtaggcatgacctgtaaactactggagactcagaatttggtatggttagattttttcctatctatggcttcgttaacagccaatgcacagaatgttaatgtgacaatagtgcataactgtaaaatttttctgtaattcagtgattggaagttagtaatcggcacaacattcactattgtcatattgtgcttttgcccctgtcattttgtccttccatagttgcacagtgctgctttttcattacagccgtagtgtgatctatacttaagcttcatgtttagggtttctgcagcacagttgttgtcaggacagcggtttatggagccatggtctcactggacatgggaaacaatatatttcaatagtcctgc

SEQ ID NO: 118237 - DNA, 3925 bp, Zea Mays
tcatcccctcctgtccgagatatttgtgcagcgccgcaaaagcgcatatccccccggccctctcgctccgccgctccgtgcgagctcccgctcccgacacgcttcccgcccgccagatcggtcccgcgcgcctcttctgcctgcatccgcgcccgcgaccaccgcttctaggtttagggttccggcagagtaggcggtgagatgggtgtgccggcgttctaccggtggctggcggagaagtacccgatggtggtggtggacgtggtggaggaggagcccgtcgagatcgagggcgtccgggtccccgtcgacacctccaagcccaaccccaacggcctcgagttcgacaacctctacctcgacatgaacggcatcatacacccctgcttccaccccgaggataggccctctccaacaacatttgctgaggttttccagtgcatgttcgattacatcgatagactcttcatcatggttcgccctaggaagcttatgtacatggccattgatggtgtggctccacgtgctaaaatgaaccaacagcgttctagacgattcagagctgcaaaagatgcagctgatgcggctgcagaggaagaacggttgcgtgaagagtttgagagggaaggaagaaggcttcctgcaaaacaacaatcacaaacttgtgattctaatgttattactccaggaaccgagtttatggctgttctttcagttgcgttacagtactacattcatcaaagactgaattatgatcctggatggaaaaaaatcaaagttattctatctgatgccaatgttcctggcgaaggggagcataaaataatgtcgtatattcgtggtcaacggaatctccctggatttaatccaaacacacgccattgcttatatggcctggatgcagacctcataatgttagctttagcaactcatgaagtacacttctctatattgagagaggtagtttttacacctgggcagcaggacaaatgcttcttatgtggtcaggtggggcatctagccgctaattgtgaaggaaaggcaaagagaaaagctggggaatacgatgagaaaggtgaagctattgttccaaagaaaccataccagttcttgaatatctggacccttcgggagtacttagaatatgagttcagaatgccaaatccgcctttccagattgattttgaacggattgttgatgatttcatcttcatgtgctttttcgttggcaacgattttcttccgcatatgccaacactagagatcagggagggagctatcaatctattaatggctgtgtacaagaaagaatttccttcaatgggtggctatttaacagattcttgcacgccggatctgaatagagtcgaacacttcattcaagcagttggctcttatgaggataaaatatttcagaaaagggcgcgtttgcatcagcgtcaagcagaaagaataaaacgggaaaaggcccaagcaaagcgcggggatgatctggatccccatgtcagagatgatcttattgtacctgtttcaaatttccgagggtcccgccttgcatctggagcagtaccttcaccatatgaacagaatggatctcagagagaaaggtacaaccaaactcggaaagctccaagagtatcatcatcaggttccagcattgctgctgctatcgttgaggctgaacaagatcttgaagcacaggagcgtgaaaataaagaagagttgaagtctatgcttaaggatgctcttcgtgagaaatcagatgtcttcaattctgaaaattcagaggaggacaaggtaaagcttggagaaccaggatggagggataggtactatgaagagaagtttggggcaaggacacctgaacggatggaagaaatacggagggatgttgctctcaaatatactgaaggattgtgttgggttatgcactactactatgaaggggtgtgctcatggcaatggttttatccttatcattatgctccttttgcttcggatttaacgagtctgagtcagctcaatataactttcgaacttgggtcaccattcaagccatttgatcagctaatgggggttttccctgctgcaagtgcccatgcacttcctttaaagtatcggcaactgatgactgatccaaattcaccaataattgatttttatccaactgattttgaagtagatatgaatgggaaaagattctcttggcaggggatagcaaaactgccctttatagaagaagatcggttgctggctgagattaaaaaagttgaggatactttgacgcctgaagaagcaaggagaaacagtaccatgtgcaatatgctttttgtgaatggcgcccattcactttctccctatatctactctctcaacagtaaattcgggcatctgccagacaaagaccgtggtgcaatcaaagaaaaacttgatccttcagctaggttagctaagtttttcaggattatcgattctctaacattgctactcttgtttcttttatttagtggaggaatgaatggttacattgcactctgtggtggggacccgtcccctcctgtcttcagatctcctgtagatgggcttgaggacatcatggataatcaagtgatatgctcaatctacaagcttccagatccacacaagcacatcgctcgtccaccagctggtgttatcatacccaagaagagtgtagaagccggtgatctgaaaccaccaccagtgctgtggcatgaagacagcggtaggaggcctcatgataacaaccaccggaggccttatgataacagcaacaggcaaaacccatcaggagctctatctggccgccaactcggggaagctgcccatcgacttgttgtaaacagcttgaatgttcggggtggtgggcaaaataattccccatctatgccatatcagacaatgatgagtggtatgaactatccaaatggaaggcatcatgtgggtaaccatggagtgcctccgagaatggaacagcctgctggtcgttctggctggcatgtttctgatgataacatgaccaatggtcaagcagcttatggtcagtatcagcctgaaaggttgggaccttcccggcatgaacgaggtaaccatggaaggcaacagtataacccatatgcaagagataaccaccatgattctagtggaagagttcagccacctggataccatcaaaaccgtggcaacccacagtctgctgctccatcagcaggtcctggactgtatgggccataccccccagcatatgctggtggttattctgggggataccagcctgtaccatatgggggtcaacaatggcagcagcgaccttatggaggcgggacaccccccacaagacctaactcacaccaatcacaaaaccgttatggtaccttagacagaagttctaacaagaggtcctcaggtcatggccaatactaatccctaaatgcataggccctttttgagtaaaggggaaatataatccaaatccttgacaaatcactaagcaatgccttcatccaaacaaaaccccttactgttgtggccctatccttgttagtaatcaccaaacaatgccttagtacaaacaaccccttactgttatagtcctgttcctgttagtaaaaattatcaggtatcatgaatgatgtcaccttagccagtgacctactacaagcttcttggtcgatttatcaagaactccaaggagcaaatgttgttaaatattagctttgctgccagatggtggcatcggctgttctttcatttgtgtttctcattcatgggggttggttatataggtgattgaaaagttttgaactgtggtgatagtgtatgtaacaaacatgtatacagttagttgatgatggatatatccaccatcatgtatttgtttcttgagatgacagtaaagcgtgatttc

SEQ ID NO: 118238 - DNA, 3918 bp, Zea Mays
tcatcccctcctgtccgagatatttgtgcagcgccgcaaaagcgcatatccccccggccctctcgctccgccgctccgtgcgagctcccgctcccgacacgcttcccgcccgccagatcggtcccgcgcgcctcttctgcctgcatccgcgcccgcgaccaccgcttctaggtttagggttccggcagagtaggcggtgagatgggtgtgccggcgttctaccggtggctggcggagaagtacccgatggtggtggtggacgtggtggaggaggagcccgtcgagatcgagggcgtccgggtccccgtcgacacctccaagcccaaccccaacggcctcgagttcgacaacctctacctcgacatgaacggcatcatacacccctgcttccaccccgaggataggccctctccaacaacatttgctgaggttttccagtgcatgttcgattacatcgatagactcttcatcatggttcgccctaggaagcttatgtacatggccattgatggtgtggctccacgtgctaaaatgaaccaacagcgttctagacgattcagagctgcaaaagatgcagctgatgcggctgcagaggaagaacggttgcgtgaagagtttgagagggaaggaagaaggcttcctgcaaaacaacaatcacaaacttgtgattctaatgttattactccaggaaccgagtttatggctgttctttcagttgcgttacagtactacattcatcaaagactgaattatgatcctggatggaaaaaaatcaaagttattctatctgatgccaatgttcctggcgaaggggagcataaaataatgtcgtatattcgtggtcaacggaatctccctggatttaatccaaacacacgccattgcttatatggcctggatgcagacctcataatgttagctttagcaactcatgaagtacacttctctatattgagagaggtagtttttacacctgggcagcaggacaaatgcttcttatgtggtcaggtggggcatctagccgctaattgtgaaggaaaggcaaagagaaaagctggggaatacgatgagaaaggtgaagctattgttccaaagaaaccataccagttcttgaatatctggacccttcgggagtacttagaatatgagttcagaatgccaaatccgcctttccagattgattttgaacggattgttgatgatttcatcttcatgtgctttttcgttggcaacgattttcttccgcatatgccaacactagagatcagggagggagctatcaatctattaatggctgtgtacaagaaagaatttccttcaatgggtggctatttaacagattcttgcacgccggatctgaatagagtcgaacacttcattcaagcagttggctcttatgaggataaaatatttcagaaaagggcgcgtttgcatcagcgtcaagcagaaagaataaaacgggaaaaggcccaagcaaagcgcggggatgatctggatccccatgtcagagatgatcttattgtacctgtttcaaatttccgagggtcccgccttgcatctggagcagtaccttcaccatatgaacagaatggatctcagagagaaaggtacaaccaaactcggaaagctccaagagtatcatcatcaggttccagcattgctgctgctatcgttgaggctgaacaagatcttgaagcacaggagcgtgaaaataaagaagagttgaagtctatgcttaaggatgctcttcgtgagaaatcagatgtcttcaattctgaaaattcagaggaggacaaggtaaagcttggagaaccaggatggagggataggtactatgaagagaagtttggggcaaggacacctgaacggatggaagaaatacggagggatgttgctctcaaatatactgaaggattgtgttgggttatgcactactactatgaaggggtgtgctcatggcaatggttttatccttatcattatgctccttttgcttcggatttaacgagtctgagtcagctcaatataactttcgaacttgggtcaccattcaagccatttgatcagctaatgggggttttccctgctgcaagtgcccatgcacttcctttaaagtatcggcaactgatgactgatccaaattcaccaataattgatttttatccaactgattttgaagtagatatgaatgggaaaagattctcttggcaggggatagcaaaactgccctttatagaagaagatcggttgctggctgagattaaaaaagttgaggatactttgacgcctgaagaagcaaggagaaacagtaccatgtgcaatatgctttttgtgaatggcgcccattcactttctccctatatctactctctcaacagtaaattcgggcatctgccagacaaagaccgtggtgcaatcaaagaaaaacttgatccttcagctagtggaggaatgaatggttacattgcactctgtggtggggacccgtcccctcctgtcttcagatctcctgtagatgggcttgaggacatcatggataatcaagtgatatgctcaatctacaagcttccagatccacacaagcacatcgctcgtccaccagctggtgttatcatacccaagaagagtgtagaagccggtgatctgaaaccaccaccagtgctgtggcatgaagacagcggtaggaggcctcatgataacaaccaccggaggccttatgataacagcaacaggcaaaacccatcaggagctctatctggccgccaactcggggaagctgcccatcgacttgttgtaaacagcttgaatgttcggggtggtgggcaaaataattccccatctatgccatatcagacaatgatgagtggtatgaactatccaaatggaaggcatcatgtgggtaaccatggagtgcctccgagaatggaacagcctgctggtcgttctggctggcatgtttctgatgataacatgaccaatggtcaagcagcttatggtcagtatcagcctgaaaggttgggaccttcccggcatgaacgaggtaaccatggaaggcaacagtataacccatatgcaagagataaccaccatgattctagtggaagagttcagccacctggataccatcaaaaccgtggcaacccacagtctgctgctccatcagcaggtcctggactgtatgggccataccccccagcatatgctggtggttattctgggggataccagcctgtaccatatgggggtcaacaatggcagcagcgaccttatggaggcgggacaccccccacaagacctaactcacaccaatcacaaaaccgttatggtaccttagacagaagttctaacaagaggtcctcaggtcatggccaatactaatccctaaatgcataggccctttttgagtaaaggggaaatataatccaaatccttgacaaatcactaagcaatgccttcatccaaacaaaaccccttactgttgtggccctatccttgttagtaatcaccaaacaatgccttagtacaaacaaccccttactgttatagtcctgttcctgttagtaaaaattatcaggtatcatgaatgatgtcaccttagccagtgacctactacaagcttcttggtcgatttatcaagaactccaaggagcaaatgttgttaaatattagctttgctgccagatggtggcatcggctgttctttcatttgtgtttctcattcatgggggttggttatataggtgattgaaaagttttgaactgtggtgatagtgtatgtaacaaacatgtatacagttagttgatgatggatatatccaccatcatgtatttgtttcttgagatgacagtaaagcgtgatttctatgtcatggctcctttgtcgttttggaagatcgtgttgttatattatctacataa

SEQ ID NO: 118239 - DNA, 3801 bp, Zea Mays
tcatcccctcctgtccgagatatttgtgcagcgccgcaaaagcgcatatccccccggccctctcgctccgccgctccgtgcgagctcccgctcccgacacgcttcccgcccgccagatcggtcccgcgcgcctcttctgcctgcatccgcgcccgcgaccaccgcttctaggtttagggttccggcagagtaggcggtgagatgggtgtgccggcgttctaccggtggctggcggagaagtacccgatggtggtggtggacgtggtggaggaggagcccgtcgagatcgagggcgtccgggtccccgtcgacacctccaagcccaaccccaacggcctcgagttcgacaacctctacctcgacatgaacggcatcatacacccctgcttccaccccgaggataggccctctccaacaacatttgctgaggttttccagtgcatgttcgattacatcgatagactcttcatcatggttcgccctaggaagcttatgtacatggccattgatggtgtggctccacgtgctaaaatgaaccaacagcgttctagacgattcagagctgcaaaagatgcagctgatgcggctgcagaggaagaacggttgcgtgaagagtttgagagggaaggaagaaggcttcctgcaaaacaacaatcacaaacttgtgattctaatgttattactccaggaaccgagtttatggctgttctttcagttgcgttacagtactacattcatcaaagactgaattatgatcctggatggaaaaaaatcaaagttattctatctgatgccaatgttcctggcgaaggggagcataaaataatgtcgtatattcgtggtcaacggaatctccctggatttaatccaaacacacgccattgcttatatggcctggatgcagacctcataatgttagctttagcaactcatgaagtacacttctctatattgagagaggtagtttttacacctgggcagcaggacaaatgcttcttatgtggtcaggtggggcatctagccgctaattgtgaaggaaaggcaaagagaaaagctggggaatacgatgagaaaggtgaagctattgttccaaagaaaccataccagttcttgaatatctggacccttcgggagtacttagaatatgagttcagaatgccaaatccgcctttccagattgattttgaacggattgttgatgatttcatcttcatgtgctttttcgttggcaacgattttcttccgcatatgccaacactagagatcagggagggagctatcaatctattaatggctgtgtacaagaaagaatttccttcaatgggtggctatttaacagattcttgcacgccggatctgaatagagtcgaacacttcattcaagcagttggctcttatgaggataaaatatttcagaaaagggcgcgtttgcatcagcgtcaagcagaaagaataaaacgggaaaaggcccaagcaaagcgcggggatgatctggatccccatgtcagagatgatcttattgtacctgtttcaaatttccgagggtcccgccttgcatctggagcagtaccttcaccatatgaacagaatggatctcagagagaaaggtacaaccaaactcggaaagctccaagagtatcatcatcaggttccagcattgctgctgctatcgttgaggctgaacaagatcttgaagcacaggagcgtgaaaataaagaagagttgaagtctatgcttaaggatgctcttcgtgagaaatcagatgtcttcaattctgaaaattcagaggaggacaaggtaaagcttggagaaccaggatggagggataggtactatgaagagaagtttggggcaaggacacctgaacggatggaagaaatacggagggatgttgctctcaaatatactgaaggattgtgttgggttatgcactactactatgaaggggtgtgctcatggcaatggttttatccttatcattatgctccttttgcttcggatttaacgagtctgagtcagctcaatataactttcgaacttgggtcaccattcaagccatttgatcagctaatgggggttttccctgctgcaaggtgaatatgcgaagattgcgtctcttgtctccagtgatcattttttttcttattggttgctgcatctcattttcagtgcccatgcacttcctttaaagtatcggcaactgatgactgatccaaattcaccaataattgatttttatccaactggtatgttgatgttgtaaacataagaagtgagctgtatcatcagattctctcttgagctaagatattttctaatctatcatgtcccgtttaccacgcagattttgaagtagatatgaatgggaaaagattctcttggcaggggatagcaaaactgccctttatagaagaagatcggttgctggctgagattaaaaaagttgaggatactttgacgcctgaagaagcaaggagaaacagtaccatgtgcaatatgctttttgtgaatggcgcccattcactttctccctatatctactctctcaacagtaaattcgggcatctgccagacaaagaccgtggtgcaatcaaagaaaaacttgatccttcagctagtggaggaatgaatggttacattgcactctgtggtggggacccgtcccctcctgtcttcagatctcctgtagatgggcttgaggacatcatggataatcaagtgatatgctcaatctacaagcttccagatccacacaagcacatcgctcgtccaccagctggtgttatcatacccaagaagagtgtagaagccggtgatctgaaaccaccaccagtgctgtggcatgaagacagcggtaggaggcctcatgataacaaccaccggaggccttatgataacagcaacaggcaaaacccatcaggagctctatctggccgccaactcggggaagctgcccatcgacttgttgtaaacagcttgaatgttcggggtggtgggcaaaataattccccatctatgccatatcagacaatgatgagtggtatgaactatccaaatggaaggcatcatgtgggtaaccatggagtgcctccgagaatggaacagcctgctggtcgttctggctggcatgtttctgatgataacatgaccaatggtcaagcagcttatggtcagtatcagcctgaaaggttgggaccttcccggcatgaacgaggtaaccatggaaggcaacagtataacccatatgcaagagataaccaccatgattctagtggaagagttcagccacctggataccatcaaaaccgtggcaacccacagtctgctgctccatcagcaggtcctggactgtatgggccataccccccagcatatgctggtggttattctgggggataccagcctgtaccatatgggggtcaacaatggcagcagcgaccttatggaggcgggacaccccccacaagacctaactcacaccaatcacaaaaccgttatggtaccttagacagaagttctaacaagaggtcctcagatgtagaagaaaatgagcttttggaccttgatcttgacgaccttgaggatctcacagatgccctcggcgagtcattcctggatttcttccttctctatttcttgggcggctttggtatgtcgggtattgggttatttcttgaccgctacttttggggagatatgccaacaggtcatatatctggatgctcatcaaactctgcgagtcaacgtttggttccggaggcagttaggagtggaacgactccgtctcagagagccaattga

SEQ ID NO: 118240 - DNA, 1477 bp, Zea Mays
gggctagattctgatattggaccatttaatgtcatacaggaagctttaagggattggaatcttgatcagaagcatttcagcttgacatctggcagtgaaattagaaacgacgagggaacctcaaagctgatggacttgctcatccaaaggaaatgccttcctataagaggtgagctatacaatatcgattgtgtgaatgatgtacttaacaacattgtctcgaaagggcaacaagtgctttgtcatgttggtaacatactagagacatttattcgggcacatatgtcctcatctctgactcgacagcaacttctagaagctgttgcacatatgggattgaagtgcccacacgaagatgcaaaatggtggcacataatatactttaggcttgaagttcttctgcatttcaagaaggcatttccatctgaagaattgttatctgcaggagacaacaaagctgttgagtctgtttgcaggatactcagggctttttatcatgctgtcgaagtgatttgtagccctatctgccccacatcaaatgtgtacttcaatgaactgtggaaagttagaacagttttgcaagaagaagcatcaactgatctcattgaacttgctaacatggtttgggagatgcaggaagcattcaatgagtattggcaaaattcatacttgtggctttcgatacctgttgttcttgatcccagattcaaaattacttttatcgagttccgtttaaagcgagcttttggtaccaatgcggaaaagtatgtatctgccattcgtgatacaataagggagctgttccatgagtattgtggtctttcaaataacttgggtggtgatacatcaactcgtgaagttgagttggatgaatttgacagtgactcattggaagattgggacgaacatcttaatgcacagacaaggaaccaacaattgagagaacttgacaactaccttgaagatggtattgtcccaaggaaggatgattttgatattttgaactggtggatgagtaattctacaaagtatccaaccctttcaattatggcacgtgatgtcctggcagtgccagcttctgctgttaattttgaggccgcattaagcggtaaggtaaatgtgatacataagcaatggagcacattaaatatcaaaacaattgaggctcttgtatgtacccgagattgggttaaatagaatggtaagctcttctaaccccgggaatacaggatgataccgcaagagtacaccgtgtgctgtatatcagacatctcgcaggcacagagccattggtaatggaatggaagctacgaaacgtgggcttccgggtgttgttcgttcacatgtattgtgcattgttgtctagtgattttcttatggtattagggcagattaattgtacagtgacaatggcgtccgtgctgctctttagcctgattgagagagttcttgtatgacggcaatagaaagcaatttg

SEQ ID NO: 118241 - DNA, 552 bp, Zea Mays
atggacgaggagagaaaggatcactcgatctgtcaagaactgcccgtcgccagacggtcgcccctacgccccatgctggccagagacgtgcaggccgtcgggctagccctcgccgtgctgggcacgggcacacggccgcaccctccgccttactggattagaaaggaaacacatatctggaagaaaaaattcacacagccaattcgaaagaaatatgcggccaaggcatgggatgcggcggcgtctgctcgtggccgtagaacgggcggacgcgctgacctcgtcgggcgtgaccttggcagggaggataggcctgctggtggacaaggaggcctccgccctggtcctggtgctgctgctacagctccagctccagcaccagcaccgactgcttttgttctccacgatgtccctccctatgctaatggtgatcttcacatgggtcatgccctcaataaaatcctcaaggattttataaatcgctacaagctgcttcagaatcataaagtgtcctttgttcctggttttgggattgccacggccttccaatag

SEQ ID NO: 118242 - DNA, 627 bp, Zea Mays
atgacaggacaagatggatctcactcaaactccggtggtgctgtttcgagtgcggagttcgaagcgacgcaacaacaaattactcaattgatgcagcaactacaagcgcttcagcatgatatacaccatgcacctaacatggaggatcaacctgacaatgaagaacatgtggaagatgatgatcctgctgccttggaggcagaggcagcacgtcgtgctgctgctagaggtggtggccgaggacgtggtgctggtcgaggacatggtgctggttttggcaatttcggtgctccgaatatgagaccacaatttttcggccgtgcacaacgtgttctagttggaggtactgcaggttttgatggtgaacctaattttggttatcaagatgaccatcgagcaggttatcatggccgtcgtggtggttacgatgatcgtcgaggtggtcactttggtgcttttggtgaccaccaatttgctggtgatgatggccaccgtgatcagcatcgtggtgatccagaacgccgacgagcagcaaggctcgagggcacacacaccttcatctcatgcagcttctacaccatctcgtgcaacccctcgctcagtttcagcttctggaaagcaatctga

SEQ ID NO: 118243 - DNA, 900 bp, Zea Mays
atggcggatcaccaggagatgatccacccaccagcggctgctgccaccacgggcagcacgacgactcacggcgattggtggaccacggcggtgtcgtggtcgccggaccagcagctacctgctgggttcggcggctgggcgtcgtctgccgcggccacagctggaggcaacaggtcgaggtccggcaacaacgcggctgcctcctcggagtcccccgggtccaagtccaaccactcgctcaccaccgaccaaggcgtggtctccgtgccgccgcacccgccgccagcggcgtctgctcacgccgccagcggcagctggaacgagccttcttactacttcgtgatggtacagggcgcccacgatcccaaccagcagttcctatccaatctagggttcgagttgctctcgtcgccgacttcgtcttccggcgggttccggtcctcctccccctcacttctcagaagcctcacggagccatcggccgccgcgaacactacgccgccaggcctcctgcagcaataccagcagcagcagcagcagacgatggaccaggcgccagccgggagcatcagggaggctctgcagctcactactaacaggacgccgttttggaacccttgtgcggaaggggcagcgagcttactagggactgccagaccaccgtcgtcagggctagcgagttttccgtccaagggcgcaatagaaggtgccgggggctctagcaacataattgccaagaggacaaacaccgttccaacgccgtcgcttaagaaaccgagaacagggacaccatcgccattgcctaccttcaaggtgaggaaagagaagcttggtgacagaatcacagcacttcagcaactagtctctccttttggaaaggtaagtgatccaaggtcttag

SEQ ID NO: 118244 - DNA, 595 bp, Zea Mays
ggaactaaagatttaaggattaggttggaagaaaaatacaagtgtgaaataccttatgacactgtttggaagggaagacaactagcactgaaagagttgcatggcagctgggaagaaagctttcagatgctattcaattggagagcagagaggttcaaaaatgcatacaagagaattatagagccaatgccagataagtctcagtggccacatgtggacctaccatttgctgttgctgcaccactagacaagagaggtagaggaaggtacaaaaaactcagaatcaagagttgtcttgaaggtgggaatagcaagagcaagaaggctgctgcagaaaaaggaaaagaggctgacaaagaggcagctaatgaagttgacatgcaggctgaaaaccaaactgaaaaaggcaagaagaagatgataagagggaagagaaggaagagaaagcctcggaagaacacaactaagtatggggagaatgccaaagtgccaacgcaaaagaagtcaaaagaatgtgctgctgtccaagaaatggaggaaggtgctgctgtccaagaaatggaggaagttgctgctatccaagaaatggaggaag

SEQ ID NO: 118245 - DNA, 279 bp, Zea Mays
atggaaacaattataaatgatagcccaattagggtcaccagaagtcgacttgcaatgctattgggagttggtccaacctcacaggaagtctgtataaggtttgctgctacagaccattgtaagaacgtgggtgtagttctgctcttctccaatgcaggttctgctcttctccaagtcgcgtgggggctgcagaccgtgggcgtgggtgtgggtgtgggtgcaggcgcgggtaaatcgacaggggtaaaacagtcagatcagctgctacttttaaattaa

SEQ ID NO: 118246 - DNA, 677 bp, Zea Mays
gcactgtatgtctaaggaatattttttgttaacaacaattggacttcaaatagtaatctctatgtaagtgtacaaattggaaaactataactgtcctgagataacagtaaagaggtataagaaatcaacaaagcagcaaaaatattaataggtcacataaaaatagtacataagattaaatatcgtcaatgaaatcaatagtctttagaactcacttatggacagcaagcacaatcgtatcaacaagtgtcaactaaataagcagagcatgtcgaaattactgacataagcaaagtggtacaaagcaatgaatattacagtagtatattgcaatagctttcaactattcataccttggttattgatggaatcaggaaccattttctagcctgcggtgtgggcaaaggcagtgaagcgcaggtctttgcacgacatagttcacactctcgtaccttggttcgtgatgagatcaaagagattgttgatggagctgttcgcgaggccggtgtaccctagtttcttgcaattcctcacccttttgtcggtcgtcgtgggggtggccggagtccactacggtgaccgccgctgcagggagacctcgggagacagaggcgaagagggcaccgaacctaatctgaccgtagatatcggcggcggtctagcaaagcagcgtggtt

SEQ ID NO: 118247 - DNA, 1538 bp, Zea Mays
ctctctctctctctctctctcttcttcctctctgcgctccaaacaatctcgccctctccttctctactctccaaaacaaacgaaacgaagcaagaaaccgagaaatctccctcccctgtggctgtggcggtggcggtggcggcgaggatcatgtcggcggctgcggcagcggaagtggggaaggagaagggcgccgccacccccggccccggccccggccccggtggcgcgtgcgagctgtgcggcgccgcggccagggtgtactgcggcgccgacgaggccacgctctgctggggctgcgacgcgcaggtgcacggcgccaacttcctggtggcgcgccacgcgcgctcgctgctgtgccggggctgcgcgcgccccacgccgtggcgcgccgcgggcccgcgcctcggccccaccgtctccctctgcgtccgctgcgtccgccgcggcccggcgggggccgtgggcgtcggcggcgatgaggagatggggggagcgggcgacggagacgccgaggatgacgacgacgaggacgacgactccgaggaggaggaggaggaggaggaggaggaaggggagggggagaaccaggtcgtgccgtggacggaggacgccgaggccacgccgccgcccgtcgggagctccacgtccagcagcagccgggaggcccccgccaacggcgcagagcgcgcagcgaaggaaaacgccccgtgctccacctcgcagccaggcctgtgccaccacgcgtcgtccgcgcgccacggcggccggagcgacgaggccacctcgtcccggagcggcggccgggtcctcgcctcccgccacaggaagagatcgccctcggatttcttcagctctgatgggtcgccgcagcccgggaatggcacaccggcggcgaggaattgctccgacgccggcattgccaggaatgactttacctgaggcaggcaacctgcgatgactggtgtagatgctgatgctaacattagaaggccagcttttagtgcatccaagctccggggaagatgcggatcacgacggcacggcgagatcagttcccaccgaggcatacatctttcttcgatcatcagttcgtcttcggtcctcaagcaaccttgcacgccgcagagtttaccagagcagcagtcctagaaccatagtagtgttcctaaacgtcgatggcttcgctgagattgtatatgtccccattacttcgttgtgttcgattccgtcctcttctgcttgttttctaaccttagagaaacggtatagggcaggctcgcagttgcaccggcattgttcgatggcctcactgtctgctttcttgaattgtgccctgagtggctgagccctagtttcttgtttcttgacagttctttcggtgagatttattgtctatggttgcagtggcagctgaagcatgcggcactgtcgtcgctgctcacctggcaaatacatacaatctgggcaagttgcaacatggcgaagatggatctggaattgttaatcgcccatttgggcgggcgtggggttattag

SEQ ID NO: 118248 - DNA, 318 bp, Zea Mays
atgaattgggcaaaagaatccaaaagttcaccttcttgcactaattgtgactcgttcatctttgagacgcagcgccacaatggcataagggagctttgccctgcgaatggagagcacaagctaatccgtgcccgtgctctcatccccctgcatgaacccaattctgttgcgatcaaccatcaagggttgtcctattgtattattcagttcattgaaaaggactacaaattagcagatactatgatttggggtctactcaagcattggccagtcagaaactgccaagaggtaattggttttgaccaaattatcaactag

SEQ ID NO: 118249 - DNA, 2284 bp, Zea Mays
gaacaatgttcttcttgaatactcaaaagaacaatgtccatcatggattctgctacgtgaccatgtggtccagcttgtttggtacacgaggccatatctttgtgttcgctttatgtatatgttccctttttattcctcagtttattcacttttatcttgtagttgcaggtttcttactcctgggtaggttccatttgtcttaaatagctttagagcaccaccttatgatatctccttttgactatgattattttcctatgaataatttttctgggaatactattaagataccaactaatctttgatatcctctaaaccaaacgcttcatgatagatgattcttgaggttgttgaatgaattggtcttgcgcatgtttgcaggcctttattggcccactaatctttgatacccactaatctttgtgctctcaattagctctaaactaatctttgatacccactaatatttgtgctctgaattggcctaattaatgatcaagtggtcatggtgtatgtcaactaatcactttctcttcatgtactactaggttataattatttgatgtggagtataaacatgcttcttgtaacatacatactgatggttaggtacctatcctagtcgtgtttgcaggcctttcagattgaaccgattacttcaacggtgtcatacatgattggtagggatgtgatggaggggagggggcaatgcaggtgcaggtaaaatttagaattttaagagcataataccctggttgtatttggcttgggagtaagtggatgttagcaatagtggagcatgtgtgggaagcggaggctgacgacagctcttacgttatcaaggaacaaacttatcctgagaaagtgctcacacgtggaacacagactactctttatttgagagatgatgacaagtatgagtttactgaccctgcaagaattgaaagcttagttaagaactgctcacaatttgtgtcattctcatatatacatggaaggagaaatcaagaacatttggggtctaaagagtctaaagaggaggaagaataaaaaaaggtgaagaggtcactgaggttagttttgtgtcagtgtaatatgttgtttgttttcatgtaattcttgcttctaatattatagaaagaatccggataggcagataagaacatgtcaatgattttgatattttcagaaataaggatttctatggtgcatgttatttaaaaaacaagccaactatagcttgtgtcaggtcatagatgcttgctattattggaactggtccatgcaaatcatttttgctcaaaatccaacttggccaatcattagtaggtcaagttatattcatgaaaccttttgtttgttgtttctttgcctaaaaacatgctttcattggttagttcattatcctagagttgcagagggactttatgtagcatgatccatgctcaggtattgcaattttggcaatttctgtaatgtaacatggaattggtgaaggtccttggtcgagtaatcacaatactattgatattattcatattgattaaatttttatcattggttctctttgtttgttatattatcttgtgtcatcgattaacaactctttcaccggacgtcttgaggtgactttagtttcttatcttttatatgtatcctgacataaaaccagtgcttattttctattcgtgcatgtgcaggtgttgtactgtttcttagaattatccagcaacttcgatgggaggaattttgtttgagcttgtgggcccaatttgagaagttttacatatagagtaaaaaaaggtcctgctctcgtgttttcgtgtaaaactggattttgttcagttcttactgtggagctatgcttcctagataaaacttctcgatttgtataacttctcgatttgtataaaaacttctccatttacatattgggaagtctatatgtaaaacttctcgatttatatatcaactatgcttcctgtggagcaaggaagcgaacgcaagctagccttttgtattagtgcattctgttcagttcttacttgatcatcccgtgttctcgcgtgtgccatggctgagtggcaagctcaacactggtattgttgtcttgtctcaaatgaagtccggttccacaagttaaccggaaatcttcatgggtgatagctgcgtcagattcttccgcgcatagggcaagtaatgcaagtgatagctgtgtcagtttacccccattttcttgggcatcacttgtctcaaatgaagtccattggaggttcgcaattta

SEQ ID NO: 118250 - DNA, 527 bp, Zea Mays
ttgatgtggagtataaacatgcttcttgtaacatacatactgatggttaggtacctatcctagtcgtgtttgcaggcctttcagattgaaccgattacttcaacggtgtcatacatgattggtagggatgtgatggaggggagggggcaatgcaggtgcaggtaaaatttagaattttaagagcataataccctggttgtatttggcttgggagtaagtggatgttagcaatagtggagcatgtgtgggaagcggaggctgacgacagctcttacgttatcaaggaacaaacttatcctgagaaagtgctcacacgtggaacacagactactctttatttgagagatgatgacaagtatgagtttactgaccctgcaagaattgaaagcttagttaagaactgctcacaatttgtgtcattctcatatatacatggaaggagaaatcaagaacatttggggtctaaagagtctaaagaggaggaagaataaaaaaaggtgaagaggtcactgaggttagttttgtgt

SEQ ID NO: 118251 - DNA, 745 bp, Zea Mays
ttgatgtggagtataaacatgcttcttgtaacatacatactgatggttaggtacctatcctagtcgtgtttgcaggcctttcagattgaaccgattacttcaacggtgtcatacatgattggtagggatgtgatggaggggagggggcaatgcaggtgcaggtgttgtactgtttcttagaattatccagcaacttcgatgggaggaattttgtttgagcttgtgggcccaatttgagaagttttacatatagagtaaaaaaaggtcctgctctcgtgttttcgtgtaaaactggattttgttcagttcttactgtggagctatgcttcctagataaaacttctcgatttgtataacttctcgatttgtataaaaacttctccatttacatattgggaagtctatatgtaaaacttctcgatttatatatcaactatgcttcctgtggagcaaggaagcgaacgcaagctagccttttgtattagtgcattctgttcagttcttacttgatcatcccgtgttctcgcgtgtgccatggctgagtggcaagctcaacactggtattgttgtcttgtctcaaatgaagtccggttccacaagttaaccggaaatcttcatgggtgatagctgcgtcagattcttccgcgcatagggcaagtaatgcaagtgatagctgtgtcagtttacccccattttcttgggcatcacttgtctcaaatgaagtccattggaggttcgcaattta

SEQ ID NO: 118252 - DNA, 735 bp, Zea Mays
acatgatggatgaagatgttataaacaatatttcagttcgcttgaagtgtgcaagacagggatcacaaattcttgacaaaaacagtggaagaagcataccgaggagtcgattgcggtgacggaggtctatttggagcagttgtcatccgcaatgatgaagtgatagttagctgccataacatggttctgaagcacactgaccctactgcgcatgctgaagtaactgcaattagagaggcttgcaaaaagctcgggaaaatcgagctctctgactgcgaaatttacgcgtcctgcgagccatgcccaatgtgctttggtgcagttcatctctcccgaatcaagaagctggtttatggggccaaggcggaggctgccatcgccattgacctgcaatgcactactctcttatgatcatgcgtgtactgccacattctgatacgagtactcaactttaaattaatcaatctactgtcctttaaggtgacaccaatggagaattcctaatggctatgcaacaacagcttgtccatgaaattcgtgaagtatggacaacttcacttgagaatctactttatatgaaggaagaccttatcatccctcatggatgtgttcattctcttgtaatctacgaagttctgttaaagttagtcgaaccattttctgattctatgttctctcatttgtttgacaacaacacatcttttatgaattaattattaaacaaaatgaggcgca

SEQ ID NO: 118253 - DNA, 967 bp, Zea Mays
tagtagctaatacatcacacatattattgagaccaactagcaacatagaaagcacaatagtgtaccaacaatggcagccaaaatattttgcttccttatgctccttggtctttctgcaagtgctgctaccgcaaccattttcccacaatgctcacaagctcctatagcttcctttcttcccccatacctctcaccagcggtgtcttcagtatgtgaaaacccaattcttcaaccctacaggatccaacaggcaatcgcagcaggcatcttacctttatcacccttgttcctccaacaaccgtcagccctattacagcagttacctttggtgcatttgttggcacaaaacatcaaggcacaacaactacaacaacttgtgctaggaaaccttgctgcctactctcagcaacagcagtttcttccattcaaccaactggctgcattgaactctgctgcttatttgcaacaacaactaccattcagtcagctagctgctgcctacccccagcaatttcttccattcaaccaactggcagcattgaactctgctgcttatttacaacagcaacagctaccaccattcagccagctagctgatgtgagccctgttgccttcttgacacaacaacagttgttgccgttctacctgcacgctgcgcctaacgctggcaccctcttacaactgcaacaattgctgccattcaaccaacttgctttgacaaacccaacaacgttctaccaacaacccatcattggcggtgccctcttttagattgcttatgagttatagttcaataatgaagttttttggatgatgtttgtggcttcccagaaataagaaagtacatttctagattcttatgtgcttctagcctccaaatgtggttgatagttattttgctctaagatcgggagtaatgaggtataaatcatcgttgtggtgtgctactcggttaattaagcatta

SEQ ID NO: 118254 - DNA, 308 bp, Zea Mays
tctcaacaaaacacaataaccacaagagatcaatcacagagatggcacagtggtttatcccgtggttcggccaagaccaacgcttgcctactccacgttgtggcgtcccaacggacgagggttgcaatcaacccctctcaagcggtccaaagacccacttgaataccacggtgttttgcttgctttactatatcccgtttgcgaggaatctccacactttggagcctctcgcccttacacttagatgatcacaaagaagcacagagtaagggagggataagcaactcactcaagacaagaaatcacag

SEQ ID NO: 118255 - DNA, 1271 bp, Zea Mays
agattagtagttaatacatcgcacatattattgagaccaactagcaacatagaaagcacaatagtgtaccaacaatggcagccaaaatattttgcttccttatgctccttggtctttctgcaagtgttgctaccgcaaccattttcccacaatgctcacaagctcctatagcttcccttcttcccccatacctctcaccagcggtgtcttcaatgtgtgaaaacccaattgttcaaccctacaggatccaacaggcaatcgcaacaggcatcttaccattatcacccttgttcctccaacaaccgtcagccctattacagcagttacctttggtccatttggtggcacaaaacatcagggcacaacaactacaacaacttgtgctagcaaaccttgctgcatactctcagcaacatcagtttcttccattcaaccaactggctgcattgaactctgctgcttatttgcaacaacaattaccattcagccagctagttgctgcctacccccagcaatttcttccattcaaccaactagcagcattgaactctgctgcttatttacagcagcaacaactactaccattcagccagctagctgatgtgagccctgctgccttcttgacacaacaacagttgttgccgttctacctgcacgctatgcctaacgctggcaccctcttacaactgcaacaattgctgccattcaaccaacttgctttgacaaactcaacagtgttctaccaacaacccatcattggtggtgccctcttttagattgcttatgagttatagttcaataatgaagttttttggatgatgtttgtggcgtcccagaaataagaaagtacatttctagattcttatgtgcttctagtctccaaatgtggtcgatagttattttgctctaagatcgggagtaatgaggtataaatcatcgttgtggtgtgctactcggttaattaagcattaacacacacaaacatgacgaggatggtataatctccaaaaatatgtactttgttaggtgggaccctatagccatgcagaatgtgctatgttaggcttgccgatggaaacgtgtgacgcatacgttttgtaaacctgttgatattatatgtgcttttatattatcatattttattaaaatattaatatttattactagtaagatataacattctatctaacttaaaacttaccataaatattccatcataactagatttaccaaactaataaactaaatatacataataaatacaaaattaa

SEQ ID NO: 118256 - DNA, 282 bp, Zea Mays
catctatcaactacagacggcaagaagtttgttgactgcttgaaggatcagaatatcatgcctggcatcaaggttgacaagggtttggttccattgcctggatccaacaatgaatcatggtgccaaggtcttgatggtttggcttcaaggtgtgctgagtactataagcagggggcgcgcttcgcaaagtggaggactgttgctagcatcccttgtggtccatcttcattagcagtcaaggaagcagcatggggacttgctcgatatgctgctattgctcag

SEQ ID NO: 118257 - DNA, 1459 bp, Zea Mays
ttattacataagttaaccacactaaaattaacattgggccattccatgatttttttctagtgcaaaatagccaaaccatgccacacatatgtggctatcgttacacatttgtaaaggtattgcatcacaccattgtcacccatgtatttggacaataacgagaggaaaaaccacttatttattgtattttatcaagtttgtcttgcttacgtataaattataacccaacaaagtaatcactaaatgtcaaaaccaactagataccatgtcatctctaccttatcttactaatgttctttttgcaaaatccaaaagtaatcttgcacaagcacaaggactgatatgtgtataaatatctcttagattagtagttaatacatcactcatattattaagaccaactagcaacatagaaagcacaatagtgtaccaacaatggcaaccaaaatattttgcttccttatgctccttggtctttctgcaagtgctgctaccgcgaccattttcccgcaatgctcacaagctcctatagcttcccttcttcccccatacctctcaccagcggtgtcttcagtatgtgaaaacccaattcttcaaccctacaggatccaacaggcaatcgcagcaggcatcttacctttatcacccttgttcctccaacaaccgtcagccctattacagcagttacctttggtgcatttgttggcacaaaacatcagggcacaacaactacaacaacttgtgctagcaaaccttgctgcctactctcagcaacagcagtttcttccattcaaccaactggctgcattgaactctgctgcttatttgcaacaacaactaccattcagccaactagctgttgtctacccccagcaatttcttccattcaaccaactagcaacattgaactctgctgcttatttacaacagcaacagctaccaccattcaaccagctagctaatgtgagccctgctgccttcttgacacaacaatagttgttgtcgttctacctgcacgctgcgcctaacgctggcaccctcttacaactgcaacaattgctgccattcaaccaacttgctttgacaaacccagcagcgttctaccaacaacccatcattggtggtgccctcttttagattgcttatgagttatagttcaataatgaagttttttggatgatgtttgtggcttcccagaaataagaaagtacatttctagattcttatgtgcttctagcctccaaatgtggttgatagttattttgctctaagatcgggagtaatgaggtataaatcatcgttgtagcctccaaaagaagaggtgaggtgtagtcttgtcggcgtttcggacccgggggaccctcaaccgagccgaccagtgaatttatcgctgcgtacccctggccagatgggttggtgcaagatggaacacaagggggaatgcggcttgtattatctc

SEQ ID NO: 118258 - DNA, 360 bp, Zea Mays
gtctgttggagaggcaagcgagcaagcaactgacaggtagctgcagcaatcagcaatgggctacgaagcggctgcggctgttgctgcgagaggccagctgcgtggagaagagaagcgcggcgcgagaagccatggccagcgagagaaggagaaggagaagaagaaggcagcgacgaggtgcagcgttgtgtggatgcttaggagagtcctgccgcttcgtagaggaggtgctatgattgttgcaccgtgatctctctcgcctctcggtgatcatcatgtgaatattgtgataccatcgatcggagagtgttttatttttcttgtttacattctttttcgttgatgaagcaaatgctttat

SEQ ID NO: 118259 - DNA, 2201 bp, Zea Mays
cgccgcaagcgcccggctgggcttcacctctccaccccatcgctcaccactccccccttcgtctccaaccagatcgccccccgccgcataaatcccccgctgacacccgatcgagcaaaccctcgcttacctcccgtcacgtcgcgtccgaacggcgacgctgcgccgtgatggacgccttcttcggcaagggcggcggcggcggcggcttccgcggcgccaagtgcaagacgctgctgaagctgtcgatcccgcggataaagctgctgcggaaccggcgggagctgcagctgcgccagatgcgccgggacatcgccaagcttctcgaggccggccaggaggccaccgcgcggatcagggtggagcacatcatccgggaggagaacatgatggccgcgcaggagatcctcgagctcttctgcgagctcatcgctgtgcgcctgcccatcatcgagacccaaagggcgtattatcttgaagtataaagcagggatcctgaatcctgctcgtgaatacaaatgggctatagttgataaaattgattaactgttttgtgactaaaaattctgcaagagatgcagataagtctgactgaattgtgtttccttgttttgttggcttcagggagtgtcctattgatctcaaagaagcaatatcaagtatctgtttcgctgctccaagatgtgcagatctacctgaactgatacaagttcaaatgatgtttgcaactaaatatgggaaggaatttgtcgctgcagcttcagagttgatgcctgattgcggggtcaatcgtcagataattgaactactttctattcgtcctcctcctgtccatgcaaagttgaaactgctgaaggagatagctgaggaacatgaagttgactgggatccatcagagacagagatagaatttctcaaacctcatgaagatctattgaatggcccgacctacttcaacggctccacactacctcttcccaaggagaaacacgaggaaacagtagcggcaagtgctgccgagcggcctgacaaagactgcgagtcagataccggtcttgactcactggattttcctgaagtcccaaaagcagcaatacgtccaccttctaacacaccattgaccccagatattggtccccatgctccgggctctcagccgcttcctcgtgagttctcagaccgtactaacttggaggagaatccaacagctggcggcgcttttaatgttattcagatgaaaagcctggaacatcttatctctgcaccatctgctcagccaaacacaccagatttgccagatgaaaagaagcaatttattccttttgcatctccaccgccagttgttgctactccattggaaaaaactgagacagttccctcaccttcaatgtctcctccagtgaagccaacagagccaaaaatctccacaaagcgggttgatgaattggccacacctccagtacctcccactgattatacgttcacaaaacaaccagaacaagtacggccaatctcttccgagagtgaggcaagtatcgacttggacgatgtactatctgctgctcagacagctgctgaatcagcggagcgagctgcgtccgcagcccgcgccgctgcgaaccttgtgcagctacgcattgcagacctaaagaagaattcaagggtctataacaagtacaccgacagtgctcaaaaggaaagccctcatcaggccgagggtacacagaaaccagtatttgatcaccaggactccttcaccaacgagacacaggactatgtgccgtctcatgtgccgcagaggtcgccgtctctggaggacgatccgtatttctcctaccccaacttgttctcggcgccaaaaccttgaaggcggaaactagtggcctgtaactgctagtagtagtcctattatgtcttggtcttcgctgttgcctcggaatttctgtgtgttgctgagtttggtacataacggtacaaaaggagactactgggttattacttggctacgaaacctgtctagtttgagtctctgtaaactgtacatgtacggtgtctgtatcagttttctgaaacatttctgcagttctacacgtaagtaatgccagatcatctagtttggttgggctgggcccaaaacaacatcttgtaatttggaatggacttggaataaaggaagtacctggagatcaacacaacaaaga

SEQ ID NO: 118260 - DNA, 2040 bp, Zea Mays
cgccgcaagcgcccggctgggcttcacctctccaccccatcgctcaccactccccccttcgtctccaaccagatcgccccccgccgcataaatcccccgctgacacccgatcgagcaaaccctcgcttacctcccgtcacgtcgcgtccgaacggcgacgctgcgccgtgatggacgccttcttcggcaagggcggcggcggcggcggcttccgcggcgccaagtgcaagacgctgctgaagctgtcgatcccgcggataaagctgctgcggaaccggcgggagctgcagctgcgccagatgcgccgggacatcgccaagcttctcgaggccggccaggaggccaccgcgcggatcagggtggagcacatcatccgggaggagaacatgatggccgcgcaggagatcctcgagctcttctgcgagctcatcgctgtgcgcctgcccatcatcgagacccaaagggagtgtcctattgatctcaaagaagcaatatcaagtatctgtttcgctgctccaagatgtgcagatctacctgaactgatacaagttcaaatgatgtttgcaactaaatatgggaaggaatttgtcgctgcagcttcagagttgatgcctgattgcggggtcaatcgtcagataattgaactactttctattcgtcctcctcctgtccatgcaaagttgaaactgctgaaggagatagctgaggaacatgaagttgactgggatccatcagagacagagatagaatttctcaaacctcatgaagatctattgaatggcccgacctacttcaacggctccacactacctcttcccaaggagaaacacgaggaaacagtagcggcaagtgctgccgagcggcctgacaaagactgcgagtcagataccggtcttgactcactggattttcctgaagtcccaaaagcagcaatacgtccaccttctaacacaccattgaccccagatattggtccccatgctccgggctctcagccgcttcctcgtgagttctcagaccgtactaacttggaggagaatccaacagctggcggcgcttttaatgttattcagatgaaaagcctggaacatcttatctctgcaccatctgctcagccaaacacaccagatttgccagatgaaaagaagcaatttattccttttgcatctccaccgccagttgttgctactccattggaaaaaactgagacagttccctcaccttcaatgtctcctccagtgaagccaacagagccaaaaatctccacaaagcgggttgatgaattggccacacctccagtacctcccactgattatacgttcacaaaacaaccagaacaagtacggccaatctcttccgagagtgaggcaagtatcgacttggacgatgtactatctgctgctcagacagctgctgaatcagcggagcgagctgcgtccgcagcccgcgccgctgcgaaccttgtgcagctacgcattgcagacctaaagaagaattcaagggtctataacaagtacaccgacagtgctcaaaaggaaagccctcatcaggccgagggtacacagaaaccagtatttgatcaccaggactccttcaccaacgagacacaggactatgtgccgtctcatgtgccgcagaggtcgccgtctctggaggacgatccgtatttctcctaccccaacttgttctcggcgccaaaaccttgaaggcggaaactagtggcctgtaactgctagtagtagtcctattatgtcttggtcttcgctgttgcctcggaatttctgtgtgttgctgagtttggtacataacggtacaaaaggagactactgggttattacttggctacgaaacctgtctagtttgagtctctgtaaactgtacatgtacggtgtctgtatcagttttctgaaacatttctgcagttctacacgtaagtaatgccagatcatctagtttggttgggctgggcccaaaacaacatcttgtaatttggaatggacttggaataaaggaagtacctggagatcaacacaacaaaga

SEQ ID NO: 118261 - DNA, 2594 bp, Zea Mays
atgagcctctggtggtggtgtcagcggtcgattgaccgattgagccaccgaacggtgaggcgagcctacacgtggggggatggtgggaggcgctaccaccaatcgagcggcattagccccaacctgaagcacacctggccggaatctaaaggatatcgtgcactcgccccgcatcgatatcctttggatgccgcccgcgaggaggtcaccgccgccgagcaagctgctgccaccaacgagagcgaggccgccacgctccgcagcgaggtcgagcgcctcgagggtctcctcgccgcggagaaggctagccatgaggaggagatgcgcaggggtgcacggctcggggaccagctgcagaccgcgtaccaggagaaggccgccctcgaggaggagatcgagaccctgaagggttccgccactgctgagggcaagggcatagaagagggatgttattctgttgctgctaaggccgggacgcctaaggatcagggcgtggtgcctcccgcactggtccgcggctgctggagcagctaccatggctggcatcacagtggtcttgtttaacctcaagaggtaatctggtggtccgatgcgcggaagttttgatctgctgctatggcctatatgagaatgggttaaccgttttgttagtgtcactggagtcatagtagtagtatctttactatcagctagataatagactagaggaacatgtatggcaagtacctttactttctgaagttttcaatggtaataagagtcgtgaacacaaacatgaggtataattgagttcttgtttgatcttttgagttgcacctgattccagactttgaattattatgacttggatggtttgtactgttagaggaaagatggtgctactttgtttagttgatgcctgagatgttttttattgcaaatttgaaatatgcatgattgtttgcatgtctctcacagcttgatgcttgtagagatgtttgttggatgatatgctgactgttaggctatctcacaaccccatatgtactaaaattggcaacatgagagccatcatatgcattgcctcttgaagtcttgatggatcgaatccaaaatagtaggagttgtccttgactgaattaacatctattggtatcactagataaagatgaatccaaacagagtaacaataagcttaaggcagaaatcggattatatatgagtgctttgaaatggtagactaatcactttgtgatccattttctacacaacaagataacatccattaactacaagccagcaaaaagcaagaaaaaagagaatcagggacaaacttgaaagtaaccaactataaagtctagcaatagtgtaattaattctgcatttgttatcagcaactgctcatggtcccatgactacgtaatgtgagaacagagggggcttccagagcactaactaaatcattcaatagtagcagtaacacactatgtattatgtacactagaatcttgacatgacaggtatctaccatctttaaattatctggtatgtattttgtatacctctatcaaatgatagcatgcaacccaaggtgcccaggtcttgcaaattttgctgatttaacaaactatgacaactggatattttcagcattcttcataagcaagtaactgtgtgttagggtcaagaaatactttttgtatgtagatatggatctaattctctaacctcctaacaaacctgctacttctcttatccaaaatcttgtaaatagaattagtgtaagtaattctgcattttttataagcttcttctcatggtcccatgactacccaatgtgagaacaaagggggcatcgaccctgaaaaccacgcagacaattgacttctttttttattcatcattttttgctcgtaaggcttgttctacaagtatttattatactatactatactcattcagatctaaacttttgcagttgcgaagggaatctcaaataaaaaattgtcgatcttaagtttcttcatcaaccaggtattttcttaacaatttcatttgaaactcagttatgactgactacattggtcatagagtgtttactgaaattgggtatggggttttcattgtagtagtttgttgctaaaacttcatgataaatggagaaccttcataaataaactcagatctaaatttatacaactcatatcattttgcaccaaccactctaggtacttactttcctctctaatactattatccagaaacctctgctccttttcctgaacaaaaaaggttcagagatatggaacatcgcaacctacatgttatagtcataaatcataagctccctattattgtaaaattaaatggttgtcagagcccgatatccatggagaaccttttatataattataattgacaacattaatcaaacaaccgacatgcgctaggaaggtggtgcactgctcctaccaccgcttcatgtccagcagctgcatgtgggcctcctcttgctcgcgtcatagccgcatcagctcccatgccagggcctccacaaaaaaaagcaacacaaaaccaagcaacgggcagaaacattcatctgaggtatgcaactt

SEQ ID NO: 118262 - DNA, 813 bp, Zea Mays
ccacctcttcatccatccggccaagcaaggggcatgaagaacaggaagggctacgggcaccagggccacctgctgagccccgtgggcagcccgctgtcggacaacgagtccggcgccgcggcagcggccggcggcggcgggtgcgggagcagcgtggggtactgcggcggcggcggcggtgagtcgccggccaaggagcaagaccggttcctgccgatcgccaacgtgtcgcgcatcatgaagcgctccctgccggcgaacgccaagatctccaaggaggccaaggagacggtgcaggagtgcgtgtccgagttcatcagcttcgtcacgggggaggcctccgacaagtgccagcgcgagaagcgcaagaccatcaacggcgacgacctgctctgggccatgaccacgctcggcttcgaggcctacgtcgccccgctcaagtcctacctcaaccgctaccgcgaggccgagggcgagaaggccgccgtgctcggcggcggcgcgcgccacggcgaaggcggcggcgcggcggacgacgccggcccactcgccgcgggcggcggggccggggacggtgtcgaccgcgcgggccacgacgacgacgcgcacgtcgggctcatgatgggagccagcagcgtcgggttcggctctggcggcggggcggcgccgtcgtactacgcggcggcatcacggaaggcgtacggcgcgggggaagggtccaaggtgatggagttcgaaggcgaggaggagaacggcggcgtgcagagggggaggggatttgccagccacctccacggcgccgtgcaatggtga

SEQ ID NO: 118263 - DNA, 899 bp, Zea Mays
ccgcgtcctcctaccccgcgctggcgactgcatcttccggggccgagccctcgatccggcgcgcttcgccgccggcatcgaggcaggaggccgagaagcggccgtgcggaggcggctctgtcggcgtagagctcgcaccccttcgaaccgaggtcgcgcgacccaccgcaacccaagatccaagccagcttccccctgctcgtcgccgcagagtcgccatcggcaaaaggcttcgtcgtccgccgacttcgtcgaaggcagccggcaaaaggaagagaagctcgtcgccgtcgtcgtcttcctcttcgattcggtccaccgaggcagatccgcgaagagcgagccatggattcggagaacgaaaagctccgtaaagcactgactactctgctcagagttgttcaaaagcgtagttgtgacatcgttgatgtcgtcaaatcagccttccagcctttcaactcacctttggtcgacgaattgaaccgagcactagttgagattgacgacctcgccaaggatcttgaagacgtagcagtgcaaactcagtgggaggtagacaatatggctaacagtcaagttaaagaacatccacaacaagaggaagcagtagaggaccttctgatagaagatggttcagatgacgacctactgatagacgaagagtcaccaattaactatgaagacctagtgggctacgacgatggtcgtgactactcaaccgacgacacatatccgtactagtgttctaggtttaacttaagtagaagtattgtagcatgttcaggtctatgttcaggtctacttgtcggttggtatgatcatgcttttgggggatttaaatgttctggtctatgtaaactgaaatcggttcagttactacaataattattgtgtttagt

SEQ ID NO: 118264 - DNA, 2669 bp, Zea Mays
ctatcccaacgagaacatcgttccccttccagcacctccattcccagccacgagacgacgaaaccctagcctcccctccccctctctcaccaggccaccacctcgccggaacccggcgcctcgacagagcacgggatcatcggccgccgtcggccgcggctgcggaggagcggtgtaagatgttgaacggcggcggcggcggccagaagaagcggaacacgaagatcgagccctaccggcaccgcgtcgagaccgaccccaagttcttcgacaagtcgtggcggaagctccatgacgccatccgcgagatctacaaccacaacgccagcggtctctccttcgaggagctctacaggactgcttataacatggtattgaacaagtttgctcctcagctctatgagaaactcacagaaaacatgaaagggcatcttgaagagatgcgcacatgtatagaggctgctcaaggtggtttgttcctggaagagttgcagcgaaaatggaatgaccataacaaggcattgacaatgattagagatatcctgatgtatatggacaggacatatattcccactaataaaaagacacctgtcttcgaacatggattagagctttggagggatactatagttcggtctcctatgattcaggggaggttgtttgacacgcttctcgagctcatacatagagaaaggactggcgacgtgataaatagaggcttgatgaggactacaactaaaatgttgatggatctagggttgtctgtttaccaggatgattttgaaaggccatttcttgaggtctctgctagtttctatagtggtgagtcacaacaatttattgaatgctgtacttgtggtgagtatctgaagcaggctgagaggcgcctccatgaagaatcagagcgtgtgtcacagtacttggatgctaaaaccaatgagaaaattactgctgttgtggtgaaagagatgctagcaaatcacatgcagaggttgattcttatggagaactcagggcttgtgaatatgcttgtcgaggacaggtatgaagacctgaccaggatgtacactttgtttaatcatgttcctgatggtctcgcaacaattagatctgtgatggtgtctcatattaaggatactggcaaaagtttggtaacagatccagagagactaaaggacccagttgattttgttcagcggcttcttaacatgaaggacaagtatgacaatatcatcaatgtgtcatttagcaatgacaagagtttcctgaatgctctcaattcctcatttgagaactttataaaacttaaacaaacagatcacctgagttcatatcactgttttgttgatgacaaactgcggaagggggtgaaagaggccaatgaggaggatcttgaaactgtcctggacaaagtgatgatgctgtttaggtatttgcaagaaaaaagatctatttgagaaatattacaagcaacacttggcaaagcgtcttctttctgggaaggctgcttctgatgattctgagagaagcatgcttgtgaagctgaagacagaatgtggctaccagtttacttcaaagttggagggcatgttcactgatttgaagacctctcaggatactacacaagggttttatgcatctacttcctcggagctgccggcagatgcccccacaatgtctgtccagatactcacaactgggtcatggccaacgcaaacctgcaatacctgcaatctcccccctgaaattgtttctgtctcagagaagtttcggtcttattaccttggcacacataatggcaggaggctaacatggcaaacaaacatggggacggctgacatcaaagtaacatttggaaatggaagcaagcatgaactgaacgtatcaacataccagatgtgtgttctcatgctgtttaactcagcagatgtcttgacttaccgtgaaattgagcagtctacagcaataccagccgctgacctgaagcgatgcctccagtcactagctcttgtgaagggtaagcaagtcctgcggaaagagccgatgagcagggacattgccgatgatgacagcttctgcgtgaacgacaagttcaccagcaagctcttcaaggtgaagatcggcaccgtggtggcgcagaaggagaccgaccccgagaagctagagacgcggcagcgggtggaggaggacaggaagccgcagatcgaggcggccattgtgcggatcatgaagtcgaggagggtcctcgaccacaacagcatcatgacggaggtgacaaagcagctgcagccgcgtttcatgccgaatcccgtggtgatcaagaagcggatcgagtcgctcatcgaacgcgacttcctggagcgggacaagacagacaggaagatgtatcgctatctggcctaagagaaccacctgtccttgaattcgatttcatcatatctacccatgttgtataaacagaccctgatccatgtaacttgtccagagaaggaaatgggtctttctgcatcccgtgacacttttaagttgagacttttttttctggatctgcccagttagttgctagcttagcttctataacatcttgcgctgggttgcatgctaacgctatagattggctgcgacgtaatgctctcttttcgttgctgcttcagaaacgcgatctgatc

SEQ ID NO: 118265 - DNA, 417 bp, Zea Mays
atggcgtttggctctctcctcctcctcttcctcctggctaccagagcttatggtcttgggaggcaggacatgcagttgcacacagcacacttgcccatgaacacgaaggtcaatagccagaagcaggagataccagctgacttcaagtggcaactacgaccgccggcgggcacactggacagccgccggaacggcttaggcggcagcaccacaccgccagagcatcgccgcctggcgacgaccacgggacgtgccgctgccgcgaaggaggaagacggcggaggagaggtcaagaagacgatgtggaggactcatcgtcgtgaggtggcggcgcccaggtttatccaccaagactacgccgggcccagcggtcactcacccaaccaccaccgggcaattccctgcggcccatgctag

SEQ ID NO: 118266 - DNA, 2348 bp, Zea Mays
acacgtttctttaccctaaccttttcgctgctccagcgaggcatacagccgccgccgtttcttcattcttccttgcagcgccgacgctccatcttccgctccctcccttgctcgcgctcggcacgtaggcgacggtggcagcgctcagcctcgggctctcagcgacggcgtcagcggcttcccctctcgccagtcgcctcgtcctccgcacaccggccggtggccctgccaaagaggcaacggagagggtttccagaacagagtatacagagggcaaggctgttatgagcaacaaggaggagaaagaatgccaaatgaccaaagaagagaagaggcggaagaagagggagaaacataaggacatgggtcagagcggcgattatgagggtaaggctgttatgagcaacaaggaggagaaagactgccaagtaaccgaagaagagaagaaacggaagaaggggaagaagcataaggacaagggtcagggcagcaattctgatagctcatgtgccaggaaccatagcattgagatggagcaagctgatgtgtcagccaagatggctgaagactcctgcttggagcatgcagaggctgttacgagcaaaagctctgcgaagaaacacaggaagaaaaagaggaaagataaagaggttgaaactattggccagaagcagatactcgatgctgatgaaaatgttgggtcagaagatacgaagaggaacagcagagaaagggaacatgataggaagtcaaagaagcacaaacgaaagcatcaggatgacgagactgcctcaaatggttcttctggtaatcaaattgttttaggggaagataagaggacggaaaaagagtatttagttaccttggatttggaagaggacaataaatctgatatgtcaaagattgggaagaagacagatagcaagaagaagaggagaaaagagagaaatgatggtgttgacctaagacaaaatacactagttggagagggcaagaatggtaagaataacaaagagaaaaaaatgtgtgaggatgagaatggtggcggtgaaagagagaaagaaaacatgggaaagcagaaggataagtgtagacgagtgagcttcactgatcatgtggaggtgtttaatataggtggtagtgatgatgtagagggtgatgggagtggtgaaactgaacttgtgcatggacgacggtttagccctgaggaagatgcaaagctaatggaagcgatattgaaatatgcagagttgaagcaattaggagagaaagggttacagatgattggggaaagtaataagcatccagagaccaggggttgttgggctgaaataggaaaagcattacctcatagacccaagaaagccaaatacgcgcgtggaaaggttttacttcaaaggagtgctgaacgtaaatggaccgctgaggagtatgagataattcgacggtttgttgaaaagaacggccgaaattggaaggtattagcaaaagaacttggaaagagtgaaatccatgtaaaagatacttggagacgaataaagttcaaaaatttgaaaagagggacttggagtcaggatgagtaccaaaacttgtttgatttggtaaatctggacatgcgtgtgaaagcccatcaaaacatcaatactggtcaccgtcatataagagataacatttcttgggaggctatcagtgaaaaattaaccactcgtagagccgaagaatgctgcacgaaatggtacgggcaattggcatcgccgctggttaaacaaggaatctgggcagatacagatgactacatgttagtggaagcgcttcaaaatgtcgatgctgtttgtgctgaagatgtggactgggagaaccttctcgagcacaggtctggggagctttgccgtcatagatggaaccagatgattcgcctgatgggtgaccacagatataggcctttcattgagcaagtggaagtgcttgcaaggcggtactgcccagagatgcttgcgtacaggaaaccagtcgcaggtggatcctcggccgacgaacctgctggagcctctgacttgtaatatgggatctttagaaacgttagcagcatatggttctagagctgccaagggtgtcgtcagcactctgatctcaacaaactttggtattgttgagggcttatgtatcttctggatttgaaatcacggatgttttatcgcccaactaatcatgatttggggctcgattagagaacgactaggaatcaggccgtccagttagaactaatagtctgattaagtgttggatgactgttgaaaatgcaatgtgaacttagcagctgtgcacttgcacttttaccttggacttgg

SEQ ID NO: 118267 - DNA, 1211 bp, Zea Mays
cagccagaaggcgcatccaaaccctacccagcgcccaacatataaattacgtgctccctcttcgccgccgtctctcgcgccgccacttccctcccgacccactatcccaaaaccgtagcgccctcgcctgctcgccgccgccgtcgttgcgagctccccatcttcctccgtcaaccatggcgacccagatcagcaagaagaagaagttcgtcagcgacggcgtgttctacgccgagctcaatgagatgctgacgcgggagctcgcggaggacggctactccggcgtggaggtgcgcgtcacaccgatgcgcacggagatcatcatccgcgccacgcgcacgcagaacgtgctcggcgagaagggccgcaggatcagggagctcacgtctgtcgtccagaagaggttcaacttccccgagaacggcgtcgagctctacgccgagaaggtcgtcaaccgcggcctctgcgccatcgcgcaggctgagtccctccgctacaagctcctcggaggccttgccgtccggagggcctgctatggtgttcttcgctttgttatggagagtggtgccaagggttgtgaggtcattgtgagtggaaagctcagggctcaaagagccaagtccatgaagttcaaggatggctacatgatctcatctggtcagccagtgaatgagtacatcgactcagctgtgagacacgtcctcctcagacagggtgttctgggtatcaaggtgaagatcatgcttgactgggacccgaagggcaaggttggcccgatcacccctcttccggacctggtgaccatccataccccgaaggaggaggacgagctgcgccctcctgtcttggcagctgaggtctaaggtcccaacagcgtcctcgaaatggcagtttgatctggtcctagctaggtttgtatcttatgataagggcagtgctaagacagttcgttccgtgtcacttctgtttaaaattaagttttgccgagacaagctatatgtaccggatgaaagtgtggttccttattgtatgctctggaattttatttttggtatgtttattttttgccttagttcaacatgcctcctgcttggacaaagtcaaattaaaaaacatgcttggacagacagcgtcatgtggattgagccgtttgtattttctgtcgatttggaccaaaatgtaaatataaataaagtacatagcgtagcctc

SEQ ID NO: 118268 - DNA, 939 bp, Zea Mays
gcgcatccaaaccctacccagcgcccaacatataaattacgtgctccctcttcgccgccgtctctcgcgccgccacttccctcccgacccactatcccaaaaccgtagcgccctcgcctgctcgccgccgccgtcgttgcgagctccccatcttcctccgtcaaccatggcgacccagatcagcaagaagaagaagttcgtcagcgacggcgtgttctacgccgagctcaatgagatgctgacgcgggagctcgcggaggacggctactccggcgtggaggtgcgcgtcacaccgatgcgcacggagatcatcatccgcgccacgcgcacgcagaacgtgctcggcgagaagggccgcaggatcagggagctcacgtctgtcgtccagaagaggttcaacttccccgagaacggcgtcgagctctacgccgagaaggtcgtcaaccgcggcctctgcgccatcgcgcaggctgagtccctccgctacaagctcctcggaggccttgccgtccggagggcctgctatggtgttcttcgctttgttatggagagtggtgccaagggttgtgaggttagtgctcctgtgcactatgagggtctgttcattttctgatgattggtgaatgcatgtcgacagccttatttgttctaatacaggtcattgtgagtggaaagctcagggctcaaagagccaagtccatgaagttcaaggatggctacatgatctcatctggtcagccagtgaatgagtacatcgactcagctgtgagacacgtcctcctcagacaggtttgttttgctacaattgcccgttgtaatgtctgtttgtctctgggtaagcacttcattttcgacgttccaaatgtaatttctcaacaaacatctttttctgtcgtgcagggtgttctgggtatcaaggtgaagatcatgcttgactgg

SEQ ID NO: 118269 - DNA, 2080 bp, Zea Mays
gcgcatccaaaccctacccagcgcccaacatataaattacgtgctccctcttcgccgccgtctctcgcgccgccacttccctcccgacccactatcccaaaaccgtagcgccctcgcctgctcgccgccgccgtcgttgcgagctccccatcttcctccgtcaaccatggcgacccagatcagcaagaagaagaagttcgtcagcgacggcgtgttctacgccgagctcaatgagatgctgacgcgggagctcgcggaggacggctactccggcgtggaggtgcgcgtcacaccgatgcgcacggagatcatcatccgcgccacgcgcacgcagaacgtgctcggcgagaagggccgcaggatcagggagctcacgtctgtcgtccagaagaggttcaacttccccgagaacggcgtcgagctctacgccgagaaggtcgtcaaccgcggcctctgcgccatcgcgcaggctgagtccctccgctacaagctcctcggaggccttgccgtccggaggtataacttgataagaccctactccctaccagctagctgtgtgatttgctgattttgatgtgcttgctactacttataatttgtatattcttgttcgttgaattgtatttaagtggtaactatagcatcgaaaaattaggaataccttgcctacactacccaaaatttggaattattaggagatcataacctataatttgcttataatctatttagaagaattttgagttgcttaaaacttccaagttgagacgttagtcattggttagaatgcttgcacctgtgattatatgttctgccttcagttcttgttggttagatattgtactggtgcagaaaggaaatgctgctccttgaggcagtggcggccagacaaccgttgagacagatccacagataaatgactaatatcctgtttgtctactaaatctgtctcacatttcttcagtcccattgacctaatagcatagcaacttcattgaccttaatagtcctttacagtagttgtgcccactgcatgcaaatttatcgtgtatcaaatacatttttcatttttggcacctatatttatatttacctgccatcttttatggtagtggggcttaagatggtgcatagaggaaatgctgctcttgtagtagcggcggccagacaaccgctgagagatagatccacagatgaacaatctttctgctgtttgtctactaattctatctcacattcttgacatgaatggtactcataggctcattaattttcttctatgtgccgcctttctatccatcgtatcaatttatgcctttgctaatatattttcttgtttggatgataaagtgtcattgttcgttgggcgtatcattaattcttgtgttaaaaaatgctacctaaggttgttaccctgtccagtattacagttagtctagttctccttactaacatgcttgttttgtcggcagggcctgctatggtgttcttcgctttgttatggagagtggtgccaagggttgtgaggtcattgtgagtggaaagctcagggctcaaagagccaagtccatgaagttcaaggatggctacatgatctcatctggtcagccagtgaatgagtacatcgactcagctgtgagacacgtcctcctcagacagggtgttctgggtatcaaggtgaagatcatgcttgactgggacccgaagggcaaggttggcccgatcacccctcttccggacctggtgaccatccataccccgaaggaggaggacgagctgcgccctcctgtcttggcagctgaggtctaaggtcccaacagcgtcctcgaaatggcagtttgatctggtcctagctaggtttgtatcttatgataagggcagtgctaagacagttcgttccgtgtcacttctgtttaaaattaagttttgccgagacaagctatatgtaccggatgaaagtgtggttccttattgtatgctctggaattttatttttggtatgtttattttttgccttagttcaacatgcctcctgcttggacaaagtcaaattaaaaaacatgcttggacagacagcgtc

SEQ ID NO: 118270 - DNA, 1312 bp, Zea Mays
gcgcatccaaaccctacccagcgcccaacatataaattacgtgctccctcttcgccgccgtctctcgcgccgccacttccctcccgacccactatcccaaaaccgtagcgccctcgcctgctcgccgccgccgtcgttgcgagctccccatcttcctccgtcaaccatggcgacccagatcagcaagaagaagaagttcgtcagcgacggcgtgttctacgccgagctcaatgagatgctgacgcgggagctcgcggaggacggctactccggcgtggaggtgcgcgtcacaccgatgcgcacggagatcatcatccgcgccacgcgcacgcagaacgtgctcggcgagaagggccgcaggatcagggagctcacgtctgtcgtccagaagaggttcaacttccccgagaacggcgtcgagctctacgccgagaaggtcgtcaaccgcggcctctgcgccatcgcgcaggctgagtccctccgctacaagctcctcggaggccttgccgtccggagggcctgctatggtgttcttcgctttgttatggagagtggtgccaagggttgtgaggtcattgtgagtggaaagctcagggctcaaagagccaagtccatgaagttcaaggatggctacatgatctcatctggtcagccagtgaatgagtacatcgactcagctgtgagacacgtcctcctcagacaggtttgttttgctacaattgcccgttgtaatgtctgtttgtctctgggtaagcacttcattttcgacgttccaaatgtaatttctcaacaaacatctttttctgtcgtgcagggtgttctgggtatcaaggtgaagatcatgcttgactgggacccgaagggcaaggttggcccgatcacccctcttccggacctggtgaccatccataccccgaaggaggaggacgagctgcgccctcctgtcttggcagctgaggtctaaggtcccaacagcgtcctcgaaatggcagtttgatctggtcctagctaggtttgtatcttatgataagggcagtgctaagacagttcgttccgtgtcacttctgtttaaaattaagttttgccgagacaagctatatgtaccggatgaaagtgtggttccttattgtatgctctggaattttatttttggtatgtttattttttgccttagttcaacatgcctcctgcttggacaaagtcaaattaaaaaacatgcttggacagacagcgtcatgtggattgagccgtttgtattttctgtcgatttggaccaaaatgtaaatataaataaagtacatagcgtagcctc

SEQ ID NO: 118271 - DNA, 1360 bp, Zea Mays
gaaaaaggacaatggctctctgtatctcatccttatcctttccccacgattccttctctcctctcttgcgccgccgctggcccagcgcggccgccgtgctccttctccactcgtgcttcccaagctgcttcgccggaagcaatgcgagggccctgccccggtggaggcgtctcggcgtcttttgccccgagcttcaacggctcccgcgccatgatctggccggcaacagtaaattgcacgagacggatccgcatttcattcatccaaacagccaaaacggggccgttccgcgcaggcgacagggctacgggaggaatttgctatgctagccaggcggttgaattgctgcccactttgtaccctgaaatcgtggtccgagacgcacggctcgaggactgctgggaagtggctgacactcactgcagctcgttctttcctggttacaagttcccgttggaccttgttctccggattgatcgttacattgctctcctctctggattttcagttccacccggctgcatgaggacttgccttgtggccgtcaattctaattctgtaaatagtagtttcaacatcgagtgtggagatgctacagatgccaactttgagaaatacaatctcagtagaggctccgtagctggcattcttacacttgatacagtggcagactatcttccgagaaggggacccctgaagcagagaaggacaggtattgcgtatatagcaaacgtcgcggtgcggaaggaggagcgacggaaagggatcgcgaagatgttggtccaagaagcagaggctcgggcaaggagctggggatgccggtcgatggcactgcactgcgacgtaaacaacgtggccgcgctacgcctgtacagaaaccaaggcttcaagtgcatacgagtgccggaaggagctaaatggcccgaacccaagatagctaaaggagcggagtacaacttcatgatgaagctagtgcccaaggcttgagtcttgaaccttataagatctgactagggaaaaaaagggaaaggtttggccgtgtaggttctgcacggatgcacgatttgctctccattcatgtgtacagcatttggtgtatagtggaggctactttgtaaatggtatatataacagctacgtgttggtccatagtgagtgactgagggtgtcggtgtttaaaccatccccagtccttgtgttgttgtgtgttatgttcttcagattctacaaggttccagccagccagaaggctgctggggcgaactgccagttctaaattgtttttttttctggagatacagaccggcttgtcatatagggctggtttgataataaaaaaattaaatggatatatgagagg

SEQ ID NO: 118272 - DNA, 1349 bp, Zea Mays
gaaaaaggacaatggctctctgtatctcatccttatcctttccccacgattccttctctcctctcttgcgccgccgctggcccagcgcggccgccgtgctccttctccactcgtgcttcccaagctgcttcgccggaagcaatgcgagggccctgccccggtggaggcgtctcggcgtcttttgccccgagcttcaacggctcccgcgccatgatctgtaaattgcacgagacggatccgcatttcattcatccaaacagccaaaacggggccgttccgcgcaggcgacagggctacgggaggaatttgctatgctagccaggcggttgaattgctgcccactttgtaccctgaaatcgtggtccgagacgcacggctcgaggactgctgggaagtggctgacactcactgcagctcgttctttcctggttacaagttcccgttggaccttgttctccggattgatcgttacattgctctcctctctggattttcagttccacccggctgcatgaggacttgccttgtggccgtcaattctaattctgtaaatagtagtttcaacatcgagtgtggagatgctacagatgccaactttgagaaatacaatctcagtagaggctccgtagctggcattcttacacttgatacagtggcagactatcttccgagaaggggacccctgaagcagagaaggacaggtattgcgtatatagcaaacgtcgcggtgcggaaggaggagcgacggaaagggatcgcgaagatgttggtccaagaagcagaggctcgggcaaggagctggggatgccggtcgatggcactgcactgcgacgtaaacaacgtggccgcgctacgcctgtacagaaaccaaggcttcaagtgcatacgagtgccggaaggagctaaatggcccgaacccaagatagctaaaggagcggagtacaacttcatgatgaagctagtgcccaaggcttgagtcttgaaccttataagatctgactagggaaaaaaagggaaaggtttggccgtgtaggttctgcacggatgcacgatttgctctccattcatgtgtacagcatttggtgtatagtggaggctactttgtaaatggtatatataacagctacgtgttggtccatagtgagtgactgagggtgtcggtgtttaaaccatccccagtccttgtgttgttgtgtgttatgttcttcagattctacaaggttccagccagccagaaggctgctggggcgaactgccagttctaaattgtttttttttctggagatacagaccggcttgtcatatagggctggtttgataataaaaaaattaaatggatatatgagagg

SEQ ID NO: 118273 - DNA, 1111 bp, Zea Mays
accaaaagcagcttctagcttcccagttcccacacgttccctcgtcttttgtcagttggacaatccgcagctcctccatctcattcttccccccatcccatccccaaggttgaccggcgaaatcagcagtccgagaaccgcgagcttctgcctgatccagcctcatcccgccatggacgaatctgaggagcacagcaacggcggcgggcacccccacccgcaccacgggtacgagtggaagttcccggcggcgctgagcgcgaacacgacgagcgtgcacgtgacggcgctggacggcgtggtgaacgtgaactcgctgttcacggtggccgtgttcgtggggctgtcgctggcgaccccggggcagctgcggagcctggcgggggacccgcggtgcgacgccggcccgggcgtggcgcggtcgctgctggtgctggaggtggtggccttctcgtccttcctcttctccagcctggtggcgcagggcctgaagctggcgctcaacctcatcaactccaaggacccgcacgacgcggcgcgcgcccacatcgacgcccgcgtgctccgcctcggcatgctcgcctccgccgtcggatccgtcgtcggctgcgtcttcctcatgacgtccatggtcatggtcgtgcaggtccgcctcggcacgctgagctgccccaccgaccgcgccgccgccaaggccgccgcgggcctcgtcggcctcgtcaccaccgcgctcgccttctacgtgggcaccgtcttctacaccttcacccactgatgccagttccatgcgtccgtgcgctgcatcccaaatccatctagcgttgcgttgcgttgcaaagggcacatcgccatcagtggtgtcggtgtgcgaggaaattgaaaggaggacctgcaatctgcgttattactttgatctgatgcgctgttcgtttttgttcgtgactaaagtttagatagtgttggatattagttatgaatattaaatatagacttaattaagtttaataaattcatctgatcttttattttcatatgtgtaattagttttataattaaactacttgtaattgtcatcaaacattcgacagatactaaacttttgattacaacc

SEQ ID NO: 118274 - DNA, 1078 bp, Zea Mays
acgttccctcgtcttttgtcagttggacaatccgcagctcctccatctcattcttccccccatcccatccccaaggttgaccggcgaaatcagcagtccgagaaccgcgagcttctgcctgatccagcctcatcccgccatggacgagtaagtctcttcccctcgccccttccatggatggatgaaggaacctaatgtttcgtgccctgtctccatccatcccagatctgaggagcacagcaacggcggcgggcacccccacccgcaccacgggtacgagtggaagttcccggcggcgctgagcgcgaacacgacgagcgtgcacgtgacggcgctggacggcgtggtgaacgtgaactcgctgttcacggtggccgtgttcgtggggctgtcgctggcgaccccggggcagctgcggagcctggcgggggacccgcggtgcgacgccggcccgggcgtggcgcggtcgctgctggtgctggaggtggtggccttctcgtccttcctcttctccagcctggtggcgcagggcctgaagctggcgctcaacctcatcaactccaaggacccgcacgacgcggcgcgcgcccacatcgacgcccgcgtgctccgcctcggcatgctcgcctccgccgtcggatccgtcgtcggctgcgtcttcctcatgacgtccatggtcatggtcgtgcaggtccgcctcggcacgctgagctgccccaccgaccgcgccgccgccaaggccgccgcgggcctcgtcggcctcgtcaccaccgcgctcgccttctacgtgggcaccgtcttctacaccttcacccactgatgccagttccatgcgtccgtgcgctgcatcccaaatccatctagcgttgcgttgcgttgcaaagggcacatcgccatcagtggtgtcggtgtgcgaggaaattgaaaggaggacctgcaatctgcgttattactttgatctgatgcgctgttcgtttttgttcgtgactaaagtttagatagtgttggatattagttatgaatattaaatatagacttaattaagtttaataaattcatctgatcttttattttcata

SEQ ID NO: 118275 - DNA, 391 bp, Zea Mays
ttgcaggaggaatttgaggagtatgctgacaaggcgaaggccttgcctgacaacacgaccaatgagaacaagctgatcctctacggactactctacaagcaagccactgttggagatgtgaatacctgttaggctgctactttcgttctcgttcccttcgtaagtttggatgctgatgaatgataaattcaagttcaccaaggtgaagcaatgagcgactacatcaccaatgtgaagcagcttaaggaggaggctgccacttcgtaaagtcccttaatagttgccaagggcctattgtcagctgagcagcctgagctttatgccatttggccatgagaaataggtcatttgatcccatatgtacctgtttatgtaactgattaccaatgtt

SEQ ID NO: 118276 - DNA, 1178 bp, Zea Mays
gcggaggacgaggatgcgccggcgacggcggcagcgcagacggtctggtacgaccccatgacttcgccgcaggcgccggcgccgcagcagcagccggcgatagaggctgcgatgcggggggcctcgccgtcggtgagctccaacgcgcggcctctcagggtgtacgccgacggcatctatgatctcttccacttcggccatgcgcgcgcgctcgaacaggccaagaagtcatttcccaacacctacttgctggtaggttgctgcagcgacgagatcacccacatgtacaaaggaaagaccgtcatgaccgaggacgagcgctacgaatcgcttcggcattgcaagtgggtcgacgaggtcataccggacgctccatgggtgatcaaccaggagttcatcgacaagcacgacatcgactacgtcgctcacgacgcgctcccatacgctgacacgagtggagctgccaatgatgtctatgaatttgtgaaagccatcgggaagttcaaggagacgaagcgcaccgagggcatctcgacgtcggacatcatcatgaggatcttgaaggactacaaccagtacatcatgcggaacctcacccgcgggtacagccgcaaagatctcggcgtcagctacgtcaaggagaagcagctgagagtcaacatggggatcagcaagctacgggagaaggtgaaggagcaccaggagaagttccacagcgcggcgaagatcgctgggaccaaccctgtggagtggatggagaacgcggaccgctggatcgttggcttccttgagaagttcgaggaaggctgccacatgatggaaactgccattaaaggtcggattcaggaggggttgaagcggcaaggcaggtcggagtcaaacctttctggagaggagtccgactcgtagttctgtgatctcccccaaatgaagctagacaaaaggagaactggagatcatttcccacagtctgtgtaacagtatgagattggttaattagcatgttattgtaggacgccatggatcattgtttagttgtacctggagattatgtagttttgaagaacaatcgtgtttctgtatgcgatcagttgctccttcattgagcatatctgcatctggcacctgctaggaagtaggaactgctattgttttcatagaactgaagatacgaagaa

SEQ ID NO: 118277 - DNA, 1374 bp, Zea Mays
gcggaggacgaggatgcgccggcgacggcggcagcgcagacggtctggtacgaccccatgacttcgccgcaggcgccggcgccgcagcagcagccggcgatagaggctgcgatgcggggggcctcgccgtcggtgagctccaacgcgcggcctctcagggtgtacgccgacggcatctatgatctcttccacttcggccatgcgcgcgcgctcgaacaggccaagaagtcatttcccaacacctacttgctggtaggttgctgcagcgacgagatcacccacatgtacaaaggaaagaccgtcatgaccgaggacgagcgctacgaatcgcttcggcattgcaagtgggtcgacgaggtcataccggacgctccatgggtgatcaaccaggagttcatcgacaagcacgacatcgactacgtcgctcacgacgcgctcccgtgagtgtgtgctttatttatgcaaaaagtttggccaaatgatttttgcaacaattttgatctaaagaaaggttgaccgaaacgatctgcttgtttcagatacgctgacacgagtggagctgccaatgatgtctatgaatttgttaggagctctgaaatctgaatctccctgctgtgtcaaagcatctaggaaatctgatgcatggtctgtgtgtctgtgcaggtgaaagccatcgggaagttcaaggagacgaagcgcaccgagggcatctcgacgtcggacatcatcatgaggatcttgaaggactacaaccagtacatcatgcggaacctcacccgcgggtacagccgcaaagatctcggcgtcagctacgtcaaggagaagcagctgagagtcaacatggggatcagcaagctacgggagaaggtgaaggagcaccaggagaagttccacagcgcggcgaagatcgctgggaccaaccctgtggagtggatggagaacgcggaccgctggatcgttggcttccttgagaagttcgaggaaggctgccacatgatggaaactgccattaaaggtcggattcaggaggggttgaagcggcaaggcaggtcggagtcaaacctttctggagaggagtccgactcgtagttctgtgatctcccccaaatgaagctagacaaaaggagaactggagatcatttcccacagtctgtgtaacagtatgagattggttaattagcatgttattgtaggacgccatggatcattgtttagttgtacctggagattatgtagttttgaagaacaatcgtgtttctgtatgcgatcagttgctccttcattgagcatatctgcatctggcacctgctaggaagtaggaactgctattgttttcatagaactgaagatacgaagaatctgacccttttcttc

SEQ ID NO: 118278 - DNA, 1275 bp, Zea Mays
gcggaggacgaggatgcgccggcgacggcggcagcgcagacggtctggtacgaccccatgacttcgccgcaggcgccggcgccgcagcagcagccggcgatagaggctgcgatgcggggggcctcgccgtcggtgagctccaacgcgcggcctctcagggtgtacgccgacggcatctatgatctcttccacttcggccatgcgcgcgcgctcgaacaggccaagaagtcatttcccaacacctacttgctggtaggttgctgcagcgacgagatcacccacatgtacaaaggaaagaccgtcatgaccgaggacgagcgctacgaatcgcttcggcattgcaagtgggtcgacgaggtcataccggacgctccatgggtgatcaaccaggagttcatcgacaagcacgacatcgactacgtcgctcacgacgcgctcccatacgctgacacgagtggagctgccaatgatgtctatgaatttgttaggagctctgaaatctgaatctccctgctgtgtcaaagcatctaggaaatctgatgcatggtctgtgtgtctgtgcaggtgaaagccatcgggaagttcaaggagacgaagcgcaccgagggcatctcgacgtcggacatcatcatgaggatcttgaaggactacaaccagtacatcatgcggaacctcacccgcgggtacagccgcaaagatctcggcgtcagctacgtcaaggagaagcagctgagagtcaacatggggatcagcaagctacgggagaaggtgaaggagcaccaggagaagttccacagcgcggcgaagatcgctgggaccaaccctgtggagtggatggagaacgcggaccgctggatcgttggcttccttgagaagttcgaggaaggctgccacatgatggaaactgccattaaaggtcggattcaggaggggttgaagcggcaaggcaggtcggagtcaaacctttctggagaggagtccgactcgtagttctgtgatctcccccaaatgaagctagacaaaaggagaactggagatcatttcccacagtctgtgtaacagtatgagattggttaattagcatgttattgtaggacgccatggatcattgtttagttgtacctggagattatgtagttttgaagaacaatcgtgtttctgtatgcgatcagttgctccttcattgagcatatctgcatctggcacctgctaggaagtaggaactgctattgttttcatagaactgaagatacgaagaatctgacccttttcttc

SEQ ID NO: 118279 - DNA, 1333 bp, Zea Mays
gcggaggacgaggatgcgccggcgacggcggcagcgcagacggtctggtacgaccccatgacttcgccgcaggcgccggcgccgcagcagcagccggcgatagaggctgcgatgcggggggcctcgccgtcggtgagctccaacgcgcggcctctcagggtgtacgccgacggcatctatgatctcttccacttcggccatgcgcgcgcgctcgaacaggccaagaagtcatttcccaacacctacttgctggtaggttgctgcagcgacgagatcacccacatgtacaaaggaaagaccgtcatgaccgaggacgagcgctacgaatcgcttcggcattgcaagtgggtcgacgaggtcataccggacgctccatgggtgatcaaccaggagttcatcgacaagcacgacatcgactacgtcgctcacgacgcgctcccatacgctgacacgagtggagctgccaatgatgtctatgaatttgtgaaagccatcgggaagttcaaggagacgaagcgcaccgagggcatctcgacgtcggacatcatcatgaggatcttgaaggactacaaccagtacatcatgcggaacctcacccgcgggtacagccgcaaagatctcggcgtcagctacgtcaaggagaagcagctgagagtcaacatggggatcagcaagctacgggagaaggtgaaggagcaccaggagaaggtgatcgagctgcttcgcggctatttcgaggcagagcttcgcgtgatccgaaaaactctgacaccgagtgtgctgctgcgtgcgcagttccacagcgcggcgaagatcgctgggaccaaccctgtggagtggatggagaacgcggaccgctggatcgttggcttccttgagaagttcgaggaaggctgccacatgatggaaactgccattaaaggtcggattcaggaggggttgaagcggcaaggcaggtcggagtcaaacctttctggagaggagtccgactcgtagttctgtgatctcccccaaatgaagctagacaaaaggagaactggagatcatttcccacagtctgtgtaacagtatgagattggttaattagcatgttattgtaggacgccatggatcattgtttagttgtacctggagattatgtagttttgaagaacaatcgtgtttctgtatgcgatcagttgctccttcattgagcatatctgcatctggcacctgctaggaagtaggaactgctattgttttcatagaactgaagatacgaagaatctgacccttttcttctgagtatgtgccgacctgtgtgttgcaccgccaaatgaactgaatattgctc

SEQ ID NO: 118280 - DNA, 3599 bp, Zea Mays
catctccccacgcaccccggcgcccgcgccgcgccaccttctctcccccctcctcctcctcctctctctctctctctctctctgccacacagcacaccagaagggcagcaggggaggtagagagaggtagcttcgcattctcggtttccctccgcgcgtgtcctcccagcctcgacagagagaagggccaccatcgtccctgcctgattgcgcgccaggcaggcaggcattatggcgccgggcggccggcgcagcaacggcgagacgccgacaggacagcagcagcagcagcagcaggctgacggcaggcgcgggtgcgcatgcggcgggttccccgtgtgcgcgtgcgccggcgcggcggcggtggcgtccgccgcctcctccgccgacatggaccgcgtggcggtggccgccaccgagggccagatcggcgccgtcaacgacgagagctgggtggcggtcgacctcagcgacgacggcctctcctccgccgccgacccgggggccgtcgcgctcgaggaacgccccgtcttccgcaccgagaagatcaagggtgtcctcctccacccctacagggtgctcatcttcgtgcgcctgatcgcgttcacgctgttcgtgatctggcgcatctcgcaccgcaacccggacgcgctgtggctgtgggtgacgtcgatcgcgggcgagttctggttcggcttctcgtggctgctggaccagctgccgaagctgaacccgatcaaccgcgtgccggacctgggggcgctgcggcagcggttcgaccgcgccgacgggacgtcgcggctgccggggctggacatcttcgtgaccacggcggacccgttcaaggagccgatcctgagcacggccaactccatcctctccatcctggccgccgactaccccgtggagcgcaacacgtgctacctctccgacgactcgggcatgctgctcacgtacgaggccatggcggaggccgccaagttcgccaccgtctgggtgcccttctgccgcaagcacggcatcgagccgcgcggccccgagagctacttcgagctcaagtcccacccctacatgggccgctcccaggaggacttcgtcaacgaccgccgccgcgtgcgcagggactacgacgagttcaaggcgcgcatcaacgggctggagaacgacatcaggcagcgctccgacgcctacaacgccgccagggggctcaaggacggcgagcccagggctacgtggatggccgacggcacacagtgggagggcacctgggttgagccgtccgagaaccaccgcaagggcgaccatgccggcatcgtcctggtgcttctgaaccacccgagccacagccgtcagctcgggccgccggcgagcgcggacaacccgctggacttgagcatggtggacgtgcggctccccatgctggtgtacgtctcccgcgagaagcggcccgggcacaaccaccagaagaaggccggcgccatgaacgcgctgacccggtgctccgccgtgctctccaactcgcccttcatcctgaacctggactgcgaccactacatcaacaactcgcaggcgctgcgcgcgggcatctgcttcatgctcgggcgggacagcgacacggtggcgttcgtccagttcccgcagcgcttcgagggcgtggaccccacggacctgtacgccaaccacaaccgcatcttcttcgacggcacgctccgggcgctggacggcatgcagggccccatctacgtcggcacgggctgcctgttccgccgcatcacgctctacggcttcgacccgccgcggatcaacgtgggcgggccgtgcttcccgtcgctgggcggcatgttcgccaagaccaagtacgagaagcctgggctggagctcaccaccaaggccgccgtggccaagggcaagcacggcttcctgcccatgcccaagaagtcgtacggcaagtcggacgcgttcgcggacaccatcccgatggcgtcgcacccgtcgccgttcgcggccgcggccgccgtcgtggcggaagaggcgaccatcgccgaggcagtggcggtgtgcgcggcggcgtacgagaagaagaccgggtggggcagcgacatcgggtgggtgtacggcacggtgacggaggacgtggtgacggggtaccggatgcacatcaaggggtggcgctcccgctactgctccatctacccgcacgccttcatcggcaccgcccccatcaacctgacggagcggctgttccaggtgctccgctggtccacgggctccctggagatcttcttctcccggaacaacccgctgttcgggagcacgttcctgcacccgctgcagcgcgtggcgtacatcaacatcaccacgtacccgttcacggcgatcttcctcatcttctacaccacggtgccggcgctgtcgttcgtgacggggcacttcatcgtgcagcggcccaccaccatgttctacgtgtacctggccatcgtgctgggcacgctgctgatcctggccgtcctggaggtgaagtgggcgggcgtgaccgtgttcgagtggttccggaacgggcagttctggatgacggccagctgctccgcgtacctggccgccgtgtgccaggtgctggtgaaggtggtgttccggcgggacatctcgttcaagctgacgtcgaagcagcccgcgggggacgagaagaaggacccctacgccgacctgtacgtggtgcgctggacctggctcatggtgacgcccatcatcatcatcctcgtcaacatcatcggctccgccgtggccttcgccaaggtgctggacggcgagtggacgcactggctaaaggtggccggcggcgtcttcttcaacttctgggtgctgttccacctctaccccttcgccaagggcatcctggggaggcacggcaagacccccgtggtggtgctcgtctggtgggccttcaccttcgtcatcaccgccgtgctgtacatcaacataccccacatccacggccccggcggcaagcacggcggcgcgatcggaaagcacggcgccgcccaccatggcaagaagttcgacggctactacctctggccgtgaaggatcgatcgatcggagcagccaacccagcatcgtcatgcatgcacatacctgccctgatgatgatatggtgagccgcgaaggtgaagagagtacgttcccgttcatccatcgtccttagtgatgcccggtgattagttgatgatgaagagtgaagaagactacacaccaacccacacacatttgatcgacccagcgacgtacccgccaattttttttcttcttctttcctttttgcccgcccccttttcttcattctttttcttctagttttgtccagaaattgaaagatgtgttaagatgtgttgatttgatttagttttttaattaccgtacccgtggtaattaaattatgtacctacttatatatacattacgccgaagaggaaggatcactttgtataagaaaagagagaaatgggggatgtaggagggggggctaggggcccggctttggggtggtattcttttagcatatggaacacaataaatttaatttcattcttggaaaaaaagaa

SEQ ID NO: 118281 - DNA, 3023 bp, Zea Mays
ggggcattccagttgcaccctctaatttgggaagggtgctcatcttcgtgcgcctgatcgcgttcacgctgttcgtgatctggcgcatctcgcaccgcaacccggacgcgctgtggctgtgggtgacgtcgatcgcgggcgagttctggttcggcttctcgtggctgctggaccagctgccgaagctgaacccgatcaaccgcgtgccggacctgggggcgctgcggcagcggttcgaccgcgccgacgggacgtcgcggctgccggggctggacatcttcgtgaccacggcggacccgttcaaggagccgatcctgagcacggccaactccatcctctccatcctggccgccgactaccccgtggagcgcaacacgtgctacctctccgacgactcgggcatgctgctcacgtacgaggccatggcggaggccgccaagttcgccaccgtctgggtgcccttctgccgcaagcacggcatcgagccgcgcggccccgagagctacttcgagctcaagtcccacccctacatgggccgctcccaggaggacttcgtcaacgaccgccgccgcgtgcgcagggactacgacgagttcaaggcgcgcatcaacgggctggagaacgacatcaggcagcgctccgacgcctacaacgccgccagggggctcaaggacggcgagcccagggctacgtggatggccgacggcacacagtgggagggcacctgggttgagccgtccgagaaccaccgcaagggcgaccatgccggcatcgtcctggtgcttctgaaccacccgagccacagccgtcagctcgggccgccggcgagcgcggacaacccgctggacttgagcatggtggacgtgcggctccccatgctggtgtacgtctcccgcgagaagcggcccgggcacaaccaccagaagaaggccggcgccatgaacgcgctgacccggtgctccgccgtgctctccaactcgcccttcatcctgaacctggactgcgaccactacatcaacaactcgcaggcgctgcgcgcgggcatctgcttcatgctcgggcgggacagcgacacggtggcgttcgtccagttcccgcagcgcttcgagggcgtggaccccacggacctgtacgccaaccacaaccgcatcttcttcgacggcacgctccgggcgctggacggcatgcagggccccatctacgtcggcacgggctgcctgttccgccgcatcacgctctacggcttcgacccgccgcggatcaacgtgggcgggccgtgcttcccgtcgctgggcggcatgttcgccaagaccaagtacgagaagcctgggctggagctcaccaccaaggccgccgtggccaagggcaagcacggcttcctgcccatgcccaagaagtcgtacggcaagtcggacgcgttcgcggacaccatcccgatggcgtcgcacccgtcgccgttcgcggccgcggccgccgtcgtggcggaagaggcgaccatcgccgaggcagtggcggtgtgcgcggcggcgtacgagaagaagaccgggtggggcagcgacatcgggtgggtgtacggcacggtgacggaggacgtggtgacggggtaccggatgcacatcaaggggtggcgctcccgctactgctccatctacccgcacgccttcatcggcaccgcccccatcaacctgacggagcggctgttccaggtgctccgctggtccacgggctccctggagatcttcttctcccggaacaacccgctgttcgggagcacgttcctgcacccgctgcagcgcgtggcgtacatcaacatcaccacgtacccgttcacggcgatcttcctcatcttctacaccacggtgccggcgctgtcgttcgtgacggggcacttcatcgtgcagcggcccaccaccatgttctacgtgtacctggccatcgtgctgggcacgctgctgatcctggccgtcctggaggtgaagtgggcgggcgtgaccgtgttcgagtggttccggaacgggcagttctggatgacggccagctgctccgcgtacctggccgccgtgtgccaggtgctggtgaaggtggtgttccggcgggacatctcgttcaagctgacgtcgaagcagcccgcgggggacgagaagaaggacccctacgccgacctgtacgtggtgcgctggacctggctcatggtgacgcccatcatcatcatcctcgtcaacatcatcggctccgccgtggccttcgccaaggtgctggacggcgagtggacgcactggctaaaggtggccggcggcgtcttcttcaacttctgggtgctgttccacctctaccccttcgccaagggcatcctggggaggcacggcaagacccccgtggtggtgctcgtctggtgggccttcaccttcgtcatcaccgccgtgctgtacatcaacataccccacatccacggccccggcggcaagcacggcggcgcgatcggaaagcacggcgccgcccaccatggcaagaagttcgacggctactacctctggccgtgaaggatcgatcgatcggagcagccaacccagcatcgtcatgcatgcacatacctgccctgatgatgatatggtgagccgcgaaggtgaagagagtacgttcccgttcatccatcgtccttagtgatgcccggtgattagttgatgatgaagagtgaagaagactacacaccaacccacacacatttgatcgacccagcgacgtacccgccaattttttttcttcttctttcctttttgcccgcccccttttcttcattctttttcttctagttttgtccagaaattgaaagatgtgttaagatgtgttgatttgatttagttttttaattaccgtacccgtggtaattaaattatgtacctacttatatatacattacgccgaagaggaaggatcactttgtataagaaaagagagaaatgggggatgtaggagggggggctaggggcccggctttggggtggtattcttttagcatatggaac

SEQ ID NO: 118282 - DNA, 292 bp, Zea Mays
ttaaactatttcttagtctacaatatgaatttgatttccctagaagtaataaggtagggattattctactatatgattaaaagcttgtctaaaagaactaaaataaataaagaaatatataaaatatgtttttgcgcattatgctgaagttctatatgtgtatccaaattaagtgtttgaactttaaacttgtgttgatttgaaatttaaatggaaaggaaaatagaaaataagaaataaaagaagggaagaactaagaaaaatactacataaaatagaataaaaatcagaa

SEQ ID NO: 118283 - DNA, 495 bp, Zea Mays
atggcggtggacaagtgcgtcaagggcgtcctcggcggcgggcatgggcgaagctcccggaacatggcggtggagcactacgacgggcaggccaagtccttcaccgctggcctgctggacttccgggccaaggacgtggtgtggtcctggtctgacgccggcgcggccgcgtcgctggacgacaagcgcgtgctccacgccatcgccatggaggacgagcgctccgtctgcgtcatcaaccagtacgacgacctcggcttcctcgacctccggagcggtgccggcggcgtcaggtggagctcccggagcaagctgaggaaccggaaggtgcccggcgaggagagctgctacccgaagctcgccacgcacggcggccagctcttctcgtccatgaacgacagcatctccgtgttcagcaacctggggtgtgtttggagctcgtacccaagctatgcactccacatgttcgatgaaatgtttgagagactagactag

SEQ ID NO: 118284 - DNA, 101 bp, Zea Mays
ccccaaatccacacatcaactgactggatgccgctaatgctgctggaggttcaatcggggaacaataggatccagagcggtggggaagtggtaagcctctc

SEQ ID NO: 118285 - DNA, 832 bp, Zea Mays
atggactacaccaacgccatccacatcatcccacccatggcctccgacgcacggaccaacgcggcggcgtccccgggcgaggaccccgacatctgggccaccgagaaagactaccgccagtggagtgccgaccagggctacaatgaccggaacccctcctcgcggacggggagcgagcagccgctgcctggtaagaaggctcacggcgggggcggcagcagcgatggtggcggcgggagcagcacaagcaagtcagcgccatcgcaagatgttcttcaagaccaagctctgttgcaagttctgggccaggacctgcccctacgtcaccaattgcaacttcgcccatggcatggaggagctctgcaagccgccgcccaactggcaggagattgtggccacccacgaggatgccaccacgaagcagggagaggagcaccagatccccattatgacatccagaagtgtcatcgctggagacgatggcggcggcggcagggcatacaagggtcgccactgcaagaagttctacactgaagagggctgcccctatggcgacacatgcaccttcctgcacgatgagcagtccaaggcacgggagagcgtcgccatcagtctcttgccgacgattggtggtggcggatacaatgctgcctctgccagcggatcgatggcgcaaaattcttccaattggaagacaaggatctgtaacaagtgggagatgactggatactgtccgtttgggagcaaatgccactttgctcatggatctactgtaatacccaatttgtaaacaatctaaagagagtagatctcattatgtgtttttgcccta

SEQ ID NO: 118286 - DNA, 1172 bp, Zea Mays
agggcaggcagaatattacgcacgcgtgttggagtatttttaaaggatctcacgttacatgtggaataacatcaacaaagttgggggggaaatgtcgagaggcaatttttttttggcacagagaaaaaagaagttgcaataggcggagcggagagaagctttagataccttttcggccacccatcatatactctgtctgctgttcttccctataaattcgtcgacctctccatatcacagagagatagagagagagagagatagacaggagagagagagagaggggaagagagagagagagagagagagagatagatgtggtaactcaagaactgttcttatgcatgcagcagccataagcattgctactagcgtctcctgcacgtgctgtgtcgtttccagggtttcatgcggggcgaagcagctggtctctgccgcctgaacgccgccggaatctgcgaggcctccccgagctgcgtgcgtcgtcggataaggcagccggcacggcaatgccggttccgcttgctccgtacccagctcctccggcgccattcacgccgcccaatggggcccagagccagctcgtctgcaccgggtgccggaacctcctcatgtacccagctggtgcgacgtcggtctgctgcgccgtctgcagcaccgtcaccgccgtgccggctccaggaactgagatggcgcagctagtgtgcggaggatgccacaccctcctcatgtacatacgcggcgcgacgagcgtgcagtgttcttgctgccacactgtgaacctggctatggaaggtaaatcctgtgacttcgattcctgtacgaaagaagaagaagaagaaaaaaaaatcctgctttctgtatattgtgtggtctggaaagctcagcaaccttccaatagcattttaacgtcgtagaattggcctatcttggagtcgtaatcgttgaaattggctattatccagagagatggaaaagcttgacagggatgtcctagagtcactggactggagctgaatgaatatctcgtagagatgcttcagtgtgccgagcacagcatttactggaactttcctacaaggaaggattttagtcccatgaccatgaccacccgttgaattcatcaagttgcgaactttgtcaaaaagaaagggaaaaataaacatcacgtt

SEQ ID NO: 118287 - DNA, 1384 bp, Zea Mays
agggcaggcagaatattacgcacgcgtgttggagtatttttaaaggatctcacgttacatgtggaataacatcaacaaagttgggggggaaatgtcgagaggcaatttttttttggcacagagaaaaaagaagttgcaataggcggagcggagagaagctttagataccttttcggccacccatcatatactctgtctgctgttcttccctataaattcgtcgacctctccatatcacagagagatagagagagagagagatagacaggagagagagagagaggggaagagagagagagagagagagagagatagatgtggtaactcaagaactgttcttatgcatgcagcagccataagcattgctactagggtttcatgcggggcgaagcagctggtctctgccgcctgaacgccgccggaatctgcgaggcctccccgagctgcgtgcgtcgtcggataaggcagccggcacggcaatgccggttccgcttgctccgtacccagctcctccggcgccattcacgccgcccaatggggcccagagccagctcgtctgcaccgggtgccggaacctcctcatgtacccagctggtgcgacgtcggtctgctgcgccgtctgcagcaccgtcaccgccgtgccggctccaggaactgagatggcgcagctagtgtgcggaggatgccacaccctcctcatgtacatacgcggcgcgacgagcgtgcagtgttcttgctgccacactgtgaacctggctatggaagcaaatcaagtcgcgcatgtgaactgcgggaactgccgcatgctgctcatgtaccagtacggggctcggtccgtgaagtgcgcggtctgcagttttgtgacatcggttggagtaagtactcaaagcatcctttttcagaaaaggatgcaattaacaaataatgttttttgttgtagaagactaccattgtttcgctgctattcttactgtaaaacaacttgtgtttctcatgagaaacagagaactaaccgccaagtttcactctactcagacctcacctggtgcagagcagaagcccagcagctgagctgatagtgtccctgaaagtgctgtgagaccacctatgaaaaggatgctttgagtgcacatgtatagagttcttccctgaagcgattctttcactttcttttcttttgttttcttttgttttcttttcttttttggttcctcctcaccatctccaccccacccgtccacttctgcgttccttcgatggatctcgcgagcccgcggaataaatgagagttttggatatatagctagggcttaacctcgtcgacttgtctgtaaaatcgaatgagacatatatataaacctatgttgttttccttgtttctgaa

SEQ ID NO: 118288 - DNA, 1269 bp, Zea Mays
agggcaggcagaatattacgcacgcgtgttggagtatttttaaaggatctcacgttacatgtggaataacatcaacaaagttgggggggaaatgtcgagaggcaatttttttttggcacagagaaaaaagaagttgcaataggcggagcggagagaagctttagataccttttcggccacccatcatatactctgtctgctgttcttccctataaattcgtcgacctctccatatcacagagagatagagagagagagagatagacaggagagagagagagaggggaagagagagagagagagagagagagatagatgtggtaactcaagaactgttcttatgcatgcagcagccataagcattgctactagggtttcatgcggggcgaagcagctggtctctgccgcctgaacgccgccggaatctgcgaggcctccccgagctgcgtgcgtcgtcggataaggcagccggcacggcaatgccggttccgcttgctccgtacccagctcctccggcgccattcacgccgcccaatggggcccagagccagctcgtctgcaccgggtgccggaacctcctcatgtacccagctggtgcgacgtcggtctgctgcgccgtctgcagcaccgtcaccgccgtgccggctccaggaactgagatggcgcagctagtgtgcggaggatgccacaccctcctcatgtacatacgcggcgcgacgagcgtgcagtgttcttgctgccacactgtgaacctggctatggaagcaaatcaagtcgcgcatgtgaactgcgggaactgccgcatgctgctcatgtaccagtacggggctcggtccgtgaagtgcgcggtctgcagttttgtgacatcggttggaacctcacctggtgcagagcagaagcccagcagctgagctgatagtgtccctgaaagtgctgtgagaccacctatgaaaaggatgctttgagtgcacatgtatagagttcttccctgaagcgattctttcactttcttttcttttgttttcttttgttttcttttcttttttggttcctcctcaccatctccaccccacccgtccacttctgcgttccttcgatggatctcgcgagcccgcggaataaatgagagttttggatatatagctagggcttaacctcgtcgacttgtctgtaaaatcgaatgagacatatatataaacctatgttgttttccttgtttctgaatttctggatgcttctctggctgctctttgatctgaacaatttgta

SEQ ID NO: 118289 - DNA, 1626 bp, Zea Mays
gattggctgggaactacatcttggaattccttttttttctctctctcactcgatttctttgtttgattattggccatggtgggtgattcctcgcctgttttatctcgaaactggattagctgcgagtttttttttcttctttcaacccgctgcgttattctaagctcggtctactcgttgcatcaggccaacaatggcaagtggcttccatgaacatggctgtccatgaaaaatcccccgtatgcatgctcggtctaatctcctcaagctagcgaaacgaaatttcctaaaagccggtctggtcctcgaatacagcttgttgcctgagccgctgggagtcctatggagtagtagagttcttcaccttcttctgcgcgcgattactgttagccggcttgaggagaagctggaacgatcttgacgtgcattcagagaatcgatttttccccgtctcccaaggactcctcgtccattagtaatcgattttactgctactgaacagctctttgcgtgcattttctccgagatttctgtggatttcaaatttcaatgcaactgaagccactctgtctctctccctcgctctgtttcgtcagcgtctcctgcacgtgctgtgtcgtttccagggtttcatgcggggcgaagcagctggtctctgccgcctgaacgccgccggaatctgcgaggcctccccgagctgcgtgcgtcgtcggataaggcagccggcacggcaatgccggttccgcttgctccgtacccagctcctccggcgccattcacgccgcccaatggggcccagagccagctcgtctgcaccgggtgccggaacctcctcatgtacccagctggtgcgacgtcggtctgctgcgccgtctgcagcaccgtcaccgccgtgccggctccaggaactgagatggcgcagctagtgtgcggaggatgccacaccctcctcatgtacatacgcggcgcgacgagcgtgcagtgttcttgctgccacactgtgaacctggctatggaagcaaatcaagtcgcgcatgtgaactgcgggaactgccgcatgctgctcatgtaccagtacggggctcggtccgtgaagtgcgcggtctgcagttttgtgacatcggttggagtaagtactcaaagcatcctttttcagaaaaggatgcaattaacaaataatgttttttgttgtagaagactaccattgtttcgctgctattcttactgtaaaacaacttgtgtttctcatgagaaacagagaactaaccgccaagtttcactctactcagacctcacctggtgcagagcagaagcccagcagctgagctgatagtgtccctgaaagtgctgtgagaccacctatgaaaaggatgctttgagtgcacatgtatagagttcttccctgaagcgattctttcactttcttttcttttgttttcttttgttttcttttcttttttggttcctcctcaccatctccaccccacccgtccacttctgcgttccttcgatggatctcgcgagcccgcggaataaatgagagttttggatatatagctagggcttaacctcgtcgacttgtctgtaaaatcgaatgagacatatatataaacctatgttgttttc

SEQ ID NO: 118290 - DNA, 439 bp, Zea Mays
taaaaggtagacgcaattaacatttctgacgtgtcaggatcaaagtacaggcaaaatcagccagatctattcttgccatcatttcatcacccaacggagatgacgatggcaaatacaactcgctggtttactttttctacaatattttgtctctattaattacaattgcagcagtctgaacagctaggttaaagccgcaacgaacagaatagatgttacttcgcagaaccattcaccattacttccacatgacgctttcagcagtttcatgttctgaaactgaatcagtagagcgcatcagatctaacaacaattacaggaaagctattgaactttaaaaaaccatgagccagttctcatgtcacaatatcaggggcagaatgtttttggttcctgaaccgatgaatttcgacgttgtcagaagttccgctatcgtact

SEQ ID NO: 118291 - DNA, 102 bp, Zea Mays
tcctcgagcaggtcagccgtcgcctccctccgttccctcagcctcctcctccctcttttcttgatccatggaaaggtagtggaggggcacggctggccacat

SEQ ID NO: 118292 - DNA, 838 bp, Zea Mays
gccgccgatcctgactcctcgtcggcgccgtcgcgactccacctttgggccgctgtcgcggttcgtcggtcgccgtcgcgtctcctcgtcgggtgtcgtcgcgcctccacttttggccgccgtcgcggtcttgcctcttcactcagccgtcgtcgcggccttccacgtctgccaccggcctctactccgcgatctctggtggcgcgcgtctccaccggcggccagatttttttttctttcctccccgctcggaccgtcccgccccggctgtctctgctccgcccggttgtcttctctcaccggcgtccggacaagggcggcgccaaacgccaccacaaggttcagcgcgtcaacacgcaggctctgctccgcctggatctcgcgccccggcctctgctcagcgatctcacgctcaggcccgcaagctctgctctgtcacatcgtccagacgaggctttcttcatcctcggtcaagatccagccctctgctccgccgatggctcctgtctgcatcaagctggtcctctggtcagtttggatactgctgggtttttccttccctacaagtttgattgaaacaaccttcagtgctagtataacatatcacacactaatacaattattatcaacatcactttgaatggtcaaaattaccatgaacggtccttctgtgtagaaactgctttgcgaggtcatggtcttgcttttcatttgattgatgatctacctgtgcctactgcaaataacattaatgcttctgaaatcaagacttagacaattaatgatggaaatgtgatggctgatattgttaacagtgtcaagccatccatgattatga

SEQ ID NO: 118293 - DNA, 891 bp, Zea Mays
atggagctattccccgacggggccttcgtgcggctgcagagccgcgcgagaagaacgtacgtccacgccgacggggactgggcgggggtctccctacgcccgaacggacccgtcccacccctgaacgcggtgtggcgggtggagcatttggtctggtcggaccagggggacacattcgtcctcctccagaacgccgcctacggccgctacctctccttctcgatccaggaggcgccgcccggccaccgtggccgctgcaccacccagctcgaccgcaacgagccccacgcgctgagcccctcctccccgtggatgtggagggtccagaggttggacccgcccgaccatggctacgtccgcctgcgctacttcggctgcgacctccgcgccaacggtaggcaccgcacctggaacacctgcgtcaccgtcgacgtcaaccgaggccgcagggtctccaccatgatgcagtggacggcccacgtcgtcgcagcgagctcggtaccgccgccccttccagcctcacctcagcctcagataggagtctgctgtggcctgttgttctggcggcgcaccggggtgcatcagcacccgccgcggacgatccggcacgtgcgggcgagcgacgaaggggacttcgaccagaatcctcacaactggccctcgttcgtttcctacgaccactccgtgatgaacctgaggatccagctggggcagctccaggacgactgggacggggagatgttcggcttcacgctgtgcatgcggcccggctcgcatggccggctaacgccactggtcaccgacctgcctcgcagcctagatcccatggacatcgtcgtcttcaggaccggatcaccaggtgactactcagcgtgcacttgttacagtttc

SEQ ID NO: 118294 - DNA, 1713 bp, Zea Mays
atgccctcggccccggccgcccccgccccctgccccggccgcagatgcccctgccgcgcccggccacaactgcggacgcccccaccacggacgcccccgccctcggccccggtcgcccctaccgcatccggccgcccccgccgcggacacccccgccaacaagtacgccagtttacaggccgtttaggtaaacgtgaacttatttttgacactttctgtgtaacatctccggccttcatgatgaacgtgaacttatttttaggacaacctcttactcatgatgaagcccttctttcaagggacatccaccttctccaggatggtgtatcctctggtaggacactagatttggcatctagtcttgatgtgggttctgctgcaccccaagcctcaggggatgcacctccagatgactataatttgagatatgtgctgacaatcacctttcaattcccttatgagacgcaccttcaggacagtgttgctactatggcccatcaatatgtgtgtagtgttgtttctactgtgcaaagggtgtcaatggctatatctccctccgaatctggtctaaatgctgggcaaaggatgctttccggcttccctgaagctgccacacttgctagatgggtttgccagagttatcactaccatctaggtgtggaaaccctcttcgctagtggagatgaggaccctgttccggaggctccagtggatggtcaacaacccccttttgccttttttggcttagatcagccagtgcgtgatgttgggtttgatcttaactttccaccaattctggaagatggggagctcatttacagcctgacaacaatgcaaaggggggctattggcgggctagattttcaggtagttccccaaggggaagatcagataatggaagaggctcagcaacatggcaatcaggtgggagcagacattgacccatttcacaataatttggagatcaactacatgtttgcacctaaaagacagcctgacccagtattccaaagtcatgtttcgagaatgaaaaatgctcaattctataggctttgggctaaatatttttctcctacttgctctcgatctattcccatccgcacgatccggatcggacattcacgagatcgtcttcttccccaggctctgagaatagcagtaccgtgcagccgccaagatgagcacgccggcgcgagcactgcggcagaactgggtgcacggcgagggattcctgagtaccccgggccgctcccatcccgcagcgacgtccgccgaacaggagtccgagcaacaccggagatccccaccctgccagatccgcagccgttccttggctccacggcaaaatctccaatcgatggtggcggcttcaacttccctgccaatccggccacgggcgttctacccgcaaccgcacgaagcttccaggaacgtcacagacccccgaccaccaggcgcggacgagggcgatcctggcagcacaccctgctcttggttctctctccttcctggcgtccatggtttggttcggcgagatggatgggggagcgggagcggcagggctatataggggcagacacagttaccgtcaatcccgatcatggcggaggtcgtcgcgcccagaaatccggcgaaggttgttgcgcgaacagcgagaatcgcggcggactggagcttccggcaaaacggtcccacccatcattgagcgaatag

SEQ ID NO: 118295 - DNA, 1453 bp, Zea Mays
gtggaagacacactgtcgctctcctcacgtgcgagcgccgccacctcatcttcccatcgaactccgccgaccccgcatcttcccatacgagctgtgtttctccaagttcgctgttggccatatcgacgtcgtcatcctcgatccagacgagtgtgtgtgccatctccacgggtcttcgacggatttagattgcattgtaccaaggataagaaaaatggataagcgaactaggaataggagagaagaggaggatgaggagttaatgctctttcttttccctgatctttatctaattactaatggagggagagagaaaagagcaaggcatgcttctattctacctggcaaggagagacttaaagagattcttgaagggcatgagaagaactgtcttgtcgcattccgtatggagcctcgtatattcaaagatatagcaacatttcttagagaagaacacatcctacgtgacacaaggggtgttaccgtggaagaaaaactaggaatgttccttttcatgttgtcccataatgctagttatgaggatttacaacatgaattcaaacataacgcaagaatgtttggaagaggatctcctaggatgaacttgatccaagctgcaactatgaaaaaaatatcccccagatctactgctaacaagcgcaagaagagaacatcaccaaaagttcgtcgtcttagagcaaactggaatagtggactagaaaagggtttagttgaaattcttcaagaccacaacaatgactgttataagggccaaaatgggtggtcattggaagcatggaatagaattgtcaagttattccatgaaaaattctcttatgtcacatttacaaaatgccaaatccaagataaagagaaagagttaaagagagactacaaggctcttaaagaggcaagacaacaaagcgggagtaacgagagacttaagaagtttcggactaaatctttcccactatttgaggctttaggagagctatatgatggaaatattgctgagggaaccatgaattttacttctattgagccttctcgacctcctgtcacacaaccttgtcaagatgacgagctcagagtatttgatccaccagcccctgcatcattgagcaaaagggcaaaaaatgttggtactggtaattcaagaacaagaattaacaagcgtacacaagatgggaatgtggttgagatgatgggagggtttctagaaatgaaagaaaaacaagctgaggcggatgaaagggccacaactaatgcaaatgaggatgatttccctattcaaacatgcattgctattatggatggaatggaagagttttctgatgatgagaaggttgatgcttatgatgtgtttaaggatgcccaaaaccgggccattttcatgactgccaaagatgctacgcgcataaaatggttgaggaagaagattgcaagaacatga

SEQ ID NO: 118296 - DNA, 112 bp, Zea Mays
ctttggggggtccggtgcggttgcaccccggcacctccctaggtccgtgatgattgagtttggtacctcaaatcgatggttgatgttggtgactaatgatgtgtttggtttg

SEQ ID NO: 118297 - DNA, 345 bp, Zea Mays
atgggccgccatacatgttggccgccggccgccgccgttagggccgcagcgatctgcgtgcttctgctgctgccggccgcggccgcgcaggcgcctgtggaagcagcggccgcgatcgaggcgcaaggcgacggcaatggcaccacacgaggcggaggcggcggcagcggcgcacgagggggaggaggtggtggcggtgggggcacgcggaagctggtgagcggcatcgactgccagatctgcgaggcgacgtgccgggtgaagtgcctcatcaacaacctcttccagtggggcgggtgctaccagcgctgcaagaccgacaactgcaacgactggtgcaggtag

SEQ ID NO: 118298 - DNA, 486 bp, Zea Mays
atgatgggcgatgcatgtggaggatggaagggagcagcgagatttggagcgtggatggcgggtgcggttcctgttgttgccagcgccctcggtgtagtggcccttggcccagttgttgtcggtgccggactggaagacgaaattgtcggggcggaagatctggccgaaggggcccgagcgcatggagtccatggtgtcgggctcgaggtccatcaggacggcgcgcgggacgaagcggccgccgctggcctcgttgtagtagacgttgatgcgctcgagctggaggtcggagtcgccggcgtactttccggtgtggtcgatgttgtgctcgtcgcatatcaggcatcacggaggtgggattcgtgggggatgggggcgagagagaggaccagggggaagggcggtttctgtgaggagtcgcggacgcgcggaaccgaggaggtggcgacgcagttagggggagagaaggaggtggtggcggcgtag

SEQ ID NO: 118299 - DNA, 1647 bp, Zea Mays
atgagctgctccatcgcagctctcgtggtttccctcttcctttcactgaaccaaatcatatcgtgccgtgcggctggcgcagacgacgatggcgcagcacgcagcctcgcctcctgcctcatctcccacggcgtcaccaacttcacgctcccgacgtcccggagctacgccggggtcctcaactcctccatcagcaacctccggttcgcgctcccggacgtcggcaagccggccgccgtggtgctcccgggctccaggcaggacctgcagcgctccgtgctctgcgcgcggagcagctcgctggcggtccgcgtgcgcagcggcgggcacagctacgagggcctctcgtacacctcggagaaccgggtgccgttcgtggtgatcgacgtcgcgaacctgaaccgggtccgcgtggaccggggctcggccacggcctgggccgaggccggcgcgacgctgggcgaactgtaccacgccgtgggccggtccggccggtcgctggcgttctcggcgggctcctgctcgaccatcggcctgggcggcaccgtctccggcggcggcttcgggctgctgtcgcgcaggttcgggctggcggccgacaacgtgctggacgcggtgctcgtcgacgcggacggcagggcgctcgaccgggccgcgatgggccgcgacgtcttctgggccatccgcggcggcggcggcgggagctggggcgtagtgtacgcctggaagctccggctcgtcccggtccctcgcaacgtcaccgtgctctcggtgggccggaccggcccggtcgagctcgtcgccgggctcgtccacaggtggcagctcgtggcgcccagcctgcccgatgacttctacctctccgtgtacctcccgaccggtccgtcatcgctggacggcaacgtgtccgtctcgttctccggccaggtgcttggaccgaagcaccgtgccctgtcagcgctgcgccaaagcttcccagagctcgggctggccgagtcggagctcggcgaggcgagctggctggatgcgaccgcccagttcgccggcctcgacacggcggccgaccttccgaaccgccagctagggtcgaggcagtacttcaagggcaagtccgactacgtgcggtcgccgatctcgcggcgcgccatggcggacatcgtccggtacctttccacggggcccccgcggcaggggcaggggcaggggggcgggtacgtgatcctggacccctacggcggcgccatggcccggatcgcgagcggcgacacgccgttcccgcaccgcgccgggaccctgtacggcgtgcagtaccaggtgtactgggacgaggacggcgagctcggtggccgcgccgccgccgccgccggggagttctgtgtgcggtggctccggtcgctctacgcgttcatggcgccccacgtgtccaagggcccccgtgccgcgtacgtcaactacctggacctcgacctcggcgccaacaactggaccgccccggcgggagggtcgtcgaaggcggcggtggcgcgcgcgcgctcgtcgtggggcgccgcgtacttcggcgacaacttcgaccgcctggtcggggcaaagacggcggtggaccccggcaatgtgttcaacaatgcacaaagcattccccctctgtag

SEQ ID NO: 118300 - DNA, 1902 bp, Zea Mays
aagtccctgatccggtccgatgatcccgagtggttcttcttcgcccccaaggaccgcaagtaccccaacggtagcaggtctaacagggccaccgaggcgggatactggaaggctactggcaaggacaggataatcaagtccaagggcgacaagcgcaagcagcataccatcggtatgaagaagaccctcgtcttccaccgcggtcgtgcccccaagggcgagcgcacggggtggattatgcacgagtaccgcaccaccgagcctgagttcgagtccggcgagcagggtggttatgttctttatcgcctcttccgtaagcaagaggagaaaactgagcgctccagcccagaggaagtggatagaagtggctactcacctactccttctcgttcttcacctgacaacctagaggcgaatgaggaagctaatacaccattaaataaggaatctccagaatctgctctgcatgaaagcccgattgagctgccaaaatctgttgaaaccaatggtggttcaatgacaaggtggctggcggacagaaatgataacttgatggttactgcaccagatgtttcccatatacctttccacggacatgctgctggtgtagctaaggttgatccttctgttggtgcttcaggccacttagttaatccccacaatggaaatgatgattataacaaatttgtgtctgatttcactcccattctaccacttgaaaatgcattcttcactgatatacaacaaggagcttttggttttgatggcatcatgaatcctcttgatccccttgatgctttcttgaatcaaacacttgttgatcctgatgaacattcatcaacaacatcaaaagttcagtatgattctgacattccaacagaatttgagaaccattggaatatgaaggttgagcctcaagatgatcaatgctggtgggcaaacataggatttgagccagacgaaccaaatcctctgcttccttgtgacaccactgaccaagacatactttctgttgactctggtgctgattccttcaatgagcttttcaatagtatggaagagactggaattattgttaggcctcaacagttggactccactgtgcaaccaaaccatgtgttcgctagccagggcaatgcagcacggaggctgcggctacaggttgagtctagggagatcataactaaagatgagagtgaagatgaagtatcatgtgttctaactccagactgtttgaacgattctgttgaggagtccactgcagagaaggatgtggcttctgatggggatgaggctgagtcaacagggattgttattagaagccatcaccctgctccaagatcaagctcagagagttcattcactcaacagggaactgctatgcaaaggctgcggctacagtcaggccttaacaaaggccagcgtcctagtactgatgattcatcaagctgcattatagacgaaccaggaagtcagcacaaagcagaaaaagcagagattgaagaggatgcgagtacaaacctcgctggaagtgctgatgatctacctggtaatatccatgatgatgagcaaaagaacatccctgaacatggtgctgaaatgacttctccagaagccaaatctgttctgaggttgcggaagacttctgaggaaggcaacaaggatgtcaagcaggagagttgtctcgagccacacgtgagagcaccaatgcagaagggaggcttccaatcatacatcatctggctggttcttccggtggctctgctcctgcttctctgtgttgggacatatggatggaattttcggttcctgaacccagttactgatggcttgttgatctgttggcgtgttcgaattcgtttggacatgccacagcatggtctgaggggatacaaggactga

SEQ ID NO: 118301 - DNA, 139 bp, Zea Mays
tatttttattttatattatgtaggattgtcaccgcctcttttcttttaggttattttcaaaatccttcaattgaacatttttgttaaaccctagtttgatctttttagcatgttcatggtaacatggctagtattaaat

SEQ ID NO: 118302 - DNA, 2901 bp, Zea Mays
agcaaagcacctccgactccaagtcgcgagagccttctcattcgtcttcctcctcttccacccatcctgcctgctcacttccgttccgtagtccagctagatccccgggcaaccgatccaccgagaagcttgtggttgtggcggcggcggagagggaagcgggaggtcggaggtaggcgcggatgccactgttgtgccggcgccggcggggccggtgatgcccgcttgagctgggccaccgtgcgtcggaggtggacgagggagcgaggcggcgccagaccgaggttgcgtcgggctcgatttctactgggctgctgtctgctgagtttacggaagtgtttggccctagaagagttgaagataaggagtggagctaggtttaaactctggtgacttggttgttgcgtgcaacgaatcaactatgctgagtttttctgtagagtaacagaaattggatcaattcaagtagatggaggtgaattcctctggcgaggaaactgtggtaaaggtaagaaagccgtacacaataacgaagcagcgggagcggtggacagaggctgaacacaaacggttccttgaagccttgaaactttatggcagagcatggcagcgcatagaagagcatgttgggacaaagacagccgtgcagatcagaagtcacgctcaaaagttcttcactaagttggaaaaggaagctatgaacaatggtacttctccggggcaagcccatgacattgacatacctccaccacggcctaaaagaaagccaaacagtccatatcctcgaaaaagttgtctcagctccgagacacaaaccaaagaacttccaaatgacaagtcaacaaaaccaaatatgcccttgagcaatgggcatgtaaaaatggtaggcgatgcatctcttcagaattttcaaaggaaggagttgtctgaaaaaggaagtcgctcggaagttcttaatctcttccgtgatgccccatctgcatcattttcttcagttaacaaaagctcttcaaatcatggggcacccaggaggaccgaggcaagtaaaacagaaagccgagatatgtccatcatggaaaataattcttttaaccccaacacccaagaggatgtaaaggtgatcagtgatcaggaaatggaaaggcttaatggtatccagatcagatctaaatgtgaacattctcatgaggggtatttggacatctcaacgcaacaaatgaagctaatgccaaagtctgtggagacaacatatgtggatgaacaaactgcaagagcttcacacaccctagcagagagcgacgggacagctagcattccagtgactgtacctgaaggaactcatcctgatcaaacaagtgatcaagtgggaatcaatggaagcatgaacccatgcatccatccaatggtttctgctgacccaaaatttggtagtagtgccacaccacagactttccctcataattatgcggcctttgctccaatgatgcagtgcaactgtaaccaagatacgtacaggtcattcaccaacatgtcatccaccttctccagcatgcttgtttccacgttgttgtcaaaccctgccatccatgcagccgccaggctcgcagcatcatactggccagcagctgaaggtaacactcctattgatccgaatcaagaaaaccctgcagatggcgtccaaggaaggaacataggctctcctccaagcatggtttctattgtagcagctacagttgctgcagcatctgcatggtgggcaacacaaggtcttctccctttcttcgctccacccgtggcttttccatttgtaccagctcctagtgctgcctttcccacagttgatgttccacgaccttcagagaaagacagagattgcccagctgaaaatgcacagattgaatgccaagaagctcgaaaacaggtacagttcgaaggtttaagaattgctgcttcttcagagtctgatgggagtggaaaaggcgaggtgtctctccatacggagttaaagctatctcctgcccagaatgctgatgccacacctaccacaggagctggcacaaatgatgcattcaggaataagaaaaagcaggatcgctcttcatgcggttctaacacaccttcaagtagtgatgtagatgcgggcaatgttcctgaggaggacaatgctaatgagaaggcgaagcaagcctcctgcagcaactcttcagctggtgacactaaccaccgcagatttagaagcaatggaagcacaagtgattcatggaaggaagtttccgaagagggtcgtctggctttcgatgcgctgttcagtagggaaaagcttccgcaaagcttttctcccccacaagcagtagactcgaaggaggttgccaaggaggaggaagatgaagtgaccacagtggcagttgacctcaacaagaatgccacaagcattgatcatgatgacctcgacacaatggatgagcccagggcttcctttcccaatgaattgtcgcacctgaagctgaaatcgcgccgtacaggcttcaaaccatacaagagatgttctgtggaagcgaaggaaaaccgggtgccggctagcgacatggttggtaccaagaggattcgtcttgatagcgaagcatccacataattgatttcttcaaagttatatttacatctaagctactataggacttcagatcttgcaatgcagtgcttcattaaaactcaatctgttgtgtgctgtattttaatgcttgtcaagcagcccgctagactgctttaaaaccttatctcgtagagtctgatttaagcatcatgcaactatcaaacttttttttttggtcaaaatgtattttccttatgttttatatttttggaaaggaaaataattgaaatattatttattttgaaggctca

SEQ ID NO: 118303 - DNA, 1921 bp, Zea Mays
ctcctccaccctactggcgatgtgctccttggtgacgacgcccgactcatcggcctcggccgggagcccgaccttccagacgtcgcagatgtacgcctggttgacgaactggtcggtgaagtagggccaggcgaggaagggcaccccgttgcggacgccctccatggtcgagttccagccgcagtgcgagacgaagcacgcgaccgcagggtgcgccaacacccgctgctgcggcgaccacgccaccaccatgccgcggccagtcgcgctgacgcggtcgaggaagccgtcggggtagccgtggatgccgccgccgccgaggacgatgtcagggcgcacgacccacaggaacggccgaccagagagctccagccccagtgccagctcccggaactggcgcgcgtcgaacatggtgtggctgccgaaggccacgtacacgacggacctcgccgcctgcgcgttgagccaggccatgcacgcgccgtcctcgggccgccagaaatgccccaccaccgctgccgcctgcttgccaccactgccacggcgacggcgctcgcccgtgaggagagggccgactgggacgatccgcgggaaccgcgcgaaggtcgccggctcggcgtcgtggaaagagttgcagaggatgaagtcgcactcttccaccgcgcggacgccggcgcggaggtaccggaacagcgcctcctgcccgtcgtggttgcctatgcagttccacgcgagcttgtcgatgctgagaaggctcgccagcacggcggccgaagccggccagatggcggcggacctgacgccggtcctccgcgccacgtcgagcgcccacgccccgacgttgtagtccgccacgacgcaggtgatgggcccgccctccgcgccgccgtcgccgtcgcggctgcgcctgatgaggtcctccacccgaggcgccatgtgctccgccgtgagcagggtcagcctgacgatgtcgttccggtcctccccgggccccatgccgtccggcaccgccaccagccggatccccctccggcccagcagcgtcggcgactccgactccggcatggcggcggccacgacgcggcggtggttgaactcggagttggcgaaggtgacggtgaagccccggtcgaccagcgcgtgggcgagctccaggaggggtatcacgtggccctgcgccgggtaggggatgacgagcgcatgtggggacggaggcgccatggcgattagttcggtcttgcgcacggccggtatcttttgctacttttacgcactcactcactgaagctgatgatgttaggctttagctgagatgttagaacatctccaacaatgccgtttaaattgaaatatgatgttataagtaggaaaaactacttttataaaatttggttaaaaaagttatagatcactctctcaattgtctcaaatatactatgacttataaactagatttgagactttaccgttgcatcggaatgatttgttggtaccctaagttttataaaatatacttatttttaaattatagaacatatttatagaccacaagatgctcttacttatatgaaatgaaaaaggcgtacggattcccccttgttgcctcaaactggccaatcgcgtgtcttgtagtacgtacagtactagttttgggatgaattcgacaaggtatatcgtatatggcagcacattgcttaggtaggttgcatatgccaattgccaagctagcactcgtcatcccctggccgtggctgcagcggtgcagcctgtatgcatcatcaggcctgccgcctgcacatgtaaatttgtttccggagtcagtggcatgactattgtcacgatatcgttttagttttcggagttatcgtttttttattttacttttaaagaaaatataaaaacgaaaatagttttagtcttt

SEQ ID NO: 118304 - DNA, 1467 bp, Zea Mays
aacataggcgcccccccaaaacaaacccttgttccggtcctttctctctctttatatatagaccccacaccacctcccctcttctccctcctccctcattatctctctctcccaagctctttctaccgtttctcttctagtcgagcggggaaaacaaagaaacaaaaaagcaaggaagcagctgcacgcacgccgtcgcctggccggccatggggttcccgtcggtgtgctactgcgtgatcctgccgcagccgctcatcctggtgctgcagctgctggacttcctgcggcacgccgtgctgctctgcctctcctcgctgggcctcgcggcgccgccggccgccgacgaccatccggcctacgcctacgcggcgccgccgccgccgccgtcggacctctgggcactgcagccgtcgtccctgcagcagcagcagcagcaggcggcggcggcggccctggcgccgccgcccacgccggcagccatcaaggcccgcctgcccgccgtccggtacgccgacctgctcggggcccgccgcgccccgccgggcccggccgtctgcgccgtgtgcctcggcgcgctccaggcgcggcaccgcgtccgcgagctcggcaactgcgcgcacgccttccacaaggcctgcatcgacaagtgggtcgacaagggccaggccacctgcccgctctgccgcgccttcctcctccccggcctcagcgccggagacggcgacggcgacggcgacggcgagctcgcctcctcctccttccctttctccttctgaacccacgcgtagtacgtacgtacgtacgcgcgcgtgctccagccgacaagcaaaagtgaaggcgcacggccggcggcgtgcgtagtacgtgtacgtacgtccctgcagcccggcggccgattgggaggcagagcaaggtcagtagcaaagccacctacctacttactacactactcctgctagctgatgagacacgagccccgtcgtacggccggccccggtcctgtgaccatccatggatcccgatgagacgagcaaggaaacagaggagagagaagaggaggtgtcagtgagcgtgaggtggtgcagtattattggtaggtgaggcacaaattatgaggaggacagggatggctacctgcattggatctggtggatgcgtagatccatccactccgcactgctccacccttttctcctgcagtgcagctccaattcacaccccccctctctctttctctctcttttgtttattaattaataattattagtttccttttctttttttttctttctctctctatctttctttcttttttctgtggtccctcctatatattattaacttgatctgcgaggggaaccaggagagatgtgcgttgtacatagctgcctccacttgacaataatattattgcaacggaacaaatcccttgtctctcacatgcatgatgattcagtcgtcgtc

SEQ ID NO: 118305 - DNA, 2598 bp, Zea Mays
attcatccaaacctcgacgaaaaagccaggcagaatcacgaggtatcgtgaaattcccatcgccctcctgctcctcgccaaatcgacgagacgccgacgagagatccgactacctcgcgctccgacacgccaacgcgtagatctggtagaataggtggcggtgggctcggacgtgcagtggtagtctcttctgcagtggcagcggcggaggagacgggggagcgagcagtcgccgcggcgtgggtctgttgtgtgctgggactcgggttccgtgaaaccctagacgccgcgggatggcgtcgtataggccgtacgcgccgccgccgcagcatccgccgccgccgccgccaccaccgcagggcggctatccgccgcagatgaattcgtacgcgccgccgccgcagcaggcgccgtacagcaggatgccggcgccgacataccacgcggggcctccgccaccaccgccaccggggccgccgccacctcaccaaccgcagttcaatttcggtcccgggcctccgcagcagctcccgcccccgcccccaccgcagatgtactaccagccgccgccaccgccctacggcgggaacagtaatccgcctcctccaccttcggcgccacccccgcctccgtccccaccccctgcggcatcgcccccgcccctccgcctccggcacagccaccgtctgcccatgccctgctgcccccaaaggggccacagcctaaggcaacgctgctgagagcggagacggaagaggagcgtcgtgcgcggaagaagcgcgagtttgagaagcagcgggtggacgaccgcaagcagcaccagatgatgcgccagacacaagccaccattctgcagaagacacagcaggttcgcactgctcagcagcagccgcagagccgccaccaccaccaccaccctccgggtggctctcgggcaggggcaactgggtctcgcccagcaacagcggttaatgctgagaggtttgagaaccggctaaaaaaaccaacaacgttcctctgcaagcacaaatttaggaatgaactcccggatccaagtgctcagctgaaatggctgcccctgaataaggataaggaccgatataccaaatacaggataacttcattggagaaaaactatattcctaaaatgattgtccctgaggatattgggatacctcttgacctacttgacatgagtgtatacaaccccccggatgttcagccgcccatggctcctgaagatgaagaactattgcgtgatgatcaggtcctcacccctattaaacaagaaggtacaaggaaaagggagaggcccactgacaaaggtgtttcttggttggtcaaaacacaatacatatctccactaagtgctgatgcagccaaaacgtcccttactgagaagcaagcaaaggaaaggcgggaatcaagggggggtcgcaatgctttcctagacaatcttaatgatagagagaaacagatcaaagccattgaagaatcctttagagcagccaagtcaaggcctgttcaccagactaaacgtgggatgcaagctgagtgggttatgcctttgctacctgattttgataggtacgaggagccgtttgttatggtgaattttgatggcgatccaactgctgattctgagcagtacaacaaacttgagagacccgtacgtgatgaatgtgaatctcgggccgtgatgaaaagttttagtgtaagtggttcagacccttcaaaacaagagaagtttttggcatacatggccccagcaccccatgagcttaccagagacttggatgatgaaaacgatgacatccagtattcctggctaagagaatatcactgggaagtaagaggagatgataaagacgatcctacaacataccttgtcacatttgataagaaggatggtgcaaaatatttgcctcttcctaccaagctagttttgcagaagaaaaaggcaaaggaggggaggtctggagatgaaatcgaacattttccagtaccttcccgtatcactgtgagtaaaacagctcatggtggtaccatggagcgcggagaatcttctggcatgcatgcgaattcaaagccacgaagatctcatgttgatgatgatcttgatgagcatccaaagcgtactcgggtagaagatattgaccaatatagtgaagaatattctgagtgatgaactgataaatcataattatcttgcaccaacgaatttgatcagtacatgtgaagccgtcaaggcataagtggttttatggtgcatggtgatgcagtgaaagagaatacctggcagtgggaggacatcatggcttggccagtttcttaagggcagagtatgtgaagcaaagctgagtgtaaccagacttcaagactttgatctctgtagtgatcatagaaagtatcacattgttgtaaagaagttttgcctttaaagtcttggagcggttctcaactgtttgttttgataatatatagaccccccattttgcaaatttcttcccgcttttctttcccaatcgactgtgcaagtacagaaatttgtttacattattaggatgggcaggtcatattatgctagacacatctttt

SEQ ID NO: 118306 - DNA, 2914 bp, Zea Mays
cctcctgctcctcgccaaatcgacgagacgccgacgagagatccgactacctcgcgctccgacacgccaacgcgtagatctggtagaataggtggcggtgggctcggacgtgcagtggtagtctcttctgcagtggcagcggcggaggagacgggggagcgagcagtcgccgcggcgtgggtctgttgtgtgctgggactcgggttccgtgaaaccctagacgccgcgggatggcgtcgtataggccgtacgcgccgccgccgcagcatccgccgccgccgccgccaccaccgcagggcggctatccgccgcagatgaattcgtacgcgccgccgccgcagcaggcgccgtacagcaggatgccggcgccgacataccacgcggggcctccgccaccaccgccaccggggccgccgccacctcaccaaccgcagttcaatttcggtcccgggcctccgcagcagctcccgcccccgcccccaccgcagatgtactaccagccgccgccaccgccctacggcgggaacagtaatccgcctcctccaccttcggcgccacccccgcctccgtccccaccccctgcggcatcgcccccgcccctccgcctccggcacagccaccgtctgcccatgccctgctgcccccaaaggggccacagcctaaggcaacgctgctgagagcggagacggaagaggagcgtcgtgcgcggaagaagcgcgagtttgagaagcagcgggtggacgaccgcaagcagcaccagatgatgcgccagacacaagccaccattctgcagaagacacagcaggttcgcactgctcagcagcagccgcagagccgccaccaccaccaccaccctccgggtggctctcgggcaggggcaactgggtctcgcccagcaacagcggttaatgctgagaggtttgagaaccggctaaaaaaaccaacaacgttcctctgcaagcacaaatttaggaatgaactcccggatccaagtgctcagctgaaatggctgcccctgaataaggataaggaccgatataccaaatacaggataacttcattggagaaaaactatattcctaaaatgattgtccctgaggatattgggatacctcttgacctacttgacatgagtgtatacaaccccccggatgttcagccgcccatggctcctgaagatgaagaactattgcgtgatgatcaggtcctcacccctattaaacaagaaggtacaaggaaaagggagaggcccactgacaaaggtgtttcttggttggtcaaaacacaatacatatctccactaagtgctgatgcagccaaaacgactgaataaaagttgtctggctttccagtcccttactgagaagcaagcaaaggaaaggcgggaatcaagggggggtcgcaatgctttcctagacaatcttaatgatagagagaaacagatcaaagccattgaagaatcctttagagcagccaagtcaaggcctgttcaccagactaaacgtgggatgcaagctgagtgggttatgcctttgctacctgattttgataggtacgaggagccgtttgttatggtgaattttgatggcgatccaactgctgattctgagcagtacaacaaacttgagagacccgtacgtgatgaatgtgaatctcgggccgtgatgaaaagttttagtgtaagtggttcagacccttcaaaacaagagaagtttttggcatacatggccccagcaccccatgagcttaccagagacttggatgatgaaaacgatgacatccagtattcctggctaagagaatatcactgggaagtaagaggagatgataaagacgatcctacaacataccttgtcacatttgataagaaggatggtgcaaaatatttggtaattagtgatgtgcattctgtattatagcacctccagttcctgggttcgatccccatcgaggacgaatttctggcttggttaaaaaaaatctcctcgctgtgccccgcccgctcccaggttacgtccttctcgcgaccctctggctgggccgttgcagagtgggcggtgacggcccgctagtgatgggggctagggttcagggattttctcggccgggaccatgtttcggtctcttcttaatataataccaggaggacggtctttccctcttcggacgagtattacatttggtttctgtgaatggttcatttcacattagtgtaacatatgtcatgatctttatttcagcctcttcctaccaagctagttttgcagaagaaaaaggcaaaggaggggaggtctggagatgaaatcgaacattttccagtaccttcccgtatcactgtgagtaaaacagctcatggtggtaccatggagcgcggagaatcttctggcatgcatgcgaattcaaagccacgaagatctcatgttgatgatgatcttgatgagcatccaaagcgtactcgggtagaagatattgaccaatatagtgaagaatattctgagtgatgaactgataaatcataattatcttgcaccaacgaatttgatcagtacatgtgaagccgtcaaggcataagtggttttatggtgcatggtgatgcagtgaaagagaatacctggcagtgggaggacatcatggcttggccagtttcttaagggcagagtatgtgaagcaaagctgagtgtaaccagacttcaagactttgatctctgtagtgatcatagaaagtatcacattgttgtaaagaagttttgcctttaaagtcttggagcggttctcaactgtttgttttgataatatatagaccccccattttgcaaatttcttcccgcttttctttcccaatcgactgtgcaagtacagaaatttgtttacattattaggatgggcaggtcatattatgctagacacatctttt

SEQ ID NO: 118307 - DNA, 303 bp, Zea Mays
atgggcctagagtcatacagatatgcttgcaacgtgaaatggctcggggtgagaggaggtgatctgcatcttatccccgaggacgcgtttcaagagctgaagccacgtgatctgcagattgccaaaagcttgatgtcgtcaaagttcctgcaggagagtcacagagctgagctggcgctgatggtggagaggggcaagcgtgcagacatcgaagccctctactcccacgggttcgatttcttggggaagtacatcgcgagaaagatccgcagggcgattacatctgatgatggaatgatgtaa

SEQ ID NO: 118308 - DNA, 1225 bp, Zea Mays
aagtagggagagaacggatatctgccattacgaagccaaccctggaaaaccagggccattaatactactcccacccgtcgtctatctcctcctcaaccaccgccccgagatctccccttctctctcctcgcgccgttttcctctctacctctttgatccggcaatggccgcgcccgcccctgccaccaccggcgacctcctacgcgtcgaccccctcgagctacgcttccccttcgagttgaagaagcagatctcgtgctccatgcagctgtcgaatcacaccgacgactacatcgccttcaaggtgaaaactacaagtccaaagaagtattcggtgcgacccaacactggggttgtcttgccacggtctacctgtgatgttgttgttacgatgcaagcacagcgggaagccccgcctgacatgcagtgcaaggataagttcctagtccaaagcgtcgttgcccctgctggtataactgtgaaggatgtcactggggatatgtttacgaaggagtctgggtataagatggaagaggtcaaattgcgagtgacctatgttgctcctccacagccaccctctccagttccagaggaatctgaagaaggttctccacctagggcttctgaatcagaaaacggagatggaccttctggaggattcaccagagcactaagagagcgcattgagcctcaagacaaatctacagaggctggagctttggtttccaagttgactgaagagaagaattccgcgattcaacagaatcatagacttagacaggaacttgacttggtgaggcaggagatcagcaagaggcgtggagggggcttctccttcatcgtcgtcataattgttgctctgatcggcgccatcctcggctacctgatgaagtcgtaattctttcaggctgtcctctgctggccataccagaggcagtcgtgcaagttgtgtttgggaagaactcgaaaaaaaaactgttgaaaccagatgtcctgagatcatccttcatattttgtcgatataggagtgggtacgtgaggaatgctgggccagtgtttaagcttttcttttccttgttgtttctccgttggatgggcattgcggacgctgtaacttgaaagttgcatcaattgcttctgtttcatagttttatcttgctgagcaaatttgttttttagcaagtaacctgctgtttcattatccggaaagaacaaggtgattccc

SEQ ID NO: 118309 - DNA, 1017 bp, Zea Mays
atgtcgcgtgtgcgccacatcttcttggctgggtgcctgggttggagattttgcaaggggcggatttacgaccagggctgcctaggctgcagccccggtcgtggcccaataacgcgagaaggtattcatccgcagcctagcttcgctagtcgctacggggtacatcgcgctaccctagtccagtgtccagccgccgccgagcacatccagacgccacacgccagagccgctcaggctcagccgcagacctgcagcgcagcgcagttggcagttgccgtcttgccgacttgccggccgccgcacgccgccaccgcccaggccgccagcgccaggcgcgtcttccgcgcggtcttctggcgagctgagcaggccgccaccgcccaggcccgaccgacgactgctggcgagctgagcaggctgcaggcgagccgcgagcaggcagagcagagcagagcggtgagcactaagcagcgattagcagagcatagcagcgagcagccggaataagatggataaatttctcatcaagaaccagaagaaagatgattctatttctaaaacaattaggacaaatgagagccgtgtagaacaaaagagaccacatattgagctagatatgaacaaaagtggcaactgcaactgttgagagagttttttctgctatgaacattatcaagactgaaagaagaaataaaatgggtgatgaatggatgaataacagcatgctatgctatattgagcgggatatgtttgtagaaattgaagatgaaaagattttgaagcattttcaaggcttaagaactcggaagataaattaacctcgcagcatcaactcatgaacgtgactgctcctaggatcggaaacacaggcgagacgagggggggcgctgcatgccctgcatgccctgggtgatcgaggtctcgttttctgatccccagctccagctgcgcgctgagcctaccgcttttgattttcctggaccccggacggatccgcacttgctttgcttgctttcc

SEQ ID NO: 118310 - DNA, 1631 bp, Zea Mays
atgtcgcgtgtgcgccacatcttcttggctgggtgcctgggttggagattttgcaaggggcggatttacgaccagggctgcctaggctgcagccccggtcgtggcccaataacgcgagaaggtattcatccgcagcctagcttcgctagtcgctacggggtacatcgcgctaccctagtccagtgtccagccgccgccgagcacatccagacgccacacgccagagccgctcaggctcagccgcagacctgcagcgcagcgcagttggcagttgccgtcttgccgacttgccggccgccgcacgccgccaccgcccaggccgccagcgccaggcgcgtcttccgcgcggtcttctggcgagctgagcaggccgccaccgcccaggcccgaccgacgactgctggcgagctgagcaggctgcaggcgagccgcgagcaggcagagcagagcagagcggtgagcactaagcagcgattagcagagcatagcagcgagcagccggaataagatggataaatttctcatcaagaaccagaagaaagatgattctatttctaaaacaattaggacaaatgagagccgtgtagaacaaaagagaccacatattgagctagatatgaacaaaagtggcaactgcaactgttgagagagttttttctgctatgaacattatcaagactgaaagaagaaataaaatgggtgatgaatggatgaataacagcatgctatgctatattgagcgggatatgtttgtagaaattgaagatgaaaagattttgaagcattttcaaggcttaagaactcggaagataaattaacctcgcagcatcaactcatgaacgtgactgctcctaggatcggaaacacaggcgagacgagggggggcgctgcatgccctgcatgccctgggtgatcgaggtctcgttttctgatccccagctccagctgcgcgctgagcctaccgcttttgattttcctggaccccggacggatccgcacttgctttgcttgctttccatggttgttaggtcgtctgcaatcgccgtcgatggcgggcgaactaaagcaaacgagagccctgggcccctgcccaacgaggcttttacattgccgaccggctgcgtttgcctggcgacggaacgcacgaacctagtaaagcaaaggaggaaagcgaggagcaggagagagactacggatcggatgcgtcagccgcgcaccggtggtcctttcctgcctgcccggcccctttcctttccgagagtggcggttgctcgatccccccgaacccgcccgcccgttttccatccacgagcagcccatgctttcagaggccgccggcccatgcgtgcatgatggacgtgggccgtaaaaacgggcatgctagcctttggtccagaccaagccaactgaactgcatgcactctcacacaacacaatgctagactgctagttgttgttggtacgagcaaatggttctggcttgttcttggtattgactaacacatgtacgtctagatacacaacagagaccatttatctattacaagactttgaatggcttagagcttggaaacgagtgtagctctacagtaatcttgatttattcattgatttaattagtttgggacgag

SEQ ID NO: 118311 - DNA, 386 bp, Zea Mays
ccggcggcggtacctgtactccaagagcctcgaggcctcccattgggtgctgttggagaaggagcgccgtatccgggcggcgctagaggagggaaagcccattcctaccgagctccgcaacgaggagcacgacctgcggaagcagatcgacctaggagcgtggaggggatttacaatattttgtgtctggttaaggacgttgctcggttgttgtttggatctgtgattgggtgctacagtttctaagagcatactgtctcgattcgtgagcccaagatagagggccgttttggtttctttagtagagagactgaagtttagttaggagactaaagtttagtccctaggaactaaaaatattcataatgcattaaacaaatcataag

SEQ ID NO: 118312 - DNA, 222 bp, Zea Mays
atgttacgtttgcagatatggacctcgatggttttctccacattaggaaagctggaagagccttttgaactcactttttttgctaacaatggtgttacggtggaacatagttttgcgtgtatgtaccaacaactaaaatgtaaacatgacattgtcatagttgagtacaggaataattatctcttatatcttattgtaaaatctaaaacagttctcctgtag

SEQ ID NO: 118313 - DNA, 312 bp, Zea Mays
atgaagcagcagccagcaggtgagggagcgggtgcgcatcaggatcagcctccgcgcgcctccctcctggtggcgtcgtggaggatgtcgatgtccacgccgtcctgcgggagcagcacgtaccgcaccaccgagcccctgatgaagcagttccgcactgaaagcatgtggggatacttgtcctggtcgactacgcgggtgttctcgagcttgatgttgaggtactggtcaaccgagtggagcgtcccgcggatcgccaagtcattcttgagctccactgtcacctccttccccaccagctccttgaagtag

SEQ ID NO: 118314 - DNA, 1838 bp, Zea Mays
cttctcccccctctgcagtcttcagtcttcacttccattccaccggctccgatcccaactgccatggcgctctccatctacacgcccacctcctcctccctcgtcccgccctccattcaggaggtcaggctgacttcgcgaccgccaaagcccgcgactttcagcctacggaggccacatctggccgcgcgggccgccgctggcaacgcacccacgtccccggtccgcgaggtcgtcactgagctcgacgcggtcgccggcttcagcgagatcgtgccggacaccgtcgtgttcgatgatttcgagaggtaaccgtcttcttgccttatactgtatttttttctgtcttgttgtcccattcgatttggtgggcgagtggcgcattgtgctatcgtgaacaatcacaggttcgcacccacggcggccacagtgagctcgtcgctgctgcttgggatcactgggctcccagacactaagttcaagagtgcgatagatactgcactggcagatggtgagtgcaacgcactggagaaggctgaggacaggatgtcctgttacctcaccaaggctcttgcaaatgttggcgctgaactggctcatcaagtccctgggagagtttcgacggaaatagatgctcggttagcttatgacacccagggcataatccacagggtacatgaactgttgaatctatacaaccaacatgatgtctcaactgaccgcctgttattcaaaattcctgctacatggcaaggcatagaggcctcaaggttgcttgaatctgaaggaattcaaacgcatctaacatttgtttacagtttcgcacaagcggcagcggcagcacaagctggtgcatctgtagtacaaatgtttgtgggccgattgcgggactgggcaaggcatcactctggtgacccagagatagatgaagctttgaagaatggagaagatgctgggctttctttggcgaagaaagtatatgcctatattcacaggaatgggtacaaaacaaagctgatggccgctgccatacggaacaagcaggacgtatttagccttctggggatcgattacatcattgcaccactgaagatattgcagtctctggaagaatctgtcaccgatcccgatgtgaagtacggctatgtcccgaagttgactcctgctattggcaagacgtacaacttcactgaagaggagcttgtgaagtgggaccagctgagcctgtcagctgccatgggaccagctgcagaagaactgcttgcttcagggctagaggggtacgtgaaccaagcacgccgcgttgaggagctctttgggaagatctggccacctcccaatgtttaacaacggcgttgagagcaatagcaatgtgatttgcctggcaggctcacaatgctgcgcggaagacgatttgcttctttttggataatacacgaagcactcccgtgtttacgttgacttgacttgcagtgtgcatgtattctgtttttgtttgtaattcagatgatttgctggatccatgagaacctgtcgcctgatattccctgcaactgcaatcgtcctcgtacgtacggctggcaacggcttcttggaacatcaccacctgagctgcagttacatgattccatttatacacacacgtatctgcctgctatcagaagtcatttctacgctggttagccaagttcatgttttgaggatacaatcgcccacctagcgtcaagatctcccttgtgaagcgtcatgctgaatgtatgaatttaccatatgcttttgttacttggcctgattttattatttgtgtgcaagtaatgttggatatgtcctcggacata

SEQ ID NO: 118315 - DNA, 1739 bp, Zea Mays
cttctcccccctctgcagtcttcagtcttcacttccattccaccggctccgatcccaactgccatggcgctctccatctacacgcccacctcctcctccctcgtcccgccctccattcaggaggtcaggctgacttcgcgaccgccaaagcccgcgactttcagcctacggaggccacatctggccgcgcgggccgccgctggcaacgcacccacgtccccggtccgcgaggtcgtcactgagctcgacgcggtcgccggcttcagcgagatcgtgccggacaccgtcgtgttcgatgatttcgagaggttcgcacccacggcggccacagtgagctcgtcgctgctgcttgggatcactgggctcccagacactaagttcaagagtgcgatagatactgcactggcagatggtgagtgcaacgcactggagaaggctgaggacaggatgtcctgttacctcaccaaggctcttgcaaatgttggcgctgaactggctcatcaagtccctgggagagtttcgacggaaatagatgctcggttagcttatgacacccagggcataatccacagggtacatgaactgttgaatctatacaaccaacatgatgtctcaactgaccgcctgttattcaaaattcctgctacatggcaaggcatagaggcctcaaggttgcttgaatctgaaggaattcaaacgcatctaacatttgtttacagtttcgcacaagcggcagcggcagcacaagctggtgcatctgtagtacaaatgtttgtgggccgattgcgggactgggcaaggcatcactctggtgacccagagatagatgaagctttgaagaatggagaagatgctgggctttctttggcgaagaaagtatatgcctatattcacaggaatgggtacaaaacaaagctgatggccgctgccatacggaacaagcaggacgtatttagccttctggggatcgattacatcattgcaccactgaagatattgcagtctctggaagaatctgtcaccgatcccgatgtgaagtacggctatgtcccgaagttgactcctgctattggcaagacgtacaacttcactgaagaggagcttgtgaagtgggaccagctgagcctgtcagctgccatgggaccagctgcagaagaactgcttgcttcagggctagaggggtacgtgaaccaagcacgccgcgttgaggagctctttgggaagatctggccacctcccaatgtttaacaacggcgttgagagcaatagcaatgtgatttgcctggcaggctcacaatgctgcgcggaagacgatttgcttctttttggataatacacgaagcactcccgtgtttacgttgacttgacttgcagtgtgcatgtattctgtttttgtttgtaattcagatgatttgctggatccatgagaacctgtcgcctgatattccctgcaactgcaatcgtcctcgtacgtacggctggcaacggcttcttggaacatcaccacctgagctgcagttacatgattccatttatacacacacgtatctgcctgctatcagaagtcatttctacgctggttagccaagttcatgttttgaggatacaatcgcccacctagcgtcaagatctcccttgtgaagcgtcatgctgaatgtatgaatttaccatatgcttttgttacttggcctgattttattatttgtgtgcaagtaatgttggatatgtcctcggacata

SEQ ID NO: 118316 - DNA, 701 bp, Zea Mays
agtaggaggtagccaattaagatagatcgccagccgggcagtagctctgagacagataggagagagagagatcgatctgtatcgtcgtcgaagctagcggaagggtacgttacgtacgcagcggccggcccctcgctgatcgcgcgcgatggagcggcggagcggcggcgcggggagctgcctggggctgctggcggtggccgcggtgtcgacgagcatcatcctcgtctcctaccgcctccaccgccggctggaggcggacctcagggccatgatcctcggcgaaggtgacgacgacggagcagcggaccacgaccggcgccggccgcgtggcacgacgacgacgagaaggaagaagaaggtgcgcttcgcggccgacgtggcggagccgtcgtccaacagcgaggagtaccggcggcggcgggcgcgtccgtcgacaacagccaccagcgcaagaagatagcacgccgccgctgcgcgtcagcccggcgccgcctgctcaccgcggcacgcgtgagccgtacccgtaccgtacgtcgtggacccgtggtggctgtgtatcttgcatgacgtgacgtggcgtcgtggcatgcacgttcaggcaggctttgagctgccgtaggtaacgtaagcctttgcggttgctttggtgtaataaactccatcaccgagctgtcatcatcatcatgttcattggctaa

SEQ ID NO: 118317 - DNA, 265 bp, Zea Mays
ttttttctttcaaatttcgtttttttgggtgcgtacgtgagtgccttgagttgatttgttttctttttcttaatttcgaaattcattttcttttatttacttagaatagcttaaacaacttttatgtcttaaatattccaaatgtataataaatataataatattattataataaataaagttcatattaaataatctttaggcaatttctattatttaaaaaagactttatataagggaatgaaatcaaatcaaaagaaatttg

SEQ ID NO: 118318 - DNA, 1387 bp, Zea Mays
aagacgctgcagatgcagtcgtcgagctaacaagcagccggacaaggtgaaatgttcccgttaacatcccttgaggcctacactaggcagcacaccaaatggggcgaccgccctgccgccggggagcattcaatcgtcggcggcacaccatcccccattcttcccgttccccaacgtgaagtggcaccatggtcgccactcgccacgcgctcgccgcaggagcaggagcagcgactgcgggccagccagcctccggttgggtagctgttctgcgcaacagcccgagggcgcggatggaggagggaccaaacaggagcggaggggaaggcaggcggtacaactgatgagcgggtacctgttctacgatagcggtcgcttcagacacgaaagatgttcttgcgagggacatgctgatcatcgccttcgagtaagatgctccaaccatgaggagcataggcacaactagcagggagagcaggccgacctcccaacagcacgcgaaggcaacaatgatagcaactaagaacgtggagaagtttgacatgaagtgacccatctggagaaagcaatgataagccaaacttttaagatctctgttatcatcgagcagttttttttttttgtttttttgggggtacttcttctctttggttagttagtgactcttgcaagtgacatgttatgaggaggccggacgaggaaaatcaattaccttttcaccaattgcgtcttgtatgacactcatgtggttggttgccccagccatgatacttgcagtggttaagtcggtgtcgaaggctccgatatcttggctgagcactgatctcagatatgctatccgcatgcgtgtcatctgcctctggcttgtatacatccagcttgcggtttctgaaatgcatggtgataatctagagcttctctatgaaatcggtcaagctagcataagatgttttgaacttgaccccactcaccaatcatcccaccaggaagggtaacaactgctaacatccacatatacggaatcaactgcaaattaacaggaacatttgcactgtcgtacgttagtggaacaacaacaacactgaaaccaatcaacagaaccggatgtcatctaatctaacagggtagttcgaaaaaagaaagaaagaaccttagtgagttcatggaccgtggcctcgttgtcgcccatgttgctcccgacaacgtcgagagtcttccccagtatgtagtacgacatggaaggccccatgccatgcacgaaggagcccacggtccccgacaccatgagcagccagtccagcgcgtccgcgtagcgaagcaggccgaagaaggggaacgatccgccgtcctcggccgctgccgctgccgcgctttgcttgccatctgc

SEQ ID NO: 118319 - DNA, 1571 bp, Zea Mays
cccctcccaccgcgggctcccgtgcgtctgccacggtgccacccgctcccgcgacatctatagacagagcagccgttctagaaagcatagtaggagagagatgagcgaggaggagaggaaaggagggggcggaggaggggacgacggagcggcggcggccgcgcgagcggcggagcaggcgcgggagctgcaggacgcggcggcggcgctgctgacgcgcacgcgggcggaggaggaggcgctgcgccggcgcgccgccgcgctgcagggggagctaaggcggctacgcgaggccgccgcggcgcacgcggacagcgaaaaggttgaggaggacttggatcgagcaacgtgcctcattaccgaaggagacgttgcgtcgctgctcccgagcaagacgcaaggcacttttctgaggatgttcttgggaccagtaaatctgcgggcaccaaggaaggaggtgcagctcaaggtgaaggaggagtacaatagctacagggacagaactgccttgctgtttcttggttttccagtgattttgttgttccttcgacaatggttatggaatagatgctttccagcattgccagttcagctgtaccaggcttggttgttattcctgtatactagtttagctttgcgtgagaacatactgcgagttaatggaagcgatattcgtccttggtggatacttcatcactactctgccatgctgatgtctgttataagtctcacatgggagataaaggggcaacctaattgtgcacgcaagcagagaggcgtggaactttttctgtgctgggccataatgcaaggatttgtcatgatgttgcagaatagatatcagcgtcaaagattatatactaggattgctttggggaaggctaaaaggatggatgttgtatggggagagactgctggtgttgaaggtcaattgttgctgttgtgccctctcctttttctattgcagggatttgagggttatgttgggtttttacttcttcgcacagctcatactggtgtcgtccctgagtggcaggtggtggtctgtgggatcctgctgatttccatggcaattggcaacttcgcaaacacattggatacattgatggccaagtctcggttcaaagcgaagatgaagaaatcaaagggcaaacgggatcttgacacgtgcccctcaccaacaggttcgtcgccgacagattcagcaaccagagcatgaaaaggtcaagagggccagttgcttaccctatgaccattgcccgtgtttaaccagggctggtcaccattgtaaatcattagtgttttctggccatcagcccctaatccttactgtctctgtcagagctcatactcatgtaagcatcaggcaactaggttgctgatggtcctaggctgaaaaaggatactgagaataaacttctggtgtttgtttatacctatatcctgaacatggagtggagtagatgagctttaggactgcaagtcttagcaaaattttcccagtatagttgtgaagctgtgagacatttgtcacaatgcgaagctgtatacaggttgaggcactatattgc

SEQ ID NO: 118320 - DNA, 1504 bp, Zea Mays
cccctcccaccgcgggctcccgtgcgtctgccacggtgccacccgctcccgcgacatctatagacagagcagccgttctagaaagcatagtaggagagagatgagcgaggaggagaggaaaggagggggcggaggaggggacgacggagcggcggcggccgcgcgagcggcggagcaggcgcgggagctgcaggacgcggcggcggcgctgctgacgcgcacgcgggcggaggaggaggcgctgcgccggcgcgccgccgcgctgcagggggagctaaggcggctacgcgaggccgccgcggcgcacgcggacagcgaaaaggttgaggaggacttggatcgagcaacgtgcctcattaccgaaggagacgttgcgtcgctgctcccgagcaagacgcaaggcacttttctgaggatgttcttgggaccagtaaatctgcgggcaccaaggaaggaggtgcagctcaaggtgaaggaggagtacaatagctacagggacagaactgccttgctgtttcttggttttccagtgattttgttgttccttcgacaatggttatggaatagatgctttccagcattgccagttcagctgtaccaggcttggttgttattcctgtatactagtttagctttgcgtgagaacatactgcgagttaatggaagcgatattcgtccttggtggatacttcatcactactctgccatgctgatgtctgttataagtctcacatgggagataaaggggcaacctaattgtgcacgcaagcagagaggcgtggaactttttctgtgctgggccataatgcaaggatttgtcatgatgttgcagaatagatatcagcgtcaaagattatatactaggattgctttggggaaggctaaaaggatggatgttgtatggggagagactgctggtgttgaaggtcaattgttgctgttgtgccctctcctttttctattgcaggtggtggtctgtgggatcctgctgatttccatggcaattggcaacttcgcaaacacattggatacattgatggccaagtctcggttcaaagcgaagatgaagaaatcaaagggcaaacgggatcttgacacgtgcccctcaccaacaggttcgtcgccgacagattcagcaaccagagcatgaaaaggtcaagagggccagttgcttaccctatgaccattgcccgtgtttaaccagggctggtcaccattgtaaatcattagtgttttctggccatcagcccctaatccttactgtctctgtcagagctcatactcatgtaagcatcaggcaactaggttgctgatggtcctaggctgaaaaaggatactgagaataaacttctggtgtttgtttatacctatatcctgaacatggagtggagtagatgagctttaggactgcaagtcttagcaaaattttcccagtatagttgtgaagctgtgagacatttgtcacaatgcgaagctgtatacaggttgaggcactatattgctt

SEQ ID NO: 118321 - DNA, 604 bp, Zea Mays
gagaaagaatctcatattctctctgattttagtgcttgcatgtatcgctatgaggacaaaatagaatttgaagaagcatttgacagcatgagatctaaagtgcataagcaaacttggctagatagtatatacaagcattttgagaggacagttgaagaaacaagagctagagaactagaggctgaatttgaggcaaggaagaagctaccaagaaggcggatgtgcacacatatgctaattcaagcaagcgatgtttacactccagttatttttgaagctttccaagttgagtatgaaagatccatggctgcatgcactacagtgttggatggagataacaaatatactgtcactattggtaatttaagtggtagaggataaactcaatgcaccatctagtgttgccaatgaaaaaccatgtaatgaccaagaaaatattagcccaaacatgcaacaaagagatgacttgctcggcactgcacaacttaagaaaaaagaggttcagttgaaaggctcaaagagaaagaaaagttggattgagaagttacgcaaagggaagcgcaaggcgactaaatctgctgtaccaacaaaaaagggagcaaag

SEQ ID NO: 118322 - DNA, 187 bp, Zea Mays
cccattctcgcactgtctttctcattctcccctccccgcaaagctcattctcattcacattcccggctgtcattccgtgttctgccattcccattaccccctctccgcactgtctttctcattcccctctccccgcaaatctcattctcattcctacgtgcatcccacgcctagctaaaattaaatt

SEQ ID NO: 118323 - DNA, 1941 bp, Zea Mays
caattttaattgtaattgctttataaataacataacatacaatataaaattgcatcgtctcctctccttcctgacattggcactggcagctgcactcaccggcagccatggaagacttgctctactactccctcaccgtagccatctgcatcgcagtcatcggcctcctctccatcctccgttcgttcaccgccaccggaccgccgccggcgctcccgcccggcccgtcgctgctgtcgctgatcaccccgctcctcttcctcggccgaacgaacttcggcatcgaacggatcctctccgccgcgcggtcccgctacgggcccgtcttcacgctctacctgctcccgtcccgcccggccatcttcatcgccgaccacgtcgtggcgcaccgcgtgctggtgcagggcggcgccgccttcgccgacaggccgccggccagcctccccttccgcctcttctccagtggccagcgcaacatcacatccggcgcctacggcccggtctggcgcgcgctccgtcacaacctcacgggcaacgtgttccacccgtcgcgcatgggccggttcgccgccgcccgccgccgcgcgctgcgggggctcgtcgccggcgtcgcgcgcgacgccggcagcagggccgtcgtcgtcgaggggctcctgcaccgggctatgttccacgtcctcgtcaccatgtgcttcggcgagcgcctcgccaccgacgccgtcgtcgcgtccgtggaggcgctgcagcgggagttcctcaagtcggtgctcggcttccaggtgttcgacgtgtgccccgcgctcaccagcctcctgttccggcgccggtggaagcagatgctgtccctccgccgccggcaggaggagctcttcgcccctctcatacgggcgtgccgcgcgcaacgaggctccgacgccaacgccggcgcggacacgtacgtggacacgctactcgacctccggatccccgaggacgggggcaggaacctcacggagggcgagatggtgagcttgtgcgccgagttcgtggccgtcggcaccgacaacacggcgaccgaggcgcaatggatcatggccaacctcgtggcgcatccggagatccaagcaaggctccgggccgagatccaccaggtcaccggcggcgcgggcgtccaggagcaggacctgccgcggatgccgtaccttcgcgcagtggtcctggaggggctccgccgccacccgccgggccacttcgcgatcccgcacgccgcgaccggcatccaagacgacgacggcggtggcgaccacgcgaccatcgaaggcttccgcgtgccgcggcgcgcgtccctcaacttcacgctcgtcgcgctggggctcgacgaggcggtgtggcccgacccgctgcggttccggccggagcggttcctgcccggcggcgagggcgcggacgttgacctcaccggcgcgaaggaggtcaagatgataccgttcggcgccgggcggcggatctgccccgggatggcgctcgctctgctgcacctcgagttcttcgtggccagtctcgtcgccgagttcgagtggctccaggtccccggtgagccggtggagttcgccgagaagcaggagctgtccgtcgtgatgcgccggccgctccgtgccaccgtcgtccggtgcacaaggaacgccaactgaccacacgggttgtcgttgtcgaaccgaacgtctgcacttttctgctcttgtttgttgctgcatgcatgtgcttttctttcagtgaagttcagcgaatttagtaaaaaattcgctaccaaatttcctgtggacttgtggagtcatgttgttagcatgccctgctcttgttggctagaggctttcatgtatttgcactgcactgctctgattgtcctaaaagttataatattaataaaaaaatcagtttttcttttgtccatcaacagttaga

SEQ ID NO: 118324 - DNA, 486 bp, Zea Mays
acataaactcattgttggtgttagctcttatcggtcatccatcatggcgagatgcctcaagtcctgcagtgtacatggactctggctgctctccatgatccttcttgcatcgtgtgtcgttcatgctcacattattaatgggcggcaaagcaacaccgggagcctcactatgaccacgacgggggaagcaagcatgataattggagatgagaaagatgcaatttgctatataaaagccgcattgtattgctgcaaaaggactatacagtgctatcaggacatagcgcaatgcttgaggaactgccgtaaaaatgtctaacaagaggctatgctttctccaactcgtagatggagatcataaagatgttacgttagacctaatcatgcatagaccggaggagaaatataagctaattagcccatccataattaataacttcgtattgtttcaaaagctataattgtcattaaatgtcgctcatagtc

SEQ ID NO: 118325 - DNA, 686 bp, Zea Mays
acatcaacacatttttggtattagactattgtagctcatatcatctgtcacccatggcgaagtgcagcagcttccaaggattattctggttgctttccatgattcttctagcatcctttgttgctcatgcacgcacaacaaggcacaccaaagaggacagcaatgctaggaacatgacgatgaccaagacgagggcatcgggcaacatacttgttagccgtaatgacgacgggccatgctatctagattccggtcttaatgagtacgtctgcagaaagactaataagtgctataagagcttggtgctctgcgtggcgagttgtcaaccatcatcatgaattcatgatactgcggagacatcatgatactgcggagacagacggcgagagatgaggctagctagatgctgtttcaccaaaatattatgtaacacccaaatctcccattttaagaaataaataagattttcgaaaagattatttgaattggagtgctcttacatatcgattaattatgcatttaatatattttcctaaaatgatcaattgggcaaaagaatatatttgtgatgtgcactgcattctggagcatggtttattactgtttgaatttgaattcggatttgaatcatttgaattctcattggatttgaattggaaactaaaaagaaaaaataaaaagaaaaa

SEQ ID NO: 118326 - DNA, 883 bp, Zea Mays
acatcaacacatttttggtattagactattgtagctcatatcatctgtcacccatggcgaagtgcagcagcttccaaggattattctggttgctttccatgattcttctagcatcctttgttgctcatgcacgcacaacaagtgggcacaccaaagaggacagcaatgctaggaacatgacgatgaccaagacgagggcatcgggcaacatacttgttagccgtaatgacgacgggccatgctatctagattccggtcttaatgagtacgtctgcagaaagactaataagtgctataagagcttggtgctctgcgtggcgagttgtcaaccatcatcatgaattcatgatactgcggagacatcatgatactgcggagacagacggcgagagatgaggctagctagatgctgtttcaccaaaatattatgtaacacccaaatctcccattttaagaaataaataagattttcgaaaagattatttgaattggagtgctcttacatatcgattaattatgcatttaatatattttcctaaaatgatcaattgggcaaaagaatatatttgtgatgtgcactgcattctggagcatggtttattactgtttgaatttgaattcggatttgaatcatttgaattctcattggatttgaattggaaactaaaaagaaaaaataaaaagaaaaatgcctacgtgtggctccctctctggtgtgtgggccgcttcctcggccggcccacttccacaccggcagctcacgcctaggggtaaaaacggtcgaaaacgatcggtaaacactaaaatcaattttcttttcatattttttctcagaaataagatcgaaaacggtaactccgaaaacgaaaacgacatcggtaat

SEQ ID NO: 118327 - DNA, 555 bp, Zea Mays
ctccatgaatgaaagcccaagcgccagccccctcccttttgtcaagtgattggaagagagttctagggaaatcgatggagaagaaacagtgtttcagttcgacgcgctctaggtgtttgatggaatggatgaaccggagatccttgttgctcttgtgaaatccgagtctatttagtgttggtacgttaattgatcacgtgatgtggaagacaaagtttggattgatctcaagataatgctgatggacgaagctaaaatgggtgaatcaaacaagtgccagaatgggagatgctcgccaagcaaacatcatctaacaacactgacttagtgttatcccaggttgtaattttgttctgttgtggatggtgctaagtgccggtgggctcggccttcttatataagtatatcccatctttagcttccttattgaggattgtcacttaagctagcatgtattttaaaacttataaatgttttatacattcaaattgtaatcttttgaaatcaatttcttttgtaatcaactccgatgatatatattgtaatcttgttata

SEQ ID NO: 118328 - DNA, 643 bp, Zea Mays
atgttctagttaaggaaaatacatagcttgtgtagggttcaatattctttgatgtttgtgttagatttggttaagccagacaaacgtaattgtgatacgtagtgatatgtcaacatatagtaattgtttttaagtattgtggtacatcaatgttatattctaaatatattaggacttgtatgttgctaatgttacttgatgattgatttaggtccgattgactagaacgtcatgtttgatgtagaattagttgtgatgttttgctttaagtctgtatcctccttagtatagcttatctatcttgtgctatatatgctcctactcactcatatgcattatgcatgtcatttaggtacgttaattgatcacgtgatgtggaagacaaagtttggattgatctcaagataatgctgatggacgaagctaaaatgggtgaatcaaacaagtgccagaatgggagatgctcgccaagcaaacatcatctaacaacactgacttagtgttatcccagtttgattatcttgattcctgttttataaagagaactaaagatgcttagccctgcttagataattaaaagttgttcttttttaaaaaaatgatgtgttacatgggatatgggaaatttttgtgaaaaagaaat

SEQ ID NO: 118329 - DNA, 1529 bp, Zea Mays
caaccacggcccgatccgcagcaaaaccttgccgcctccgcgggccgcggcactccaaagccgccatcttctcacgcacacggcacaccgcgcatcccctgctctcggcagtctccgcgggctccctcctccgccgccgcttccatggactccacgccggcacccgaggcagcccccggcgcgtcctcttcctctcccgccgctgccgcggccgccgagggtcttgcggggggcgtggcggcgatgaccctggatgagcggttcgaaatgctgcggggcatcggggaggagtgcatccaggaggacgagctcaggcgactgcttgagaacaagcccgtacccatctgctacgacggcttcgagccctctggacgcatgcacatcgctcagggcgttgtgaagaccatcaacgtgaacaagatggtcaacgccgggtgcaaggtgaaaatttggatcgccgactggttcgcgcagctcaacaacaagatgggaggcgacctgaagaagatccagacggtagggcgctacatgatcgagatttggaaagcggctgggatgaaccttgacggggtggagttcctgtggtcctccgaggagatcaacaagcgcgcacacgagtactggccaattgtgatggacattgcccggaaaaacaacgtcaaaaggataatgagatgctgccagattatgggcagaagtgatcaggacgacttgactgctgcccagattttttacccttgcatgcaatgtgctgatatatttttcttaaaggctgacatatgccagttggggatggaccaaaggaaggtcaacgtgctagctagggagtactgcgatgacatcaaacggaagaacaaaccaattattctttcgcatcatatgctccctggttttaaagaaggccaggagaaaatgtcaaagagtgatccatcctcagctatctttatggaagatgatgaggcccaagttaatgtgaagataaagcaagccttttgccctcccaaaattgttgaggggaatccttgtttggagtatattaaatacattgttttcccttggtttggaagatttgaggtcatccgtaaggaaagcaatggtggtaacaagacatttacatgcatgaatgaactaatttctgattacgagactggtgctttgcatcctgccgatgtcaaacctgcactggcaaaagcaataaatgaaattttgcagcctgttcgtgatcatttcaacaacaacaacgaagccaaagttcttcttaacactgtcaagaagtacagagtaaccaattgaggagtggaagctgtccatctttagggcatgtttacattagggtggatatcgccgtttgaaattcttgtatgctattctgttactagttgcataggtagctcaaaagtttcatgtttctagatatataaaaagaatactttacttgttgactacttgatgtgcatcatagggctcaacctaaacagtgttgcactgtaagtattcgataaaagataaacaaagccaatatccaggag

SEQ ID NO: 118330 - DNA, 894 bp, Zea Mays
gcatgtgttctacacttctttctttctaggttaatatagtttcataagcttcgctgttgttgcaggcccaagttaatgtgaagataaagcaagccttttgccctcccaaaattgttgaggggaatccttgtttggagtatattaaatacattgttttcccttggtttggaagatttgaggtcatccgtaaggaaagcaatggtggtaacaagtaatatttttatttctcatctgctaaaattatttgttttccgacaataatgtggtggaaccagggagatataaagttctgtgccatcattatttatatttggctgacacctgtggtcatgcaattaattatgcagaaattaggttattgaatttccaacataacatgatttattatctctgagggacttctaaggcggttgctttcaaacaggacatttacatgcatgaatgaactaatttctgattacgagactggtgctttgcatcctgccgatgtcaaacctgcactggcaaaagcaataaatgaaattttgcagcctgttcgtgatcatttcaacaacaacaacgaagccaaagttcttcttaacactgtcaagaagtacagagtaaccaattgaggagtggaagctgtccatctttagggcatgtttacattagggtggatatcgccgtttgaaattcttgtatgctattctgttactagttgcataggtagctcaaaagtttcatgtttctagatatataaaaagaatactttacttgttgactacttgatgtgcatcatagggctcaacctaaacagtgttgcactgtaagtattcgataaaagataaacaaagccaatatccaggagagacatgagatggcatgtagatttaaaaatgtcttttggccatgtcc

SEQ ID NO: 118331 - DNA, 681 bp, Zea Mays
gcatgtgttctacacttctttctttctaggttaatatagtttcataagcttcgctgttgttgcaggcccaagttaatgtgaagataaagcaagccttttgccctcccaaaattgttgaggggaatccttgtttggagtatattaaatacattgttttcccttggtttggaagatttgaggtcatccgtaaggaaagcaatggtggtaacaagacatttacatgcatgaatgaactaatttctgattacgagactggtgctttgcatcctgccgatgtcaaacctgcactggcaaaagcaataaatgaaattttgcagcctgttcgtgatcatttcaacaacaacaacgaagccaaagttcttcttaacactgtcaagaagtacagagtaaccaattgaggagtggaagctgtccatctttagggcatgtttacattagggtggatatcgccgtttgaaattcttgtatgctattctgttactagttgcataggtagctcaaaagtttcatgtttctagatatataaaaagaatactttacttgttgactacttgatgtgcatcatagggctcaacctaaacagtgttgcactgtaagtattcgataaaagataaacaaagccaatatccaggagagacatgagatggcatgtagatttaaaaatgtcttttggccatgtcc

SEQ ID NO: 118332 - DNA, 875 bp, Zea Mays
agacatgataaaaaagaaccgtgcccgataaataagaagcgctgcctccgttcagggcctccgacacctcccaataaaaacgttcctccccgtcccactcgccggagcctggccgacgggatgcctcgagattcgcgcccagccgggatgcgcctcttcggcgtcaccatcgcgccggcgccggaggcggatccaccggtacgggatccgagccccaacccgcccgtggcggccagggaggacgtgatgcgtaagtgcaagagcatgggcaacctcgccgcccttggcgctgtcgtggacggtggaggaggtggtgcggacggcggaggcgccggcgacggctacctctccgatggcgggctgatgcagtcgtccgggaagcggcggagggcgcaggagaggaagaaagctgttccctggactgaagaagagcataggacatttcttgctggtcttgaaaagctagggaagggagactggaggggcatagcaaaaaattttgttaccaccagaacaccaactcaagttgcaagtcatgctcagaaatattttcttaggcaaactaatccaaacaagaagaagcgcagatctagtctttttgacatgatgccaagagagctgtcaccagcaccaaattgccccatattaccaccatcgatggcaaaagtacacgatgtggtagctatgacgaaacaacttcagaatagcaacttggaaggaacctcctcttcaaatgcagcatctcaagttggaagagatctccccccagttccatcttttaaggcaacaaatatggatccaagtttcagcaaatttagccacatggtaatgctactgtattatctctctgtcatacgtattattatgtgttaatc

SEQ ID NO: 118333 - DNA, 1378 bp, Zea Mays
agacatgataaaaaagaaccgtgcccgataaataagaagcgctgcctccgttcagggcctccgacacctcccaataaaaacgttcctccccgtcccactcgccggagcctggccgacgggatgcctcgagattcgcgcccagccgggatgcgcctcttcggcgtcaccatcgcgccggcgccggaggcggatccaccggtacgggatccgagccccaacccgcccgtggcggccagggaggacgtgatgcgtaagtgcaagagcatgggcaacctcgccgcccttggcgctgtcgtggacggtggaggaggtggtgcggacggcggaggcgccggcgacggctacctctccgatggcgggctgatgcagtcgtccgggaagcggcggagggcgcaggagaggaagaaagctgttccctggactgaagaagagcataggacatttcttgctggtcttgaaaagctagggaagggagactggaggggcatagcaaaaaattttgttaccaccagaacaccaactcaagttgcaagtcatgctcagaaatattttcttaggcaaactaatccaaacaagaagaagcgcagatctagtctttttgacatgatgccaagagagctgtcaccagcaccaaattgccccatattaccaccatcgatggcaaaagtacacgatgtggtagctatgacgaaacaacttcagaatagcaacttggaaggaacctcctcttcaaatgcagcatctcaagttggaagagatctccccccagttccatcttttaaggcaacaaatatggatccaagtttcagcaaatttagccacatggcaatttcgccgctacagggtgtctatgtggtatcagaaagttctcttactaagacaaaatatggagcgcgtctggagaactccctacccattcggaccagttcccagagcccctgaagggacgccttcaccaactcctgctgctgctgctgctgctgctgctgcggctgccaatgcagctgttccggtctctcaagctaacctgacgactgcctgtactagtaacacattcttgagccagccaaagccaagtgatactccgtcactgcctccgaagggaggtcctccatcagaggaggacggtttggaactgactgttgccccaccctcccaacagaacatgacgaacatgtcttcccagaatgcggtaggcgtgatccaagtcatctaagctaatatattttattttattttatttctctctctctctctctttctctctagaagttactgtggctgttgacagttattgaccgaataaatattaacattgtattagcaatactacatgaataagaagagcatgaggtataagcccatcatttgcctgtaa

SEQ ID NO: 118334 - DNA, 1314 bp, Zea Mays
agacatgataaaaaagaaccgtgcccgataaataagaagcgctgcctccgttcagggcctccgacacctcccaataaaaacgttcctccccgtcccactcgccggagcctggccgacgggatgcctcgagattcgcgcccagccgggatgcgcctcttcggcgtcaccatcgcgccggcgccggaggcggatccaccggtacgggatccgagccccaacccgcccgtggcggccagggaggacgtgatgcgtaagtgcaagagcatgggcaacctcgccgcccttggcgctgtcgtggacggtggaggaggtggtgcggacggcggaggcgccggcgacggctacctctccgatggcgggctgatgcagtcgtccgggaagcggcggagggcgcaggagaggaagaaagctgttccctggactgaagaagagcataggacatttcttgctggtcttgaaaagctagggaagggagactggaggggcatagcaaaaaattttgttaccaccagaacaccaactcaagttgcaagtcatgctcagaaatattttcttaggcaaactaatccaaacaagaagaagcgcagatctagtctttttgacatgatgccaagagagctgtcaccagcaccaaattgccccatattaccaccatcgatggcaaaagtacacgatgtggtagctatgacgaaacaacttcagaatagcaacttggaaggaacctcctcttcaaatgcagcatctcaagttggaagagatctccccccagttccatcttttaaggcaacaaatatggatccaagtttcagcaaatttagccacatggagcgcgtctggagaactccctacccattcggaccagttcccagagcccctgaagggacgccttcaccaactcctgctgctgctgctgctgctgctgctgcggctgccaatgcagctgttccggtctctcaagctaacctgacgactgcctgtactagtaacacattcttgagccagccaaagccaagtgatactccgtcactgcctccgaagggaggtcctccatcagaggaggacggtttggaactgactgttgccccaccctcccaacagaacatgacgaacatgtcttcccagaatgcggtaggcgtgatccaagtcatctaagctaatatattttattttattttatttctctctctctctctctttctctctagaagttactgtggctgttgacagttattgaccgaataaatattaacattgtattagcaatactacatgaataagaagagcatgaggtataagcccatcatttgcctgtaa

SEQ ID NO: 118335 - DNA, 210 bp, Zea Mays
atgggagtgttgggacaaagaaaggaaagaaatggtgactatcaaaatcattacgacattaagaagtacatgggtgctgcaatgatagaaattggcatgctcgagcagcttgcaaaatgtacctcttaccataacctctttcattttaacgataatcacaagaattcaagtggtgcctatattatgagaaagaaggattttggcttctaa

SEQ ID NO: 118336 - DNA, 429 bp, Zea Mays
aggttgctgcggagaagtttgtgagtttatctattctgataatggaactgtaaccatggtatatcatgtgaatatttaaaggaactgatagagagatacaatcaatctcaaatgaacttaaggataataagggtcaacatgagatatgttgttctaaaattgaaacaataaagggtaaatggcttccaactctgtggattcattcgtaactttcaagaaatggcagttgctcactactaacagcttatctacaacctaatgaaattcgttggtagtgtccacttcatatgtcataagttgaagagcataaatattctgaaagctcacggtaaaagcatcaaggatagttacatgctaaatggctatgcactaaagactaaacacaggccgtgcaggtcaaggaatgcctatgagagtaactcctactag

SEQ ID NO: 118337 - DNA, 1136 bp, Zea Mays
ataccccggtcctgaagtggtagaacaatcatctcccagaccgcgcgatggccttatcctcctcgcgagcgccgctgctgccattgttatgcttgctactaacagttgtagctgccgccaaacacccgaagcaggagaagcctactccggcggcgttggcgcccgtcgtcacacttgaaggctgccccgacaagtgcggcaacgtcagcatcccctaccctttcggcaccaaggacggatgcttccgcccaggcttcttcgtcgtgtgcaacgacaccttcgatccccctcgccccttcatcaactccagcctcgcgctcggcaccgacgacacgaggacgcagatcgtcgtcgaggacctgtactacctgaccgccgaggacggcatgccggagacgacaccgacaaggtccgcgtggccgatcgagctcgccggcgtgtctctctcggacgcgaaagcgcggctgctgggcgccttcagctacgagtgcaggctgaacgagacgcaccactcggtgcggcggcagaggatcaacttcggcgtctaccgctcgcccttcctcctgtcggacgccgacaacgtgctcatgggaatcggcagcaacgtcgtcgccgagcagaccaccggtccgctgtgccagtcctacctcaacctgatatccttgtcggacggccccgtcaacgggtcgtgctctgggcagggctgctgccaagccaacctaccccccgtccgctctgacagcacggtgaccatccagaagggcaccatgtacgaggacggtggctacggcggcggcggcggcggccgcgtcgactgctcctacgccatgatcgtggagaaggcgtggtacaacttctcgtcggtggacctcgacagcgacgcgttcctgcggaggaacgccgccggggtcgtccccgttgtcgcggacttcaccatagacggaggtggatgtcccgacgccggcgagccgacgcccaaggacttcgcctgcataagcgacaacagcaagtgcgtggaccggctggtctacgacaattccagggggcactactgcagttgctccgttgggtaccaagggaatccatacatccatggaggatgccaaggtgccaattcatacgttattccattttaa

SEQ ID NO: 118338 - DNA, 1303 bp, Zea Mays
gacattgatgagtgcgctcggccagacctgtatccctgccacgggaaatgcaagaacacgccaggtgattacgaatgtagctgtccagccggaaagagaggaaatgcaaaacaagcgccgtgcaccgacttgttttctctgcctgccaagatttccgtaggtgtggtaggtggccttttcatagcagcgctactggtgttcatcatcctaatccgcaacgagaagaggaagatggccgaatttttcgagaaaaacggaggccctacattagagaaggcgaagaacataaagatctacaagaaggaggagctgaagccaatcctgaggcgaagcaatttcatcggaagaggtgccttcggtgaagtttacaagggagacctcgacggccaatcagttgcagtaaagaagccagttgatgacagtgacggcgtgcacaatgaccagttcgccaacgaagtcatcatccagtcacgggtgaaccacaagaacatcgtgaggctgataggctgttgcctagaagtcgacaagccaatgctcgtgtatgagttcctctccaaaggcagcctcgacgatgttcttcatggaagcagacgtgatccactgaacttgaaatgccgtctggacattgctgcagagtccgcagaaggcctagcctatctgcattcgaaaacaacaaacgtcatcttacacggcgatgtgaaaccagctaatatacttttggatgaggactggacaccgaagatctctgactttggtatatcgaggctgattgtgaaagataaacagcacacggattttgtcattggcgacaggagttacatggatccagtgtatctacgagacgggctactcactgatagaagcgatgtctatagtttcggagttgtgatcttggagctcataagcaggaagaaggccacctattctggcaataatagtctggtaagggaatttctcgatgctcacaaaggtaaaatggaagcgaccaagttatttgatgaggaaattgccaagccagaagtttcagatcttcttaatagtctctatgagattgcagtgcgttgtctgaatcttgatgtggatgaaaggccaagcatgacagaagtagcagagagtattctgatgctgaagagatcctggagcaatacattgacaaaaacgtcgtcagccagttgataaagattgatatatgttatagcgtgcatgtgactgtactgtctttgtggaatctggtaacaagtaactactagttagtatgccagatgattaatatatgttatagtgtaattcatgtttgtggaac

SEQ ID NO: 118339 - DNA, 1109 bp, Zea Mays
gctccttaaaaacaatgggcagcaaaactagcaaatggttttaaactggcacgcattaaataggacaatattgggtgtatccgtagtgacgatctatttggagataaaacaaaaaaggtttgcatttatttggaggtatccacccacccagcagcctagccttttccactttataaacagaaagaaagaaggtgtacctatagaattggtccttgtgaaaggtttcaaaaacttacaagagactccatggcttcatcatcaactgagattggttcggatatgaccatctctgacactactacatctgaagtcccggtccatgaaatacctccggctgtacttgatgtgcaggaagaagaagagattgtatccgccgctgtgcccgtttctgtgcacgatgtggctcctttgcagcaggcagagataggtaaagatgtaccaaaacatgttgaaaaggaggttgaggttccccaatggctgaagagtcttgctggtgaggaagcacaggactggagagcctttgtccgcactaggatcaatgggcatactgataggacctatactcacaagcaataccgccaccagttccgttccaaagctgaagtcaaactgtttgtggattccaatgggatgacaacgggcatatttaaaggaagaaaacttcaaaagaagaagatagctggtatggatgctcaaggtgctggaacaagtgaatctgctgggagaagagcgtctgcctaccatgctagacaaaagcgacgacgttcacttggccaccagctgagccgttctgacgaaaagatgcctcctggtttcatttagattcttaatgatataatatcaactttatttctagaggaataaataaaggtacgtacgtacttggaggaaactatgtgagaataattaagctaggtgaacaagggcacctgcaaacgttcattatatttgatgcttgctatgctatatatggcggcggaattgtgttgttagtcgtgtgtttgttatccctaattaaactgctggtcgtagaccttgtagcagcaatgttttgcattgtaaacccttattgtatgcttgttatccctaaattaactggcctgaacagt

SEQ ID NO: 118340 - DNA, 108 bp, Zea Mays
gtggttaagacgaaagaggataagcttgtgtcacgtgtgttggatctaaccgtctcactgcggggaagtggaaaaagagtgtgtcgtacttggctacctcactgtgtt

SEQ ID NO: 118341 - DNA, 1732 bp, Zea Mays
ctacactacactacacacaagtgttagagctgacaccaacacccatgcaacactccctaaccttcctcttgctgatacccttgacgctcttcatcctcatcttctgccggcgccggcatgcgtgggcgcgcgaggcagcctacgcgcggctcgccgcggtcaagtcggctgtcgtcaagaagctccctggtctcggccgccagccgccggaggtcttcgtcaccgaccgtttcaccgcgcaccgcctgctcgtgggcggcgccgccgccggcggcgcgttctcggaccgcccgccgtccaccgtgcccagcgccgtgctctcgcgccgccggcactacaacataaactcggcgccgtacggcccgctctggcgcgcgatccggcgcaacctcacctcggaggtcttccacccgacgcgcctccgtcagcacgggcgcgcgcgccgcctagccctccacggcctcgtcgcggacctcgaccggcagcggcgcgcgtccggctccgcggtgctcgcggcggagagcctgcgcgcggccatgttcggcctgctcgccaccatgtgcttcggcgtgggcgtcgacgagggcgtcgtgcgcgcgatggccgacgcgcaggacgacctcgtccagtgcttcctcgggctgcgcgtcttcgccacgctccccgcgctcacggggctcgtctaccgggaccggtggaggaagctgctccagctccggcggcagcaggaggaggcgtacctcccgctcatcgaggcccatcgcgccggccggcaaaggcgcaatggcgagcccccggcgtacgtggacacgctcgtggacctccgcgtgccggcggacgagcacgccgctgcgtcaggcagcggcggcggcaagcgtcggaagcggcagcgcaggctcactgacggtgagctcgtgggtctctgctccgagttccttggcgctggcacggagcccgctgccgcgctgctgcagtggatcatggccaacctggtgaagcggcccgacgtgcagcgcgcgctccgtcaggagatcgacgccgccgtgggtgtcgacgccgacgaggtcggcgaggaggtcgtcgcaaggctcgagtacctcaacgctgtcatcatggaagggctccggctgcaccccaccgtgcccagagtgtttagaaaggtgatgcccgacgaccatgtcgtgctggacggccggcgtctccctgccggcaccgcggtgcactttccgctggcgcggctggcgcgtgaccagaccacgtggaccgacccgcgtgagttccggccggagaggttcctggccggcggcgagggcgagggcgtcagcctggtggcggccgcgggcagcgctggggagatcaggatgatgccgtttggtgccggccggaggatgtgccccggcatgggcgtcgctgtgctccacctcggttacttcgtggccaatctggtgagggagttcgagtgggcggaggccgaaggcgagctcggcgttgacctacggccccacctcgggttcttcacagtcatgaagcggccactgcgtgcgcacctcacgcggctacggcgggaggtgagctagctacagcctacagctagggcacctccacctccagagtggtccacaagtttatacaccatcagttctaaaataaaatttgttttaccttttaaattgattcatacaatacaagtttacgaaggttataagtgagctttatatatatatgtttaaat

SEQ ID NO: 118342 - DNA, 552 bp, Zea Mays
atgaagaccgctgcagccaccaccttagtcctcgccgccttcttgttcgtcgccggcgacgcctgcgccaacgtcccccagatgcgatggacggaggcatgcgtgaaggcgggcgagacggcggagctgtaccacgtgtgccaggagacgctgcagcacgggccggacgcggcggagctgaccgcctacgtggtcctggcggcgaggctggcaacgtggtcgtacgacgacacggtgggcagcgcggagcagctgatcgccgacgggtcgctcccgggcgcccagcgggcgtcctaccagcagtgcatcagcagctacggcacggcgcgcgtccagatggtgcgcgtgatggaggagctcgccggctgtgacttcacgcgcgccgggccggagctggcggccgcggtggccgccatggagtcctgcggtaaagggctggtcgccggcacgccgctggccgcctggaacgcggccgacagagacaggaccgctgtcgtgtatgacttgggcgccttgatcgtcggcagagctcctggctccatgaacccctag

SEQ ID NO: 118343 - DNA, 916 bp, Zea Mays
gggctggcgcgaggttcgttggaccaggaaaccgcggtcggcggagctctcgctctcgctctcgcttcgttgaaggctcccctcttcctccaagtataaaggagcctcctttccctttgccgtgctgtgccgcgcctgccattctcctcccgagccttctcttccttcacgcctctttgccgcagcgcgggtgggtcgtcgtttgctgtttgttccgagatcaccggagccagccagccagccagaggcagagatgaggtggtcggcgttcctgtgggaggccgcgtccggccgccgcccgggggtttccaacctcctcctcgtcgtcgcagccgccagtagcggaggtctcgtcgcgtacgccgactccggatcagatgctgctgtcgagcagccgcagcttcctccgaggaagaaggtcgtggtgcttgggactggttggggcggcacgacgttcctgaggaacctcgatagcagactgtatgatgtgcaggttatatctcctcggaactacttcgcgttcacgccgctgctcccgagtgtcacttctggaacagttgagcctaggagcattgtggagccgatccgtagggttttggagaaggtatgctgttctgcagagtttattgtgggttccttctcactgctaataggttctagcatttacgtcatcccgcgtgcttctctcattcttatttcaaaagagtcattggccatttttagatcattagattagatgccgttcttctgccttaacataggatttagttgtgaaccagagcagctgacaattgtcagtttgcagtgaaggtaccagtgcatcagtgctgtggacattgtatgacttgaatgtttatgtatagtggtagtttgattattgttttgtctagcagcagcttcagttctctgtctaaac

SEQ ID NO: 118344 - DNA, 2311 bp, Zea Mays
gggctggcgcgaggttcgttggaccaggaaaccgcggtcggcggagctctcgctctcgctctcgcttcgttgaaggctcccctcttcctccaagtataaaggagcctcctttccctttgccgtgctgtgccgcgcctgccattctcctcccgagccttctcttccttcacgcctctttgccgcagcgcgggtgggtcgtcgtttgctgtttgttccgagatcaccggagccagccagccagccagaggcagagatgaggtggtcggcgttcctgtgggaggccgcgtccggccgccgcccgggggtttccaacctcctcctcgtcgtcgcagccgccagtagcggaggtctcgtcgcgtacgccgactccggatcagatgctgctgtcgagcagccgcagcttcctccgaggaagaaggtcgtggtgcttgggactggttggggcggcacgacgttcctgaggaacctcgatagcagactgtatgatgtgcaggttatatctcctcggaactacttcgcgttcacgccgctgctcccgagtgtcacttctggaacagttgagcctaggagcattgtggagccgatccgtagggttttggagaagaaaggtggagaaatcaaattttgggaagcagagtgtttcaagattgatccacaaagcaagaaaatccattgtcgctcgaatgttgggacaagccttgaggggaatggcgagttcttggttgactatgactatctcgtggtagcagttggggctaggacaaatacattcaatactcctggtgtggtagagaattgccacttcttgaaggaagtagaggatgctcaaaagatcagacggagtgtgatggactgctttgagagagcaagcctcccctttcttaatgaagaagagaggaagaagaatcttcattttgttgttgtgggtggtggacctactggagtggaatttgcagcatctttgcatgattttgttaccgaagatttatccaagctttacccctcgattcagcaccttgtcaagatatcgttgattgaagctgcagatcatatactgaccatgtttgacaagaggataactaattttgctgaggataagtttggaagggatggtattgatgtgaaaactggatataaagttgtgaaggtttctaaggatgatattaccatgcaaaatcctgccaccggggatatttcagtcccttatgggatggctgtctggtcgactggtattggaactcgtccattcgttgtggaatttatgaaacaaattggccaggctaatcgccgtgtcttggctactgatgaatggctaagggtccgtgaatgtgatggtgtctatgcaataggtgactgtgctacaataaaccagaggaaagtaatggaggacatttcagaaatattcagagtcgcagataaagataagtctggaaccttgactgtgaaagaaattcaagatatccttgatgatatctacgtgaggtacccgcaagtacagctctaccttaagagcaagcagatgaacggcatcgctgatctagtgaggagcgccaaaggagacgctgagaaggaatccgtggaactgaacatcgaggaattcaagaaggctctttcgctcgtggattcacaagtcaaattcttacctgcgaccgctcaggtcgcatcgcagcagggccaatatcttgctaggtgctttaacaagatgaaggatgctgaagaaaaccctgaaggcccaatccgcatcaggggagaaggccgccatcgcttccgccccttcaggtaccggcatctgggccaattcgccccactaggaggggagcaaactgctgcacagcttcccggggactggatctccattggccacagctcccagtggctctggtactccgtgtacgcaaccaaacaaatcagctggcgcacgaggatgctggtggtatcagactggacacgccgattcatcttcggaagagactcgagttgcatatgatcaagagggaaaagattttgctgtgacatatattcagatgaacgaggccagtacagcctcttcccactttttttttagtctgatttcacataaatgttccccttttgttgttagggaagaatctgacttcccctgcactttgtatagtgcaccacgaagaaattcctttgtacctaccttttctttttgagagagttgcactgcacttttgcggtctgagtaagctcagaattcttttaatagctattttttctaccactaatatgtgatatggagaagggtcagtttggacctgattttgttgtgtgaaatcctgttttggct

SEQ ID NO: 118345 - DNA, 1382 bp, Zea Mays
gtttaactattgccccaacaatttctcggcatgtttacctggcgtaagttacattgtttactagactaacggttgcttgcatttcctgaaggtttgacaagaggataactaattttgctgaggataagtttggaagggatggtattgatgtgaaaactggatataaagttgtgaaggtttctaaggatgatattaccatgcaaaatcctgccaccggggatatttcagtcccttatgggatggctgtctggtcgactggtattggaactcgtccattcgttgtggaatttatgaaacaaattggccaggctaatcgccgtgtcttggctactgatgaatggctaagggtccgtgaatgtgatggtgtctatgcaataggtgactgtgctacaataaaccagaggaaagtaatggaggacatttcagaaatattcagagtcgcagataaagataagtctggaaccttgactgtgaaagaaattcaagatatccttgatgatatctacgtgaggtacccgcaagtacagctctaccttaagagcaagcagatgaacggcatcgctgatctagtgaggagcgccaaaggagacgctgagaaggaatccgtggaactgaacatcgaggaattcaagaaggctctttcgctcgtggattcacaagtcaaattcttacctgcgaccgctcaggtcgcatcgcagcagggccaatatcttgctaggtgctttaacaagatgaaggatgctgaagaaaaccctgaaggcccaatccgcatcaggggagaaggccgccatcgcttccgccccttcaggtaccggcatctgggccaattcgccccactaggaggggagcaaactgctgcacagcttcccggggactggatctccattggccacagctcccagtggctctggtactccgtgtacgcaaccaaacaaatcagctggcgcacgaggatgctggtggtatcagactggacacgccgattcatcttcggaagagactcgagttgcatatgatcaagagggaaaagattttgctgtgacatatattcagatgaacgaggccagtacagcctcttcccactttttttttagtctgatttcacataaatgttccccttttgttgttagggaagaatctgacttcccctgcactttgtatagtgcaccacgaagaaattcctttgtacctaccttttctttttgagagagttgcactgcacttttgcggtctgagtaagctcagaattcttttaatagctattttttctaccactaatatgtgatatggagaagggtcagtttggacctgattttgttgtgtgaaatcctgttttggctactcattgtgtgctgaactagtggttcagttggttacatgaa

SEQ ID NO: 118346 - DNA, 957 bp, Zea Mays
gcagcacctgaacacgggaaatcccctcgctcgtgtctcagctactgtggccactcatttgccagcaagtggcattatatatattcgttcctccggccgacggccagtacgtacgtaggcgccgacgagctaggtctcgccgccgccgcctcgctcgcggtagagaaagagagagagagaaacagatcgagatatagaacgagaaattttaataaagagaggcgagctagctatctaggtagagagaggccgggccggccgcgcgggggcgggcaagcaagatagaggccgggagcgtgcgcaggaagctgatgaggctgctgtcgttcgtgccctgcggctgccgtgctggacccatcgacgacgcgccgcccacggaccaccacgccaccgcgaggaaccgcaggatcgtcgggaggagggcaaccgccgccaggtcctccgcctctgcggcgcactggcgcccctcgctcggggacatctacgaggactacagcgccgacgcggccagtaataaggccggcgacggcgggccggcgaggggcaggaaagcggcgtcctgggacgtcgcccgggtgctgccccgcgcgcacagcgatgaataccggcaccttgagcgcgcgtcgtccatgccagcgttcgcgccgatggccttccttttctgatcacgtcgtcggcggccgccagccctcgacgacgatgaagtactgcgggaagcatatatatacagattactgtcgacgtattgtagaaccaatgatatatatgcatgcatatgcacatccatcaggccggaataaatctatgcatgcttttgtgtgtgtgacgtacgtgtctatgtatatgtgatgatttggatgagctagctagagtcgtgaacgtacatgccatgtacataattactagtatagttatagtaattaataatactagctatatagctaatagatatcgaaa

SEQ ID NO: 118347 - DNA, 3618 bp, Zea Mays
atgggatctggccgcgccgtcatgctctgtgggacccttgccctggtgcctaaagatcttgcgctgccaccctgccggagcacgagagggtggggatcatcgggcggacaaggcttggtcggcggacaccacagcggcggggagcgaccacagttttggctaccccgcgggaagaagatgaaggaggaccgttggatgcgcgatgaagaattgagcaggcagaggaaacctgagcgcaatggcagtgtatttacacctatagctgcaatgtattccagtggtcatgcactccctgttgcaaataggagccacggtttggtatttggcagtctgagcaaggactgggacgacattcgccagcgcaaggatcagttggtcaacttccttgctagtcttgaacgagcctctggagattctgcggcagctggcaaaatcgaagatagcaaattggccagtcctgtggagccaactgaacaaaaagagaaggctgccataatcgttcttgattcagacgatgaggacggaaatggttcaggaaacagtaagttggcatctgagactaacaaagaactcggaacatctggattgattaataatatcgcagaaaggatgacgtttaatgggagccaagcatttggaaccgtgcatacttatggagataagaacacacagattgttccgtatggtcaatgttctgctttagtgaatcagtttcctttgcaaaccagttggcaaccatctattcagtttgagagagtcgtgctgcagaaaaggcctgaggagcagcgaatgcaagatcttgtggctgctagcatagccgagaagagagcagaaacacaagtgttcctttcacttcccacagagaaaaagcgaaggagatcagaccccagtctgcatgccagtgacgatactgctactgtccctaaacaaagaaaaagtaaaggtgccacagttgtagcagcagctaatttgtcattggtttcacaacaaactgctacatcaccagaacctgacatggttatagaggaagaggagaaacataaaaatgaaagtgatggtcttgacgattattggaaagattttgcattggctgttgaaagcacaaagggaggagagagttacatgcttgctggcggtgggctctgtccagtagaggttcagtggctgatatgtacaaccgtagtggtaggtatcggagttcatgttgttgagtacgacatagttggtaaacagtgcacgcttgccgcttgcggggccctggatttagtaggaacagggcatgccctcctggggcttggggctggtatgagccgggcccactgcgggttttcttctgctgacaggatctcagaagtcgtattgctaatatccgggcttgacgaagttgatgaggcggcaattgaaaaggaagataatggaaagatggaggacatcgattgcaatcatgacatccggattcatgaagatttgggtcatgtatgccgtgtgtgtggtatgattgtgagaagagctgattcaataattgattatcagtggaaaaaggcttcaaggagaagaacgaatggctatggaggacattcaaaagatgctgatgagatagattgtggtactgttaaactgtctgaagatttcatagtcgcagatattgctattcatcctagacatgctcggataatgaaaccacatcagttggaaggtttcaactttttggttaagaatttgattggagacaagcctggaggttgcattctagctcatgccccaggtacagggaaaacatttatgcttataagcttcattcagagcttcatggcaaggtatccatctgcaaggcctcttgttgtgctgcccaaagggattctaggtatatggaagacagaaattaaacgatggcaagtgcaggatataccagtgtacgatttttactctgtcaaggctgaaaaaagagtagaacagttgcaaatcctcaaatcttgggaagacaagatgagtatactatttcttggatacaagcagttctccacaatcgtcactgatgatgggggcagcaatgtcacagctgcatgtcgagacaggctgcttaaggttcccaaccttctgatacttgacgaaggacatacacctagaaatcgggagactaatgtactcgaatcactaaatagagtggaaacaccacgcaaagtggttctttcgggtacacttttccagaatcatgttgaagaagtgtttaatatcttgaatctcgttcgcccaaagtttctcaggatggaatcatcccgtcctactgccagacgtataatgagtcaagttgaaatagttggtagaagttcgaaagggcttgctgatggcgcattcactaaggcagttgaagaaaccttattgaatgatgagaacttcaagagaaaagctcatgttattagaggtcttagagaactaacaaaggatgttcttcactattataagggtgatatcttagatgaactacctggcttagtagacttcagtgtgtttttgaagctcacacccaaacagaaagacattatttataagttggaagcacatgatcggttcaaaagaaatgcagtagggagtgcactgtacattcatccatgtctttcagaactttcagaggttaatgctgagcatagggctaacacctttagagatgatttagttgatagtctggtagattctatcactgtgagagatggcgtgaaggccaattttttcatgaatatcctgtcacttgctaattctgcaggagagaaagtgctagctttcagtcaatatatatctcccatgattttctttgaaaggctgctggtgaagaagaaaggctggcatgtggggaaagagatctttatgatctctggtgatactagccaagaagacagagaattggcaacggaccattttaacaactctgctgacgcaaaaattatgtttggttctatcaaggcatgtggggagggtatctccctcgttggtgcgtcgagagttgtcattctggacgtacacctgaacccatctgtcacccgtcaagcgattgggcgtgcattcaggcccggacagcagaagaaggtgtttgtgtacaggcttgtagctgccgattctgacgaggtaaaggtccatgagacagcattcaagaaagaagtcataccgaagctgtggttcgaatggagcgagcactgtactacggaagacttcaaacttggtcaaattgatattgatgactctggtgacgaactgttggatactaaagcaatccgcaaggatatcaaagcgctgtatagaaggtaacaagctttgtggccactggacaccatgtacatattgcagtgctgaccgtcgagctgatccttaaactgaagaaagaggtgacgggtgttgcggtggctacattgcgcggtcattcccagctatatccgtggaatggcggcttcttttgttcgtagtatgtgccaacttggggcagcagtcagctgatccccagacacatttctagactcttttttaggctcaagtttctgagaattaacctgctatggcgtttagccttaagtaaatatttcgttcgcaacaataataacccagtaaacctaatttgttcttgtgcgt

SEQ ID NO: 118348 - DNA, 1321 bp, Zea Mays
caaccacgggcgcgaaacgcgaccgggtccacctgtcatccataccacggctcgccttcctaatctcgggactcgggtccgcgatgcgagccaccaagagatccacgaatatacccatcccattccccacaaggctccgtcccttcggcggcggcggcgatgtctctcccccctggcccggcggacagtggcaccggcaccggagacgactggttcctcgactgcggcatcctcgacgacctgcccgccgcggcctgcggagccttcccgtgggacgcgtccccgtcgtcttccaaccccagtgtggaagtgggcagctatgtaaacgccaatgatgcattcaaggagcccaatgatgtcttcaaggagcctggcagcagtaaacgtttacggtcaggatccagtgatatgccaacatctaaagcttgcagggaaagaatgaggaggaacaagctgaatgacaggtttcttgaactggggtctgcattagaacctgggaagccagtgaaagctgacaaagctgccatcctaagcgatgctactcgcatggttattcagctccgttcagaatcacagcaactgaaggagactaatggcagcctcgaagaaaagattaaagaactaaaggccgagaaggacgagcttcgcgacgagaagcagaaactgaaactggagaaggagagtctagagcaccagatgaagctgatggcatcggctccagcctacatgccccatccgaccctgatgccggcgcctttcgcccaggcgcccctagctccattccatgcccagggccaagctgcagggcagaagctgatgatgcccttcgtcggctacccagggtacccaatgtggcagttcatgccgccttcagaggtcgacacctcgaaggacagcgaggcgtgccctcctgtcgcatgatcaccttgatggggctggtcctgctcacaccatgtggattagccgcaactagttgtcgttgtcgatccattgatggggtataactgatgttcttaggctatctccagcagcctctctatcctattctctatcttactccctattttaaattttactctgtaaacagtacagtctatagtgtaagacaatgttttgcatgtttatatccacgcttggctggagatgggcatggtagtctgttggtgaccaaggaagctgtgatatctgtggcgaggtgccctgctagaggctcctttaatgggtgtacaattttcgtggtggaaagaagaatgttcgttcttgttctccatagcaacagtgtcatattatctatctatgccatatatattttatatttgac

SEQ ID NO: 118349 - DNA, 1276 bp, Zea Mays
caaccacgggcgcgaaacgcgaccgggtccacctgtcatccataccacggctcgccttcctaatctcgggactcgggtccgcgatgcgagccaccaagagatccacgaatatacccatcccattccccacaaggctccgtcccttcggcggcggcggcgatgtctctcccccctggcccggcggacagtggcaccggcaccggagacgactggttcctcgactgcggcatcctcgacgacctgcccgccgcggcctgcggagccttcccgtgggacgcgtccccgtcgtcttccaaccccagtgtggaagtgggcagctatgtaaacgccaatgatgcattcaaggagcccaatgatgtcttcaaggagcctggcagcagtaaacgggaaagaatgaggaggaacaagctgaatgacaggtttcttgaactggggtctgcattagaacctgggaagccagtgaaagctgacaaagctgccatcctaagcgatgctactcgcatggttattcagctccgttcagaatcacagcaactgaaggagactaatggcagcctcgaagaaaagattaaagaactaaaggccgagaaggacgagcttcgcgacgagaagcagaaactgaaactggagaaggagagtctagagcaccagatgaagctgatggcatcggctccagcctacatgccccatccgaccctgatgccggcgcctttcgcccaggcgcccctagctccattccatgcccagggccaagctgcagggcagaagctgatgatgcccttcgtcggctacccagggtacccaatgtggcagttcatgccgccttcagaggtcgacacctcgaaggacagcgaggcgtgccctcctgtcgcatgatcaccttgatggggctggtcctgctcacaccatgtggattagccgcaactagttgtcgttgtcgatccattgatggggtataactgatgttcttaggctatctccagcagcctctctatcctattctctatcttactccctattttaaattttactctgtaaacagtacagtctatagtgtaagacaatgttttgcatgtttatatccacgcttggctggagatgggcatggtagtctgttggtgaccaaggaagctgtgatatctgtggcgaggtgccctgctagaggctcctttaatgggtgtacaattttcgtggtggaaagaagaatgttcgttcttgttctccatagcaacagtgtcatattatctatctatgccatatatattttatatttgac

SEQ ID NO: 118350 - DNA, 890 bp, Zea Mays
ataccacggctcgccttcctaatctcgggactcgggtccgcgatgcgagccaccaagagatccacgaatatacccatcccattccccacaaggctccgtcccttcggcggcggcggcgatgtctctcccccctggcccggcggacagtggcaccggcaccggagacgactggttcctcgactgcggcatcctcgacgacctgcccgccgcggcctgcggagccttcccgtgggacgcgtccccgtcgtcttccaaccccaggtccgcccagatcgaccgaccgattcctcccttccccacgccacctcctagttccggaaggcacggatgctttgtttggcgtacggtcctggcgacaggtcccgtgaccccggcgttccgtatctttgcgatgagtatattgtggaatcgtgacgggcggatgaattgttttggggatttgggctgtgtagtagtctactagatgcatgcgcgtggaggcgtctgatccgtagaggtggtttctttacactgcggatcttccagtctgttgctcgtgctataaacctgccgaggctgcttttgtacaggttaaattagattagagttcccaaacaaaaaaaatggtttcctaaaaaaacaaggctgctgagtttgcgcgctgcaagataacttgccttggtaggtttgttctcgtgtttccgtgactgtgcttatgagttatgacagtggaacggatgtattacgtgtgactatgaccaatgatttgctcaaacgattgagatggatgttttaattgattgatggcgattgtaataccagtcttgatgataagtggtgtggctgcgagtgatgggatgccatgtgttgctcggccatggatggaaatggaatcgtgacacctgactgga

SEQ ID NO: 118351 - DNA, 434 bp, Zea Mays
ggcgctccgcgaagtaaagggggctctcacgtccaacgtagtccttgagaataccgtcaacgctacctggaactcgtcgtcggtggcgagtgcgtggaaggcgttctcgagctcggtgagcgcgtgcatgagcgtctcggggacgtacttgccgccgaacctcccaaacctccccatggcgtcgggccgctgcagccccgcgaccgcggcgccgttccccatctccagcgcggcagcgggggaggccgcctccgcggcgaccgccttggccggctgcattgcggcctctgccacggcgcccctgcgcgggcgggcggaggaggaggaggctggcgcggcggacgacgccacccgcagcaccgcgcgcggctgggtcggcgcggcggcgcgggtagggcttccgcgaatggcggcggccatgggaacaattcgag

SEQ ID NO: 118352 - DNA, 346 bp, Zea Mays
cagcgtgggtttcccatcttcagggatattcgtcaagaataccggatccgatgggatgatctgcgttggcgtcatcgactgaccttgttgtgcccgaggactatagatgatgtttgcaatgccaccaacggcgctcctgtcgagcagctccaagtatacagtggcaggcattccggatctgattggatgatctgtgttggcatcaccgcctgaccttctgggcaagttctaaattccatatctcccagacctgctgggctaaaatcatgaaatttcataatagcaaagatgtctagacccctataatttttgtattaccaagtttaggagaaaaagtgtctacccc

SEQ ID NO: 118353 - DNA, 1045 bp, Zea Mays
ggaggaaggagaagagggagagagtggtggggattcggcatggacatcatcacgcagctgcaggaccagctcgacgagatggccgtgctggccgtcaacaccttcggcacgctgcagagggacgcgccgccggaccgcctctccagcagctaccctgacccgctcaaccccaaccctaagcccgaggacgactccaaaccccaggtccaggcccagcccggcgcgccgccgccgccaccggcgcaggcgcaggcgcaggcgcagccgcccgcgcctgacctcaccgagcaacccaaggctatgagccgcgccctcgtcctcgcggccaagaagtttgatgcacttgttgcagcagtgccactatcatcagaagaggatcaagtgaaaagaatccaagagctacaggcagagaatgaagtcgtgggactggagctccagaagcaacttgaagctgccgaaagggagttgaagcaggttgaggtgctgtttaatgaagcaacagacaattgcataaattttaagaagctagattaattacgttaatgtttgctgaaaagaaactgttcctgtggatggagtgtggaggatgaatgccagtaagaactttatattccgtcttttcagattctctactagtgaacaataattgcacttagcttttgtgtactggcattctgatctgccggattaggattgacctttggttgtaaggtgcaatgtttttagtatgaactgacgcttgaactgtggtggtctttttaatggatctggcacctggcttcctctgggatttcttctatattttggtatttgttcagtacctgagacctttgacacctgttcctaaactcccctccagccactggcctggagtagaactgtatttgggaaataaaagcacggaaattctctctacagtgctcagacatgatactggttggttctgcaaggatactccctgctcactcacacagacacaataacaaaacaaagagaaggaaaagatgcatcattcccctacagccttattcatcgtccgttgagc

SEQ ID NO: 118354 - DNA, 630 bp, Zea Mays
actagtcttcatatcttgctccattgcataagataagatgtttatcccaacagtgtacagaacaatcttcatctcttgctccattacataagataagatgtttatcccaacaatgtacataacgtagagtcttcatctcttgctccatttcataagataagatgtttatcccaacaacagcgtacagacgtagaatcttcatctcttgctccatttcctaagataagatgtttatcccaacaacagcgtacagacgtagagtgatgcatacgggagggagggagtgagggagatcactttgtgttaaccatggttgaaaacttgaaatgtaaagactggcaaactttagttcaaattatgcttgctgcagttccaactttttccccttaaatgaggaacaattatggccttctatgcagtttgatgcacttgttgcagcagtgccactatcatcagaagaggatcaagtgaaaagaatccaagagctacaggtagatatcagacagtcagattaattcatcgagcacaggatgggcatctgccaaactcctactccaaataaactgtatgaaaatctgaaatttgcaggcagagaatgaagtcgtgggactggagctccagaagcaactt

SEQ ID NO: 118355 - DNA, 2706 bp, Zea Mays
ctctccccgttcccctgccggcctgccccaggcccccagctaaaccgccgccgagacgcggcattcccgtccctttcccgccgccactaccttcgccttcgcgccacggccgattctcccatggcgcaggcctcgtccttggtggcggtgctgcgccgccgcacccccgccgctgcccgcctgcttcctcaccggctcgtctcctccgctcccgctccggcgttcgcctcgtcctcattggtcccgctccccttgccaagcctgatcgagggagacagatgcggcggcggcctctccgcttcgttcggctcccactcacgcctccggcttcctcggcgacaccatgcggttgctatggctaccaggacagcgcaccaagttgcttcgagccccgagagcccagcggcggtgacgtcgttgtcgtcaagtgaggctagcactagcactgctgcttcagagcactctgagttggtcgattttatcaagtcagcgtttgggaagcttgaaggtcaaaatcattgttggttcaacatcatgaatgacacttggatgaacttgaaccatgaaggaatatatcttcttcttttgtatcaatcttgtggaacattgaacaacgacggcaaacatctaattgcttttgagagcttgaaacatctgcaacagaggtatccacgcctgaatgtttttgctttgcaacatgggagtgatgttagttctttagcttctcaaagccaagctttccgcacaatagtgaaggagtacatcacatttcctatcttgatctcagacaaaaacttctccaatatgacaaatggtgcttgctacttgctatttgaaggttctaaggaccctgtactattcacaaactgggttgaggagcctgatgtcatgattaaggccatagatgaacttaccacgtctaaagaaaaaccttctgaaaatgttctgtcaagagtttcttggcagaaagaagaggttgtcaaagagccatctgttggttccttcagaaacttgttactttaccacccagcatgtgtatcagttgatgaagatggggatcgcatttttatctctgacagtaaccatcataggatcatcattagcaacagcaatgggatgattttagattatattggatcttccccaggctatgaggatggagagtttgagtcagccaaattcttgcgcccagcttcatcattttatcacgctgctgaagactgtctatttattgtagattcagagaatcatgcagtcagaaaagcagatttgggaagaaggactttacaaacagtttatccagtcttcaataaaagcaatggcatctggagctggattaccgataagcttggtatgagaaaagaagctactccaactattcaagattttcatgcagactccatggcacttccatggcatttgatacaaatttcagaggacaccttattagtcgcagaccgcagctttgaaactccgtggaccctgacaatatcaactggcgaaaagcaggatattggaagaggcagagctgaaataatggagtcatatcagaaaactgtaaaagaaaggtgtgctcttattaaggatatgcacatgaattggtcatcaagtgctagagtgctttctgattcagtgcagaagattcccaacaatgagcttatatcatctatagcaagatttcagaattacattgtcttctgtgatacagatggtcaaagggttctgaagcacgacttggataccaagaccacctcaaccattcaattttctgactgtgaggtacttgggttgccatattggtctgtttgcaatctcgagagagtgtcaacctgggggtattcatctggacagttacaggagcatgcgcagcaagtagacgtgcttcctggaagatgcaacatcaccgtctacgtggacattccggttggcactgaacttgccgcgcctttggtggataattgcatctggcgccaagtaaggggatctggcgctgaggtctctggttctgatgggccagacacggccacagagaaggtcggcatcgcgcagcagtggtatgacgagctggacaacctggccttctctgaggtggcggaggagcctactgccgctgcgcatggagacggcaacactgacgatcaaagttaccaggagcagagaagagtgcaattcacctgcacagtgaacgtcagccctgggacgtgtgagctggtggcctctgtcgcgctgtatctgaggctggctggaaagagaacgacgaccgacggcgtggagctcgtcaagcgggtgatgggcgggtgccagttccgcgaggagcaggccggcgtggagctgctggcgcggtgccgcgaggacgacgacgcgacgggcctggtggtggtgaagccggtgcacctgcggctgcggctggtgtgcggcgaccacccggccggcgccaccaacaaggagaccatcagcaccgagtccagcctcaagatcaatgtcaccttggactagctagtggttctgaattctgattttggattttgatccgtgtctatttttattctttggaacctgtctatttttattctttggattttgatccgggctggcgatgggaacgtgtcagtacgtgtatgcgactatgcgatggtaaggaacaagctgactgacaccatctcatgtactggagcaatatagttgacctagttgtgccgagaactt

SEQ ID NO: 118356 - DNA, 1893 bp, Zea Mays
cgcgtaaataagaaaaaaaaatagagagaaggcaatgcatgttgtcgaaacaaacgctgattatttaagctctctcccttgagtagtagtagccaagcccaagaccaagtgaaacatcaacacttccacgttccacccatggctaattctcatcaccggtgcaccagcgtcgcctccgagctggaaggcacgctgctcatctccggcagcctcttcccatacttcttcctcgtcgccctcgaggccggcggcccgctcagggccctgctcttgctcgccgtgtaccctctcgtcgcgctgctcggcgccgccttctcgtgggacgacctacccctgctcgccatgaccttcctgtccaccgccggcctcgacgtcggcgacgtgaccgcggcggcgcgggccacgctgcccaggttcttcctggccgacctgcggggcagcgcgttccgggccttgtcgcgccacgccggcggcggcgagaggtacgtcgtcacgcacctgcccaggctcgtcgcggagccgttcgtgagggagtacctcggcgccgacgtccgcgtcgtcggcacggagctgcgggtggtcgcgggtaagaggttctcaggcacggtggtggtggcctctcccggcgtcgcggcggcagcggctggcgccgaccgcagcctgggtgctctggtggccgtccttgggagcgaccgggtcgtcggcgtggggctctactgccccggcgccggcggggaccagcagccggcgtttctgcaggcttgccaggagcgccgcatggtgtccgcgccggagaaggcggcggcggtgcccctgccgaggagcgagtacccgcggccgctggtgttccacgacggccgcctcgtgcgccggcccgacccgctcgcgtgcctggccatcttgctgtggctcccgctcggcgtgctcctgtccgtgacgcgcctcctcttcggcttcctcccgcacggcgccgggctcctgctgtccgcggccacgggcttccggatgcgcggcagcctcgggggagcggcagcggcgggcccgcggcgaggcacattgttcgcgtgcaaccaccagacgctgatggacccggtgatcctcgcgacggtgctgcgccggaaggtgaccgccgtgacgtacagcctatccagcttctcggagctgatcgcgccgatcccgaccgtccggctgacgcgcgaccgcggcagggacagccggatcatgcagcgcgagctcgcgcgcggcgacctggtggtctgcccggagggcaccacctgccgcgagccctacctgctgcgcttcagcccgctgttcgcggagatcgccgacgaggtcacgccgacggccgtgcgggccggcggcgccatgttccacggctccaccgtgcggggccacaagtggctcgactccgtcttcttcctcatgaacccggcgccgtggtacgagatccggatcctggccacctgcagtggcagtggcggcgcgtccagcctcgacgtggccaacggcgtccagcgcatgatcggcgatgagcttgggttcgagtgcaccgggctcacgcgcagggacaagtaccggatgatcgccggccacgacggcgtcgacgcgaggtcgtcgccgtcgtcatagctggagaggttgcatgtgccagcgtacgcttgtggggactcatgcacagaaatgcaaaacgttcaactggttctccttctccatgaccgccctgctcttaaacacagacattcagtgttgcagcgactaggctccattcttcccttgactttaatttaaagcccgaacaaaaaaaacacattttcaggaaatgaccggtttagacggttttggtacaagcccaaccaaaatttagtgattttttatgttccttaaaaggaagaa

SEQ ID NO: 118357 - DNA, 1787 bp, Zea Mays
ccttataaaagccatgactgccgccactcgactcagtaggttaaagcgacgcccgccgccgcaagccgtccgccttgcccctcgaaggcttggtcctcctccttgtatcccgacctcccccgcgacagacccgtttccccgctaggctagagttatcgttcctctgcagcgatggcgatcaagcggaccaaggcggagaagaagatcgcgtacgacaagaagctgtgcagcctgctcgatgagtacaccaaggtgctcatcgccctcgccgacaacgtcggctccaagcagctccaagacatccgccggggcctcaggggcgactcggtggtgctcatgggcaagaacacgctcatcaggcgctgcatcaaggtctacgccgagaagaccggcaaccacacctttgacccgctcatggacctgctcgtcggcaacgttggcctcatcttcaccaagggagacctcaaggaggtgcgcgaggaggtcgccaagtacaaggttggggctcctgctcgtgttggtctggttgctcctgttgatgttgtcgtgccccctggcaacactgggctggatccctcccagacctctttcttccaggtgcttaacatccccaccaagattaacaagggtactgtggaaattatcacccctgtggagctgatcaagaagggtgagaaggtgggctcgtccgagtctgctctgctcgccaagctgggcatccgccccttctcgtacggtctccaggtcaccagcgtctacgaggatgggtctgtgttcagccctgaggtgcttgacctttctgaggaggacctaatcgagaagttcgccactggtgtctccatggtcgcttctctttccctggcactatcgtacccaacccttgctgctgtgccccacatgtttatcaatgggtacaagaacgtgcttgctgttgctgtggagactgactactcgtacccacacgccgacaagatcaaggagtacctcaaggacccgagcaagtttgctgttgctgctcctgtagctgctgcggactctagtgctgctgctgcccccaaggaggaagagaaggctccagagcctgccgaggagtcggacgaggaaatgggcttcagcctgttcgacgactaagccgctcttatcgtccatccgccgcaagttttgcttctgcttattattttagtgcattatgttttagtagacaaaccatgttggtgtaattgacaatgttatctccttaaatgttgaaagtgcccgtgttgtgtcacttgttattggtttcttgagctagtttggttctcttctcttgtgaaaaagatgtctcccgtaaagacacctcttcaagtgatgtcatctaccacaagacatcttttaaagcaatgggttagacatagattagttaatcatgtaaccaaagggtatgtactttggcatggatggcagtgaactttgttaggattggatggcttgaaattcagaacatctgataatcgttaggaccagctaacggcttagctaactaatgttcttcatggaaatgttgcagcctattccatgtggaaaggattgatgaagaagatgcaacatgcgaggatgaacgttgagattcgtaattttttttaatttagtgcactttgtatcaaattttgtatgaatttatattttatttatgaatatatattacctataccatatctggagcgtgcaatctattttttaaatggtatcaaataaaaggactaagcgcactgtagaaaagtattcagaggacacgaaaatggcacacc

SEQ ID NO: 118358 - DNA, 2620 bp, Zea Mays
tgaacctcttctcccagactggacgtctgcagtctgcactctgcacccccgtgccaatcccgtttctattcagtcggttcccctctcccccaagccaaacaccaccatccttccctccctccctacgcatcctctccccctcgacgctttccccacccaatccgaccgccggggcgggcgattccctggagattcggcgcggattcggggctcctctcggggtttctcggcgaatcagcggggatcgggactcccggctgaagaatcctctatctgtttcggtaactgtttgcaacagtttgtgtggagattgcataccatcaccttccctgaagtgaaaaatatatgggctgatcttggcatttcatgggaggttctgaagatgacgagccaccctcaaaacgcgcaagaacatcctcagtagaatctgcaagtttaccagactgtttctcgttttcgaaattttccaatcctttgggaagtacaatggctagacctttgccttcccaagggaaagaagttatggttggttccaagggtgttattaagaaggaggaatttgttaggataatcaccaaaactctgtatagtcttggatatgaaaaaagtggagcagttctggaggaggaatcagggattattttacataaccctatggtgaaacttttcagagaacaggtgattgatggaaattgggataatgcggtggttaccatgaatacaattggccttcaagatgaaaacatcttgaaatctgcggcatttttgatattggagcaaaaattctttgaacttctaaaaaatgacaatgtcatgggtgctatgaagactttacgatgtgagatcacaccccttggtgttaatagaaaaagagtgcatgaactgtcgacttgtatgatttcttgttcttcacagcagttgttccttggtttttcaaagcttggaattgattcttctagttcacggttgaagcttctagaggaattgcagaaggtgcttcctccagctgttatggtgccagagaggaggttagaaaatttagttgagcaagcacttactgtgcaaagagatgcttgctatttccataattctgttgatgggttgtcactttacattgatcatcactgtgggaaagatcagataccatcttgcacgctacaggttttgcgtgcacatcacgatgaagtgtggtttattcaattctcaaataatggaaagtatttagcctcagcgtcaaatgataaatctgcaattatatgggaggttgatgaggatggagagctattactgaggcatacattgagtggccatcaaaagtcagtgatgatggttgcatggagccctgatgattgtcagctcctcacatgtgggcaggaagaaaccatccgacgctgggatgttaaatctggcaaatgtcttcatgtttacgagaagtctgccactggtttgatatcatgtgcttggttcccagatggaaagcaattatctggtttagctgatcaaaacttttgcatttgggatttagatggtaaggaagtagattgctggaaagggcagggatcaacaggaacatctgattttgctgtagcaaaagatggaaaccttataataagcatgagcaagcagaacacaattcttctatttgatagggagacaaaacaggagagaataattgaagagggtagtacaattacttcattttgtctatcagaagacggtgatttcctgcttgtaaatcttgtaagcgaagagattcatttgtggaacataagaaatgatcctgttcgtgtcaaccggtacaatggtcataagcgcacccggtttgtgataaggtcttgttttggcggatttgagcaggcgttcattgctagtgggagtgaagattcacaggtctacatatggcatagagccactggcgatctcattgagactcttgctggtcactcgggcacagtcaactgcgtcagttggaatcctgcgaatccccacatgctcgcctcagcgagcgacgatcacacagttcgtatatggggggcaaagaagtccagtcttaagcgcaaggatgttgggagcagcaattgcaacagtaacggttctcgctcgaatggcaatgcacataacaacgttttcgttcaaaagtgcaacgggaacaacaccaaatgatttgccagggcaatgtatccccatggatggttgactggcgtctgtaaatccccctgtcctttacttccctcgtggaagaagaatcgccaccgccatagttaagacaacaacaacaaagctgcagcacaaagtgtggggaacctgctaggtttcgtgcgctatctttcccttgttccttcatgactgtcatcacatgtatttcttaattcaagctgggatggaattatggtattactttgcatctttgatatcttgatttgccctctctgattgattgtaactgcattttggtggtgatggttgttaactcctcttattgcattttgccttgagaagaaacaaatgttggcctaggatgctccgtctaaagaacgggacggaacatcttatcacaaatttaagtagattcatggatcatttatttccaatgaattaagtggtctgtttgattgtcata

SEQ ID NO: 118359 - DNA, 1651 bp, Zea Mays
ctgcactctgcacccccgtgccaatcccgtttctattcagtcggttcccctctcccccaagccaaacaccaccatccttccctccctccctacgcatcctctccccctcgacgctttccccacccaatccgaccgccggggcgggcgattccctggagattcggcgcggattcggggctcctctcggggtttctcggcgaatcagcggggatcgggactcccggctgaaggttttgcgtgcacatcacgatgaagtgtggtttattcaattctcaaataatggaaagtatttagcctcagcgtcaaatgataaatctgcaattatatgggaggttgatgaggatggagagctattactgaggcatacattgagtggccatcaaaagtcagtgatgatggttgcatggagccctgatgattgtcagctcctcacatgtgggcaggaagaaaccatccgacgctgggatgttaaatctggcaaatgtcttcatgtttacgagaagtctgccactggtttgatatcatgtgcttggttcccagatggaaagcaattatctggtttagctgatcaaaacttttgcatttgggatttagatggtaaggaagtagattgctggaaagggcagggatcaacaggaacatctgattttgctgtagcaaaagatggaaaccttataataagcatgagcaagcagaacacaattcttctatttgatagggagacaaaacaggagagaataattgaagagggtagtacaattacttcattttgtctatcagaagacggtgatttcctgcttgtaaatcttgtaagcgaagagattcatttgtggaacataagaaatgatcctgttcgtgtcaaccggtacaatggtcataagcgcacccggtttgtgataaggtcttgttttggcggatttgagcaggcgttcattgctagtgggagtgaagattcacaggtctacatatggcatagagccactggcgatctcattgagactcttgctggtcactcgggcacagtcaactgcgtcagttggaatcctgcgaatccccacatgctcgcctcagcgagcgacgatcacacagttcgtatatggggggcaaagaagtccagtcttaagcgcaaggatgttgggagcagcaattgcaacagtaacggttctcgctcgaatggcaatgcacataacaacgttttcgttcaaaagtgcaacgggaacaacaccaaatgatttgccagggcaatgtatccccatggatggttgactggcgtctgtaaatccccctgtcctttacttccctcgtggaagaagaatcgccaccgccatagttaagacaacaacaacaaagctgcagcacaaagtgtggggaacctgctaggtttcgtgcgctatctttcccttgttccttcatgactgtcatcacatgtatttcttaattcaagctgggatggaattatggtattactttgcatctttgatatcttgatttgccctctctgattgattgtaactgcattttggtggtgatggttgttaactcctcttattgcattttgccttgagaagaaacaaatgttggcctaggatgctccgtctaaagaacgggacggaacatcttatcacaaatttaagtagattcatggatcatt

SEQ ID NO: 118360 - DNA, 659 bp, Zea Mays
tataccttctgccgccgccatcctgaccctgttccccacccatatcgtgaacccgccgccgacgcagcagcaggagacgcgccaaggagagcccgcaaggaggcgactatgagggccaaggtacatcctccatccccctaactcctacgcgcgtgctatctcgtcacgtagattcctgtggcgtagcaactccttgacactccctgcctcgagtagctgtctgctcggttcgtccatgtcccgaagctgcgattgcaaagagagcgattcgtccatgtaggggcgctgcgattacaaagagagttgttcgtccatgtaccggggctgtgattacaaagagagaggctcgagtggcgcaattcttctgggacggcggatctcgccgtgcgtgcgtggcgcccctcgtcgcagcggacgggtctgtatctttggcatgggaggctgatctatgagctgagccgaacagtgactgatcgtttcgtgtgagcttggtatctcttgtcccgtggcctggctccgcatggtcatgccgctgcggtcggtggaggtgtcgcgcttgtggcgccgccgcctgctagcaggttcttccccggccacggtggaggttccttcgcatacatttgatatgagccccattctagttaggatatattattatg

SEQ ID NO: 118361 - DNA, 571 bp, Zea Mays
tataccttctgccgccgccatcctgaccctgttccccacccatatcgtgaacccgccgccgacgcagcagcaggagacgcgccaaggagagcccgcaaggaggcgactatgagggccaagtggaagaagaagcgcatgaggaggctgaagaggaagcgccgaaagatgaggcagagatccaagtaggctgatggggattgtggatggtggtgtcggcatagttgtgttacgtttcttcgatgcgtgagttcatggagagatgtcacatcctagttcgtcgtcaccgtttgccatgggtccaatggctcgtcttggaaacctgcacttcagtaggccatctatcgtggtttctagctatatccagagttttgtgctaagacaaatcagtcagtcgttttgtgaacctattatgatggagctttatttgctgctaatatcgacctacctgttaagtaattgcaacgttcgtctatgctgtgcttgtttgtgatacctgttaagtaattatcagagaaacaacggccagcactcgagctgtgctgaagagcacactgattggtgtgcttcagtg

SEQ ID NO: 118362 - DNA, 942 bp, Zea Mays
atgcacaatctacggtccgtttcaaagcccaacgcgaagctctatttgggccttccgtttacgcccaaccgacaatgcgaagccttatttggcccaaccgaaggcccaacgcggtcagctgatgtctctttgactctttccaccacacgaccacactgctcgtgctctctcgatgcggtcaccagtcgaatggacggcgcggatatcccctcccactccgccgccgatggcgaccggcctccggagaacgcggacgacggcggcgtggaggacgagcgtgccgccgcgccccctccggagcggtgcggggcgttggcttccgcaatcgcaggggtgctggccggcgcgctgcgggagcacgaggagcgggcggccgccaccgcccggagccaggacgaggtcgccgctgccatcgaccgcctcaacggagagctagacaggctattagagaatgcacccacaatggtaataatgcatcattcagcaaggatttccagcatccgcaagaggatttcagcaatgaacatgctgctcaagtccatacaacgacgcatagatagcatggatagaattatttctactgaccattcatctcctgtacagaaagccggtaatgaagttggaacaaggttctagcagaattctggtggtgtcccatcaattgcgcaccatttctgttttggtagagctgccatccaacaatcacacggtgctgtgcatagaagtgagacgtcataatgtcgattttttccccagagatgtgtcatcaaaatatttcaatcctttttgtagcatattggagtggggaaagtcttttgtactggatggtcaatgttgcagacaacgaatcgtgctttcagctttggcgtttacccttgtattcaaacatgaaattgtcttcagaaatattatcatattgtcactgttgagcggttttgatgt

SEQ ID NO: 118363 - DNA, 1922 bp, Zea Mays
accagacccacacgtttctttaccctaaccttttcgctgctccagcgaagaacacagccaccgccgtttcttcgtcttcctcgcagcgccggcgcgccatctcggtacgaaggcgacggcggcggcgacggcggcgttcaggatcgggatctcagcgacgacgtcagaggcttcccatcccgacccccgccagtcgcctcgcgccctcgactccggactccggtcctccgcacaccggccggtgaccctgcgtttgaacctgctatagaaatttataaaatggccgcggttgatgcgacaaccaaggagatggatgcactgcatgttggacaaaatgatgaaacaaaagagactctgattaaagaagacaaagctgcaaacagcaatcattctgttgttgcagctcagtccttgctaccagaggacgacgatgatgatgaagcacaagctgatggtccatctcaagatggagcagcagctgtaaagaagaaaaagaagaaaaacaaatccaaaaagaagaagggcccccttcaacagacagatcctccatcaatacctgttgatgagcttttcccctcaggagaatttccagagggcgaaatccaacaatacaaggatgacaatctgtggagaacaactagtgaggaaaagagggacctggaacgactgcaaaagccaatatacaactctgttcgccaagcagcagaagttcatagacaggtgcggaaatatatgaggagcatcataaaacctggaatgttaatggttgatctatgtgagacattggaaaacatggtccggaaacttatcaaggagaatggactgcaagctggcattgcttttccgactggatgctccttgaattgggttgcagctcactggactccaaatgcgggcgacaaaactgtgctacaatatgatgatgtgatgaagcttgattttggaacacatatagatggttacattgttgattgtgcatttactgttgcattcaatcctatgtttgatccattgcttcaagcaacgagagatgccacaaatactggaatcaaggaagctgggatagatgcacggcttggtgatgtcggtgctgcaatccaagaagttatggaatcctatgaggttgaaatcaatgggaaagttttccaagttaaaagtgttcggaacctcaatggacacagcatcgggccatatcaaatccatgctgggaaatcagttccaatagtgaaaggtggagaacaaacaaaaatggaggaaggggagttttatgccattgaaacttttggatctacgggaaagggatttgtcagggaggacttggaatgcagtcattacatgaagaactttgatgtcggacatgtgcctttaaggttagcaaaggccaagcaactgcttgggaccatcaaccacaacttcggaacgctcgccttttgccggcggtacttggaccgccttggtgagaccaagtacctcatggctctgaagaatctttgtgacaatggcatcgttcagccgtaccctcccctgtgcgatgtgagagggagctacgtctcacagtttgagcacacaatcttactccggccaacttgcaaagaggtcatttccagaggcgatgactactgattgcggctggaggaggctccttgtaccaggttgtgtgtgtggagcgccatccgtttatggatcacactcggataaatggtttggtcctccagagttcaggatgttgtatgagttttataataactcgctaaagattgtggatgtacaagtagcagtaatacgttttctgggaacatggacattgttaggctatttccagcggggatttcgtccgagtttcaatctcgattaaatgtgttgccacataagaaaatatgataatatggcaataatttaataagagagtgagttttattgga

SEQ ID NO: 118364 - DNA, 1635 bp, Zea Mays
cgccgtttcttcgtcttcctcgcagcgccggcgcgccatctcggtacgaaggcgacggcggcggcgacggcggcgttcaggatcgggatctcagcgacgacgtcagaggcttcccatcccgacccccgccagtcgcctcgcgccctcgactccggactccggtcctccgcacaccggccggtgaccctgcgtttgaacctgctatagaaatttataaaatggccgcggttgatgcgacaaccaaggagatggatgcactgcatgttggacaaaatgatgaaacaaaagagactctgattaaagaagacaaagctgcaaacagcaatcattctgttgttgcagctcagtccttgctaccagaggacgacgatgatgatgaagcacaagctgatggtccatctcaagatggagcagcagcagctgtaaagaagaaaaagaagaaaaacaaatccaaaaagaagaagggcccccttcaacagacagatcctccatcaatacctgttgatgagcttttcccctcaggagaatttccagagggcgaaatccaacaatacaaggatgacaatctgtggagaacaactagtgaggaaaagagggacctggaacgactgcaaaagccaatatacaactctgttcgccaagcagcagaagttcatagacaggtgcggaaatatatgaggagcatcataaaacctggaatgttaatggttgatctatgtgagacattggaaaacatggtccggaaacttatcaaggagaatggactgcaagctggcattgcttttccgactggatgctccttgaattgggttgcagctcactggactccaaatgcgggcgacaaaactgtgctacaatatgatgatgtgatgaagcttgattttggaacacatatagatggttacattgttgattgtgcatttactgttgcattcaatcctatgtttgatccattgcttcaagcaacgagagatgccacaaatactggaatcaaggaagctgggatagatgcacggcttggtgatgtcggtgctgcaatccaagaagttatggaatcctatgaggttgaaatcaatgggaaagttttccaagttaaaagtgttcggaacctcaatggacacagcatcgggccatatcaaatccatgctgggaaatcagttccaatagtgaaaggtggagaacaaacaaaaatggaggaaggggagttttatgccattgaaacttttggatctacgggaaagggatttgtcagggaggacttggaatgcagtcattacatgaagaactttgatgtcggacatgtgcctttaaggttagcaaaggccaagcaactgcttgggaccatcaaccacaacttcggaacgctcgccttttgccggcggtacttggaccgccttggtgagaccaagtacctcatggctctgaagaatctttgtgacaatggcatcgttcagccgtaccctcccctgtgcgatgtgagagggagctacgtctcacagtttgagcacacaatcttactccggccaacttgcaaagaggtcatttccagaggcgatgactactgattgcggctggaggaggctccttgtaccaggttgtgtgtgtggagcgccatccgtttatggatcacactcg

SEQ ID NO: 118365 - DNA, 1923 bp, Zea Mays
gcccgagcccagagtagggtttcgggcttttcgtcttctctttcgtcctcttcttgttgcgcgccatccgatcgccgctgccaggtcgtgtcctttctcgtcgccggcaaggcctcctcccacccaatttccttgacgagaggcgctgctcggttccccggacctcacctggggcctgcctggcgtccattttagcctaaaataggcttaaatagtcagattttgagcacccaatctcgataaagaaagccccaaagaggcaatagccagctgccagccctagtacgacgacgtgccgccgccagctgcctctgcgcgaagacgacgcgccgccgtagagttgcccaggcccgctgactcccgatctgcatctctcggactgcccgacgccttgcggctgcggacgcctttcgctgtgcgggctgcgtccagtggaacgtcacctctcccagcgcgggacgcgcctccaggctccagcggagctcgacaggccggcagttgaccccttgccaactggctcctggactcctgttttgctgggttgaggagaaccatgccggacgtgaagtccgctgctgccacggtcgccaaggcagtggctggtgactctccttcccctgctgctactcctcctgcgccggccgtcgccagcagcaatgggacaccgcagaagccgcctcctattccagctgccaccttcgacatgcccaagccaaaccttcgtggtcttaacaagcccaagtgcatccagtgtggtaacgttgcccgctccaggtgcccattccaatgttgcaagagctgctgctacaaggctcagaatccttgtcacatccatgtcctgaagcagagcaacacattgccagataagccatcacctgctactgcttcttcaacagaacagccatctaccaatttacccgcaaccagttcagcatcaaggctagctgccttgcaaaagcttcctcagcattttctgaagtctctccaaacaaagaagtcgcttacgaaaaaggatgccgtggctataaacaagtggaggtttatgaagctaagggaacatatgcaaggcgatatcgatgatgaaaacgaagcatatgagaggtatacacagaatgttaggttactggaggaaacattctatcccatggaatacgctgatgtcgagcctgaagccgaagcaccttcttcagacgaagaaaggatggacttgctggtttcggaggcaaaggtgaggctgaagtcggataacgaaatcgctgatcgcttcaaggagagggtcgccgccatcttggaccagaagctgaaaaaactgctcgagagccaaagcgccgacgaggacgacaaactgtccgatccagaccaggacgatcatctaaacccggcgaagttcagcgcgaagcagaaggcagagagaagcgcgagcttaaacgagctgctcggtaagctgacacgggcacggagcgaggacgacctgaagccgtgccgcgatctcatcgagcagctgtttgggaaggagaagggctcctctactgacaggcaagctggagtggagatggagcagagagatcaagagtcagccgcagcagcagtagcacagccttactccgtcccagagttgtgcgctaggatggaggttgatgaggactttgccgcaaagattagtgatgagttctcgttgagtcaggtggcgcagctatgaatctggaacccggccttcgatgagttctcgttgagtcagggggatgcaatgttattatcactgagctccttcgatgtgtaccaactcaacagcgctatccatcgacgtgctggcctgtcatttaggtgttgttgtttggttacgactagtaaatgtaaatgttagaaccccgatgagcagatgagttgagcaccgctcccggcgctcgacttcctctcacgaag

SEQ ID NO: 118366 - DNA, 927 bp, Zea Mays
ctccactctcaactctcaactctcaagccgtttgcgtcgaccccccgactcacgcctcttcgcccgttctccctctccccgagccaggtacgacgacgtgccgccgccagctgcctctgcgcgaagacgacgcgccgccgtagagttgcccaggcccgctgactcccgatctgcatctctcggactgcccgacgccttgcggctgcggacgcctttcgctgtgcgggctgcgtccagtggaacgtcacctctcccagcgcgggacgcgcctccaggctccagcggagctcgacaggccggcagttgaccccttgccaactggctcctggactcctgttttgctgggttgaggagaaccatgccggacgtgaagtccgctgctgccacggtcgccaaggcagtggctggtgactctccttcccctgctgctactcctcctgcgccggccgtcgccagcagcaatgggacaccgcagaagccgcctcctattccagctgccaccttcgacatgcccaagccaaaccttcgtggtcttaacaagcccaagtgcatccagtgtggtaacgttgcccgctccaggtgcccattccaatgttgcaagagctgctgctacaaggctcagaatccttgtcacatccatgtcctgaagcagagcaacacattgccagataagccatcacctgctactgcttcttcaacagaacagccatctaccaatttacccgcaaccagttcagcatcaaggctagctgccttgcaaaagcttcctcagcattttctgaagtctctccaaacaaagaagtcgcttacgaaaaaggttgttggctgtttcacgcgctctgtttgtttttgaaccgttttgtgacttctgtcttgttctaggatgccgtggctataaacaagtggaggtttatgaagctaagggaa

SEQ ID NO: 118367 - DNA, 913 bp, Zea Mays
gtaaacgacgatgaatggttacagccgtgatctgagaaaaccgaagcctgtcattgtttgtgtagggaattttttcttctcactgtgtaaggggaaatctgtgaacggcatgggcattgtactgtgccgtagtatctgtaaacgctgtgatccattactgtctgtccgacgcaatcaaacaggaagcagcggtatccattaatgatgtgaattgattattacatgccgaaaagccccaaccaaacagcactaatgaacgtgctcgttgcttaccccactgatggacagagccagaggtcacccacccaccccaccaacgcggggcgcacacagacccagacatatcactcacaacagtacaacacaagccacccacttcgcctgggttctggccttctgggtggctggttcttccttcccgcttccctcgtcaaccaaatcaaccgactcgccaggtctcctccggatcgccacgcgccgcgcaccacccgcccgcctccccgaatctctcgagcccgcgcgcaggcctcgatcgcggcggaccccgatgccccgcctcccggccaatccggcggcggcgacggaggagacatgagccggccgggactcgccggacctgccagtcatggacgccaccgcgcgcccggccatcgtcatcgacaacggcacagggtatagcaaacttggattttctgggaactcagagccgtctttcaccctccctactgtcgtagcagcaaatgaatcttttctagaccagacagagctgttgagtagtgcaaactggatagcgcagtataatgcaggcatcatggctgatcttgacttttttattggagacgaggctctatcgcggtttagatctagtgggctgtacactttaagaagtccaatccgtcatggtcaggtatgt

SEQ ID NO: 118368 - DNA, 963 bp, Zea Mays
gaggccatacagtaggcatctatgttaaacaaataaaagattagattcttatgcatctccattacaatttcaggagttcaagaagcatgacaagaagcctgataagtacatcaaacattggtcagctgttaaaccaaagacgggggtcccatatacaattgacattggatatgaacgctttcttgggccagagatcttcttcaatcctgagatttactctgccgacttctccactcctttacctgagttgattgataactgtgttcagtctgcaccaattgacacaaggagagctctgtacaagaatatagtattatctggtggatctaccatgtttaaagacttccacaagagactccaaactgatataaagaagatagtggatgaccgtgttgctgcgactaatgcccgtcatcgtgtggaagtgagacctattgaagtcaacgtggttgcccatccaatccagagttatgcagtttggttcggggggtcagtagctgcatctaaccctgaattctttgagttctgccacacaaaggaggaatacgaggaacatggagccagcatctgcagaacaagcccggttttcaaaggaatgtactgaattttcctcacaacccatcgtctagcaggagagttcatttaggtttcttcgatagaatagtcaattttgattcttttctggtccgttgcacaaccattgtcgggctcgggccaccctgactagatttgtagttgtagctctgtttgtactagttgtttggtctgtgttctgcgtcgaatgttgtgtatagccaacagctcggttcctgttcgaggtgcttgattgtagccagaaggcccagaaccttggacagtttagaggggaaatattgttttttttacattagcttgttcagacagatttacggaactcatataataataaatcaggctaatctagagtggccaggatagaagata

SEQ ID NO: 118369 - DNA, 2370 bp, Zea Mays
atggatcgtccagccgttcagcgcaagcccccagtttggcgaagactctcccctccagtgaactccttagtagtggagaaaggagcacagggggacatgcatccgactgagggacgtatgaagaagaagagaagacgttcaaagcgcgggaaaggcagctcgggactgaattcggggctaagtcagccacaccccaatcctcctgatgctgtccggatcaccttgcctcggaaaccttcctgcgtcctagagttctccgctgatctggcaagaaaggaagctgctcttcggagagccttgtttgtttcggtggttggcaccaggccgacggttcgcggggaagaggtgattgaggaattggcgcgatgttttggcatcagccctgctgacatgtctatccagcaggccacgccagaggatttcctattattcctgcctgatgaacacacagcgacccaaattcttaatgaaggaagacctttcagaggccctggattttctctcagctttaaaagatggacgagattctcacacgcctcgacgacgtctatggcggcactggttgatattgaaattcgaggaattccagcacatgcttgggatctctccacggcaaaaatgctcctacaggattcgtgctgggttttggaactgttaagggattcaggaacatcatttctgctacgcgcctggtgttttgatccaaaacgactgcattcggaaatggaacttcatatcgtcgagccgggcattgatgaacagaagaaacggtgtctgacatacaacatttttatgacagtgtcaccggtggcccttcagttgaccaataacactgacactctatccccttcctctgatgatggccagtgtgatgaagaagatgacagcgatccagctaactcccagcagcgccgccttccacctcagccaccaagggaatctgttcaccttcggataggcgcccaatttgtgtctggaaggagtagggcgctgtgcttggttgaggaagctgaaaggacatgcacaggctcaggcgcctcgggatttaatgaacaaccttcattgcagccccttaatgacttcccgacctggggaggtgagagggaaatgcagctggtcggtggcacctcgggttcctccaggcggatatgcagccagccgttcactgatgcgtgcgctgcccaagtaaatgacgcgcagctccagccgatcattgatgcatgcgctgcccaattaattgacgtacagctcgatgcttgggccaactccttcataacggaggaaaaaacccaggagtcgccatccccttcatggaagcagtgcagacagttggttaatgaggcaagcaacattggggtccgaactgactcctttattgatggggacagaaccaaggggacactggctgttgggtcgctgaatcagtcgaggtcagcctcgccccagtatcagttagctgccgctgggccgctggagggggaccggactgattcgccccaagctaatgggcctttgggacttttggatgaagaactgcgatacctgatgtcaccgcgccaggatgatcttgtggctgacccggtggaatgggctatgacggacctcacccatcaagtgtaccttactaaggttgtgcggacaaccttgactctgggtgctcctgatgcttcgtacagtgaacggaagtcctcaaccaggaaattgttaccccaacccagtcactgcactactggcaatgaacttccaaggacgctgctaattagggaccgtcaatcattcaagaagctggtggtatactcacgaaaacgattcaacagtagggacaaatctagaaacttgaatgaagaacggagtgggccaaacgcttctgggacgtgcgggattgatactgatgaaaatgcagtgcccacggcgcgagaggtcagcctggcagttactactgaagatagtcagtcagctttacaggagacccaaacaaacagttcacagcccatgaacaaacaattccttgataaactttccaaaaagatctcaggccttcttgcaacaccaggggaccccccttttatgacgttgaaaaatgcccaaattgcagaatttatcccacgccgcagccgtcgaattgctggcgtgggagttgaatttgacaagatggacttatcttcaagaaccacaaagaaagtcatgcaggccttgaaagtaattggggaccctggggcagtcacccagcaggccagagaagactatctgaaagtgttctccactgaacttcctgtttcacatattgaggcgctggcgtccttttttggatgggtggtgccagatgatctcaagttgggtagtaccagtgttggcattagtgcctgttaa

SEQ ID NO: 118370 - DNA, 345 bp, Zea Mays
atggaaccaaccagcctccgcccccgtccaccttggccccggcaccgtaggcggatctgtgcctctcctcgcccgcgtccacccccatcgcctcctcctacaccttctccgccatcggcatcatcgtctccatcatcgcctccgtcctcggccctccctgcacactgcaaccgcctcctgacgatgctcgcgtgggatggtgacggtgacgcggcgctccgtggcttgtgccccctccgccgcctccagcaccttctctgccatcggcatctccatccttggcgcggcatggttagtcagcgcacgcctccacaccatgtctcactagatctgccgctttgctag

SEQ ID NO: 118371 - DNA, 297 bp, Zea Mays
atggctgcggcggaggcgcggcgccggtcagcggtctgggccctgctgccgctgcggctgctccacccggtcgcgctcgtgttggccaacaccgaaggttctgttggtgagaacatgttccattggcaagcgaccatcatggggccttcagacaccccatttgcaggtgggctattcttggtgaacattcacttcccaccggattaccctttcaagccaccaaaggtgtctttccacaccaaggttttcgacctgaacattaacgacaacaacaacatttgccttggacattcttaa

SEQ ID NO: 118372 - DNA, 728 bp, Zea Mays
gatcgaggaagtcactcgtgagaaagtgaatttcttagaagagcttttgagcagcacataatttgcttaccaattagcggatcagatgacttcagcaaaagcatatgtcatccttgcaaagagcatgataatctttcgcttgcatgggagcttagttcgcagataaggaattgccaaagattgttctctaaaggggcagttagtgggagagcaatcacttgttttagttagtaatttaaaaactttggactccaatcagttatgtatagtagaatcaattgtcagttaacataaacataaggggtcttcccatgacatgatatgttagcatggatgtccaccgaggctgtgatgcactctgcatttgttttattcatgtataactgtaatcatattatagtttttttggaaatgtttgctctatactcgatcatattctaaagccaccattgagtctcaacctgtcttacttaacatttgtagtcacctatctgtgtgtagagctgcactagctgttcttattgtcaggttctgttggtgagaacatgttccattggcaagcgaccatcatggggccttcagacaccccatttgcaggtgggctattcttggtgaacattcacttcccaccggattaccctttcaagccaccaaaggtgtctttccacaccaaggttttcgacctgaacattaacgacaacaacaacatttgccttggacattcttaa

SEQ ID NO: 118373 - DNA, 1402 bp, Zea Mays
tgcgggtatgagtaatattttatatccgcgagcgtatatatgggtaacccgttgtcatccctaacccacatagacctcgcccttggctcgcatggcttccggcttcttctcctcgccgttgcgtgagaccgcgctaaaaccctaggctttgagaccccaatggcgtccgcgacggcgacggcgcccgcattcgctctcgcgtcgtccctctcgcgccgcggtttcctcccgctctctcgtcgcgccggccggcccgtgccccagtcgctgcgcttcgtagcgtcagccgtgaggcggcgccgcagcgcggtcgtggtggcagcggacgcggcggcagcggccgggagcgcggagttcggcgacgaggagaacccttatgagcttctgggcatcaggccgcttgatagcttcgaccacatgaagatggcctacaagaagaagcgcaaggacgccgaggagactggagacgatgagttccttgccaagttggatagggcccacgacactgtcatgatgcagcagctgcggtatcggaagaagggagtcacatacgggtctgttcaggtgtccaaggatatcaagtatgctgacaatcaaccaatagtgctttggggaccaagattctccagatcaacagtgaaggacatgcgcataaatatggcaatatcagcagcatttgttgtttggatagctattatgggcaatgcagactggaagcctttgcagttcctatgttttgctttcttctgcagaatactacagaagctaagagctactgaaccactaataactccaatatacaatgaatatggcgaggttgaaggacgaggaataagaatggcaaaaagagtagtccgtgctctgggtttgatttttggatgtgtgttcactgcatccctggcttatacagcagctagtaacatggttgagctttcattgcagtatactccccgtatgttttactactatcaggagctgattgttactgtggctgcctccgttcttctgtacatcacggcttcatggtaccgataaacacgacaaacaattatggcctggcttagatgattgcgagatgttaggacatgccttgagtttcagatagagaccaacctgtggtgccttccgcatctaagggatagccaagaacccgcaaattctgtagcattcttccagctttgaggcaggtagttcttagtggaggatcatgtgaccagctatggattcagtagtacaatgaagatggccaatggatgaaaattgtttcgcgagaatatttgaacagcggtgttgtccatgcaatttttaattagatcttggacatatgcttagacgacatacttaactgtgatgtgcatgtgcttttttttgcctgaatgagtgctgagcttcttctgtgtta

SEQ ID NO: 118374 - DNA, 1276 bp, Zea Mays
tgcgggtatgagtaatattttatatccgcgagcgtatatatgggtaacccgttgtcatccctaacccacatagacctcgcccttggctcgcatggcttccggcttcttctcctcgccgttgcgtgagaccgcgctaaaaccctaggctttgagaccccaatggcgtccgcgacggcgacggcgcccgcattcgctctcgcgtcgtccctctcgcgccgcggtttcctcccgctctctcgtcgcgccggccggcccgtgccccagtcgctgcgcttcgtagcgtcagccgtgaggcggcgccgcagcgcggtcgtggtggcagcggacgcggcggcagcggccgggagcgcggagttcggcgacgaggagaacccttatgagcttctgggcatcaggccgcttgatagcttcgaccacatgaagatggcctacaagaagaagcgcaaggacgccgaggagactggagacgatgagttccttgccaagttggatagggcccacgacactgtcatgatgcagcagctgcggtatcggaagaagggagtcacatacgggtctgttcaggtgtccaaggatatcaagtatgctgacaatcaaccaatagtgctttggggaccaagattctccagatcaacagtgaaggacatgcgcataaatatggcaatatcagcagcatttgaatatggcgaggttgaaggacgaggaataagaatggcaaaaagagtagtccgtgctctgggtttgatttttggatgtgtgttcactgcatccctggcttatacagcagctagtaacatggttgagctttcattgcagtatactccccgtatgttttactactatcaggagctgattgttactgtggctgcctccgttcttctgtacatcacggcttcatggtaccgataaacacgacaaacaattatggcctggcttagatgattgcgagatgttaggacatgccttgagtttcagatagagaccaacctgtggtgccttccgcatctaagggatagccaagaacccgcaaattctgtagcattcttccagctttgaggcaggtagttcttagtggaggatcatgtgaccagctatggattcagtagtacaatgaagatggccaatggatgaaaattgtttcgcgagaatatttgaacagcggtgttgtccatgcaatttttaattagatcttggacatatgcttagacgacatacttaactgtgatgtgcatgtgcttttttttgcctgaatgagtgctgagcttcttctgtgtta

SEQ ID NO: 118375 - DNA, 3223 bp, Zea Mays
ggggggggggaggggtcgccttctgctccccggtcaccgcggaataagctagcccccctctcctcctgcctcggggggttagggttaggctttttctcccggaattgcgagaggaattccgcggccaaggcggcgcattgctagcgagaggaggagaaggaggagtcagcagcgcggctccgacacggccgccagcaatgatggggaagacgcatatgttctctaagggccacccgctcggcttcgtgcccgactaccggcacagggtggaggcaatgggggagttcaagcggctcgggagccccgtgagggtcgactcggggagctactgcccgccgcccaagaggaagtgcgtcagcgtgaattctgaggagagggaatgcgcctccgggttcagcttgacccgcgtgccccgggaggtgttctcactgcccagtatgactgctctagacaagaaggacgtggagatgaggctccaccatgagcttgcgcaggtgaaggacctccagattagactgttttcaggagggcataatgttgggagcatgaatggtgcgacggtcgcgtcagctcccggaagcgatatgctgcccaagaaaaaagccgagaagctcaggcgaagcaattcagtgcagacggataggggagctccaccacctatggccacagctgtcgccccacctgtttccagctctattaactacacgtcctcgtttaaacaatgtgccaaccttctcaagtcccttatgagccatgtatgggcaagcccgtttcttgttccagttgacattgtgaagttgaacatccctgactactttcaaatagtcaagcagcccatggatttgggtacgatccagaaaaggatgaaggcaggcatgtactctacacctccggaatttgctgcagatgtgaggctcactttcagcaacgctatgaactataacccagctaacaatgatgttcatttaatggccaaaactttgagcaagaactttgagagccgatggaagcttattgagaagaagctccctaaaccagatgagaagcctcctcagccagatgagaagcctcctcaaccagttgagaagcctcctgtgaggaagcccacaaaaaagaattcaactaagagagtttccattgagaaagaagacctcactaagaaaaaaccctcaaagaaaagtgtacctaagcagtacatctttcggggagaagattcagctgacagtccagttctgcaaccaaagaaaaggaaaacctctcctttggtacaagatgctcctttggtaggggatattgttccaaccagaaagagaataatgacgagtgagcaaaaatatgatttaagtgcaagattacagtcatatggtgcattcattccagatcatgtagttgagctcataaggagtcacgctgactattgcgacgccaacgaagaggaattagagcttgatatggatgctctaggtgatgatacactttttgaattactgaggctacttgatgactatgacagagttaacccatcaagaaaccttacagaacaggatcctcatgaggttaagtctcgaagtcaatatgaactcatcaatgcgtcagtgtgtaacgaggaagtaaatgagctctttgacgaggacgttgatattggggagaatgaccctccagttttgacttttcctcctttggtacttgaagatgaaacagcagacagaagccgcaaacatagtgcatctagcagttctagtagtgactcagaatcatcctctagtggctcaggttctagtagctcttctggaagtgatacagatgccaaagctgctcaacaaaacagcgtgtcaaaggaaaaaattctacctgtggatggcctgggtcatgaaaaggattcactggacacattaaatttaccagagcaaagtacagaccctgtctctgtttctgcttatggtgagggggggtatgtatctgagaaggtctcccctgagaagcaaatccgagctgcccttctgagaagccgctttgctgatacgattctgaaggctcgcgaaaaggctcttgatcagactaccaaaaaggatcctgagaagcttcgacgcgagagggaggaacttgagaggttacaaagacaagagagagctcggttgcaagctgaggctaaagctgcagaggatgcctgcaagagggctgaagaagcagcagctgctgaggctgctgcagaagctaaacgacaaagagatattgagagagaagcagctcggaaagctttgcaagagatggagagaactgttgacatcaacggagggagtcactttctgaaagaccttgaaatgcttagaggtatcacatgcgaagagatgcccaacttggttggtgaagggagccctgggtttcaactgggaagcagcaacgccctagcaaagctcgggctgtacatgaaagatgacgaagatgacgaggagggcgatttggcagatgcaccagtggtggttgatatcgaagagggagaaatagattaagcgtgcttcttctggaccattttttatacgcgacaggagacctgtgggcatcactgatctgcatagcttttctttggcatacaaagcgacctgacgaaaagatcgcctcgcaccagacctggaggtctggtattcgtttttgtaactgcccaagttttggagccaagtcactaggttcgtcgagcttatcgtttggattgagaatctctggacttctgatatccactttcgataaggacttgttcggttaagaggtgatcgaaggagattggagaggggattggagaggattaaatccctttctagtcaattgaacagaggtagcaactgaataagccctaaaatggaatggcgagtttactgcatatatgatgaggccataaaagcggatgaaaagggaggagaaggcacaaggagtgatatatatgatgaggccataaattcggatgaaatgggagaagagatggggtagtggggagaaggcacaaggagtgatggtgatggctcttgagctggtgccagccgtttttgaggggtagttttagagccatttccgtgtcgtgaatgtaatatcggaaactgtacaaaagttagctagttagacgatggaaatcattctttccttcaatttatgcagtgcctgttcttatgagacgttgcacatttctcgtattgctatgggatcctgttgcgtagtagtattgttttggcac

SEQ ID NO: 118376 - DNA, 1323 bp, Zea Mays
gtccatctcccctgcctgcaccaattcctgaggcaccaaccaagcctctcttgttgactccgacgccgatcgaacgtacagacggccatggagacccaagcgccggagaaggagaactacctccctgaaaaggatgcgaggagcgcacgggagaaggccatcgacgagtggctcccgatcacctcgtcgcggaacgccaagtggtggtactccgccttccacaatgtcaccgccatggtcggcgccggcgtgctcagccttccctacgccttgtccgagctcggctggggccctggcatcgccgtgctggtggtgtcgtgggtgatcacgctgtacacgctgtggcagatggtggagatgcacgagatggtgcccggaaagcggttcgaccggtaccacgagctggggcagcacgcgttcggcgagaagctgggcctgtggatcgtggtgccgcagcagctggtcgtcgaggtgggcgtgaacatcgtgtacatggtgaccggcggcaggtcgctgaagaagttccacgacgtgctggtgtgcggcgacggcggggcgtcgtgcgaggggaaggacaacatcaagaccacctacttcatcatgatcttcgcctccgtccacttcgtcctctcccagctccccaacttcaactccatctccggcgtgtcgctggccgccgccgtcatgtcgctcagctactccaccatcgcgtggggcgcgtcggtggacaagggcaggatggcgggcgtggactaccacctgcgcgcgaccacgacccccggcaaggtgttcggcttcttcggcgcgctgggcgacgtggcgttcgcgtacgccgggcacaacgtggtgctggagatccaggccaccatcccgtcgactcccgagaagccgtccaagaagcccatgtggaagggcgtcgtcgtcgcctacgtcgtcgtcgcgctctgctacttccccgtcgcgctcatcggctactgggcgttcggcaacagcgtccaggacaacatcctcatcacgctcagcaagcccaggtggctcatcgcgctcgccaacatgatggtcgtcatccacgtcattggcagctaccagatctacgccatgccagtgtttgacatgatagagacggtgctggtgaagaagctgcgcttccctcccggtctgacactgcgtctcatctctcggaccgcctatgttggtaatgaacgccccccgtcaaatctgaactgaacttgtacagccgaattggcgcctcactgaactaaggtgatgcaacctgtacgtatgtgcagcgttcacaatgttcatcgccatcaccttcccctt

SEQ ID NO: 118377 - DNA, 1679 bp, Zea Mays
gtccatctcccctgcctgcaccaattcctgaggcaccaaccaagcctctcttgttgactccgacgccgatcgaacgtacagacggccatggagacccaagcgccggagaaggagaactacctccctgaaaaggatgcgaggagcgcacgggagaaggccatcgacgagtggctcccgatcacctcgtcgcggaacgccaagtggtggtactccgccttccacaatgtcaccgccatggtcggcgccggcgtgctcagccttccctacgccttgtccgagctcggctggggccctggcatcgccgtgctggtggtgtcgtgggtgatcacgctgtacacgctgtggcagatggtggagatgcacgagatggtgcccggaaagcggttcgaccggtaccacgagctggggcagcacgcgttcggcgagaagctgggcctgtggatcgtggtgccgcagcagctggtcgtcgaggtgggcgtgaacatcgtgtacatggtgaccggcggcaggtcgctgaagaagttccacgacgtgctggtgtgcggcgacggcggggcgtcgtgcgaggggaaggacaacatcaagaccacctacttcatcatgatcttcgcctccgtccacttcgtcctctcccagctccccaacttcaactccatctccggcgtgtcgctggccgccgccgtcatgtcgctcagctactccaccatcgcgtggggcgcgtcggtggacaagggcaggatggcgggcgtggactaccacctgcgcgcgaccacgacccccggcaaggtgttcggcttcttcggcgcgctgggcgacgtggcgttcgcgtacgccgggcacaacgtggtgctggagatccaggccaccatcccgtcgactcccgagaagccgtccaagaagcccatgtggaagggcgtcgtcgtcgcctacgtcgtcgtcgcgctctgctacttccccgtcgcgctcatcggctactgggcgttcggcaacagcgtccaggacaacatcctcatcacgctcagcaagcccaggtggctcatcgcgctcgccaacatgatggtcgtcatccacgtcattggcagctaccagatctacgccatgccagtgtttgacatgatagagacggtgctggtgaagaagctgcgcttccctcccggtctgacactgcgtctcatctctcggaccgcctatgttgcgttcacaatgttcatcgccatcaccttccccttcttcggcggactgctcggcttcttcggcggattcgcctttgcaccgacgacctatttccttccctgcgtcatgtggctcgcgatctacaagcccaagaggttcagcctctcgtggttcaccaactggatctgcatcattctcggggtgatcctgatgattctgtcgccaatcggagggcttcggcagatcataatggacgcgaaaacgtaccagttctactcgtaaactgctaccagacactgagtttttttgtcgtgccaacaacagaggggaacttcctggtaccatgtataagctgttacagatgttgggttagttatatatatacatgcatacgtattgtttcttaatgttccaaggtgaccgtgggttgtgtatatggtaaaggagaatcgatgatgatggttgtcccagatatttggtggtttaattctattcacttgtcccat

SEQ ID NO: 118378 - DNA, 2582 bp, Zea Mays
gatgtgggctatcgcccaccacctccctctactgtgtctgtctcccccgccgcgtcgtcccggacgtatccatccactgcgccagcgccgcgagaagagacccgcccgccgcaccagcgcctccgtccgcgagttccacctgaatccccacagcttcccgcaccaacgaatccggccagtccgcggcgcccccggcccactcgcggcggaaattcgtgacaaagccgcgattttttttcttcttcttcttcgcccttttgctttcgctcccgccggcccccttttccttttcttgttgaccccgccggtctgccccttttattgctgcgccggatcgtgttttctcgtcggaaggcgcgggctttccgagggcggcgatcgcggattcgcccccggaggcgtcgatttggttcgcaggtggaggaggggtcatggatccggggagatttctttagcgcgggttcgttcagggacgcttgtcagaacccgtcatgattaagcagatcctcggccggcttcctaaaaagcaggccaagtccggcgagaaggagctggccggcgcgggcccgtcgctgcccagcccgacggccgatacgagaaccaccaccgatttgaccacgtctagcaggcttgtcagtcccagcaactacgcctccacggccacgaatcaaggccagagcttcgtggcggccagggccgccggcgtcagcaacgggttcccggcctcggcagggtatgaggcgctgccgagcttcagggacgtgccggcgccggagaaacctggtctgttcctcaggaagctggccatgtgctgtgtggtgttcgacttcgcggacccgaccaaggacgcgagggagaaggaagtcaagaggcagacgctgcttgagctggtggactacatcacctcggccaccggcaagttcccggagcacgtcgtgccggaggtcatcaggatggtgtctgcgaacctgttcagggtgccgccccctgccccgagagagaacaaggcactcgagttgttcgatatggaggaggaagagcccgtcatggacccggcgtggccgcacctgcagattgtgtatgagctgttcttgaggtttattcagtctcccgagacagacgcgaagctagccaagagatacattgatcacggcttcattgtcaggcttctcgatctctttgactcggaggatcctagggagagggagtacttgaagacgatccttcacaggatatacggcaagttcatggtgcaccgtccattcatcaggaaggcgatcaataatatcttctacaggtttatattcgagacagagaagcataatggtatcgcagagctgttagagattttcgggagtataattaatggctttgctttgccactcaaggaggagcacaaattgtttttagtacgatcactgattccactccacaaaccaaaatgcgttgccatgtaccatcagcaactgtcttactgtgtcacccagtttgttgagaaagattgcaagcttgctgatattgtcattaggggtttactgaagtattggcccgtcactaatagctcaaaggaggtgatgtttttgggtgagctagaggaggtgctggaagctacacagccagcagagttccagaggtgtatggtgccactttttcgtcagatttcccgatgtttaagcagttctcactttcaggtggcagaaagagcgctcttcctatggaacagcaatcacatcgagggtttgatcaaacacaacagcaaggttatactgcccgtagtcctcccagcattagaacggaacacgaaaggccattggaatcaggcagtgcagagcctgagtctaaatgtccgtaaaatattcatggactacgacccagcactgttcgaggagtgtcgcgagaagtttgaggaagaggaagctcaagaagccggcatgaggtcaagatgtgaggctagatggaagcgcctagaagaaattgcctcgtcaaaggaggtgaagtagctcgtcttgccgactgcccaggctgtagctcgtcagcagagttcctctagctatctagccttgctggctgcatacgagcagctagctctttctggcaggatcaagtagatgctgatgtaactgcccatggatggctgcttgcctcgtgttacttgctttaccgaacattttacaggctgacatgtaaatacgaggtacatggtgggccgtgaagcttcaacggggactcaggttctggctgccgtgtgatccactgatgacagtatcggttttcatcatcagaggacaaaggaaaggatgtaaaatggtcattcctgctttactgagatgctcatgccacatgttaacgtctagtctgcggctcaatgtcttgatccaagcactgctagaagcacttgaaagacagtcgagcagcacttgttcttgcctgctgatggtgattttgctgaaatgtatagcatgctttgtgtatgatgaatggtaacttggagccatgtcttgtgatgatatgtaatcgtgttgtacatgtcttttccttcctttgatgtatacagaaatttggaatgaagtgctcattgattg

SEQ ID NO: 118379 - DNA, 842 bp, Zea Mays
ctgagttggatagagcttttgtcaaaggaagacaatgctagaaaatacaacgcactcaacaggtgaaacggcgcccataggcatcaccaccgtcgaggctttcaccttagaagtcccccagacgtcaagctacagccgccgccgtcgctgccctgatattccgcacaaacccttctgtagggacatcgacgcgagttgcgtctgccgccactcctcttccggttgggcacacggaactgagcactaccttgccaccccgcgccacactgccgcgtgcccagagccgatgccggcagccgccgccggctcaggcaaacgtggccactgtagccagcagtcgttgggcgcgagtgtcctgcaactagccgccagcaccgccgaccagacatgacagcagcagccgcaacacggcggatctgaggcgttggcgcgcgcaccacagcagcgccgccggggccactccgccggcccaccgtcgcccgaagcccacgtgcacgcggccgccgccgagccacccaacgtgcatgtttgatcttagttaatggcttcaatcaagaataaagaatatccttagtctcgattgaagtcattgacatgcagtaaaggactagctagctcatctgtttggtttgcattacttcaaacttcttatagtgcttcccatttgtacgccagtccagccttaacatcgtgttgctggtccattctgttattccctatcatgagttgtccatgtccggagggcaaatagttcagagaagcagctatgctatgcttgctaccaaactctgacgggaaatcataaccttgtcatacttttgcatttcttgcccctctacata

SEQ ID NO: 118380 - DNA, 2300 bp, Zea Mays
agcttccttccttgcgaacgcaactgaccgctccggattcgccggcccccgccgccgcttcgccttctctctccctcgtccacggcaaccaactaaccgtcgagatattggcggggcgccgatgctccctgactccccgtagcgcgttgcggatgctgtgggcctgtgaggctcgctgccgccgctttgggatctgggctgctgccggagcggcagcggcggttgtgactggcgccggcgatggcgatatcggcgaaggagaggaagctgagcaggctcgggagttgtaagggcggtgcggcggctggaagtggcagcggcggcggcggcggttcgcctgctgccagggcccaccggtcggtggcggcggcgccgcagcggcgtgtcttcgctgcgctcttcgcgttcctgtgcgccggcgtagtcgtcctcggcggcgtgcacgtcattggagcaacgttccggccagtgctcaggacggcgtggccggcggcaaccctgaacgccatttcctccgatgccagagcgcggcgaggtggcagcagcgccgacaccaccgtgctgccgtcagtccaaatccggcacgcggtcgccatgccggaccgtgtactcctgatcctcaaggacgggccgttgctgccatctcccgagcggttccagtgcctgtactcccccgccaactcctcggaactgcgccgccaccgacccctcttggccgcctcctcacccgatggacccagcctcgtccactgccctgccgagccatcgtgtgtggacgtctctctgtccctgtccctgtcccctccggtggcgccgctgcagtgggacaggcttgtgtacgctgcgctcgttgacagcagggacaactccaccgtcgtgttcgccaaggggatgaacctccggccaggccggttgggtgtggcgtcgaggtaccagtgcgtctttggccgtgatctgtggaagccaaagcagcgtgtgctcacgtcccctgtgatttctgccgcacaagaggttttccggtgcgtgactccagctcgcgttcgccggcacctcaggatgacaactgatcccaacggcaatggcaatggcaatgacaagccgatgttggtctccatcagaacgaaggggcagagggactccacgctgccctcgatcgctgaacctgagccacttcctcctcggcacaactacaggcatcatcgacgacggccaaaggcgcactcaatgtgcgtgtgcaccatgctccgcaaccaggcgaggttcctcagggaatggatcatctaccactcgcgcatcggcgtggagcggtggttcatctacgacaacaacagcgacgacggcatcgagcaggtcctcggcaccatggacccgtcgacgcacaacgtgacgcgccacctgtggccgtggacgaagtcccaggaggctggcttcgcgcactgcgctctgagggcccgggagagctgcgagtgggtggggttcatcgacgtcgacgagttcctccacttccccggcaaccagacgaccctgccagacatcctgcggagctactcgaacaggccgcgggtgggcgagctgaggacagcctgccacagcttcgggccctcggggcggaccagaatccccaagcaaggcgtgacgacgggctacacctgccggctcgccgcgccggagcgccacaagtcgatcgtgaggcccgacgcgctgaacccgtcgctcgtcaacgtggtgcaccacttccacctgagggaaggcgcgaggtacgtgaacgtcgggcagggcgccatgctcgtcaaccactacaagtaccaggtctgggaggtgttcaaggacaagttctccgggcgcgtcgcgacctacgtcgccgactggcgggacgaggagaacgtcgggtccagggacagggcgccggggctggggactaggccggtggagccggaggactggccgcgccggttctgcgaagtgtacgacaccgggcttaaggatttcgtgcagaaggcgttcgcagacccggccactggaagccttccatggtagatgatgggggtatacatacagagagacagggaattaagaaacaagtaaacgaaaaggataggtagaagagtggtttgctctctgttagtcatttgaggttttcttttttttcccctgttcttacttcttttagagccatctgtttctcttttttttttctttttacatgtctaaggaaatgattcttttgtagataaaaagaaaggtaggtagtaagttatcttgacgaaaggagggaattctatatatacaaagcgggatgg

SEQ ID NO: 118381 - DNA, 1725 bp, Zea Mays
ataaaatacccttcagttcacaaggccaccacgcgcgcccaaaggcccccaaccccaaccttgcaggaaaagagagagagagagacgaccccccaaatcggaatccgcacacccccatccatggccgccgccctgctccgccgctcgccggcggtgcgcgcgctcctctcgccggcactctcgtcccgcctcgtcgcgtccaagccccactcctcgtcccccgcgccgccgccacctgccaaggccgcctccagcacgaagaccttctcgatctaccggtgggacccggactcgccgtcgacgaagccgcacctcaaggactaccaggtggacctgtccgactgcgggccgatggtgctggacgcgctgctcaagatcaagaacgagcaggacccgtcgctcaccttccgccgcagctgccgcgagggcatctgcgggagctgcgccatgaacatcgacggcgacaacggcctcgcctgcctcaccaagatctccggcgcctcctccgcgtccacggtctcgccgctgccccacatgttcgtcgtcaaggacctggtggtggacatgaccaacttctacagccagtacaagagcgtcgagccatggctcaagcgcaaggaccagcccccgcagcagggcaaggagatcccgcagaccaaggccgaccgggccaagctcgacggcatgtacgagtgcatcctctgcgcctgctgctccacctcctgcccgtcctactggtggaacccggaggagtacctcggcccggccgcgctgctccacgccaacaggcttccgctgtgggggacgcttatcaaaccgaaacccaacatgttcatgcaccttcaagctcgaggatatcacggggtgtcagagaagagaaacctgcgggaccacaaacgtagactgcttgcagaaaaatatgagctaagaggaaagatgtataaggccgtctgtagggaccctgatcttccattggatatgcgggagaagttccgctataaactgtccaagttgccaagaaatagctccatgacacgtcttagaaaccgctgcattttcacaggacggtctcgcgctgtctacaagaaatttcgcatgtcccgtatcgtgttccgcaccttggcaaacaagggtgaactgatgggcgtaaagaaggcatcgtggtggatacaggacagccgtgaccagttcaccaaggagcgcctggacgccatcaacgacgagttcaagctgtaccgctgccacaccatcaagaactgcacgcacgcctgccccaaaggcctgaacccggcaaagcagatcgacacgatcaagaagctccagttgggtgccccaagtgcctgaaaccgagcgtgtcttcccttgaaaacggtcgtggaacagacctgtggaaaaaattgggatgaacttgccacttatttcgttgttgttgttgttctttggtcttcgcgcggtggtttctacctgccaaagacgaataattcccggctggggcccctccagtccactccacccatgcttttgtgtcaggcggagcggacgtagagcatagggagtgaataaccgctaccttatttcatttctatgatgtatctatctaatttggtcctcccctgataatgcacgacccgtagtgttaacaggcgtatttggaccttcaggaagtatttggacatggcaaatgtattttggaatgctcttatctaccgtgagatgcgaaaggaa

SEQ ID NO: 118382 - DNA, 1394 bp, Zea Mays
ataaaatacccttcagttcacaaggccaccacgcgcgcccaaaggcccccaaccccaaccttgcaggaaaagagagagagagagacgaccccccaaatcggaatccgcacacccccatccatggccgccgccctgctccgccgctcgccggcggtgcgcgcgctcctctcgccggcactctcgtcccgcctcgtcgcgtccaagccccactcctcgtcccccgcgccgccgccacctgccaaggccgcctccagcacgaagaccttctcgatctaccggtgggacccggactcgccgtcgacgaagccgcacctcaaggactaccaggtggacctgtccgactgcgggccgatggtgctggacgcgctgctcaagatcaagaacgagcaggacccgtcgctcaccttccgccgcagctgccgcgagggcatctgcgggagctgcgccatgaacatcgacggcgacaacggcctcgcctgcctcaccaagatctccggcgcctcctccgcgtccacggtctcgccgctgccccacatgttcgtcgtcaaggacctggtggtggacatgaccaacttctacagccagtacaagagcgtcgagccatggctcaagcgcaaggaccagcccccgcagcagggcaaggagatcccgcagaccaaggccgaccgggccaagctcgacggcatgtacgagtgcatcctctgcgcctgctgctccacctcctgcccgtcctactggtggaacccggaggagtacctcggcccggccgcgctgctccacgccaacaggtggatacaggacagccgtgaccagttcaccaaggagcgcctggacgccatcaacgacgagttcaagctgtaccgctgccacaccatcaagaactgcacgcacgcctgccccaaaggcctgaacccggcaaagcagatcgacacgatcaagaagctccagttgggtgccccaagtgcctgaaaccgagcgtgtcttcccttgaaaacggtcgtggaacagacctgtggaaaaaattgggatgaacttgccacttatttcgttgttgttgttgttctttggtcttcgcgcggtggtttctacctgccaaagacgaataattcccggctggggcccctccagtccactccacccatgcttttgtgtcaggcggagcggacgtagagcatagggagtgaataaccgctaccttatttcatttctatgatgtatctatctaatttggtcctcccctgataatgcacgacccgtagtgttaacaggcgtatttggaccttcaggaagtatttggacatggcaaatgtattttggaatgctcttatctaccgtgagatgcgaaaggaactatagcgtaatggttatggatttccactagcatcttctggtcc

SEQ ID NO: 118383 - DNA, 827 bp, Zea Mays
cttcagttcacaaggccaccacgcgcgcccaaaggcccccaaccccaaccttgcaggaaaagagagagagagagacgaccccccaaatcggaatccgcacacccccatccatggccgccgccctgctccgccgctcgccggcggtgcgcgcgctcctctcgccggcactctcgtcccgcctcgtcgcgtccaagccccactcctcgtcccccgcgccgccgccacctgccaaggccgcctccagcacgaagaccttctcgatctaccggtgggacccggactcgccgtcgacgaagccgcacctcaaggactaccaggtggacctgtccgactgcgggccgatggtgctggacgcgctgctcaagatcaagaacgagcaggacccgtcgctcaccttccgccgcagctgccgcgagggcatctgcgggagctgcgccatgaacatcgacggcgacaacggcctcgcctgcctcaccaagatctccggcgcctcctccgcgtccacggtctcgccgctgccccacatgttcgtcgtcaaggacctggtggtggacatgaccaacttctacagccagtacaagagcgtcgagccatggctcaagcgcaaggaccagcccccgcagcagggcaaggagatcccgcagaccaaggccgaccgggccaagctcgacggcatgtacgagtgcatcctctgcgcctgctgctccacctcctgcccgtcctactggtggaacccggaggagtacctcggcccggccgcgctgctccacgccaacaggtataccaccatcaccgccacatcgcatcctttgtactgtgatggatga

SEQ ID NO: 118384 - DNA, 1404 bp, Zea Mays
cttcagttcacaaggccaccacgcgcgcccaaaggcccccaaccccaaccttgcaggaaaagagagagagagagacgaccccccaaatcggaatccgcacacccccatccatggccgccgccctgctccgccgctcgccggcggtgcgcgcgctcctctcgccggcactctcgtcccgcctcgtcgcgtccaagccccactcctcgtcccccgcgccgccgccacctgccaaggccgcctccagcacgaagaccttctcgatctaccggtgggacccggactcgccgtcgacgaagccgcacctcaaggactaccaggtggacctgtccgactgcgggccgatggtgctggacgcgctgctcaagatcaagaacgagcaggacccgtcgctcaccttccgccgcagctgccgcgagggcatctgcgggagctgcgccatgaacatcgacggcgacaacggcctcgcctgcctcaccaagatctccggcgcctcctccgcgtccacggtctcgccgctgccccacatgttcgtcgtcaaggacctggtggtggacatgaccaacttctacagccagtacaagagcgtcgagccatggctcaagcgcaaggaccagcccccgcagcagggcaaggagatcccgcagaccaaggccgaccgggccaagctcgacggcatgtacgagtgcatcctctgcgcctgctgctccacctcctgcccgtcctactggtggaacccggaggagtacctcggcccggccgcgctgctccacgccaacaggcttccgctgtgggggacgcttatcaaaccgaaacccaacatgttcatgcaccttcaagctcgaggatatcacggggtgtcagagaagagaaacctgcgggaccacaaacgtagactgcttgcagaaaaatatgagctaagaggaaagatgtataaggccgtctgtagggaccctgatcttccattggatatgcgggagaagttccgctataaactgtccaagttgccaagaaatagctccatgacacgtcttagaaaccgctgcattttcacaggacggtctcgcgctgtctacaagaaatttcgcatgtcccgtatcgtgttccgcaccttggcaaacaagggtgaactgatgggcgtaaagaaggcatcgtggtagatgctaaagagccagtagaaaaaggcgctagctctgcattagtccaggaaaataaggttgtgtgcgtggaacctttcgatgtctgatccctgaaacaatctttaaagtttctgacccgcagccaattttatttaaatattttagctgaatcaatgtactgtactgttttttttggatattatgcacttgtgaagttaaaggatcggaacatgtttgtgaatgcagaaatgtttttttctgttatctt

SEQ ID NO: 118385 - DNA, 1046 bp, Zea Mays
gcccgcctccgaccttgcagcgataagcccgattcccggttctagaaacacggagacggtagacggaggagctaacttgccaattgccattgcactgcgcgcgcgcgcctcgcatccgccgccagcaggtgccaccgccatctctgctctctctctctctctcaagcaacgcccgccatggcgaccatagccacgatggccctgctgaagcccgccaggatcgtggcgcggtcggcgccgccgtccaccagcggcagcgtctcgctgcgcgtcccggcgcgggccaagaaggccgcggtgtccgcgtccgtgtcgtccgcgctggcgggcgccttcttctcggcgctggcgtcgtcggacgcggcgctggcggcgcagcgcgtggcggacgtggcggcggcggccgactccgggagcgacaaccgcgggcagctgctgctcttcgtggtggcgcccgccatcgggtgggtgctctacaacatcctgcagccggcgctgaaccagctcaaccgcatgcgcagccaggccgtggtcgccggcctgggcctcggcgccgccgccgccgggatggcggccgcgcccgaggcctccgccgccgccgcggcgcaggacctcgccgctctcgccgctgctgcggctgcggccgcgcccgccgacgacaaccgggggctcctgctgctcatcgtcgtcacgcccgccatcggctgggtgctcttcaacatcctccagccggcgctcaaccagatcaaccgcatgaagtccgactgagctgctagctggcaacaacaccggggacggcggagtgtgcgtatcagcggctggacggttgtaatttatagcgtgaagcatggttggtctacgtgccttgttttttccatcttcgaatcttgagcaaatgcagtacatgtacagctccctccctctcgtctcaatctgttacatacatatacacacataccgtatcctctgtggtggttggtcaatgcaaacgctcctcgacgctggacatctcgccggcgagcgctccctgaacgccgccgccggcg

SEQ ID NO: 118386 - DNA, 1387 bp, Zea Mays
cgacgcaaaggggagcaccgcaatccggcccgccaacggcgtgcctccacctcggccagccgccgccacgtcagcgcgtgatcggggaaaagcggcctggccaccatgcttctcgcggtctcgccgcggtcgcgggctttccctcgctgctccaaacagtcgtccaggacagccccggatcccgtgacaaaagaagcgtcgccaattcgccatggcccgtggccagcggcggcggaggcggcggaggccggagccgcgggcgagggccagtggcaaggggaagaaggccaggtacctgagcctcagcgacctcatggttaaggcggaggtgggagcgacgccgccgcggtccgggtgcgaggaggcgggcgtgaagcctgaggaggaggacgcccgcggcgacgggcagcagcggcaggtggagccgttcgcgccgcaccaccaccacgaggcgtccaccctgttcgaggccctgccggcgccttcgctctccgacatcctcggcccgtcgccgtcgccgtcgcccgacggggccggctccggggcctcggggctcccgggcgccgacgaggaggacctgccgcgccgcgcgctgcggggcagggagcgctgggtgtactgcagcggcgactcctcgttctcgccggcgtccacgccgcccgccaccgccacggccaccacgtcgtcgccgtcgccgccgtgctcgtcgtccgccgcgagcacgggcgcgtcggcgcgctcgctgctgctcaagctggattacgaggagatcctcgcggcctgggcggaccgggggccgctctacatcggcgccggcagcgacctgcaactcgacgcagcgcaggtggcttcggggagggcggagagggtgaggcggtacaaggagaagcggcggaggcggctcttcgcgaagcggatccgctacgaggttcgccgggccaatgccgtcaagcggccgcggttcaaggtggtgacaaattcttctcctcatgtcttaagttgggacgcactgcagggccgtttctgatcctggtggatatgatgcactgcagggccgtttcatcaaggaggaggacgacgaaggcgagctccggcctacacagcctgcctccttcagtttgcttcttccatcatcgccagcctcgtccccgtgtgtatcactgcatggcaaaagaactcgatagctagctgcgatacgtacatgtatcttgtaaaacagtaaccaggaaaaaaaaagaaattgctacagccatggtctgggatttcgaggtccattgatgggaggcatctttgatgactcattgctttctccgtaacaagggctcattgttactcgttgttggtctcttccctttgcgttgagcttgtgtcctatactcctatcaca

SEQ ID NO: 118387 - DNA, 1449 bp, Zea Mays
ccaacgaaggaattcctggaagggaatcgaggatgtcatctctagtaaggaactaaataaaatacggttttgttaacgctagtttccaccccctacataaggcctttcgggccacccgttttacaagccgaagacgcgaccgacccaggcaggcaccactccgctcaacgcaccgggcggcacccaaatcccaaaccctagcacacgcaccatggcggcgcagcagaagatccggtggggggagctggaggaggacgatggcggggacctcgatttcctcctcccgccccgcgtcgtcgtcggacccgacgagaacggcctcaagaaggtcatcgagtaccgcttcgacgacgacggcaacaaggtccgggtcacgaccaccacccgcgtccgcaaactcgctcgggcgcgcctctcccgcagcgccatcgagcgccgccagtggcctaagtttggggacgccctcaaggaggacgccggctccaggctcaccatggtctccaccgaggagatcctcctcgagcgcccccgcgccccagggagcaaagctgaggagtcagctgcatctggtgatccgctggctatggcgagcaagggaggtgctgttctcatggtttgcagaacctgtgggaagaagggcgatcactggacctcaaagtgtccgtacaaggacctggcaccaccgactgaaactttcacggacaggcctccaacgtcagatggccctcctgcaccaggtggtcctgctaagggagcatatgttcctccaaccatgagaggaggtgctgataggactggagactcgatgcgccgcaggaacgacgagaattccgtccgtgtgaccaacctctcggaggacacccgcgagcctgacctccttgagctcttccgtgcctttggccctgtcagccgtgtctacgtcgcggtggatcagaagactgggtcgagcagggggtttgggtttgtcaactttgttcacagagaggacgccgagaaggccatcaacaagctcaacgggtatggttatgacaaccttatcctccgagtcgagtgggcgacaccaaggcccaattagttttgccgctacctgctagaatcgcatatttctgttgaattatatcagtatgtttgtttgaattactggtacctgagtcatgaatttatcttgttggaaaaacctgttatgtgtggtttggttggacgagaataactatactcgcttcttttatattgagttcgcatgccgtttgttgtcagcaaattctatgtgccctctaagttctgacttgtgatgattgtatggctgaacaaagcaaatttcatggtcgcaaggctggcaccttgcatagccttgaatgcttgatcctttgggtcagagactctaaaggttcagtggtttactagcatctcattcgatcaaaagataacaaaaaacgaacgactaaacct

SEQ ID NO: 118388 - DNA, 489 bp, Zea Mays
acaagccgaagacgcgaccgacccaggcaggcaccactccgctcaacgcaccgggcggcacccaaatcccaaaccctagcacacgcaccatggcggcgcagcagaagatccggtggggggagctggaggaggacgatggcggggacctcgatttcctcctcccgccccgcgtcgtcgtcggacccgacgagaacggcctcaagaaggtcatcgagtaccgcttcgacgacgacggcaacaaggtccgggtcacgaccaccacccgcgtccgcaaactcgctcgggcgcgcctctcccgcagcgccatcgagcgccgccagtggcctaagtttggggacgccctcaaggaggacgccggctccaggctcaccatggtctccaccgaggagatcctcctcgagcgcccccgcgccccaggtctacatacctccatctccaatatcctcgtcgtctgttcgttcgattgctagctggtcgaatctttggatt

SEQ ID NO: 118389 - DNA, 858 bp, Zea Mays
atgccacttcatcagttcatttcgttatatatagaggcaaaccacaaccgagaagacaccattgaaggtttctcctcttctgattgtcttccttttttgagaaaaaacgaagcactacagttccactacaaccatggcttgccacctcagatctgctagtgtgccttccagccctcgctcgaatggcattggtgttgaggaacagatgcagagattgaagagaaccgtctctttgtcttctgtgaccattggaaccatgtgccatggtttgagaaagcttggagaagtatacaacaccatcggcgagcttgtgtgcttacccagcaaccaagttagacagcagaggaaagcagtggagcaagagctcgaccaatcccttgtccttctcaatctctgcaacactatgcaagagagattctctgagctcaaagaaaccatcctcgacatgcaattggcactcaagaaaggagatcatacagctgtacaagccaagatccagtcctacatacgcgttgccaagaaggcacagaaacagttcaagaaaatcagcaaaaagcgcaccacagcagatcaagaaagttgcagggtggtcaagatgctgtctgaagccagagagattgttgcctcaatgctggaatcctcatcgtatctgctgtcaagaaaaatcatgatgagttccagcaagtggtctcttttctccaagacattccagaagaaaagttttgtttgcgaggaggagcaactgcaggagttagagctggacatcattgatcttgagggtggagttgagtctttgttcagggcattaatccatagcagagtttcccttctaaatactctcaccttaggtaaaggaag

SEQ ID NO: 118390 - DNA, 1030 bp, Zea Mays
tgcagttgcttcaacctctctggctatataaaacaaggcaaagcttagaagggagaacaccattacaacagcttgcatttgctctttccttctcttccacctccagtagcttcattccaaggatggtgtgccatctgagatctgcgagcgtgccttcgagccctcgctctaatgagatccatgttgaggaacagctgcagagcctgaaggcagccatctcatcaccgtcagtgaccatcaaaaccatggtcgatggtctgagcaagctcgggagcatctacgaccgcattgatgtgctcacatgcttgcccaccagccagaggaaggcggtggaggaagagctcgagcgctccctcgtcctgcttgacctctgcagcgtcttgcaagagagcttcgtggagctcaaggccagtgttcaagagatgcagttggctctcaaaagaggagacgacgcggctctccagaccagggttcagtgctacgcgcgcttggtcaagaaggcacagaagctgttcaagaagttcaacaagaagactgcttctgacatcgaaagttgcagggtgatcaaccttgttgctgaagcgagggagattgctgtgtcaaccctagaatcaacattgcatctcctgtcaaagcaaattgcaatgccaagttgtagcaagtggtcacttgtctctaagtctttccaaaagaagagagtcatgtgcgaggcggatcaattgcaagggctggagctcggcttcgttgatcttgagaacagagttgggacattgttcaggaaattggtccagaacagagtgtcttttctgaatattcttagcttgtagacaaatcatacgacgactctgaacccatacgattagcatccgccttttagaggatttgctgatcatacaaacaattttgcatggcagatatgtatatgtcagaaagtgtacaaaaaatactcaaatgagaggcaaagtttttggcccattttcttctggcagtttgtctctccctggtggctaattttacagtgtgcatcctt

SEQ ID NO: 118391 - DNA, 1431 bp, Zea Mays
ccatgcaggcgagctagccaaccatagcacagacatgacagccttgtaatcaagcccaatggccaatgcaattcttattagttggctttagttgcaacgcttgaccatgcagttggtcacacatgagaatgattctccttgtctgctgattctgctcagtgcatctgattctccctgtctgctggttcagctctgcagttgcatccacctccttcgctatataaacaaggaagccgaagcccagaagacaccaatttagcagcttgccttttatctttcttctctcccactccaagaagttccagtgtgtcagctttcacgaattccaaggatggcttgccgcctgagatcggctagcatgccttcgagccctcattccagggagaccaatgttgaggaacagattctatgcctgaaagcagccatctctctgccttcagtgactgtcgaaaccgtattcgatgatctgagcaagctcgggagcatctacaaccacatcgacgcactcacatgcttgcccaggagccagaggaaggcagtggaggaggaggttgagcactccctcgtcctgctcgacctctgcagcattgtgcaagagagctttgttgaactcaaggcctgtgtccaggagatacagttggctctgaaacgaggtgatcacacagctgcccataccaagattcagtgctatgtgcgctcggccaagaaggcacagaagctgttcaagaaggtcaacaagaagactgtctctgacatcgaaggatgctgggtgatcaatctggttgctggagcgagggagattgctgcgttgatccttgaatcgacattgcatctcctgtcaaagcaaattgtggtcacaagttctagcaagtggtcacttgtttccaagtcattccgaaagaagtgtgtcatatgtgaggcagaacaattgcaagggttggagctggacattgttgaacttgagagcagagtagggacattgttcaggaagttgatccaaagcagagtgtctcttcttaatgctcttagcttgtagacagaccatacaacaagtctgaccccctgtcgccttttagaggattcgctgatatccaaacaattttgtgtgcacatacacaggagaaaatgtacagaaaattactcaatgagagatagtttttcatccattttgttttttttttgaaagggagaggcaaaagacttgccgctccaatatattagaaggtgtaggactaacaggaaattacaagaaaccaagacgacttacaagactagaagcgaactcctgaacaaaattactaagcggacctactaagcgtacctactagccagccaggccatggaaacaaccaactaactctttgaccactagcgcgacctgctccgctgatttaagctgactgtgaaagattctattgttcctctctaacc

SEQ ID NO: 118392 - DNA, 1175 bp, Zea Mays
gcgagcttgccagcaatagcgcagacatgacagcctcgaatcaagctagtttgataatgcagttcttggttggcttcggttgcaacgtatgagtcggtcacacatgagaatgattctccctgtctgctggttcagctattcactggcatccacctccgtagctatataaacaaggaaaccgaagcccggaagacaccattgcagcagcttgcctttgatctttcttctttcccactcccagaagtttcagaggttcacacctttcaccaattcaaggatggtgtgccacctgagatctgctagcatgccttcgagctctcgctccagtgagacctctattgacgaacagattctgagcctgaaagcagccatctctctgccttcagtgtccatcaaaaccatggtggatagtctgagcaagctcggcagcatctacaaccacatcgacgcactcacatgcttgcccaggagccagaggaaggcagtggaggaggagctcgagcactccctggtcctgctcgatctctgcagcgctgtgcaagagagctttgttgagcttaaggccagtgtccaggaggtgcagttggctctggaacgaggtgaccacacggctgcccataccaagattcagtgctatgtgcgctcggccaagaaggcacagaagctgttcaagaaggtcaacaagaagactgcctctgacatcgaaggatgctgggtgattaatctggttgctgaagcgagagagattgccgtgttgatccttgaatcgacattgcatctcatgttgaagcaaattgtgattccaagctctagcaagtggtcccttgtttccaagtcattccgaaagaagtgtgttgtatcatgcgatgcggaacaattgcaagggttggagctggacgttgttgatcttgagagcagagttgggacattgttcaggacgttgatccagagcagagtgtctcttcttaatgctcttagcttgtagacagatcatacaacaggtctgaccccctgtgattagcatccgccttttagaggattcactgatatccaaacaattttgtgtgtacatatacaggagagaaaatatacagaaaattaccaattgagagtttttcgtccattttgttgtcagctggtgtctctctcgtgattaattttatagcgtccattct

SEQ ID NO: 118393 - DNA, 1199 bp, Zea Mays
agccgtgcaggcgagcttgccagcaatagcgcagacatgacagcctcgtaatcaagctagttcagtaaagcagttcttcttgattggcttcggttgcagcgtatgagttggtcacacacacacgagaatgattctccctatctgctggttcagctccgcggttgcattcacctccgcagctatataaacaaggaaaccgaagcccggaaggcaccattgcagcagcttgcctttgatctttcttctttcccactcccacccagaattttcagcgtttcacagctttcaccggttccaaggatggcgtgccacctgagatctgctagcatgccttcgagccctcgctccgttgaggaacagattctgagcctgaaagtagccatctctctgccttcagtgaccatcgaaaccatggtggatagtctgagcaagctcgggagcatctacagccacatagacgcgctcgcatccctgcccagctgccagaggaaggcaatggaggaggagctcgagcgctccgttgtcctgcttgacctctgcagcgccatgcaagagagctttgcagaactcaaggccagtgtccaggagacgcagttggctctcaaaagaggagacgacgcggctcttcatgccaagattcagtgctatgcgcgctcagctaagaaggcacagaagctgttcaagaaggtcaacaagaagactgcctccgacatcaaaggatgcagggtgatcagcctggtcgctgaagcgagggaagttgccctatcgatcctcgagtcgacactgcatctcctggcgaagcagattgcggtcccaagtcccagcaagtggtcacttgtatccaaatcgttccagaagaagagaatcatgtgtgaggcggagcagttgcaagggttggagccggagattgctggtcttgagagcggagttgggactttgttcaggacgttgatccagagcagagtttctcttctcaatgctcttagtttgtaggcagatcatatagcactctgaccccccctgtgattagcgtccgccttttagaggatttgctgatcatacaaacagttttgtatgtacagatatatgagagaaagtgtgcagaaatatactcaattgagaagcaaagtttttggtctatttcgttttgtctcctctgctctgtctcttcccttgtgactattttgtggtgtgtattc

SEQ ID NO: 118394 - DNA, 735 bp, Zea Mays
gagaaaaatagcatcacagtttccattactaccctggcttaccatctcagatctgctagcgtgccttgtagtcctctctgcaacgaggttgatgctcataagcagccccagagcgtgaagacaacagtttcttcatcatctgtggccattggaaccatgtgtgttggtttcagaaagctcggaggagtctacaactgcatctgcgagctggcgtgcttgcccagcaaccaagttacacaacagaggaaaacagtggagtaagagctggaacgctcacttgtcttgctcgttctctgccatactatgcaaaagagctttggagaactctagatgaacaccatggacatgcagatggctctcaagagaggagacgaggttgcagtctccatgctagaaacgtcacatctcttgacaaatcataattgctttctagcaagtggtcgcttgtcttcaagacactccgaagaggagagttgtgagtgaggagcaattgcacgagttagaattagacattgttgatcttgagaacggagttgaagctctgttcaggacattgatccagagcagagtggtcctcttctgaattctcttagtttgtagatagatcatacaaaagtctgtcagcctgtgattagcgtccactttttagaggatctgctgatcatcaatcttttttatgtaaatatgagagagagtatatataaagaaactgaatccataaaaaagcaatgtttt

SEQ ID NO: 118395 - DNA, 135 bp, Zea Mays
gtttttatttttcattttttttatcttcttttaaattctaatttctattctatgatcactagtttctatatgcaacgttacatatgttttatagtcttatctagatgttttatgattttgttttggctaatgtga

SEQ ID NO: 118396 - DNA, 120 bp, Zea Mays
ggccaaccgcggcccggcacggccaggcccaggccctacctttttttattatctgtggacaaatttgaatcgtcgaaaccgataaatggtgctgcagccaataaaataaaatactgtgtc

SEQ ID NO: 118397 - DNA, 340 bp, Zea Mays
aaattattaatctttatttttgcataattttagatttttaccgtttaaatgtgggagaggagagagaggtgaatggaatagtagagataagatttataagaaatagggatctgcaccaagaacataaacacaaattaattagcatattcttgcccctcaagttaaaatcatgcatcaatagtacgacaataatacaaatccggtgtgcatactacagaacaggaatgtaggcattaccttaattaaaaaaagtaatgtgctagtattagtagtaccttctagggttgagtcttcctcaacacccttgtatgcccagtggcatgatgcaatgatgttctca

SEQ ID NO: 118398 - DNA, 4344 bp, Zea Mays
acttctagccttctggaactctcccttccggttccttcatctccgcctccacggctccacctccaccgctgctccacacgggcacacctttgcctcgcccaaccgctgccttgctcgcgttcgccattccccagaccttgagagctaccgtctggtccgatcggacggatcccttcgcgcgccccagagatttcaggtaaggtgctgtaacagaagatgcaagggggaagaggtgggaggcagggcttattcggtttcggggacccttctggtggttccggtggctttggacaaccagggagccttatgcctggtttttttggtggcgcaaatccctttgacgaccctttcttcacaaacccctttggtagcatgatgcagactagtttctcagcccctttcagcggcatgatgcaacctagcttcatgaaccccttcggcagcatggtgcaacctagcttgcttggaccaagtatgtttgcgccccatggcaatctcaatggaggcatgtttggaagccagacacatctcggtcaaggtatcagcaatggcagtggtttcattcagcaggcccctgaaccaagcaggcctaaagggccaattatcaaggagttatcttcagatgatgaggatgatgtagatgatgatgaagaaggcgagaagaagaatggtaactttaggaagcatcaaagggaaagcaaagagccatatgtggaggacccagatgatgaagaagataataaaagacctaagcatggacaatttgggagggagttcagcagagttaacacatcacgtccacagcctcagacatttatgtttcagagttcaactgttacatatggtggtccaaatggagcatgttatacatcttcaacaactaggaggactggtgcagatggatttacgctggaagaaaataaagaggctgacacaactactggtaaagccactcacaggatttcacgtggcattggcattaaggtattgatattccttgcagatctcttgctttctctcatccaatcgcactgatgttgtgattggagctacttactatctggggttggcacgctgcagggtcactcgttaacaagaaatcttaattctgatgggcgtgtgaacacccttcaaactttacacaacttgaatgaagatgagcttggtggatttgaggaatcatggcaaagaaataccagggagaatatgcctggctgggatcctagaatgaacatgcttggcaatggaaatgttcgctctgacttccgagatgtgaatcaaatgcctgcacttccagccccagaactataccgtggcacgaattttcagaatggctcttccatgggccgtgcaccccgcacatgagttcctctgtggcatatgctggatcacagtgctcagtaccggtgacttgcactattatgcagaaaaatgttgaaacccaaactcagcttttgaaaaactactgtaacttgagacagttttaatagtcgagagctttccttagtttcagcagctctatccgagtactccaatcactgtagtttagtgctgcctgagatgcaactaaaatctgtttggatagggaggattatttcttgggaaatttactggtttttggtgaaatctgaagaaaatgaaccatcctgatcttacccatcacgtgttggtgatgtagcctgttaaaccttcatgaataaactgtgagcctcagggtctgtatgcttgtagtttttctcattctagctgccaataagctatgcaaagtacattcattacggttacatctagatagcagcagctaaacaaacaaaggtgcatatatacgtatatatagttgtgtcatcaaacgtggccgtcagattcaggtggcttcgccgcgttcttctccggcgaccggctgatctcaccggcggctgccctggtctgctgttgcaccaccaacgttgagacccggcatccgaaatccgtggacgtgagcaggtccccgaggacgccgagctccaggtgctcgctccagtccgatatgccgaccgttagcggtgacttggggccgtccgctcgccggccgacgatcagcaggtccgacgccgggctagacttccggatggtgtccaccatctcgtcggagctacagaccaggttctcgctgtaggcgacgcggtggccgtcgacccaacggcggacgtactcctgcagcgcctcctcgtcgagccggtcctcctcggggtcgccgcccttgcgccactccggcggcggcaggaaccggaagacggtgaggccgatgggcgcgtcctcggccatgtgcgtggcgagcgcgagcgcctcccggtcgtccggcccgccgaggaagtagagcgcgacgcggtgagggaagccgtcggcgtcggctgtggccgcggggcccccggccacggcggacgatgcgacggagaggctgccccggtcgacgaggatggcgacggagcagggggagtagtggagcacgttgacgttggcggcctggacggagccggcgctggccgtcgtgttctcgacggagccgtcgatggcgaggcgctggtggaagggcacgacgatgagcatggcgcgcttctcgagcgccacggcgcagacgtcgtcgtgcatggtggcgtagggcgcgatgcagacgtaggggagcagcgacgcggaccccacgggccgctgctgcacgaagtactggaaggcgttgacgatgcgccccgagtcggtgcccccagacggcacgcagttccggtcgccgtacttgaaggcgcggagcacggagctggtgagccccacgagcggcgtgaggtggaggaggtagacggagacgggcgacacgggcgacgggctggcggcgtccagcagcgccagcatgggcgccacgtccgcctgcgagtgcacgcacgccagcatccgcagctcgtcgcccagcttcttgtgctgcaccgtgcgccgccggtacgccacgtacttctcctccgggtggtacaggtgcttgaccagcgacgacgtggcggcgcccagcagcaggatgttgagcatgaaggcggcgtacacctgctcgtcgaagatgtccgagtccacgaacgccgaggcgtaggcgacctcggtgatgcccttgaagttcatcatgaggccgacgatgaaggcctcccggggcgacatcccgcagtagatgcagggcagcatgcaggccgcctgcttggcggcgacgccgacgaggaggaagatctcgaggaggaggcacgtggaggcgtcggtgatcttgaagacgtccagcctgaggccgccctgcgcgaagagcagcggcatgagcaccccggcgacgaggcggtcgaggcgctcctcgagggtgaccccgagcggggcgccgccggggagcatgagacccagcatgaagggcccgtaggtggcgtgcaggcccaggacctcgctggcgaagctgcagacgatggtgatgagcagcacggcgacgaggcgcgcctcggagaggaggcctccctcggggacgtcgcgcatgaggcgcaggatggccgggcgcgccacgtaggtcaggaagcctatgaagatggcgaagatgacgagcgacaggaagccgatccgctggaccctctccaaggggctggacgcgaggaggtaggacgtgatgcccgcgacaaagatggtgttggcgaagtcgccgatgagcgccgcggacatagcgaggcgccccagcttggaggagaggaggttgaggtcgcccagcgtggagcagacgacgatgaaggccgagagcgaccaccacacgttgaggttggtgagcatgaagttggccttccacggcgccggcacgcgcgccccgagcgcggcggcggcggcgtacatggccatgtgcggcccgatggcgccgaagaaggcgatggccacggccttcttcccggacttgacgatcatccccaggtccgtcttcacgccgataacaaagatctgcagtgtgaaggcgtacgcgccgaccgtgttgagctgcagccacccctccggcgtcgcgaagggcgcgctggcgttcgggagcacccggcccaggagcgacgggccgagcagcgcgccggccacgatctgggagatgacgaggggcacgttggcgcggccgagcagggcgtgcacggcgcgggagagcgcgaagacggcgcagacatggtagaggaggagcgggaagtagaacttgagcgggtcgtcgccggcgaagacgccagaggaggtggcgactgagtcgttgagcgggaagcagaagatgctcttgttgacggtgacctccgcaagcagttgcggaccgggcggcgcctcacgcgacatgggcgg

SEQ ID NO: 118399 - DNA, 4248 bp, Zea Mays
acttctagccttctggaactctcccttccggttccttcatctccgcctccacggctccacctccaccgctgctccacacgggcacacctttgcctcgcccaaccgctgccttgctcgcgttcgccattccccagaccttgagagctaccgtctggtccgatcggacggatcccttcgcgcgccccagagatttcaggtaaggtgctgtaacagaagatgcaagggggaagaggtgggaggcagggcttattcggtttcggggacccttctggtggttccggtggctttggacaaccagggagccttatgcctggtttttttggtggcgcaaatccctttgacgaccctttcttcacaaacccctttggtagcatgatgcagactagtttctcagcccctttcagcggcatgatgcaacctagcttcatgaaccccttcggcagcatggtgcaacctagcttgcttggaccaagtatgtttgcgccccatggcaatctcaatggaggcatgtttggaagccagacacatctcggtcaaggtatcagcaatggcagtggtttcattcagcaggcccctgaaccaagcaggcctaaagggccaattatcaaggagttatcttcagatgatgaggatgatgtagatgatgatgaagaaggcgagaagaagaatggtaactttaggaagcatcaaagggaaagcaaagagccatatgtggaggacccagatgatgaagaagataataaaagacctaagcatggacaatttgggagggagttcagcagagttaacacatcacgtccacagcctcagacatttatgtttcagagttcaactgttacatatggtggtccaaatggagcatgttatacatcttcaacaactaggaggactggtgcagatggatttacgctggaagaaaataaagaggctgacacaactactggtaaagccactcacaggatttcacgtggcattggcattaagggtcactcgttaacaagaaatcttaattctgatgggcgtgtgaacacccttcaaactttacacaacttgaatgaagatgagcttggtggatttgaggaatcatggcaaagaaataccagggagaatatgcctggctgggatcctagaatgaacatgcttggcaatggaaatgttcgctctgacttccgagatgtgaatcaaatgcctgcacttccagccccagaactataccgtggcacgaattttcagaatggctcttccatgggccgtgcaccccgcacatgagttcctctgtggcatatgctggatcacagtgctcagtaccggtgacttgcactattatgcagaaaaatgttgaaacccaaactcagcttttgaaaaactactgtaacttgagacagttttaatagtcgagagctttccttagtttcagcagctctatccgagtactccaatcactgtagtttagtgctgcctgagatgcaactaaaatctgtttggatagggaggattatttcttgggaaatttactggtttttggtgaaatctgaagaaaatgaaccatcctgatcttacccatcacgtgttggtgatgtagcctgttaaaccttcatgaataaactgtgagcctcagggtctgtatgcttgtagtttttctcattctagctgccaataagctatgcaaagtacattcattacggttacatctagatagcagcagctaaacaaacaaaggtgcatatatacgtatatatagttgtgtcatcaaacgtggccgtcagattcaggtggcttcgccgcgttcttctccggcgaccggctgatctcaccggcggctgccctggtctgctgttgcaccaccaacgttgagacccggcatccgaaatccgtggacgtgagcaggtccccgaggacgccgagctccaggtgctcgctccagtccgatatgccgaccgttagcggtgacttggggccgtccgctcgccggccgacgatcagcaggtccgacgccgggctagacttccggatggtgtccaccatctcgtcggagctacagaccaggttctcgctgtaggcgacgcggtggccgtcgacccaacggcggacgtactcctgcagcgcctcctcgtcgagccggtcctcctcggggtcgccgcccttgcgccactccggcggcggcaggaaccggaagacggtgaggccgatgggcgcgtcctcggccatgtgcgtggcgagcgcgagcgcctcccggtcgtccggcccgccgaggaagtagagcgcgacgcggtgagggaagccgtcggcgtcggctgtggccgcggggcccccggccacggcggacgatgcgacggagaggctgccccggtcgacgaggatggcgacggagcagggggagtagtggagcacgttgacgttggcggcctggacggagccggcgctggccgtcgtgttctcgacggagccgtcgatggcgaggcgctggtggaagggcacgacgatgagcatggcgcgcttctcgagcgccacggcgcagacgtcgtcgtgcatggtggcgtagggcgcgatgcagacgtaggggagcagcgacgcggaccccacgggccgctgctgcacgaagtactggaaggcgttgacgatgcgccccgagtcggtgcccccagacggcacgcagttccggtcgccgtacttgaaggcgcggagcacggagctggtgagccccacgagcggcgtgaggtggaggaggtagacggagacgggcgacacgggcgacgggctggcggcgtccagcagcgccagcatgggcgccacgtccgcctgcgagtgcacgcacgccagcatccgcagctcgtcgcccagcttcttgtgctgcaccgtgcgccgccggtacgccacgtacttctcctccgggtggtacaggtgcttgaccagcgacgacgtggcggcgcccagcagcaggatgttgagcatgaaggcggcgtacacctgctcgtcgaagatgtccgagtccacgaacgccgaggcgtaggcgacctcggtgatgcccttgaagttcatcatgaggccgacgatgaaggcctcccggggcgacatcccgcagtagatgcagggcagcatgcaggccgcctgcttggcggcgacgccgacgaggaggaagatctcgaggaggaggcacgtggaggcgtcggtgatcttgaagacgtccagcctgaggccgccctgcgcgaagagcagcggcatgagcaccccggcgacgaggcggtcgaggcgctcctcgagggtgaccccgagcggggcgccgccggggagcatgagacccagcatgaagggcccgtaggtggcgtgcaggcccaggacctcgctggcgaagctgcagacgatggtgatgagcagcacggcgacgaggcgcgcctcggagaggaggcctccctcggggacgtcgcgcatgaggcgcaggatggccgggcgcgccacgtaggtcaggaagcctatgaagatggcgaagatgacgagcgacaggaagccgatccgctggaccctctccaaggggctggacgcgaggaggtaggacgtgatgcccgcgacaaagatggtgttggcgaagtcgccgatgagcgccgcggacatagcgaggcgccccagcttggaggagaggaggttgaggtcgcccagcgtggagcagacgacgatgaaggccgagagcgaccaccacacgttgaggttggtgagcatgaagttggccttccacggcgccggcacgcgcgccccgagcgcggcggcggcggcgtacatggccatgtgcggcccgatggcgccgaagaaggcgatggccacggccttcttcccggacttgacgatcatccccaggtccgtcttcacgccgataacaaagatctgcagtgtgaaggcgtacgcgccgaccgtgttgagctgcagccacccctccggcgtcgcgaagggcgcgctggcgttcgggagcacccggcccaggagcgacgggccgagcagcgcgccggccacgatctgggagatgacgaggggcacgttggcgcggccgagcagggcgtgcacggcgcgggagagcgcgaagacggcgcagacatggtagaggaggagcgggaagtagaacttgagcgggtcgtcgccggcgaagacgccagaggaggtggcgactgagtcgttgagcgggaagcagaagatgctcttgttgacggtgacctccgcaagcagttgcggaccgggcggcgcctcacgcgacatgggcgg

SEQ ID NO: 118400 - DNA, 4223 bp, Zea Mays
ctcccttccggttccttcatctccgcctccacggctccacctccaccgctgctccacacgggcacacctttgcctcgcccaaccgctgccttgctcgcgttcgccattccccagaccttgagagctaccgtctggtccgatcggacggatcccttcgcgcgccccagagatttcaggtgctgtaacagaagatgcaagggggaagaggtgggaggcagggcttattcggtttcggggacccttctggtggttccggtggctttggacaaccagggagccttatgcctggtttttttggtggcgcaaatccctttgacgaccctttcttcacaaacccctttggtagcatgatgcagactagtttctcagcccctttcagcggcatgatgcaacctagcttcatgaaccccttcggcagcatggtgcaacctagcttgcttggaccaagtatgtttgcgccccatggcaatctcaatggaggcatgtttggaagccagacacatctcggtcaaggtatcagcaatggcagtggtttcattcagcaggcccctgaaccaagcaggcctaaagggccaattatcaaggagttatcttcagatgatgaggatgatgtagatgatgatgaagaaggcgagaagaagaatggtaactttaggaagcatcaaagggaaagcaaagagccatatgtggaggacccagatgatgaagaagataataaaagacctaagcatggacaatttgggagggagttcagcagagttaacacatcacgtccacagcctcagacatttatgtttcagagttcaactgttacatatggtggtccaaatggagcatgttatacatcttcaacaactaggaggactggtgcagatggatttacgctggaagaaaataaagaggctgacacaactactggtaaagccactcacaggatttcacgtggcattggcattaagggtcactcgttaacaagaaatcttaattctgatgggcgtgtgaacacccttcaaactttacacaacttgaatgaagatgagcttggtggatttgaggaatcatggcaaagaaataccagggagaatatgcctggctgggatcctagaatgaacatgcttggcaatggaaatgttcgctctgacttccgagatgtgaatcaaatgcctgcacttccagccccagaactataccgtggcacgaattttcagaatggctcttccatgggccgtgcaccccgcacatgagttcctctgtggcatatgctggatcacagtgctcagtaccggtgacttgcactattatgcagaaaaatgttgaaacccaaactcagcttttgaaaaactactgtaacttgagacagttttaatagtcgagagctttccttagtttcagcagctctatccgagtactccaatcactgtagtttagtgctgcctgagatgcaactaaaatctgtttggatagggaggattatttcttgggaaatttactggtttttggtgaaatctgaagaaaatgaaccatcctgatcttacccatcacgtgttggtgatgtagcctgttaaaccttcatgaataaactgtgagcctcagggtctgtatgcttgtagtttttctcattctagctgccaataagctatgcaaagtacattcattacggttacatctagatagcagcagctaaacaaacaaaggtgcatatatacgtatatatagttgtgtcatcaaacgtggccgtcagattcaggtggcttcgccgcgttcttctccggcgaccggctgatctcaccggcggctgccctggtctgctgttgcaccaccaacgttgagacccggcatccgaaatccgtggacgtgagcaggtccccgaggacgccgagctccaggtgctcgctccagtccgatatgccgaccgttagcggtgacttggggccgtccgctcgccggccgacgatcagcaggtccgacgccgggctagacttccggatggtgtccaccatctcgtcggagctacagaccaggttctcgctgtaggcgacgcggtggccgtcgacccaacggcggacgtactcctgcagcgcctcctcgtcgagccggtcctcctcggggtcgccgcccttgcgccactccggcggcggcaggaaccggaagacggtgaggccgatgggcgcgtcctcggccatgtgcgtggcgagcgcgagcgcctcccggtcgtccggcccgccgaggaagtagagcgcgacgcggtgagggaagccgtcggcgtcggctgtggccgcggggcccccggccacggcggacgatgcgacggagaggctgccccggtcgacgaggatggcgacggagcagggggagtagtggagcacgttgacgttggcggcctggacggagccggcgctggccgtcgtgttctcgacggagccgtcgatggcgaggcgctggtggaagggcacgacgatgagcatggcgcgcttctcgagcgccacggcgcagacgtcgtcgtgcatggtggcgtagggcgcgatgcagacgtaggggagcagcgacgcggaccccacgggccgctgctgcacgaagtactggaaggcgttgacgatgcgccccgagtcggtgcccccagacggcacgcagttccggtcgccgtacttgaaggcgcggagcacggagctggtgagccccacgagcggcgtgaggtggaggaggtagacggagacgggcgacacgggcgacgggctggcggcgtccagcagcgccagcatgggcgccacgtccgcctgcgagtgcacgcacgccagcatccgcagctcgtcgcccagcttcttgtgctgcaccgtgcgccgccggtacgccacgtacttctcctccgggtggtacaggtgcttgaccagcgacgacgtggcggcgcccagcagcaggatgttgagcatgaaggcggcgtacacctgctcgtcgaagatgtccgagtccacgaacgccgaggcgtaggcgacctcggtgatgcccttgaagttcatcatgaggccgacgatgaaggcctcccggggcgacatcccgcagtagatgcagggcagcatgcaggccgcctgcttggcggcgacgccgacgaggaggaagatctcgaggaggaggcacgtggaggcgtcggtgatcttgaagacgtccagcctgaggccgccctgcgcgaagagcagcggcatgagcaccccggcgacgaggcggtcgaggcgctcctcgagggtgaccccgagcggggcgccgccggggagcatgagacccagcatgaagggcccgtaggtggcgtgcaggcccaggacctcgctggcgaagctgcagacgatggtgatgagcagcacggcgacgaggcgcgcctcggagaggaggcctccctcggggacgtcgcgcatgaggcgcaggatggccgggcgcgccacgtaggtcaggaagcctatgaagatggcgaagatgacgagcgacaggaagccgatccgctggaccctctccaaggggctggacgcgaggaggtaggacgtgatgcccgcgacaaagatggtgttggcgaagtcgccgatgagcgccgcggacatagcgaggcgccccagcttggaggagaggaggttgaggtcgcccagcgtggagcagacgacgatgaaggccgagagcgaccaccacacgttgaggttggtgagcatgaagttggccttccacggcgccggcacgcgcgccccgagcgcggcggcggcggcgtacatggccatgtgcggcccgatggcgccgaagaaggcgatggccacggccttcttcccggacttgacgatcatccccaggtccgtcttcacgccgataacaaagatctgcagtgtgaaggcgtacgcgccgaccgtgttgagctgcagccacccctccggcgtcgcgaagggcgcgctggcgttcgggagcacccggcccaggagcgacgggccgagcagcgcgccggccacgatctgggagatgacgaggggcacgttggcgcggccgagcagggcgtgcacggcgcgggagagcgcgaagacggcgcagacatggtagaggaggagcgggaagtagaacttgagcgggtcgtcgccggcgaagacgccagaggaggtggcgactgagtcgttgagcgggaagcagaagatgctcttgttgacggtgacctccgcaagcagttgcggaccgggcggcgcctcacgcgacatgggcgg

SEQ ID NO: 118401 - DNA, 591 bp, Zea Mays
attcatccgttcggcgcttgcacgcaagcctcgggtcaccggcaaggagggctgcaagccacgcccaaatcacagtcaggccacatggagagagggaggtgtctcgggtcgctccccgatccgacgaccccagcggcggcgatgggcggcaaggacctgacagaggagcagatcgcctcgatgcgggaggccttcacgctgttcgacacggacggggacggccgcatcgctcccacggagctgggcgtcctcatgcgctccctcggcgggaacccaacccaggcgcagctccgggacatcgccgcgcaggagaagctcacggcgcccttcgacttcccgcgcttcctcggcctcatgcgcgcccacctcaggcccgagcccttcgaccgcccgctccgcgacgccttccgcgtcctcgacaaggacggctccggcaccgtcgccgtcgccgacctccgccacgtcctcacctccatcggagagaagctcgaggtgcacgagttcgacgagtggatccgcgaggtcgacgtcgcgcccgacggcaccatccgctacgacgacttcatccgccgcatcgtcgccaaatgatcc

SEQ ID NO: 118402 - DNA, 1034 bp, Zea Mays
gacaagacgggacaaggtgtgtggtgtgttctgttcccgacacccgcccacaccggcgaccaccagaccacccaaatcagttgcccttgcccacacggccacacgcctctcctctccttttctccttcccccttcaggctccccgatccgacgaccccagcggcggcgatgggcggcaaggacctgacagaggagcagatcgcctcgatgcgggaggccttcacgctgttcgacacggacggggacggccgcatcgctcccacggagctgggcgtcctcatgcgctccctcggcgggaacccaacccaggcgcagctccgggacatcgccgcgcaggagaagctcacggcgcccttcgacttcccgcgcttcctcggcctcatgcgcgcccacctcaggcccgagcccttcgaccgcccgctccgcgacgccttccgcgtcctcgacaaggacggctccggcaccgtcgccgtcgccgacctccgccacgtcctcacctccatcggagagaagctcgaggtgcacgagttcgacgagtggatccgcgaggtcgacgtcgcgcccgacggcaccatccgctacgacgacttcatccgccgcatcgtcgccaaatgatcccgtcccctccgagtctccattccgccgatccaccctcgcgcgctcttcgtctgtaataacttcgtcttccatccccgtgatttcattttgtttcccttctatggctggctcatttgaattcaatctggcctcctcttcgttccgagactgttcggataaaacggataatggttgctgtgtgattatcaaccaatcaacgattaattattagtagatctggctgatggtgcttttgcttagctacctgtaatgtaaagtgtgggtctgcctcctttgtcactgattttggcttgcctggtaacgaatctctgctatgatctgcactggcttatgtattcatgctgatctagtgctacttttgtttgggtcataggttgtattggaatctggaaatttcattggcctgctttaggatt

SEQ ID NO: 118403 - DNA, 103 bp, Zea Mays
cggaggtagtactgcagaactagagcaagcagaagaaacgctatttcagagtttacaaccctcctgctcgtcgtacaacatcagtacaataaacaggagatag

SEQ ID NO: 118404 - DNA, 1187 bp, Zea Mays
aaattagaacagaaggagtattacataaaagcttgtgcgttttccacagtgattttgagcgaccttattgatcttatctgaaagatactcatccgtcgcgctcatcttttgctggttgaaccaaagagcccactaatggaaaaaaacaacacgcaaattcttgttccagaacatttccaaaacatatatcacaagtccaaatcctaaagcagaaacaagccaatttctgagatgttttatcttataccacaaaacaaaataatgaaattccatcagaaaaagcttcagtaaacgtgtaccgggccgaaacgtcccgagcccatgggcgaagcccaacaagcggcccagcacgaaacgtcggagccctagcgaaaatcctcagcgccgccgcgcactataagtagcgcctccaaaccctaggctgctacgcgcttcctctcgccctcgctcctccgccgccgccgccgccgcatcaagcccccgccccgccgtcgcctgaggtagacaccaatccgccgccatggggcgtatgcacagccgcgggaagggtatctcatcgtcggcgcttccctacaagaggacgcctcctacctggctcaagaccgctgcctccgacgtggaggagatgatcacaaaggcagcgaagaagggacagatgccgtcgcagatcggcgtcctgctccgtgaccagcacggtatcccccttgtcaagagcgtcaccggcagcaagatcctccgcatcctcaaggcccatgggctggcaccagaaatccccgaggacctgtacttcctcatcaagaaggcggtggcgataaggaagcaccttgagaggaacaggaaggacaaagactctaaattcaggctcattcttgtggagagcaggatccaccgccttgcccgctactacaagcgcacaaagaagcttccacccacctggaagtagtaagtcaaccagaacccattccttgcctcaaccatggagttgcgaactgtcagttatcttggtgatttgtatcatgtgtttgatgtgagagtcaatgtgcaccaatactacataggagctgttctagacacattagttgtgtgtggtatgcttttattctaatcaactgaagctagatatgcatatcatgggctctgttgtatctacaagggcggaggtttaggcaatcgtgtttactatttca

SEQ ID NO: 118405 - DNA, 1455 bp, Zea Mays
aaattagaacagaaggagtattacataaaagcttgtgcgttttccacagtgattttgagcgaccttattgatcttatctgaaagatactcatccgtcgcgctcatcttttgctggttgaaccaaagagcccactaatggaaaaaaacaacacgcaaattcttgttccagaacatttccaaaacatatatcacaagtccaaatcctaaagcagaaacaagccaatttctgagatgttttatcttataccacaaaacaaaataatgaaattccatcagaaaaagcttcagtaaacgtgtaccgggccgaaacgtcccgagcccatgggcgaagcccaacaagcggcccagcacgaaacgtcggagccctagcgaaaatcctcagcgccgccgcgcactataagtagcgcctccaaaccctaggctgctacgcgcttcctctcgccctcgctcctccgccgccgccgccgccgcatcaagcccccgccccgccgtcgcctgaggtagacaccaatccgccgccatggggcgtatgcacagccgcgggaagggtatctcatcgtcggcgcttccctacaagaggacgcctcctacctggctcaagaccgctgcctccgacgtggaggagatgatcacaaaggcagcgaagaagggacagatgccgtcgcagatcggcgtcctgctccgtgaccagcacggtatcccccttgtcaagagcgtcaccggcagcaagatcctccgcatcctcaaggcccatgggctggcaccagaaatccccgaggacctgtacttcctcatcaagaaggcggtggcgataaggaagcaccttgagaggaacaggaaggacaaagactctaaattcaggctcattcttgtggagagcaggatccaccgccttgcccgctactacaagcgcacaaagaagcttccacccacctggaagtatgagtcaaccacagcgagcactctggtggcctaagtgtggtatcctccgacagcttgttctagatatgaatttgtgtaatgcttcttatgtctcgatccggttaaatggacaacggacctcatctttttttatgtttaccttgagaatcccgtaaaccattttggggttttgaattgtctgttaaacgtaacatgcatatgttttgaagcctagggtgagcttttacttcaccatcacttattattgttgcttgttcatacgtggcatggtttttttggttattatatgactaaaatgtccactttgatcgcacataccagatgtgttttttctcgaaatatatgcataagaccaatctgcacgcatttgtaaacggtgttttaatcgtcagaaaccctatgcctgacgcacgctcaaatttacgctaatttgtcatggacatggctgctcggcctttttttagagaacaggagggggcttactgaaaattttatttaaactagaaagaaaac

SEQ ID NO: 118406 - DNA, 937 bp, Zea Mays
ctcctctccttcgactccattgcattcggccgtcgtctggttccgctattgttgggattgcggatttggttcgctgacgtgtgttcatcgcctggtaggtggaggagatgatcacaaaggcagcgaagaagggacagatgccgtcgcagatcggcgtcctgctccgtgaccagcacggtatcccccttgtcaagagcgtcaccggcagcaagatcctccgcatcctcaaggcccatgggctggcaccagaaatccccgaggacctgtacttcctcatcaagaaggcggtggcgataaggaagcaccttgagaggaacaggaaggacaaagactctaaattcaggctcattcttgtggagagcaggatccaccgccttgcccgctactacaagcgcacaaagaagcttccacccacctggaagtatgagtcaaccacagcgagcactctggtggcctaagtgtggtatcctccgacagcttgttctagatatgaatttgtgtaatgcttcttatgtctcgatccggttaaatggacaacggacctcatctttttttatgtttaccttgagaatcccgtaaaccattttggggttttgaattgtctgttaaacgtaacatgcatatgttttgaagcctagggtgagcttttacttcaccatcacttattattgttgcttgttcatacgtggcatggtttttttggttattatatgactaaaatgtccactttgatcgcacataccagatgtgttttttctcgaaatatatgcataagaccaatctgcacgcatttgtaaacggtgttttaatcgtcagaaaccctatgcctgacgcacgctcaaatttacgctaatttgtcatggacatggctgctcggcctttttttagagaacaggagggggcttactgaaaattttatttaaactagaaagaaaac

SEQ ID NO: 118407 - DNA, 945 bp, Zea Mays
caccggtacactgcttgtattcattctgaatacttaacatcgacaaagtacaattgactttccttaaaatactattagcaggtagtgtccttgtccctggaatataacatgtgttgatgagggtttgttgtaaaatcattagtggtatgatgtatacaagtacagatgttgagttgagtaaagattactggttttgcagagctacatttgtattaacttggactaaactgtaaacttagactgtgaggctaaatttgctatgctctgtgaatagagtgaaacatcccattctgattaattcagttatcgaactgttatttactaaatattgattacacacatactgcacctcaactgttgtctgtttgaattttaattgcttttggatcttgttgcatatatgactgaccttgtttccttgtttttgtgcagtgagtcaaccacagcgagcactctggtggcctaagtgtggtatcctccgacagcttgttctagatatgaatttgtgtaatgcttcttatgtctcgatccggttaaatggacaacggacctcatctttttttatgtttaccttgagaatcccgtaaaccattttggggttttgaattgtctgttaaacgtaacatgcatatgttttgaagcctagggtgagcttttacttcaccatcacttattattgttgcttgttcatacgtggcatggtttttttggttattatatgactaaaatgtccactttgatcgcacataccagatgtgttttttctcgaaatatatgcataagaccaatctgcacgcatttgtaaacggtgttttaatcgtcagaaaccctatgcctgacgcacgctcaaatttacgctaatttgtcatggacatggctgctcggcctttttttagagaacaggagggggcttactgaaaattttatttaaactagaaagaaaac

SEQ ID NO: 118408 - DNA, 1005 bp, Zea Mays
atggattttgttcactgttcattctcgcacaccagttttacttttcatcacgtcatcagcacttgctttcacaaaaagagcaaaggccagagaagacaaccggaggcaagaaagttctccatagaagcaaaacaatcatcgggtgctgaccttgtcgcacgtcgccttctacgtgctgcgcatcgacatggacgccgctatgccaagaagcgccacaagaaggatgcccgagccacacttgaccctaagcatgtccgccagaccggtggtgatcctggcgctggacccagcaacgccgcagcaccgtcgcagcaaccgccagcgccacgtcaagaccgatggatgcatcctccatcgccttcgccggagcgggttgcagagcggttgcgtgagtccgagacccagcaaccgctccgtccgatgcggtactgccccctccatggatgggggccgtgtcctgctcgccaaccgtgggtttctccgtcgggtgcacacaccaccgctaccgctgttcgatcgagcggactgctcattcaagttgcctctccagcgcgccctcgtgcttggacacggttgactgcgcggaaatcaaccgaccctcgcggtcgccccgtcggccagatcgcatcaacgtctactgtgaccgttgccatcgacgacatctcttcctcctccgacgatgagaggatcgccttagtcctcggcgacggggtgcagcagcggctgcctactccgactcccgacgtcggcccatcgggaacggtctcaccaccgacgctcttgagcccgagcggcaacagtgtggtccgtcggctggcgcaccacctttccccacggccgcgcgcgccgcggtcgtggtctgcgacagcaagaccgtccgacgacgacgttcgcgagcgctcacgctcaccgtctctcctgatgcgcggcctcagcgggcaccttgacgtcgcgcggccccgacaaggggctctgtgcggcctcggcctcgcccggcacccgtga

SEQ ID NO: 118409 - DNA, 1907 bp, Zea Mays
atggctctcttgaaagtgcacacgtcctctttaatcttcaaggctaattggataggggtgagggcgctgttttcaaatatcctccggtttctctccttccagatgttccacatggtgtatatcatgaggccgttgaagtcacgcttttggttctttgggagcaggggatgtagcttcccaccagtcttttatgctggagaagctgattttaccgtgaagacaccgtcggggttccatttccaggcaatggagtctggcacctgtggttggaggtggaaatcatggagtctaaaccagagggagacgaattcctcgaactgcaccgtggaggatgatgtggctataaacaagcggaggtttatggagctaaaggaacatatgcaaggagatttcggtgctgaaaatgaagcatatgagaggtatacacagaatgttgggttactggaggaaacatggtgtcccatggaagatgttgatgttgagccttaagctgaagcagcttttcttcagaggaaggaaggatggacttgctggttttggaggcaaatgtgaggttgaagtcggataatgaaaattgccaatggcttcaactatcttggagcagaagctgaagaaattgccgatgaggatgacaaaccatctgatccaaatgaggacgatcatctaaacccaatgaagttcagcacaaagcatatcagctatttggaaaggagaagccgagaatggttcctctattgacagttcaactggaatggaggtgaagccgagcgatcaagagtcaggtgcagcagtagcatggccttgctctatcccagagttgtgcactagatggaggttgatgaagactttgctgcaaagatcgatgatgaaataacctctttgaatcaggtggcacagctatgaatatggaatctagcccaattgccatgtgactaattctatttaaattacctttttcaaggagagagctcttttatcttcaagaaaggtagcatactttggcacaattatcttcaagagagctcttttatcttcaagaaagcgcagatgaggatgacaaaccatctcatccaaattaggacgatcatctaaacccaatgaagtttagcacaaagcagaagatggagagagaagctcaagcttaaatgagctgcttggtaagctggctaggatacggatcaaggacgacctgaagccttgttgtgatcttattgagaagttgtttggaaaggagaagggttgacaggtcaactggaatggagatgaagccgagcgatcaagagtcagctgcagcagcagtagcacggtcttactccgtcctagagttgtgcactaggatggaggttgatgaagactttgccgcaaagatcaatgatgaatttctcctcgttgaatcaggtggcacaactatgaatctggaatctagaccaatcgccatgtgactaattttgtttaaatcacttttttcttctaggagagagctcttttatcttcgtgaaagatagcctacttactttggcacaatttgctatggaagtggacagagcatcacaaatgaggaatgtatgttcatttattggtataataataatggcatttgccttgtcccttcagtataaagcagatatttctagcttcgtaattataaagatggtccatgccatatcttattatatatttcatttttaccatttctcagcaacttgtagatggaaccagaagattaagtactggtggttgaaatctgtatggaaatttcatcaaaacctgatagcttcaaatgtgcatgtctagataagtgctcaaaaaaagatgccagcgagaactagaaagttctaccagccttctctggacatggtgggggccagaaagctttcaagaaaacctatccacttgacttgggaaaa

SEQ ID NO: 118410 - DNA, 609 bp, Zea Mays
tcctcgagcaggtcagtcgtcgcctccctccgttccctcagcctcctcctccctcttttcttgatccatggaaaggtagtggaggggcacggctggccacattggaaagaacaggaaaacaacgaatttgttttggctaatttcttattgaatgcattttcgactattgtaatttactaatttatctactatgattggctcattttgttactgcatatgcagcctcaccgttgccatggacggcgatgccttcgacctcaactcgcaggcgccggagactgatggtttcccggggcttcagctgtacggcaacatcctgtccgactctgatggtctgttcgatggtcgtgccagcggctctgtgcttcctccatatcgcccaccgtgtgccgaaggcggagacgcgcgggcagctgcagcggcaccctacgcccggcagctgctcttcgacgctccacctcggcggcaggcaacacagttcgtcagcaggcgaactcggccgcagcagcacccgtccgtcatcaatagctcaacaacacagcgcgtcgtcgcaccaacagccaaggcgcaccgcgtccgccaccaccgagggcacagagggctccgagg

SEQ ID NO: 118411 - DNA, 854 bp, Zea Mays
ctatgttgaactctgtgtatcatctcaatctgcaatacaaatttgagaaaaaaatctactgtaatgcttacagtcaaacaaagagttctatgttgaactctatgttcaggttgctttaaaatataattattccacaaattatactgatcaattatcataatctgtagaagtccatgtattagctgttatatcattatattatggtgttcaacgatgagtagagaccatttagtaacaacaaattacatctagtctggtaaagaacatgtcactgtctaactgatctatagtaagctccatgtcaagaaatagtcgacatcggggcatcgccatcatcccggcatagctcctccaattcagtcatgaaatcacccccatcggtgccagctgaatcagccagcatcctgtcctgcatcgcctgtccaaacatcaaccagcacaaacagtgttagaatggtcactactcaagcttcctcaaaccagggtttgaaaaaagggtgactaatatgttagggaggacctgggactctcgtaggctgttaacacaggcttgcagcctgcggtactggtctcttgcttcaggatactgattcatggaacgcacacgagccagtgctctatccaacctgcctgtagcctgtttcctgccatccttcaagaagtcatattcatcctcagcctcagcctttgcaggttggatctgccatgatggaccttcaagttgtttctcaggttggaaacctcgcagaccccttccctttctcctccacctcagtatgactttctccatgatgccaacagaccagactaccttccgatagtttttccttacctgatgtccacgtacatgggcc

SEQ ID NO: 118412 - DNA, 1759 bp, Zea Mays
ccagcgtaccgaaaaaaaaaaggcaaaggggagcctgtctgaccgaggacgaaagaggcgcaggcgcacatcctccccctcccttgccgtcctccccctccccttgctggccgtcgcctgctgctgctgtcgcaggcgcgccagcgccaccgacccgccgatgagcgtctagctaggcatcatctccgcgacgagtcgacccaccacccacccacccactggcttgcctgcgaaccacccctgcgccgatccacctccgctgcctgtctgcctgcttctacatataatcgcgccggcctccgcctcgtcgcctgcgacccccaccacagaaccctccccctcacctccgctatcctcctccccggccgctccccgacagactccgatggccatcgtcgagactgccgctgccgctgcggctgccgctgccgctgccgaccacaccgcgccaccgcgcgaggaggaggcgccgggcgccgccgccgacgccggggagcgcgaaatgcgggatctggaggacctcctctccaagctcaaccccatggccgaggagttcgtccctccctccctcgcctcccccatctccggcgccggggccgggcacggggccctcacgcccgcgccgctctccccagccgcctacggcttctacccggtcaacgccggcttcgcggtcgcctcgccgggccaccgcggcgtcgtcagcttcccggcggtcgccgacgcccacgccggacgcggcatgaagaaggacggagccggagggttcggcggccacggccacggccaccccggcaggcggcggaccaacagccgcaccagcatggcgcagcgggacgaggccatccgccgcaccgtctacgtctccgacatcgatcaccaggttactgaagaaaacctcgcagcactatttataaattgcggacaggttgtggactgtcgcatgtgtggggacccaaattcagtccttaggtttgctttcatagagttcactgatgaggagggtgcaagagctgctctgaatctgtcaggaaccgtgcttggatattatcctgtcaaggttctgccgtcaaaaactgccattgcaccagtcaacgaaacattcctacccaggtctgacgatgaacgtgaaatgtgtgcaaggactatctactgcacaaacattgacaagaaggtcactcaagcagatctaaaattattctttgagtccatatgtggtgaggtctttcggctgaggttgcttggcgactaccatcattctacccgcatcgcttttgtggaattcgtgatggcagaaagtgctactgctgctctcaactgtagcggtgtggtactgggatccttgccaataagggtgagcccgtccaagacgcccgtgcgtccccgcgtccctcgccacctgatgtcgtactaggtatacatacatgaggtgctgacgatgccactgctcatatataagtaatagagatagacatgtatgaaaagggtcttttgtttttaagttgtgggctcggcctttttttctctctccttgattcaccgttggtcgaggctgttcttttttttaccttgcacatagaggagagcttcttactaagaaggaagaatgaagaaggaagcgcgtgggggtttttttttttaccttgatgcttttttaacctgtgttcagttgattggctgcgtctggttgctactcaacaaacaagaacacaagctaaaacttggtgatcggagactaccttttgcttgcttcgatgct

SEQ ID NO: 118413 - DNA, 1646 bp, Zea Mays
ccagcgtaccgaaaaaaaaaaggcaaaggggagcctgtctgaccgaggacgaaagaggcgcaggcgcacatcctccccctcccttgccgtcctccccctccccttgctggccgtcgcctgctgctgctgtcgcaggcgcgccagcgccaccgacccgccgatgagcgtctagctaggcatcatctccgcgacgagtcgacccaccacccacccacccactggcttgcctgcgaaccacccctgcgccgatccacctccgctgcctgtctgcctgcttctacatataatcgcgccggcctccgcctcgtcgcctgcgacccccaccacagaaccctccccctcacctccgctatcctcctccccggccgctccccgacagactccgatggccatcgtcgagactgccgctgccgctgcggctgccgctgccgctgccgaccacaccgcgccaccgcgcgaggaggaggcgccgggcgccgccgccgacgccggggagcgcgaaatgcgggatctggaggacctcctctccaagctcaaccccatggccgaggagttcgtccctccctccctcgcctcccccatctccggcgccggggccgggcacggggccctcacgcccgcgccgctctccccagccgcctacggcttctacccggtcaacgccggcttcgcggtcgcctcgccgggccaccgcggcgtcgtcagcttcccggcggtcgccgacgcccacgccggacgcggcatgaagaaggacggagccggagggttcggcggccacggccacggccaccccggcaggcggcggaccaacagccgcaccagcatggcgcagcgggacgaggccatccgccgcaccgtctacgtctccgacatcgatcaccaggttactgaagaaaacctcgcagcactatttataaattgcggacaggttgtggactgtcgcatgtgtggggacccaaattcagtccttaggtttgctttcatagagttcactgatgaggtctgacgatgaacgtgaaatgtgtgcaaggactatctactgcacaaacattgacaagaaggtcactcaagcagatctaaaattattctttgagtccatatgtggtgaggtctttcggctgaggttgcttggcgactaccatcattctacccgcatcgcttttgtggaattcgtgatggcagaaagtgctactgctgctctcaactgtagcggtgtggtactgggatccttgccaataagggtgagcccgtccaagacgcccgtgcgtccccgcgtccctcgccacctgatgtcgtactaggtatacatacatgaggtgctgacgatgccactgctcatatataagtaatagagatagacatgtatgaaaagggtcttttgtttttaagttgtgggctcggcctttttttctctctccttgattcaccgttggtcgaggctgttcttttttttaccttgcacatagaggagagcttcttactaagaaggaagaatgaagaaggaagcgcgtgggggtttttttttttaccttgatgcttttttaacctgtgttcagttgattggctgcgtctggttgctactcaacaaacaagaacacaagctaaaacttggtgatcggagactaccttttgcttgcttcgatgct

SEQ ID NO: 118414 - DNA, 2269 bp, Zea Mays
ccagcgtaccgaaaaaaaaaaggcaaaggggagcctgtctgaccgaggacgaaagaggcgcaggcgcacatcctccccctcccttgccgtcctccccctccccttgctggccgtcgcctgctgctgctgtcgcaggcgcgccagcgccaccgacccgccgatgagcgtctagctaggcatcatctccgcgacgagtcgacccaccacccacccacccactggcttgcctgcgaaccacccctgcgccgatccacctccgctgcctgtctgcctgcttctacatataatcgcgccggcctccgcctcgtcgcctgcgacccccaccacagaaccctccccctcacctccgctatcctcctccccggccgctccccgacagactccgatggccatcgtcgagactgccgctgccgctgcggctgccgctgccgctgccgaccacaccgcgccaccgcgcgaggaggaggcgccgggcgccgccgccgacgccggggagcgcgaaatgcgggatctggaggacctcctctccaagctcaaccccatggccgaggagttcgtccctccctccctcgcctcccccatctccggcgccggggccgggcacggggccctcacgcccgcgccgctctccccagccgcctacggcttctacccggtcaacgccggcttcgcggtcgcctcgccgggccaccgcggcgtcgtcagcttcccggcggtcgccgacgcccacgccggacgcggcatgaagaaggacggagccggagggttcggcggccacggccacggccaccccggcaggcggcggaccaacagccgcaccagcatggcgcagcgggacgaggccatccgccgcaccgtctacgtctccgacatcgatcaccaggttactgaagaaaacctcgcagcactatttataaattgcggacaggttgtggactgtcgcatgtgtggggacccaaattcagtccttaggtttgctttcatagagttcactgatgaggagggtgcaagagctgctctgaatctgtcaggaaccgtgcttggatattatcctgtcaaggttctgccgtcaaaaactgccattgcaccagtcaacgaaacattcctacccaggtctgacgatgaacgtgaaatgtgtgcaaggactatctactgcacaaacattgacaagaaggtcactcaagcagatctaaaattattctttgagtccatatgtggtgaggttggtcgttctttactccaaacacaatctcccttctgtacagctaaaggtttgcagaaatggcaattcaaccagcacaatatatcgttggctcatcgcaatggctgctaacaggtctttcggctgaggttgcttggcgactaccatcattctacccgcatcgcttttgtggaattcgtgatggtcagctaagcataccttcgccttcaaatttgcgcagcttcttttttttagggaagtattttttgcgcaaaagttgcctggcttttagcatcgtttgatgggcgaggacacacatcgcctccaaatactagaacgctagggatatttgttctctcaaataaagctttacctgtaagaagagctgttagtggctggagtgaatagaatttggttggtcggtgcctccaagttgtttggtctgccgttcaaatgcatgattattctgcgagctgttttaagactgggcctcaaatttttttttccaggcagaaagtgctactgctgctctcaactgtagcggtgtggtactgggatccttgccaataaggtaaaactctgactgatcttcttacgctttgcattgagtaaggagctcttctgggcggttggacaacagagtcgttctcgtgtgttttcagggtgagcccgtccaagacgcccgtgcgtccccgcgtccctcgccacctgatgtcgtactaggtatacatacatgaggtgctgacgatgccactgctcatatataagtaatagagatagacatgtatgaaaagggtcttttgtttttaagttgtgggctcggcctttttttctctctccttgattcaccgttggtcgaggctgttcttttttttaccttgcacatagaggagagcttcttactaagaaggaagaatgaagaaggaagcgcgtgggggtttttttttttaccttgatgcttttttaacctgtgttcagttgattggctgcgtctggttgctactcaacaaacaagaacacaagctaaaacttggtgatcggagactaccttttgcttgcttcgatgct

SEQ ID NO: 118415 - DNA, 1526 bp, Zea Mays
atggccatcgtcgagactgccgctgccgctgcggctgccgctgccgctgccgaccacaccgcgccaccgcgcgaggaggaggcgccgggcgccgccgccgacgccggggagcgcgaaatgcgggatctggaggacctcctctccaagctcaaccccatggccgaggagttcgtccctccctccctcgcctcccccatctccggcgccggggccgggcacggggccctcacgcccgcgccgctctccccagccgcctacggcttctacccggtcaacgccggcttcgcggtcgcctcgccgggccaccgcggcgtcgtcagcttcccggcggtcgccgacgcccacgccggacgcggcatgaagaaggacggagccggagggttcggcggccacggccacggccaccccggcaggcggcggaccaacagccgcaccagcatggcgcagcgggacgaggccatccgccgcaccgtctacgtctccgacatcgatcaccaggttactgaagaaaacctcgcagcactatttataaattgcggacaggttgtggactgtcgcatgtgtggggacccaaattcagtccttaggtttgctttcatagagttcactgatgaggagggtgcaagagctgctctgaatctgtcaggaaccgtgcttggatattatcctgtcaaggttctgccgtcaaaaactgccattgcaccagtcaacgaaacattcctacccaggtctgacgatgaacgtgaaatgtgtgcaaggactatctactgcacaaacattgacaagaaggtcactcaagcagatctaaaattattctttgagtccatatgtggtgaggtctttcggctgaggttgcttggcgactaccatcattctacccgcatcgcttttgtggaattcgtgatggcagaaagtgctactgctgctctcaactgtagcggtgtggtactgggatccttgccaataagcctcatgcacgcttctgcttgctgcttccgtgactggcggtgccgatcaacgatttccgaccagcaacaacgcacaaatcttcatccacatgcggacatgcgacgctatgtatatatatatatatacacaaacacagatccatgtcacgtacaagaccgatcaccaccaccagcagctgctacgttaattgtgtccatggggagctgcgcatccaagtcctgcgactggtgccgctggatgacgaggaaggcgcaggcgaccttgacgaggcgggggcagcgcacggcggcggtgcacccctggacgccgcccgaggtgccgccggccggtcagcgggtcaccgtgcgcatgcgggccagcgagttccgcgcgctgaccgccgccgccgtccgcagggacgcagcaggcgacgtcgccgcccgcctcatcctcgacgggtgcgccgccggccgctgggcgtggtcgccggcgccggagtagttcgtgagaacctacctgctgtgcgtgcgcgcgcgagtgcagagctgctgtctgtaattcgtgatggaaatcaaatg

SEQ ID NO: 118416 - DNA, 433 bp, Zea Mays
accaagtgcaattgttttttttggaggagatgcattacatcaagaaaaagatttattgaaactgtttagaaagctattgatgatattgatgctaggatgatatggaagcaacgatagcagtaccagttgaagatggacagtttgcgaagtcttctacataaatttcacatgtcttgcttttgtgactgatcagctctggagcagctagagtgatgtagttgtgggcttttgaacaatagctggagtgatatgaaacattagtgatgcagttgtgggcttttgaactgcttcaagctggagtgatgtcgttgtggtgtttttgtgactgatcatctctggagcttttgtgaatgatctagttagctatctgtaaatgatctagctgtgaatgatattataattgtgatgcttttgtgaatatataattgtggtg

SEQ ID NO: 118417 - DNA, 216 bp, Zea Mays
atgacgccgaggacgccgagcgagaccttggcggcgtccaggtcggggtcgccggccacgagctccctgacgacggcgaagccctgggaggccggcgcgggcgtgacgatcctgagcgcgaccacgtactcgtgcacggcgctgcccttgccccacagcgagctcccgtgggcgcccgtggccagcaagccgccgacggtgagaccgtaccagtag

SEQ ID NO: 118418 - DNA, 686 bp, Zea Mays
atgtcgtggcccgttgccatgctcgcatccatggccatgccaaggcagacatctcctcgtgacgtggctctgaaatggaaggagatactgttagttttacccaattgtcgagtgaaggagtatatgaagaaactttacaagacatctgtaccaccctagatgagttgcagtagattccacccattaaggacaaatggacaataatccattatcaaagccaaatcataagctaaaaggttgagaagatggtgcttctggtatgtggatggcgccatacgattactgtttgtgactcaagtaatctatacacttatggttggtgcaaatacgttcaactaggacatagtgattttgaagatgatttagttccacataaactagaagcattgaaagatagcactatatcctaggtaataccttctacaaacattccatgacatggtttcaaaacttcaatttcgcttttctaggatatttacaaagactggttccatacttctatgcacatgttgacatcgacataccttatactgatggctataatctactttttacatattggtatatgtagtcaggtttacattaaaagtttaggaaactcacaaaaataggaatatatctaatgctacttagcctaaagccccatacaaaatatccctgccagaattaattagcatgtcctcaga

SEQ ID NO: 118419 - DNA, 635 bp, Zea Mays
atgtcgtggcccgttgccatgctcgcatccatggccatgccaaggcagacatctcctcgtgacgtggctctgaaatggaaggagatactgttagttttacccaattgtcgagtgaaggagtatatgaagaaactttacaagacatctgtaccaccctagatgagttgcagtagattccacccattaaggacaaatggacaataatccattatcaaagccaaatcataagctaaaaggttgagaagatggtgcttctggtatgtggatggcgccatacgattactgtttgtgactcaagtaatctatacacttatggttggtgcaaatacgttcaactaggacatagtgattttgaagatgatttagttccacataaactagaagcattgaaagatagcactatatcctagaaaaagatataatggaactcaaattttggtggttgcactactgtggagacttgaattcatgtatacacttagttagactcaacgttagcgcaaacagttgatgaccaagttttttaattagtattttagtttggatgtatagtacacttatgtatgagttatttgacaatgcttatttatgagatattgaatggcacttgtctatgttatattaattataatttt

SEQ ID NO: 118420 - DNA, 294 bp, Zea Mays
atgatgctggttctgctgcgcgcggtgcatcggcgacgacgcccccgcgtgacgccgcggcgtcgagtacgagaagggcctcgccgtgtccatctccagcgtcttcaccggctcgcggtgctgctccatggacgcgcgcccgggcgccgccgccgcggccccgcgtacgctgctgcggctggtgtcgaacgacgcgcgcgacgccatccaccgctccgcccaccgcggctgcccgtccacgtccacgtccacgtccatgtccgccgacggcgccgctgggttcctccgaatctt

SEQ ID NO: 118421 - DNA, 1875 bp, Zea Mays
caacagcccaacttctcgtcgtgctgttcccatctttcctttcctcttcccttccccgtcgatctcgtcggcgacgccactacctcgccgtccggtcccaccacccgcctccgactcctgcgacccagccacggatcccgaggatacgggccgagtccggcgatgggggtggtggtagagcgggaggagtgggcactcagccccttcgcctacccgctcctctccgccgccgccctcgccgcggtgctcctcctcccttacctttccccgaggactgcggcgcacgccaccggaccctcgtcccccttcgacgtgggagccgcacccttcctccggttccgccgcgccttcctcgtcctcttctccctcgcgtccgtggttgaaggtatccattccgtgtttggggaggatgagttcgtgcggtgtgggcttggcagagagcagacgaccgcgcgccttgcctctaccactgcagctgcgctgttccccggtgccatttctggcgtcatctccgacaaaataggaccacgaagggcttgcatattgtattgggtacttcagcttgcagtaggtgttgtgaagagtttcagtgcgcttcgctgttcatggatcaacaatttcattctggcttttgcctcttcagtgttctctttctgttttgagacgtggcttgtgctggagcatgagaagcaagaccagaagcaagatctgctgtttgataccttctggctgatgacattctttgaatcggtgtcccttgtcggaagtcaagaaatcacaaatgtattggttagtgatgatgacagtagattcttgcttccctatgcatttgcagccacactatcggtagtgggcattctgtatatcagaaatgcatcaagtacatgtcagcatgcatctgccattgggagctaccaaaaatcatttcttgctcatgtcctcagagacaaaagagtactgatcctggtcttagctcaagcaagcatccattttgctgtctcagccttttggtttctctgggcaccaaccatagtggctgacggaaggtatgctcaactgtcagtaatctacccctgtttcttggcatcaaggatgcttggaagtgctggttttccatggttttacggagccatagcccccttccggaacgaggacagcttgacaatagcttacgttggtgctggactcgctttgtcgattgtggcttatgattaccaggagattgcaccactggtgatagtgttctgcatcttccatgcctgtgtgggcttcattttgccgtcactggccagattgcgaacaatgtacctgccaaatgagctgcgagggggcatgatgagcttttcaatgtcactggcaaatgccgccaccttcgttttcttgatacagggcagcgcccaccatcgacacgttgcaaactcaaccatcctgagccttgcgtcctatggcctgttaggagctgggggctgcgtccatatgttgaggaggtggaggaagcacactcggctgaatgcccgtagtctgtaggagctggaggcacccaatgaatgctatacacactgcagggtgagcttgagagcggtttctgtagcatgctagtatctcacgttttgtttatctgactttttctggaaatatcaggaggtaggtgtaggatactacttttgttgttgttcaaagaaattgttgaaattgaaggttgacaaaaaatctgtgtacatgcgtcggggccatcaaactaacgtctgactttgatttttagcaattaaactcgaaagccaggaatctgtgtatgtatgtttggtttgtagtttttttttcaagtgttcgtttcatacattgtcttgatagtataaaaatcgctcgtaccataca

SEQ ID NO: 118422 - DNA, 1561 bp, Zea Mays
caacagcccaacttctcgtcgtgctgttcccatctttcctttcctcttcccttccccgtcgatctcgtcggcgacgccactacctcgccgtccggtcccaccacccgcctccgactcctgcgacccagccacggatcccgaggatacgggccgagtccggcgatgggggtggtggtagagcgggaggagtgggcactcagccccttcgcctacccgctcctctccgccgccgccctcgccgcggtgctcctcctcccttacctttccccgaggactgcggcgcacgccaccggaccctcgtcccccttcgacgtgggagccgcacccttcctccggttccgccgcgccttcctcgtcctcttctccctcgcgtccgtggttgaaggtatccattccgtgtttggggaggatgagttcgtgcggtgtgggcttggcagagagcagacgaccgcgcgccttgcctctaccactgcagctgcgctgttccccggtgccatttctggcgtcatctccgacaaaatccacactatcggtagtgggcattctgtatatcagaaatgcatcaagtacatgtcagcatgcatctgccattgggagctaccaaaaatcatttcttgctcatgtcctcagagacaaaagagtactgatcctggtcttagctcaagcaagcatccattttgctgtctcagccttttggtttctctgggcaccaaccatagtggctgacggaaggtatgctcaactgtcagtaatctacccctgtttcttggcatcaaggatgcttggaagtgctggttttccatggttttacggagccatagcccccttccggaacgaggacagcttgacaatagcttacgttggtgctggactcgctttgtcgattgtggcttatgattaccaggagattgcaccactggtgatagtgttctgcatcttccatgcctgtgtgggcttcattttgccgtcactggccagattgcgaacaatgtacctgccaaatgagctgcgagggggcatgatgagcttttcaatgtcactggcaaatgccgccaccttcgttttcttgatacagggcagcgcccaccatcgacacgttgcaaactcaaccatcctgagccttgcgtcctatggcctgttaggagctgggggctgcgtccatatgttgaggaggtggaggaagcacactcggctgaatgcccgtagtctgtaggagctggaggcacccaatgaatgctatacacactgcagggtgagcttgagagcggtttctgtagcatgctagtatctcacgttttgtttatctgactttttctggaaatatcaggaggtaggtgtaggatactacttttgttgttgttcaaagaaattgttgaaattgaaggttgacaaaaaatctgtgtacatgcgtcggggccatcaaactaacgtctgactttgatttttagcaattaaactcgaaagccaggaatctgtgtatgtatgtttggtttgtagtttttttttcaagtgttcgtttcatacattgtcttgatagtataaaaatcgctcgtaccataca

SEQ ID NO: 118423 - DNA, 2082 bp, Zea Mays
caacagcccaacttctcgtcgtgctgttcccatctttcctttcctcttcccttccccgtcgatctcgtcggcgacgccactacctcgccgtccggtcccaccacccgcctccgactcctgcgacccagccacggatcccgaggatacgggccgagtccggcgatgggggtggtggtagagcgggaggagtgggcactcagccccttcgcctacccgctcctctccgccgccgccctcgccgcggtgctcctcctcccttacctttccccgaggactgcggcgcacgccaccggaccctcgtcccccttcgacgtgggagccgcacccttcctccggttccgccgcgccttcctcgtcctcttctccctcgcgtccgtggttgaaggtatccattccgtgtttggggaggatgagttcgtgcggtgtgggcttggcagagagcagacgaccgcgcgccttgcctctaccactgcagctgcgctgttccccggtgccatttctggcgtcatctccgacaaaataggaccacgaagggcttgcatattgtattgggtacttcagcttgcagtaggtgttgtgaagagtttcagtgcgcttcgctgttcatggatcaacaatttcattctggcttttgcctcttcagtgttctctttctgttttgagacgtggcttgtgctggagcatgagaagcaagaccagaagcaagatctgctgtttgataccttctggctgatgacattctttgaatcggtgtcccttgtcggaagtcaagaaatcacaaatgtattggttagtgatgatgacagtagattcttgcttccctatgcatttgcagccacactatcggtagtgggcattctgtatatcagaaatgcatcaagtacatgtcagcatgcatctgccattgggagctaccaaaaatcatttcttgctcatgtcctcagagacaaaagagtactgatcctggtcttagctcaagcaagcatccattttgctgtctcagccttttggtttctctgggcaccaaccatagtggctgacggaaggtatgctcaactgtcagtaatctacccctgtttcttggcatcaaggatgcttggaagtgctggttttccatggttttacggagccatagcccccttccggaacgaggacagcttgacaatagcttacgttggtgctggactcgctttgtcgattgtggcttatgattaccaggagattgcaccactggtgatagtgttctgcatcttccatgcctgtgtgggcttcattttgccgtcactggccagattgcgaacaatgtacctgccaaatgagctgcgagggggcatgatgagcttttcaatgtcactggcaaatgccgccaccttcgttttcttgatacagggcagcgcccaccatcgacacgttgcaaactcaaccatcctgagccttgcgtcctatggcctgttaggagctgggggctgcgtccatatgttgaggaggtggaggaagcacactcggctgaatgcccgtagtctgtaggagctggaggcacccaatgaatgctatacacactgcaggtggcaagcgatgacgagaccgatagtggtgataaaagtccacaataccaagagtttgccgatagcttcttctgctgatgccggtggtggtgttgacggtagcggtgttggtcacccctacttccctatgtgaattatctggttgatgaggtgatagtgtgatacaataccaatgaggtgggtgtaccaatgggaggggcctaagtactaccaaatgttggtggagtcgtggagtataacttctacgtggaccgatcagacttgggcatagtacaagaaacagttgatgcgtgaccaaggtattatgttcctctcatcgaaggagtacaatatgacacattatcagtggaatgcacacccgtgggaatgatcttcgacgggggtgtatttgtatcttcgatgttgtttgtgaactatgaaacaatgtcatgtaatgtatttgaactgctaaatgttgttattggacttgtgataatatttggagtcatcttttattcaaattatgggacctcaatgt

SEQ ID NO: 118424 - DNA, 1670 bp, Zea Mays
ggataaatcgcttgtgtcaactcgcacaccatctagattctgggtacgcagcatcattttactagttggttaggaccgttagtccgaacaccgacaaattgattgaccatagcctacaaatccattcacgggcttgtagccttgtactggagtaggattaccattttcattttgtgacggggaatgattaataagcaacatctgcacctgtgtttctgaaaccaccaggggtgtaaatttctggttcttataccacataccacctggtttactagctattaacttttcatgtaatatggcctttgtgcctccaagacaagtagacaactatgggcaccaaaaactgtgtctgcttacaacataaagatgctgaatattagtttagctaatgcgttgatactttgtagttctatgcattacttgttagttgctaaccttgacttgtgcatcttgatgaagtttggatgatatatttggctggtaggaatttcagagtataatctgaaccttggtatgatttgtctttcttctctttcgtgtagttttttgttccataatctactcgtatccttggcagcagttactgttatgtgatgcagtctatgttttcttttatccttccagtagtagctataacttacaaattttccactgatgattatagaggaccacgaagggcttgcatattgtattgggtacttcagcttgcagtaggtgttgtgaagagtttcagtgcgcttcgctgttcatggatcaacaatttcattctggcttttgcctcttcagtgttctctttctgttttgagacgtggcttgtgctggagcatgagaagcaagaccagaagcaagatctgctgtttgataccttctggctgatgacattctttgaatcggtgtcccttgtcggaagtcaagaaatcacaaatgtattggttagtgatgatgacagtagattcttgcttccctatgcatttgcagccacactatcggtagtgggcattctgtatatcagaaatgcatcaagtacatgtcagcatgcatctgccattgggagctaccaaaaatcatttcttgctcatgtcctcagagacaaaagagtactgatcctggtcttagctcaagcaagcatccattttgctgtctcagccttttggtttctctgggcaccaaccatagtggctgacggaaggtatgctcaactgtcagtaatctacccctgtttcttggcatcaaggatgcttggaagtgctggttttccatggttttacggagccatagcccccttccggaacgaggacagcttgacaatagcttacgttggtgctggactcgctttgtcgattgtggcttatgattaccaggagattgcaccactggtgatagtgttctgcatcttccatgcctgtgtgggcttcattttgccgtcactggccagattgcgaacaatgtacctgccaaatgagctgcgagggggcatgatgagcttttcaatgtcactggcaaatgccgccaccttcgttttcttgatacagggcagcgcccaccatcgacacgttgcaaactcaaccatcctgagccttgcgtcctatggcctgttaggagctgggggctgcgtccatatgttgaggaggtggaggaagcacactcggctgaatgcccgtagtctgtag

SEQ ID NO: 118425 - DNA, 2403 bp, Zea Mays
ggataaatcgcttgtgtcaactcgcacaccatctagattctgggtacgcagcatcattttactagttggttaggaccgttagtccgaacaccgacaaattgattgaccatagcctacaaatccattcacgggcttgtagccttgtactggagtaggattaccattttcattttgtgacggggaatgattaataagcaacatctgcacctgtgtttctgaaaccaccaggggtgtaaatttctggttcttataccacataccacctggtttactagctattaacttttcatgtaatatggcctttgtgcctccaagacaagtagacaactatgggcaccaaaaactgtgtctgcttacaacataaagatgctgaatattagtttagctaatgcgttgatactttgtagttctatgcattacttgttagttgctaaccttgacttgtgcatcttgatgaagtttggatgatatatttggctggtaggaatttcagagtataatctgaaccttggtatgatttgtctttcttctctttcgtgtagttttttgttccataatctactcgtatccttggcagcagttactgttatgtgatgcagtctatgttttcttttatccttccagtagtagctataacttacaaattttccactgatgattatagaggaccacgaagggcttgcatattgtattgggtacttcagcttgcagtaggtgttgtgaagagtttcagtgcgcttcgctgttcatggatcaacaatttcattctggcttttgcctcttcagtgttctctttctgttttgagacgtggcttgtgctggagcatgagaaggtttctgtatttcttgaaacacatatgtgctattactgtgttgtctatgttgtatgaatcatttagcgcttgatcctgaattttcagcaagaccagaagcaagatctgctgtttgataccttctggctgatgacattctttgaatcggtgtcccttgtcggaagtcaagaaatcacaaatgtattggttagtgatgatgacagtagattcttgcttccctatgcatttgcagccacactatcggtagtgggcattctgtatatcagaaatgcatcaagtacatgtcagcatgcatctgccattgggagctaccaaaaatcatttcttgctcatgtcctcagaggtgagtgttgagtcatcttgcttgctccagagctttctttctcatttctgttgataaaactccatctatattcaattttaccatatctagatacaactgagaaagaaatttagcacatgtagaattgctctagtcaaattttagagatgtttctaaattctaatttgaaaaatgcataaaaggaaacaacatttctatctctctcatcatgaactcgtgagtcgtggttgttgcaggctaaacttttcagtgcttgcatgttccagttccatttgtgactgcaattaatgtgtttcagacaaaagagtactgatcctggtcttagctcaagcaagcatccattttgctgtctcagccttttggtttctctgggcaccaaccatagtggctgacggaaggtatgctcaactgtcagtaatctacccctgtttcttggcatcaaggatgcttggaagtgctggttttccatggttttacggagccatagcccccttccggaacgaggacagcttgacaatagcttacgttggtgctggactcgctttgtcgattgtggcttatgattaccaggagattgcaccactggtgatagtgttctgcatcttccatgcctgtgtgggcttcattttgccgtcactggccagattgcgaacaatgtacctgccaaatgagctgcgagggggcatgatgagcttttcaatgtcactggcaaatgccgccaccttcgttttcttgatacagggcagcgcccaccatcgacacgttgcaaactcaaccatcctgagccttgcgtcctatggcctgttaggagctgggggctgcgtccatatgttgaggaggtggaggaagcacactcggctgaatgcccgtagtctgtaggagctggaggcacccaatgaatgctatacacactgcagggtgagcttgagagcggtttctgtagcatgctagtatctcacgttttgtttatctgactttttctggaaatatcaggaggtaggtgtaggatactacttttgttgttgttcaaagaaattgttgaaattgaaggttgacaaaaaatctgtgtacatgcgtcggggccatcaaactaacgtctgactttgatttttagcaattaaactcgaaagccaggaatctgtgtatgtatgtttggtttgtagtttttttttcaagtgttcgtttcatacattgtcttgatagtataaaaatcgctcgtaccataca

SEQ ID NO: 118426 - DNA, 104 bp, Zea Mays
cggctgtcgagaaatttggaattatggcattatgaaaaacgggattcactactttgccatcaatcggacgggcttcacctaaataccattatccaacttgacac

SEQ ID NO: 118427 - DNA, 1556 bp, Zea Mays
actcgcaagcaaccgccaattagtccgccatgcccacgtactatgcaaatcaaactgtaggcgtacgtacatacgaatacgatcggcagcaagcggtcgcgagcttttcgatgtgtgatctactcttggactactgctatctctgcattgtgcccctcgtctcacttcgatcctgcctgcttgctaagtgagatcgatcgagcccatcggtgatggacgacgacgacctccacggcaacggcaagaacaagccgctgccgccgacgcggcgccgctgctactgttgcagctgcaccacggcggccacgctgctcatgttcctgctcaccaacgccgtctccgtcgccgtcgtctcttccggcgccgggtcctccctgctccgccgctacggcggcggctacaggcccgccgccaccatcgtccgcctctgggacggctccgcggcgctccacgcggacctcaacgccacgcaggccgcgctcgccgccggccgcgccgacctcgcggacctccacgcccgcgtccgcaccgccaacgagctcctccgcacgctcctgcacgccatgcgggaggagctctccgccactggcggcggcgaatggaagcgcgagcccgcgggcgagctcaggctcgctgtcggtgtcggcccgcgccaccacgatgtgaccgaggctgcggtcccggtcctgggccacgcgtgcgtccgcgttcaggacgatctcgagcgctacatggactacgcacccggcggggagtgcccgtcagacgagcaactcgcgcacaggctcatgctcagcggctgcgagccgctgccgcgccgccgctgccgcccgcgctcgcccaaggggtacccgcagccggcgccgctgccccggagcctgtggaccacgccaccggacaccaccgtcgtctgggacgcgtacgcgtgcaagagctactcgtgcctcgcggccgcccgcggtaacatcactggctgcggcggcgacggcgacggcggatcatgtttcgacctgcggcgcgggcggggtagatgggcgcgcgacgacggcgcgctgtcctactccatcgacgccgtgctccgggcgcgtcccaacggcacggtgcgcatcggcctggacctcggcggcggctccccctccggcacgttcgccgcgcggatgctggagcgcgcgggggccaccgtgctcaccgcggccgtcgactccggcgcgccgttcggcagcttcgtcgcgtcgcgcggcctcgtggcgcttcacgttacccccgcgcaccggctgcccctgttcgacggcgccatggatatcgtgcacgcggggcatggcctcggcgccggcgacatgctggagttcgcgctgtacgacgtgtacagggtgctcaggcccgggggcttgttctggctggaccacttcgtctgcgccgccatgcagctgaacgccacgctcgcgccgatgctggatcgcgtcgggttcaggaagctgcggtggaacaccggccaccggggaaaggagaaggaccagtggtacgtctcggcgctgttggagaagcccatgacatga

SEQ ID NO: 118428 - DNA, 280 bp, Zea Mays
gcgagcggcgtcacggaaggcgcgagatgcgcgcagcgatgatcgcgcgtgacatcctccgatccggcgcagtttcggcggcccgagtgacaacctacatttgtgcttgtgttattgacgacgtcctccggccactacctccttcgattcgtgttttcttttcgattattgtgtttcatgcctaccacatgtattatttacgctaaaaactgtacgattttatgcttgaacatggagttcgtatatcagtttactgcatgcacattggaaaggcaattcc

SEQ ID NO: 118429 - DNA, 990 bp, Zea Mays
tccatccgggcccacttgtcatctgactcagtgtgtgtgagtgggctactaggcgtcttccactcttcctctcctttccagaccccagagccagagatcaaccacctgcggcggcgatggggatcggtgagcacttcgagggcgtgaagcagcactgggcgagcaacttcgccttcctcgactactacaagaaggtctacggccgcgccgagcccctccccaagtggtccgacgccgacgtcgacgagttcatcgcctccgacccggtctacgggccccagctcaaggccctgcgggagtcgaggaagtttgcgctcgccggggccttcgccggcgccgcccacctcggcggcgtcgcgctcaagtactccaaggcgccgcacggcgtcgtgctggcgaccgggttcggggcgatcacgggcgccgtgctggggtccgaggtggcggagcactggtaccagctctacaagatggacaagcagggggccaaccttaggttcatctactggtgggaggacaaggtctcaggacagaagagctgaaccatgttgaattgaatgatgcctatttgagcattccagtttgacaaaaacattgatgtctattatctgtaatccttattgttttgttttgtttcctagtttttctctaataaggtgcgtatcggttgtggaaaccaactggacgatgtatttttcatctctgtcagtagtgacatttatccttagtacttacaatgtttatggtcaatctggtgcaaacagcaaatcctctccgttttcaaggtatggtttctcaaactactattttcctgtcagtagttataacctcagaaataagaataccatgatcatgttgcaattattgttgtatctgtttcttatataaggctatgtatgtactgtcattgccccttgggtagacgtgtactcaactgcacggatgttgcaattatataaggctatgtatgattttttatttaaatgtatc

SEQ ID NO: 118430 - DNA, 652 bp, Zea Mays
acttactttgatacggcccttcgttcttatccacatccccttttgccagccactgctcccgtcccacccgccacaccgtccaccggcacgtccaccggctcccatggcgctccacgccgtctcctccgcggcggtctcctccccgttgcgcgccctctcacgcagcctcccccagcgcccaggctgtggttgtttaccaaagcagtccgtcatgatttactccacaaaatttgcaagacctcaggctggaccggtggacttcgctggcaggcctctggttcttggacgctcggacaagaggcgagtggttacagatagagacattttccccatgttatgggttatcagattagtcttcattagcttttgattctcatgatatcagagcagttttgatgcatgccactattgaagaaatcgaagcggagaaatccctcatcgaagaccaagctaaagaaaagatggagaaggcaatcgaaacagtccaagctaacttcaacactgtgaggacaggacgtgcaaacccggccatgcttgaccggattgaggtttcatggctcgtccttgttcttttttcttatatatgatgaagtgctaagtgttgcatgatcaaatatattcccctgtgttgggaacatcttccattttgcat

SEQ ID NO: 118431 - DNA, 1289 bp, Zea Mays
acttactttgatacggcccttcgttcttatccacatccccttttgccagccactgctcccgtcccacccgccacaccgtccaccggcacgtccaccggctcccatggcgctccacgccgtctcctccgcggcggtctcctccccgttgcgcgccctctcacgcagcctcccccagcgcccaggctgtggttgtttaccaaagcagtccgtcatgatttactccacaaaatttgcaagacctcaggctggaccggtggacttcgctggcaggcctctggttcttggacgctcggacaagagagcagttttgatgcatgccactattgaagaaatcgaagcggagaaatccctcatcgaagaccaagctaaagaaaagatggagaaggcaatcgaaacagtccaagctaacttcaacactgtgaggacaggacgtgcaaacccggccatgcttgaccggattgaggttgagtactacggaactccagtaaacttgaagagcattgcacagataagcactccagatgcaacttctcttcttattcaaccatatgataagtcaagcctcaagcttattgagaaaactatagttgctgcaaatcttggtgtgacaccaagcaatgatggagaagtaatacgagtgactgtcccaccattgacatctgatcgcagaaaggaattatcaaagacagtagctaaattagctgaagatggcaaggttgctataaggaacataagaagagatgcaatcaaagcttatgataaactagagaaggaaaagaagctttctgaggacaatgtgaaagatttatcagctgatctacaaaaagtcacagatgagtacatgaaaaagatcgaatccatccagaagcagaaggaacaggaactgatgaaaatttagacctcaagctgactgtatggctggtgaggagtaaccgcctccgtgaagcatggacccctgcatatgttggtgtttctgaagcaatttgtttggttcatggctttggcgtctcggcgctgcgccagggatgcacgttttgaatcaggcgctttgctggaacttttgggtgcacacaagttgagactgctgctgctgctgtgtgtgtgttttgagattaagacaatgctgctgtgttttttctttgagattaagacaatgctgttgcgtgtgttcttctcgttttctgtaatgttcgtaaatagtctcttcgtcgccgtgttgtctgactgctacattgtcaatatttcaaaacatacgtctctgaatcaaatgtctggattggttctgccta

SEQ ID NO: 118432 - DNA, 1263 bp, Zea Mays
cgttcttatccacatccccttttgccagccactgctcccgtcccacccgccacaccgtccaccggcacgtccaccggctcccatggcgctccacgccgtctcctccgcggcggtctcctccccgttgcgcgccctctcacgcagcctcccccagcgcccaggctgtggttgtttaccaaagcagtccgtcatgatttactccacaaaatttgcaagacctcaggctggaccggtggacttcgctggcaggcctctggttcttggacgctcggacaagagttttgatgcatgccactattgaagaaatcgaagcggagaaatccctcatcgaagaccaagctaaagaaaagatggagaaggcaatcgaaacagtccaagctaacttcaacactgtgaggacaggacgtgcaaacccggccatgcttgaccggattgaggttgagtactacggaactccagtaaacttgaagagcattgcacagataagcactccagatgcaacttctcttcttattcaaccatatgataagtcaagcctcaagcttattgagaaaactatagttgctgcaaatcttggtgtgacaccaagcaatgatggagaagtaatacgagtgactgtcccaccattgacatctgatcgcagaaaggaattatcaaagacagtagctaaattagctgaagatggcaaggttgctataaggaacataagaagagatgcaatcaaagcttatgataaactagagaaggaaaagaagctttctgaggacaatgtgaaagatttatcagctgatctacaaaaagtcacagatgagtacatgaaaaagatcgaatccatccagaagcagaaggaacaggaactgatgaaaatttagacctcaagctgactgtatggctggtgaggagtaaccgcctccgtgaagcatggacccctgcatatgttggtgtttctgaagcaatttgtttggttcatggctttggcgtctcggcgctgcgccagggatgcacgttttgaatcaggcgctttgctggaacttttgggtgcacacaagttgagactgctgctgctgctgtgtgtgtgttttgagattaagacaatgctgctgtgttttttctttgagattaagacaatgctgttgcgtgtgttcttctcgttttctgtaatgttcgtaaatagtctcttcgtcgccgtgttgtctgactgctacattgtcaatatttcaaaacatacgtctctgaatcaaatgtctggattggttctgccta

SEQ ID NO: 118433 - DNA, 333 bp, Zea Mays
atggttgctagatcaggatacaaaaccttgctcatctatgttaaggttcccctctcaccaagtctaggactaggaaaaagagggatgaaactgattcttggtgtttcgtataatgccttgaacaagtatcttcctccagaatgctttgacctcagcaaaacaccatttatttcatctaaggtggatgtttggtcagctggtgtaattttttaccaaatgctttatggaaggcgtccttttggtcatgatcagactcaggagagaatacttcgggaagatacaattattttggtcacgatcagactcaggagagaatacttcgggaagatataa

SEQ ID NO: 118434 - DNA, 1334 bp, Zea Mays
cgcttgtcaaaaaccaaacagaacaaggacccaggcaaaatccactgacggcaagagataggagggagatctcgtgatttccggtggcaagtttcggttttgatcccaaccccaggttcctcaccccgaggagaaaaggatccagattttcttcctctctagtaagttgcagttcgcggtggcgccgccccccgccgctgcctccgtgttgcgcggttccgatttggagtgagggggagcgcgtgccgtgggattcccgttcggatctacggagtgggcagctttcctgctccaattcggtcggccagcaacgaaggcccttgaatcttgttgatgcgcggccagatgcgggaagcgtactgggagaaggtttcttggaatcttcgtccgggctccgtggagtgaggtccctcgcccgccgggatcgccccgtcgtcctatgggctgcgtcagttccaagcaattccacggcggggacgaccatggggacggcaagccgcgccggcggccctcgagcaactcgctgaagcgcctggttagttacagttccagcaagaggcatgaggagttggaggaggaggatgaggtgggggcggctgtggcggccacgtcctcgagcggcggacgccgcgctgggaatgacgccagcacggcgaggctgatccggaagccgccagcactggtggtcgaggctgtgccggcattgtcggaggaggctgccactttggcggttggtgtagttgatgcagaaagggcggttgctgcagcgactgggaatcggaagcggcctcctgcagatgtacatatcaatggcgcggcagagcaaggactgagtagcgttggtgttagaacggagggggaggccaaaccaaggatcagggacgtgcccaatggcgtccagggggagcatgtggtggcagggtggccgagatggctcacagaggtggcggcagaggcggttcgtgggtggcaacctcggagggctgagtctttcgagaagctggacaagataggacaaggtacatatagcagcgtttataaagcacgtgatcttgagaatggaaaaattgtcgctctgaagaaagttcggtttgccaatatggaccctgagagtgtccgatttatggcaagggaaatccacatcttaagaaggcttgatcatccaaatgttatcaaacttgaaggtttggtgacgtcacgcatgtcaagcagcttgtatcttgtatttgaatacatggagcacgaccttgcaggacttgcagctacacctggcttaaaattctcagaacctcaggtcaagtgttacatgcaacagctactttctggacttgatc

SEQ ID NO: 118435 - DNA, 699 bp, Zea Mays
ttttggaccatctacttgccgtagaacctgggaataggggtaccgctgcatctgcccttgacagtgaattttttacaacaaagccatatgcctgcgatccatcaagtctacccaagtatcccccaagcaaggaatatgatgctaagcttcgagatgaagaagctaggaggcaaagagcagctgctaaaggacaggaagctgaagctggacggaggaagcaacctcctgcacctgatggtaatagtggattgcagcaccgccgagttcagatgaatcctaaaagcagcagttacaagttcactccaaaggaggatgctgtttctggatttccaattgatccgccagcaagagctgctgcagacaatggttaccctcagcgcgttcctctgatgcaagctggccgttcttcctccactctgggtagatcaagtgggatggatccaaaggcccaaagattccacacctcccaaattgtcactactgagatgtccggccaatctactgcatctgggcagcgaggcaatgctcctaagatgtctaacctcggggaaagtgccaggagacaatatcttcgagagcatcggtccagttcaagatacagtcaactcactgctgcggacccttctgacaggcctgaatggaaccatcaattccaagagcggccatcgtcttcccatcggaaggatgatgctgtggcaa

SEQ ID NO: 118436 - DNA, 1734 bp, Zea Mays
cgcccaacaaccctgaactgggccggccgtcgctgcattcccccttccgctgcccaacgacccttcccgtccgctggcaaccctcgcctccgcgtggcactccagggctccagaccccgccgccgccctaagccagacgctgaggcttgtggtctcttcgccggagacgagcaccaaccaggatgcaatgtttggtccggaatgtctgccgagccggaagccgtggagcggcggcgaggctcctggagcttgccgcggctggtccgggtgcgacgcagccatccgtggccgtcaaactcctcaggccgccttacgagttcacacgtccgatcggggtagttcaacccgtacgtgtgcagagccgggccgtttcgcgtgatggcctcgttcctgccgcggccacctccggttttggtctctgcgcacaagttatcgtcgcgatgaggggtctgtcgacggtggggagtgcggccgaggtcgcttctgattcggacgattccacctcccctgcggttgagcaccccccgcgcatcaagttcaagaggcccgacaagaccgccaggcacattatgaatatcctaaacaaagaggcggtcgaaaaggtccgctcggaaagggagattcctgatgtgcagcctggatgcatcattcagatgagattgcaagttcctgagaacaaacggcgtgagtcgacgctgaaggggattgtgataggaaggcgcaacgccgggatcaatacaaccttcagattgcgtagattagtggctggtgtcggagtcgagtctgtctttccactttactcgccaaacatcaaagaaatcaaggtattggacaggaagaaagtcaggagagctaagctgtattacctgagggacaggatgaacgcacttagaaaatgagtctttcagcttgtttcaaggaatttcgccgtgcggatcagcacggtttctgaagcgcaacggttgcagccctgagaattgcattgtctggttccacatcgttgcaaagccatagcctgtagttgtcgattgccatgcttggttttgagctgcaagtgctagcagatatatgttttccgacacaatcaaaaaaaattgcggttattcccttttcgatttacgacactgtagcttcatagcacaaaataacgtgctcagatctattacttccctccgcacctttactatctaggatgtatgtgttttttgacataagcaagctggaaagtgaaaactcttatgtgatgcttcctgatatcgagatcatgggcctcttctttcctgtccagctcgacctgctgtgtgagaagtggtataagctctaaggacacccattgaactgaactttgttggagtctttatggcttagtatgtgtggtgcggagtgattgtgagtaagtggtgtcgtaactaattctgagttttagaaacttacagctgataattggtagcccttgttgatttggggctatggagttgagacttgagagagagtggcatctatatcactcaagctcagctctttgtgatgaagtggtataaccgtataaaccagtctcacgccacaaacgtaatcatagactagccggttgtcctgctttgatatggttgttttatgtcatgtaaatatatattgagatatttattaaatataattattgtttatttttaaacactaaagtgtgtatggttgttttatatcatgtaaatagatattgagatatttattaaatat

SEQ ID NO: 118437 - DNA, 1340 bp, Zea Mays
cgcccaacaaccctgaactgggccggccgtcgctgcattcccccttccgctgcccaacgacccttcccgtccgctggcaaccctcgcctccgcgtggcactccagggctccagaccccgccgccgccctaagccagacgctgaggcttgtggtctcttcgccggagacgagcaccaaccagatcctaaacaaagaggcggtcgaaaaggtccgctcggaaagggagattcctgatgtgcagcctggatgcatcattcagatgagattgcaagttcctgagaacaaacggcgtgagtcgacgctgaaggggattgtgataggaaggcgcaacgccgggatcaatacaaccttcagattgcgtagattagtggctggtgtcggagtcgagtctgtctttccactttactcgccaaacatcaaagaaatcaaggtattggacaggaagaaagtcaggagagctaagctgtattacctgagggacaggatgaacgcacttagaaaatgagtctttcagcttgtttcaaggaatttcgccgtgcggatcagcacggtttctgaagcgcaacggttgcagccctgagaattgcattgtctggttccacatcgttgcaaagccatagcctgtagttgtcgattgccatgcttggttttgagctgcaagtgctagcagatatatgttttccgacacaatcaaaaaaaattgcggttattcccttttcgatttacgacactgtagcttcatagcacaaaataacgtgctcagatctattacttccctccgcacctttactatctaggatgtatgtgttttttgacataagcaagctggaaagtgaaaactcttatgtgatgcttcctgatatcgagatcatgggcctcttctttcctgtccagctcgacctgctgtgtgagaagtggtataagctctaaggacacccattgaactgaactttgttggagtctttatggcttagtatgtgtggtgcggagtgattgtgagtaagtggtgtcgtaactaattctgagttttagaaacttacagctgataattggtagcccttgttgatttggggctatggagttgagacttgagagagagtggcatctatatcactcaagctcagctctttgtgatgaagtggtataaccgtataaaccagtctcacgccacaaacgtaatcatagactagccggttgtcctgctttgatatggttgttttatgtcatgtaaatatatattgagatatttattaaatataattattgtttatttttaaacactaaagtgtgtatggttgttttatatcatgtaaatagatattgagatatttattaaatat

SEQ ID NO: 118438 - DNA, 1567 bp, Zea Mays
gcaaacagcccaaagaacacacgcgtcttccccagaaagcagctgtcacacatatggagggcgccacaggctgcggcgtccatgtcgtttcccggcgcatggtgcgtccgttcacgccgccgccgccgccggcggtgaacgggaacggctgcaatcgacccaaggaggagaccgaggtgattcacctggcgccgtgggaccttcgcctgctcagcatcgactacatccagaagggcatccttctgcccaagcctccatccgagggcgacgacaacgacctccacctcgtcaacgccctgcggtcctcgttcgcgcgcgccctacggatcttctacccgttcgccggccggctcacctccgaggagcgagccgacgacgggaccgtgtccgtgttcctgcggtgcaccggcgaaggcgccgagttcgtgcacgcggtggcgccagaggtcgccgccgccgacatcgtctcctcgctgtacacgccgcccgtggtctggaagttctacccgctggcgctggttcttggcgctgacgccgccatcgagcggcttccggtgctcgccgctcaggtcaccgtgctcgccgacagcgtcttcatcggcatgacgctaaaccactccgtcggcgatggcaccgcattttggcacttcttcaacacctggtcggagatcaaccgcgccaccggcggcggcgccgacctgtccacgccgccgccggtgttcgggagatggttccccgaggcatgtccggtgccgatccccttgccattccgcaggctggaggacatcgtgcgccggttcgagcgcacggaggtgaaggagtgcttcttcaccttctccgcggcgagcgtcaggaagctcaaggcgcgggcgaacgacgagatggccggcagcgccacggccaccatctcgtcgctccagtcggtcctcgcgcacctgtggcgcgccgtgtgccgggcccggcgcctccccccagagcacggcacgttctactcggtggtggtcgggtgccgcgggcgcgtggacggcgtgccgccgggctacgtcggcaacgccatggtgttcggcagggcggaggccactgccggcgagatcgaggagaaggggctgggctggacggcgtggctgctgaaccgcgccgtggcgtcgttcgacgaagcggccgtgagggagtcgctggagcggtgggtcggggagccggacttcacgtacatggacaacctgtcctccgccggcacggcgctagtaaccgggagctcgccgaggttcgacgtgttcgggaacgacttcgggtgggggaagccgctggccgtccggagcggctccgggaacaaggccgacggcaaggccacggtgttcgaggggccggagcggggagggagcatatcgctagaggtgtgcatcgcgccggacgcgctccagaggctcgtcgccgaccacgagttcatggacgcggtgagcacgtatgtacgccggcatgatgagcttgatgcatgatcgacgtgcattaattaatcacttgtagttgacaacaagctgtcgtacatgttcatacgtgtagaggttaa

SEQ ID NO: 118439 - DNA, 398 bp, Zea Mays
aatttgattatttatttgatagtaatctcatgtttaattataggaataagatggacaaatttctcatcaagaaccagaagaaagatgattctatttctaaaacaattaggacaaatgagagccgtgtagaacaaaagaggccacatattgagctagatatggatgatatagttgcagatcctggccttagaaaaccaattgatgagttcccccatgaaattagagatgatgctaaaagagcttatttacaaatgggtccatgtcaaccatttagtcatacatttccacggacagcgggtaattctcaaactagaggttttgttgaatcttggttcaaacagttcgattggttagagtacagtgtacagaaagatgcaacttattgcttttattgcttt

SEQ ID NO: 118440 - DNA, 209 bp, Zea Mays
ccgccgcactaccgacgaggaattgagcggacgcctgtcagcagtgcgagtgactacccacccccacatgatctctggtcgccgatgaacccccacgaacaccaattgaagcccgagtggcggaggtcgtggcgaaggacagggcaacggcgagattgtcacgacgttctctcgcttttcccggttctacgacgattgtggctgggttt

SEQ ID NO: 118441 - DNA, 3517 bp, Zea Mays
tgctgcagcttctgggccgaccgggggggggggggggggggtgcgtttgacttccctttccttcctgcggtaggggcccacctcgttgccccgctaggccgctacccttctctcttcccccgcctccgtctcttcgactccagacacctccccttcccgctcgccggcgctcggcggcgatccggaaccggcagcggcgcgcatggcgggcccgtgggacacgcacgcgtcgacgagccgggcgcccgcgggccccgacggggaggcggagggcgcgtcgccggactcgctgcggaacacgccctccaacatcgcgcggctggaggacgcgatcgggcactgcgcggcgcgccgcaagtacctcgcgcacaccaagagcccctccgacggcgaggacgtccgctggtacttctgcaagcttcccctcgccgacaaagtgctctcttcttcggtaccacggacagagatagtcgggaaaggagactatttccggttcagcgagagggactctctggcactggaggcatctttcttggagagggaggaagagctgcttgcgtactggtggagggagtacgctgaatgcagtgcaggaccaagaggatccttggttgaaagtgatgattctgcatatctttataaggttgaggaagagcgggttggggttcctgtgaaaggtggactatatgaggttgatttgatgaggcggcattgcttccctgtgtactggaatggggaaaaccggcgtgtcttgagaggccactggtttgctcgcaaaggtggcgtcgactggattcccgtgcgcgaggatgtctctgaacaacttgagttagcgtataattgtcaggtctggcatcgtcggaaatttcaaccttcaggcctatttgcagcaagggttgaccttcaaggaagtacaccggatttgcatgctctttttactggagaggatgatacttgggaagcttggcttgtctttgatacaggtcctaagtttggtagcaacacaatcaaattaagacgcggatatttctgttctgaatctgcaagtacaaagccttcacaggatgaattgcgtcagaaaaaagaagaggaaatggatgattactgctctcaggttccagttggtcatctggtattcatggttcatggcattggacagaggctggagaaagctaatcttgttgatgatgttgttgatttccgtcgtgtaactgctaacctagctgaaagatacttaacttcgtatcaaagaagtacccagagggttctatttataccctgtcagtggaggaagggcttgaagctcagtggtgaaagtactgttgagaaactcactttggatggagttaagggccttcgagtcgcattaggtgccacagttcatgatgttttatattatatgagtcctatctactgtcagcatattattgactcggtctcgaaccagttgaacaaactgtacatgaaatttctaaagagaaatcctggttacagtggaaaggtttcattgtatggccactcgttaggaagtgttttgtcgtatgatatactttgtcatcaagaatccctttgggccccatttccaacagagtatctgaacatggaaacatctgatcgaaatcaaggagcaaaatcagccaatgaagctgatctgcatgattcaggcgcaaaggatcatgatacttctagtctagggtattcttgtgctgataatgaaaacagtgtcattgatgaagatagcaccagaactgacgtgtcatgtatggacagcatcctcccatcatgtgtgcttgaggattcaccaaataaccatgacactgtcgtgcctcgtggtgcggttgttgctgatcaaaatggagaagaaaagaaggttgagaattatcagtcggtgtatgctgaggaaggaacaacttcaggtgtaatcacaaaaaaggctgaaggatcaagcatttcaagatctgctaaggaagtccatgaagaggtcctcgacaaagaaaaattgatggtccttgccaaagacaaattgatcctttcactagaagaagaggtgaaatgtcttaaagctaaactagatcagcttgaacaacataatcatctagtgactgaaaacaccagtggtgttgagtatcatgaagggcaaaattataatcatgccttgaactctggcaaacttttcgtggcacaagaaagtacaaaccagtcctactcaccgcaaatcaaatacacgaaactaaactttaaggttgatacattctttgctgttggatctcccttgggtgtcttcctttccctgcgtaatgtccgtattggtattggcaaaggacaagactattggcaagataagaacgtaattgaagagatgccatgctgccggcagatgttcaatatttttcatccttttgaccctgtagcatacagaattgaaccacttgtatgtgaagattatctaaagaagcgtcctgtaattgttccctaccatagaggcggaaagaggatacatgttggagtgcaggagttcagagaagatatttctgcacgttctcaagcaattgcccgtcaattgaagtcactgaaggtcaaagcagtagctgctatactagcattgagcagaaatgacacagaagaggatggtgagagtgctaatgagaaagaaaaatcatatggttccattatgatggaaaggttgaccagttcaccgaatggtcgaattgatcatgtgcttcaggagaaaacatttcagcatccatatctatctgctttgggagctcataccaactattggcgagatcatgatactgctctcttcattctcaaacatttgtatcgtgatatacccgaggatcctccaagcgatgtcattgaaaggatgcctattaaactattttatgagagagatccagttgaggaagaaacgcctgtgacgttttcagatcatgcagcaattaaggaattctgcagaaaggtgaaagcttactcaagaaaaatggaggatgatgccaactgccaagcctcgtgatggatttttagtctctcgttacggcctcacacgttcctgggcaagcagaagcaagatgcagacatgggaaggaagaacgaatcgtgatcccaagaaaagaatccacgagatgcagttccacgcttcacgccagaatcagagcacttggagaatgttgtacggagtagagtcggttgccttgctcgttcctacatttataatgcagtgttgtacatagaacgtccgactgtagttttgtgcatcttgaacgtaatgttatgctgcctgctttaaatgctacagaatatatttttgcttttgcatccctagtgtgcgtcaattgcaaagtggttagctcctacttatttagcatgtcttttcattatgtctatcatgggcaaaagtactacataaaaaaggactcgcttagggcccggttgattttttttttttgaaagtttaggtattacaaagacctagttttatagctaaagcgatgcaaaaccaccgtgatttcaaaag

SEQ ID NO: 118442 - DNA, 2146 bp, Zea Mays
ggtctcgcaaagggacacaattccctaggaaccgcacaaaagcttcctgcaatccggcggctttggcgttgaacctccccccttgatcagtagtagaatcggctgctaaagatttctatttttatttttttctcggttcggaaggtgccgtgcggcgagcgaaataaatcgctgcggcgagaatcctgtggagatgagttgcgttaggtggcaggaccactcataaattctgcctgttcattcagatctgctccgtgctgtgcttcttctgctgctgccttgcagcgaccagcgagaagaaatccattcgctaggccggcccacccacccacgatagcggttgtggtcactcatgcgtcgtcgccggagtccaatctcgccgctcggagtttcttgacttttctggtcggagtttccatttcctcctggaggagattatttctttctcctctttcaccccgagaatctcgtctcgggtcgcgctggtttgattcctcctcgcctgagtccaccgctttcgcttccagtggagaagcttgtccgtgaagcagcgctcgtctcctgcttaaaatttcttccttctgccttggtttctttgctcgcgcccgccgatttgcttgctgcccagtccacactcctccgttcgtgtctcgcggctttccgcactcgttttcccggtctcggatttcgttaccaatgggcaacgcgttcgcgtgcatgccgcgcaaggagcagcgaggcgcggccgcggtgtcgcgcagcaagcggatggggagcgcgcggtcggcgcgcggcgggcccaagctgacgcccgcggaggaggagctcctccaccgccaggctctggccatggccatccaccagcacctcgacgccggcggctccatgtcgcgccgcatcgacgccggggcctccctgtcccggcgcatggccccgggctccaccagctcccgccgccgcggcgacctgccggactccgtcacgaatgccaagcccgccccaattgttctggagaatttggaaacaaagaaaattgtccttgttcatggagaagggttcggtgcttggtgttggtacaagaccatctcacacttggaggaagctggtctagatcctgttgccttagatctcacaggctctggcatagaccatactgatacaaacagcatagctacgttagcagattactccaagccattgattgattacctcgacagacttcctgaagatgagaaggtcattttggtcggccatagttgcggaggtgcgagtgtctcgtatgcactggagcagtacccccgaaagatctcaaaggcggtgtttcttactgctacaatggtaaaggatggccagaggccctttgacgtgttctcggaggaactccggtcggcggatgttttcttgcaagagtcacagtttctagtctatggaaatgggaaggacaagcctcctactgggctgatgttcgataagcagcagatcaaggggctgtatttcaaccaaaccccttccaaggatatggcactagcagcggtgtccatgaggcctatccctctagccccaatcatggagaagctctccctcaccccggagaactacggctccgtccgtcgctacttcatccaggcactcgacgaccacatgctgtcgccggatgcccaggagaagctggtccgcgagaaccctcccgacggcatcttcaagatcaagggcggcgaccactgccccttcttctcaaagccgcagtccctcaacaagatcctgctggagatcgcgcagatccaagctcctgcggcgctgctcaaggcgagctcccccgaggagaccgccgccgccatggtgacagggccagccaagtcatgactgcatgtatgtagtgtacacgaaaagagaaatgagtaagcacataggttgcaaaagggagggggaggaggtctggggattaactgaagccaagctgtgtcggataataatgtagggaggtcaaagtgtttctttctttcttctgtgatcagatcagatcatatagagaatgagaggtggtcagcagataattgcatttcttttttcctttttaccttgtgaatgaatgagatattcagtgaccaatgtcaacgcggaaagcctttgtggtgatgcttactaa

SEQ ID NO: 118443 - DNA, 931 bp, Zea Mays
gtgacgtcacctcttctaaggcccctgtggtgccaattcagatgggctccaggatgaggccaggcccatgggggcacgattcggccttttcttgtcttgctcgtcaaaagaataaaatcccaacccataggaaagcgtagcatagcaggggaggccgggaggggagaaaggcgaactcgaattgggggaagagagcgagagacgaatcgcatcgagccggagaggaagtcagagacagggaggagggcggcggaatcggcgccggcgggaggcaggcatggaggacctgagcgtggaggagctcgcctccaacctctccacctacaaagagcagctacgcgaggtcaagaagcttatcaaggagaagaaggatgatgctggaatttctgaatatattgatatggagaaggagcttcaagaggtcagttcatttcttattttatcctgtaatgtgatccctcatgctcgtgtagctacacgtcagatacatcggattaatgattttcacaaatggatgcttgatttctcctctgatttttggggcatgttgctatcgattcctctcttctttgttacaaggagccatgcccagcaaggtagcatgaaaaggccgcttgcaacagaagatttgttttggggaatttagatttttgtaaccttgaaaggtgagaaggttaattatggcaatggtagggactgtccgagcaaccatattaataataatgaacaatatgtaaaaattcagtggcttcaaagttgtccattaccctttatcttgatttattgcaggtttgtactactacaaatttcggtgttgctgctgctgttctaagttggatcttgaaatatgggcacatgtttaatactactgggaggttgcttgtgtttatgatgcttaatatcattttttgtgtttgctgcaggtcataac

SEQ ID NO: 118444 - DNA, 1505 bp, Zea Mays
gtgacgtcacctcttctaaggcccctgtggtgccaattcagatgggctccaggatgaggccaggcccatgggggcacgattcggccttttcttgtcttgctcgtcaaaagaataaaatcccaacccataggaaagcgtagcatagcaggggaggccgggaggggagaaaggcgaactcgaattgggggaagagagcgagagacgaatcgcatcgagccggagaggaagtcagagacagggaggagggcggcggaatcggcgccggcgggaggcaggcatggaggacctgagcgtggaggagctcgcctccaacctctccacctacaaagagcagctacgcgaggtcaagaagcttatcaaggagaagaaggatgatgctggaatttctgaatatattgatatggagaaggagcttcaagaggtcataacgttaaccgaagagattttggcaactgcaaagcaaactgagagtgcccagaatgttgcaggtctatcaccgccaagctattcagctggagtgcagtctgagggactggatgacctttcacattcccataagtttgccgttggtactagagttcaagctgtgtggagtgaagatggagaatggtataatgcaaccgttgaagctttgacaccaaatggatactatgtagcctacgatggctggggaaacagtgaagaggtggacccagataatgtgaggctgcttgaggaagaagcagctgatgccttgggacaagctgaaaaggaagctgaagctacaaaaatggcaataaagaggaaaattgaacaagcagcaacatctgattttcaggcgcgtagcttgccggccaaacttcgtatcgaaccaagtgaccctgaggatgttaaagctgcaaagcgtaagaaaatacatgctttcaaatcaaaatcccgctttgagcagcttgaatttgcccaaaacaaaaggcagaatgcatggcagcagtttcaaaccaaggggaaagccaaaaaggtagcttcttggcccccacgtaatttttttttgctttcttaaaaatggctaggcactcttccattgagttggaattctgaatctcaaggtactacatatggccatcctcagcattcatgttatgatggaggaccaaaatggaacaaattgtctgacctttcccagcattccagttagtcgagaaacagattgtgtgaatttcgatggtttgtttgccaggtggggttcttctccggtcgcaagaaggagagcatcttcaagtcaccggacgaccacagaggtaaggtgggtgtcactgggagtggcaagggcctgaccgacttccagaggagggagaagcatctgcaccttaaaggtgggtccggggatgcagcggatgatgacgaggagtaaactgaagaaccgagcctctgtttgtatcccgccgaacagacatttccatacctgttctttagcgccgacatggcctcgaggggactcttgacttaaaccagaaaatttcaatgtt

SEQ ID NO: 118445 - DNA, 1432 bp, Zea Mays
gtgacgtcacctcttctaaggcccctgtggtgccaattcagatgggctccaggatgaggccaggcccatgggggcacgattcggccttttcttgtcttgctcgtcaaaagaataaaatcccaacccataggaaagcgtagcatagcaggggaggccgggaggggagaaaggcgaactcgaattgggggaagagagcgagagacgaatcgcatcgagccggagaggaagtcagagacagggaggagggcggcggaatcggcgccggcgggaggcaggcatggaggacctgagcgtggaggagctcgcctccaacctctccacctacaaagagcagctacgcgaggtcaagaagcttatcaaggagaagaaggatgatgctggaatttctgaatatattgatatggagaaggagcttcaagaggtcataacgttaaccgaagagattttggcaactgcaaagcaaactgagagtgcccagaatgttgcaggtctatcaccgccaagctattcagctggagtgcagtctgagggactggatgacctttcacattcccataagtttgccgttggtactagagttcaagctgtgtggagtgaagatggagaatggtataatgcaaccgttgaagctttgacaccaaatggatactatgtagcctacgatggctggggaaacagtgaagaggtggacccagataatgtgaggctgcttgaggaagaagcagctgatgccttgggacaagctgaaaaggaagctgaagctacaaaaatggcaataaagaggaaaattgaacaagcagcaacatctgattttcaggcgcgtagcttgccggccaaacttcgtatcgaaccaagtgaccctgaggatgttaaagctgcaaagcgtaagaaaatacatgctttcaaatcaaaatcccgctttgagcagcttgaatttgcccaaaacaaaaggcagaatgcatggcagcagtttcaaaccaaggggaaagccaaaaaggtggggttcttctccggtcgcaagaaggagagcatcttcaagtcaccggacgaccacagaggtaaggtgggtgtcactgggagtggcaagggcctgaccgacttccagaggagggagaagcatctgcaccttaaaggtgggtccggggatgcagcggatgatgacgaggagtaaactgaagaaccgagcctctgtttgtatcccgccgaacagacatttccatacctgttctttagcgccgacatggcctcgaggggactcttgacttaaaccagaaaatttcaatgtttgtcccattctcattgttgaatgtcgctgccgttttggagctgcattctggtggcgaggtcacgctgctagaggagggcgtcctgagcgtacagatcgacttgtcttgctagtctgtagtgaagtattaatccttaaacgtttact

SEQ ID NO: 118446 - DNA, 79 bp, Zea Mays
gatcagatcagctcgtgttgttgcaggagaaagcgcagaaaagacctgcaccagcatgaccgacctgcatgcacattac

SEQ ID NO: 118447 - DNA, 609 bp, Zea Mays
aagccgaagctgcccttgcccactcttcttctcctctcccccctctttctactaaaaaaatactcctccccacactaaactagtgccaaattgcttccgcattccctccctgcattcccctcctccgagtatccgacccatcggcggtcctctccctcgtggcgacggccgctccaccgccgctgccgagtgggtcttggccggcgacgaccgcccaccggatacagcagcaggactagtagccaagaacaaagaggctagctagcggtgataaagttttcataggtgtatgtttgggagccttatttggatcctgaaaaacacacaacaataatggggcacgaccatatgtctcgtataaagatgcatatggcagaaggttcttttggtgacaggaaccggtgccagcaacctgggtgcaatgaggttgtcgatggaagggtagtgtactgcaaaactcacagcggagagttgtcatgccaacagttcagtcacctccagagcggactggagagctcagcagtaccatgcactgagcaagagttacatgtcaagcacgaaggggatgatcgaggtaaactaaaggatagttctgggtacactttgggt

SEQ ID NO: 118448 - DNA, 817 bp, Zea Mays
aagccgaagctgcccttgcccactcttcttctcctctcccccctctttctactaaaaaaatactcctccccacactaaactagtgccaaattgcttccgcattccctccctgcattcccctcctccgagtatccgacccatcggcggtcctctccctcgtggcgacggccgctccaccgccgctgccgagtgggtcttggccggcgacgaccgcccaccggatacagcagcaggactagtagccaagaacaaagaggctagctagcggtgataaagttttcataggtctttatgctggaaacttctgcagaaaaacacacaacaataatggggcacgaccatatgtctcgtataaagatgcatatggcagaaggttcttttggtgacaggaaccggtgccagcaacctgggtgcaatgaggttgtcgatggaagggtagtgtactgcaaaactcacagcggagagttgtcatgccaacagttcagtcacctccagagcggactggagagctcagtaccatgcactgagcaagagttacatgtcaagcacgaaggggatgatcgaggtaaactaaaggatagttctgggtacactttgggtcagactgcacaatttgtcttccctggggcaggcatgttttgcaagaacgatagctgcagcaagcaagcacatgagaactcaatctactgtaagttgcatagcggtgttagcaagggctgcatggtccgaggctgtacaagaggtgcacatggaggcacacctctgtgcattgggcatggaggcgggaaacggtgtgtgatccctggatgcccaaatg

SEQ ID NO: 118449 - DNA, 1775 bp, Zea Mays
aagccgaagctgcccttgcccactcttcttctcctctcccccctctttctactaaaaaaatactcctccccacactaaactagtgccaaattgcttccgcattccctccctgcattcccctcctccgagtatccgacccatcggcggtcctctccctcgtggcgacggccgctccaccgccgctgccgagtgggtcttggccggcgacgaccgcccaccggatacagcagcaggactagtagccaagaacaaagaggctagctagcggtgataaagttttcataggtgtatgtttgggagccttatttggatcctgaaaaacacacaacaataatggggcacgaccatatgtctcgtataaagatgcatatggcagaaggttcttttggtgacaggaaccggtgccagcaacctgggtgcaatgaggttgtcgatggaagggtagtgtactgcaaaactcacagcggagagttgtcatgccaacagttcagtcacctccagagcggactggagagctcaggtttatcggtgcgtcctgtaactcctgttaatgacagccagtttaagggatctgtttccattgcagcagtaccatgcactgagcaagagttacatgtcaagcacgaaggggatgatcgaggtaaactaaaggatagttctgggtacactttgggtcagactgcacaatttgtcttccctggggcaggcatgttttgcaagaacgatagctgcagcaagcaagcacatgagaactcaatctactgtaagttgcatagcggtgttagcaagggctgcatggtccgaggctgtacaagaggtgcacatggaggcacacctctgtgcattgggcatggaggcgggaaacggtgtgtgatccctggatgcccaaatgccgcgtgtggtcaaggcctcagtgaccgctgtgtgaggcatggtggtggcaggagatgtagattcgaagggtgtgcgaagggcgcacaggggaacaccgattactgcataaggcacggtgggggaaggcggtgcaagtttgaaggttgcacgaagagtgcgcagggacggacagatttctgcattaagcatggtggtggcagccggtgcaagttccaaggatgcggcacgagcgcaaaatggggaacagatttctgctctatccacaggaaggctttgttgggaggcgacaatgccgccgtccctgaagctttgcctgccgcttcagaaaaacgacgtcgtgccaagaagcccaagaaggcggcgaaactgtctgaggcctcccaagagaatgccacagcagcagcagctattgctggtaacagcactcaacatatgggcggtcttctcatagctatccctgttgctaaccgtgacatgttaaccaaagccgtggcagcgacggggcaagctgcaatagcctccgcacagatagtggcgccgctgtccatgaaatcgccgacgccatctggagcagcggcggctaccttgactgggagggaggcgggagcaagcagggagatgctgggtctgtagaaagatggtggcagtgcataattcgggaggcttggcgacaccccttgcccagatagttctctgattattgccttctttttagactgagaaaaacctcgaaactttaggagggttgtgcattttgacagactcgggccgtcgactgactctagtgatgttctgtgcctttctcgtttgtaaattgcaatgttctcgtgtattttctcttgtgaccatttggacagtaagcaataatattggtgttctaa

SEQ ID NO: 118450 - DNA, 1726 bp, Zea Mays
gccgaagctgcccttgcccactcttcttctcctctcccccctctttctactaaaaaaatactcctccccacactaaactagtgccaaattgcttccgcattccctccctgcattcccctcctccgagtatccgacccatcggcggtcctctccctcgtggcgacggccgctccaccgccgctgccgagtgggtcttggccggcgacgaccgcccaccggatacagcagcagggtgtatgtttgggagccttatttggatcctgaaaaacacacaacaataatggggcacgaccatatgtctcgtataaagatgcatatggcagaaggttcttttggtgacaggaaccggtgccagcaacctgggtgcaatgaggttgtcgatggaagggtagtgtactgcaaaactcacagcggagagttgtcatgccaacagttcagtcacctccagagcggactggagagctcaggtttatcggtgcgtcctgtaactcctgttaatgacagccagtttaagggatctgtttccattgcagcagtaccatgcactgagcaagagttacatgtcaagcacgaaggggatgatcgaggtaaactaaaggatagttctgggtacactttgggtcagactgcacaatttgtcttccctggggcaggcatgttttgcaagaacgatagctgcagcaagcaagcacatgagaactcaatctactgtaagttgcatagcggtgttagcaagggctgcatggtccgaggctgtacaagaggtgcacatggaggcacacctctgtgcattgggcatggaggcgggaaacggtgtgtgatccctggatgcccaaatgccgcgtgtggtcaaggcctcagtgaccgctgtgtgaggcatggtggtggcaggagatgtagattcgaagggtgtgcgaagggcgcacaggggaacaccgattactgcataaggcacggtgggggaaggcggtgcaagtttgaaggttgcacgaagagtgcgcagggacggacagatttctgcattaagcatggtggtggcagccggtgcaagttccaaggatgcggcacgagcgcaaaatggggaacagatttctgctctatccacaggaaggctttgttgggaggcgacaatgccgccgtccctgaagctttgcctgccgcttcagaaaaacgacgtcgtgccaagaagcccaagaaggcggcgaaactgtctgaggcctcccaagagaatgccacagcagcagcagctattgctggtaacagcactcaacatatgggcggtcttctcatagctatccctgttgctaaccgtgacatgttaaccaaagccgtggcagcgacggggcaagctgcaatagcctccgcacagatagtggcgccgctgtccatgaaatcgccgacgccatctggagcagcggcggctaccttgactgggagggaggcgggagcaagcagggagatgctgggtctgtagaaagatggtggcagtgcataattcgggaggcttggcgacaccccttgcccagatagttctctgattattgccttctttttagactgagaaaaacctcgaaactttaggagggttgtgcattttgacagactcgggccgtcgactgactctagtgatgttctgtgcctttctcgtttgtaaattgcaatgttctcgtgtattttctcttgtgaccatttggacagtaagcaataatattggtgttctaatctc

SEQ ID NO: 118451 - DNA, 1721 bp, Zea Mays
gccgaagctgcccttgcccactcttcttctcctctcccccctctttctactaaaaaaatactcctccccacactaaactagtgccaaattgcttccgcattccctccctgcattcccctcctccgagtatccgacccatcggcggtcctctccctcgtggcgacggccgctccaccgccgctgccgagtgggtcttggccggcgacgaccgcccaccggatacagcagcaggctttatgctggaaacttctgcagaaaaacacacaacaataatggggcacgaccatatgtctcgtataaagatgcatatggcagaaggttcttttggtgacaggaaccggtgccagcaacctgggtgcaatgaggttgtcgatggaagggtagtgtactgcaaaactcacagcggagagttgtcatgccaacagttcagtcacctccagagcggactggagagctcaggtttatcggtgcgtcctgtaactcctgttaatgacagccagtttaagggatctgtttccattgcagcagtaccatgcactgagcaagagttacatgtcaagcacgaaggggatgatcgaggtaaactaaaggatagttctgggtacactttgggtcagactgcacaatttgtcttccctggggcaggcatgttttgcaagaacgatagctgcagcaagcaagcacatgagaactcaatctactgtaagttgcatagcggtgttagcaagggctgcatggtccgaggctgtacaagaggtgcacatggaggcacacctctgtgcattgggcatggaggcgggaaacggtgtgtgatccctggatgcccaaatgccgcgtgtggtcaaggcctcagtgaccgctgtgtgaggcatggtggtggcaggagatgtagattcgaagggtgtgcgaagggcgcacaggggaacaccgattactgcataaggcacggtgggggaaggcggtgcaagtttgaaggttgcacgaagagtgcgcagggacggacagatttctgcattaagcatggtggtggcagccggtgcaagttccaaggatgcggcacgagcgcaaaatggggaacagatttctgctctatccacaggaaggctttgttgggaggcgacaatgccgccgtccctgaagctttgcctgccgcttcagaaaaacgacgtcgtgccaagaagcccaagaaggcggcgaaactgtctgaggcctcccaagagaatgccacagcagcagcagctattgctggtaacagcactcaacatatgggcggtcttctcatagctatccctgttgctaaccgtgacatgttaaccaaagccgtggcagcgacggggcaagctgcaatagcctccgcacagatagtggcgccgctgtccatgaaatcgccgacgccatctggagcagcggcggctaccttgactgggagggaggcgggagcaagcagggagatgctgggtctgtagaaagatggtggcagtgcataattcgggaggcttggcgacaccccttgcccagatagttctctgattattgccttctttttagactgagaaaaacctcgaaactttaggagggttgtgcattttgacagactcgggccgtcgactgactctagtgatgttctgtgcctttctcgtttgtaaattgcaatgttctcgtgtattttctcttgtgaccatttggacagtaagcaataatattggtgttctaatctcaga

SEQ ID NO: 118452 - DNA, 1660 bp, Zea Mays
gccgaagctgcccttgcccactcttcttctcctctcccccctctttctactaaaaaaatactcctccccacactaaactagtgccaaattgcttccgcattccctccctgcattcccctcctccgagtatccgacccatcggcggtcctctccctcgtggcgacggccgctccaccgccgctgccgagtgggtcttggccggcgacgaccgcccaccggatacagcagcagggtgtatgtttgggagccttatttggatcctgaaaaacacacaacaataatggggcacgaccatatgtctcgtataaagatgcatatggcagaaggttcttttggtgacaggaaccggtgccagcaacctgggtgcaatgaggttgtcgatggaagggtagtgtactgcaaaactcacagcggagagttgtcatgccaacagttcagtcacctccagagcggactggagagctcagtaccatgcactgagcaagagttacatgtcaagcacgaaggggatgatcgaggtaaactaaaggatagttctgggtacactttgggtcagactgcacaatttgtcttccctggggcaggcatgttttgcaagaacgatagctgcagcaagcaagcacatgagaactcaatctactgtaagttgcatagcggtgttagcaagggctgcatggtccgaggctgtacaagaggtgcacatggaggcacacctctgtgcattgggcatggaggcgggaaacggtgtgtgatccctggatgcccaaatgccgcgtgtggtcaaggcctcagtgaccgctgtgtgaggcatggtggtggcaggagatgtagattcgaagggtgtgcgaagggcgcacaggggaacaccgattactgcataaggcacggtgggggaaggcggtgcaagtttgaaggttgcacgaagagtgcgcagggacggacagatttctgcattaagcatggtggtggcagccggtgcaagttccaaggatgcggcacgagcgcaaaatggggaacagatttctgctctatccacaggaaggctttgttgggaggcgacaatgccgccgtccctgaagctttgcctgccgcttcagaaaaacgacgtcgtgccaagaagcccaagaaggcggcgaaactgtctgaggcctcccaagagaatgccacagcagcagcagctattgctggtaacagcactcaacatatgggcggtcttctcatagctatccctgttgctaaccgtgacatgttaaccaaagccgtggcagcgacggggcaagctgcaatagcctccgcacagatagtggcgccgctgtccatgaaatcgccgacgccatctggagcagcggcggctaccttgactgggagggaggcgggagcaagcagggagatgctgggtctgtagaaagatggtggcagtgcataattcgggaggcttggcgacaccccttgcccagatagttctctgattattgccttctttttagactgagaaaaacctcgaaactttaggagggttgtgcattttgacagactcgggccgtcgactgactctagtgatgttctgtgcctttctcgtttgtaaattgcaatgttctcgtgtattttctcttgtgaccatttggacagtaagcaataatattggtgttctaatctcaga

SEQ ID NO: 118453 - DNA, 1645 bp, Zea Mays
cttgcccactcttcttctcctctcccccctctttctactaaaaaaatactcctccccacactaaactagtgccaaattgcttccgcattccctccctgcattcccctcctccgagtatccgacccatcggcggtcctctccctcgtggcgacggccgctccaccgccgctgccgagtgggtcttggccggcgacgaccgcccaccggatacagcagcaggctttatgctggaaacttctgcagaaaaacacacaacaataatggggcacgaccatatgtctcgtataaagatgcatatggcagaaggttcttttggtgacaggaaccggtgccagcaacctgggtgcaatgaggttgtcgatggaagggtagtgtactgcaaaactcacagcggagagttgtcatgccaacagttcagtcacctccagagcggactggagagctcagcagtaccatgcactgagcaagagttacatgtcaagcacgaaggggatgatcgaggtaaactaaaggatagttctgggtacactttgggtcagactgcacaatttgtcttccctggggcaggcatgttttgcaagaacgatagctgcagcaagcaagcacatgagaactcaatctactgtaagttgcatagcggtgttagcaagggctgcatggtccgaggctgtacaagaggtgcacatggaggcacacctctgtgcattgggcatggaggcgggaaacggtgtgtgatccctggatgcccaaatgccgcgtgtggtcaaggcctcagtgaccgctgtgtgaggcatggtggtggcaggagatgtagattcgaagggtgtgcgaagggcgcacaggggaacaccgattactgcataaggcacggtgggggaaggcggtgcaagtttgaaggttgcacgaagagtgcgcagggacggacagatttctgcattaagcatggtggtggcagccggtgcaagttccaaggatgcggcacgagcgcaaaatggggaacagatttctgctctatccacaggaaggctttgttgggaggcgacaatgccgccgtccctgaagctttgcctgccgcttcagaaaaacgacgtcgtgccaagaagcccaagaaggcggcgaaactgtctgaggcctcccaagagaatgccacagcagcagcagctattgctggtaacagcactcaacatatgggcggtcttctcatagctatccctgttgctaaccgtgacatgttaaccaaagccgtggcagcgacggggcaagctgcaatagcctccgcacagatagtggcgccgctgtccatgaaatcgccgacgccatctggagcagcggcggctaccttgactgggagggaggcgggagcaagcagggagatgctgggtctgtagaaagatggtggcagtgcataattcgggaggcttggcgacaccccttgcccagatagttctctgattattgccttctttttagactgagaaaaacctcgaaactttaggagggttgtgcattttgacagactcgggccgtcgactgactctagtgatgttctgtgcctttctcgtttgtaaattgcaatgttctcgtgtattttctcttgtgaccatttggacagtaagcaataatattggtgttctaatctcagacc

SEQ ID NO: 118454 - DNA, 831 bp, Zea Mays
cctttctatcatcatcgtccacacaaacacatcctactctttagcaaaaagacatggcaaccaccaagaaggagaaggtcatcctcgtcctgctgttctccctgacgatgctccctctcagcaccctcggcacccgctccggcccggcggccgtgcagcaccacggccacggcggcaccaccaagcacccctcgcctccttcaccagccacggcggcgctggtacgcagcacgtgtaactccacggcgtactacgacgtgtgcgtgtccgcgctgggcgccgacccgtccagcgccaccgccgacgtccgcgggctctcgaccatcgccgtgtccgcggcggccgccaacgcctcgggcggcgccgccacggccgcggcgctcgccaacggcaccggcaccgccgcgtcgtcgtccaacgcgcaggcggcccctgccacggcctccgccgccgcggcgctgctccgcacgtgcgcagccaagtacggccaggcccgggacgcgctggccgccgccggggactccatcgcgcagcaggactacgacgtggcgtccgtgcacgtgagcgccgccgccgagtacccgcaggtgtgtagggtgctgttccggcggcagaagcccgggcagtaccccgcggagctggcggcgagggaggagacgctcaggcagctctgctccgtcgcgctcgacatcatcgggctcgcctccaccaacaccaactaataagctagcagcagtggcgtggcggcgagaaaagagaggaagattttataaaaaaaaagtagcacctttttctttttggtttaattactgtacgtattatattaattag

SEQ ID NO: 118455 - DNA, 1206 bp, Zea Mays
ggtcgatccgctgtgactgtgatgcatggttgagttgttagatcgatattctttctctaaaacatactggttgtgaaccattcagtaatcaaatgtgcgcaaacttactgctgctcagaatccgggcactgtaaccggtgctgttgtcgtagtagcggttccacagcatgaggccgccgtagttagcggagccgctcaccgccggcagcacacgcgacacaaggtcgtccgggggtacgtacccgctacccgctgcagcaggcgacgccggcaggccaaggaacacagacgccgacgacggcagcgactgcgtccacgccttccacgatgccgccaggttggccacgccgtctccgtccttctgctggtactcgcacccggggttgttgtagaactgcacccacacgtggtcgaacagccccgtggcgagcgccgcgccgagcgaggcgtccgggtacgggcactgcggcgccgcggtgagcaggtacttcctccctcgcctgtcgcccccgtacagcgacgttaggttcctggcgaggccgtcgaagtggctggacggactgatctcgatgtccatgtcgatgccgtcgagcaccgcgtcgccgagaggccgcgatgaggaggtgccgccgaggaagttgtcccagaggtaggtggccacgctctcggcgtccgaggcggaggagaggttgtagcttccagcaccgccgccgatgctgaggagcaccctgacgcctctcgcctggcaggccgcgatgtccgcggccagagctgtgcagccgcccgacgcggggtcgcagtgcccggccaagttgaggaccggtgtctggccgctgccgaacgtggaaaggaaggccatggcaaccaaggcgtagcggccgctgctgcatgtctggcccaggctgccctcgttgctgttctggccccagtagacggagatgttgacggcggcggcggcggcgggggctgcgcaagccagcagcaaacaggcgcagagaagcttgcggcggcggttgcaggccattggctggcgctgtttcatttttcttcttcttgctcttgtggttgtgattgaggttgtagtaacaagcgggcatggatgacttttgtgggacgcggtaacgccaagaccaagacccctgcattggaagaattcgaccaggtcatgcatatagaactaccacatgcatctgaaagtgacaggtg

SEQ ID NO: 118456 - DNA, 564 bp, Zea Mays
agaccaacaaacgcaaaagttgtcagtcctgcacccaagagcagtggtacttctgtagaggcagaaagccctctaattacgacaaagaaaatctgtgatagatgccattatgttcatcctgtgataaacacggttcagaatctgtcacagtggaaagaagctaagagtctcaaggcccaaccagtgcatagtaaaatgttggataaggagcatgtaaactcactggcagatgtaggtccaagccatgactgtaattctgcccgccacacaaggatgaaccctagcttgtaaagtaagaaggaaatttctttggacgctagcagtggacaatggaataatgcttcgaaagatgaaggacttaatcgattaacattttctatgttgccttgttcttaactcatagcatttgagaacaagtcaccaacattggcgcccacctccgtggcgccgaagaaagcttcagcaactggcactgcagctcttcaaccactggaccacaatcaggagactgtctctcttcgggaggcccgaagccagaaaaggaaggctgttagtccaacacca

SEQ ID NO: 118457 - DNA, 3051 bp, Zea Mays
ttactcgcgcacgctccatccgtcaaccacaagagccccacgcgctggccttgcctctgcccctcgccctcgcctcgcctccaggatcttgtcctcccccatctcctcgggccaaggaatcgttctcatccggcgacctacctccgttacgtctcaggtcttgttctgtatcacaagcaaagcaaaggatcggaggctactccattcggcagcaagctgactctgaagtctgaacgttggagtagaacaaggtgcttgttcaaaattgttagttgcatggagatgggaatgactcctgaagtaatgtatggacaaaatgttttcgttcctgctactgcaaatccctaccaatatggctatacagaagttggatcaccaatggaatggtatagtcacccgaactcttcaggatatgctagccaagatattttctattcggctgaaggcatgcaatgcgtatactatgcagccccagacaatggatctatgcatcctacctacattccttatccttcagatccttctttcgtacccgatggctcatttatgcctcaggagtatgttgctgaccctgctaactccacatgccaaataggcccgtcatcctattacattccagctgttcttccttatgcacaagatagtgtcccgggaagcgcaaccacacctctttactcctccaatgttgcatttcttcctggcataccaggttatgctgcaacatctgcaaatgcagcatttcctttaattgctcccgtcaccacaaaaagtgacatcgttgtgcatccacctgtacagtctactattgtacctttgaagcagttgcaggaccatgcaaaaccgccaaaagttcaactgcacaattcggttccacagaagcaagagttgccagatagatgtatggtacctgctaaactccctcatgcttctcaggtatcagcacatttgtctggaaacaattgccttggatgtgctgctggatctgatcttcataagtgggctgccgccgagaaattccagccatcttcaaagtcaagtggtcatctaaatggtactggccaaaaggtgcatagcttagttgattctgagaaaccaagcaatcagagctttgccatgattgtgaaatctcacacattaaggctccctgtcggtaatccggatgggacaatcattataagaaccgaccagtacaacagagatgatctccgagttgactatatgtatgcaaagttctttgttatcaagtcaattggtgaggcagatgtgcacaaatcgataaagtatggtgtatggtcaagttcctccaatggaaacatcaagctagatagcgcattcagggatgctgacaggatatcaaggaggcattctactaagtgtccagtattcttgttcttctctgtgaatgggagtgggcacttctgtggcatggctgagatggttggtcctgttgattttcacaaggacatggacttctggtgtcaggataaatggaccggctgctttcctgtgagatggcacattgttaaagatataccgaatggttttttgcagcatatcacactgcagaataatgaaaacaagcctgtgacgcacagcagagatacacaggaaataccatacctccctggaatatctgtgatcaagatcttcaaagacatcaaagtgagggactgcctgtttgatgattttatgagatatgaggcagaagaggcgcaaatgaagccgcacagaagatgcaagctgagttacgatgctccagattttgtacctgtctcccagcgcactgagcagacgaagtccagcagtgtgctggtagacagaacatctgagatacaaaatgtgtctgagaagccgcatgatgctaaggtgatcaatcctcaggagccgcgtgcctctgataagcaggcgagtgaggctgagaaagagaatgaactacaggaaagtcattgcagcggcagtcagaaccaagaggatgcagcgaaaactgcaaccaaccatccaccaggtccaagcttgaaggcggcaggtgcggatgggaaacagcagtactggaagaaggtcgaaaatccaaagcagcatgcagacagcggtgctgcccagggctcactgaaagcacctgaaaagcggctaaatggagtcagcggctctgcgagcacagttccagttccagagggtggcgagcagcagagggtcactgccaaacttgggtctctcaagataagctccaaggcagtggaggctgaccgtaagactagcacagctggtatggagaagcagctaaatggagtcagtggctctgggagcgcagttcctgagggtggcgaggagcagaaggtcaaaatcagttccaaggtagtggaggctgaccggaagacgagcaaagctggtgtggtgacaatcggctcgatgccggtccgggttgacagttatgccgtctagtggccagcgggggggagcttttgtttttatcttttttgcccttctggggtaatctttggtgccccggcttttcatcttcctttctggtagaagaatgcttgtcctggttggtggttctttcctagcttctatatggtatcaaaaaaagaaaaaaaaaagagacgacgaatagttagattcttttttcgttgggggtgaaaagctagttttgcaggcaggcagcattctcatggtggtggtttcgtttgtggaaaagagagaagatactataatatgtgttcgttttcatgacattctattaagaaagaaaaagggaggagattagtaacctgggctcgggtgtgaattcttgcttgttctatctccccttgttttctttgtgttgtggcaggatcaggatcttatatgagcgttgctacaaaaggtggcttattttataatattattaaactctgatgtggcgtgcaagagagcattgttcaaagtaggatcggagtacgagtagtgtggtgttttggacattcagtagtgaattcggtcgtcctctctgaaggctgaaggagtgctatacttttcctatattattaattattaattcttgtttttgtaata

SEQ ID NO: 118458 - DNA, 2637 bp, Zea Mays
cgtacagatatatacctatgtgttacaataaaaatgaaacatgataggttgtcatagcagatgttcgcagcagatgatataaataagagatttataccgtgataaataaaaaaatatagagaatattatttgtagaatgaagtttaaaatataggatgaaatagttataggaccgtaatccatctgtgggacatcgcatgctgggaccgcgggtgtgggatagggacggatgacaaagcaagagcagaaaaaagaactttcaccatcctccctatcaatacaagattcatctacacaaattataatatactccgtgcgaaggaaagatcaaattagagattcattcgatcaattctgattgtttccttccattccaaaccaccttcaattctgatttctgcgggtgtgggatatcgtccccccttgccattccaaatcctcctctgcaattttctcatggcagctgacgtttccatcccaactcgatccgcgtcaaccgcccgctaattcctcctagttctagtcccctctctcctgcgccgactcatctttttcctcgtgtcactcccctgctgctgctgctgccgggaagatcaaatcccgtcaaaaggccaatgcactttccgtacccctggagacgactctggatttcgggccatggaagtgctcttttcccatgactgggggaaagaaatccctccttttttgaaagcaggctgtgaaaagaaacgaaatcactttgacctgtgatttggttactctaggcctctctaccatttactctgctacctgagtgatgatgcaactgcgcagactgttcgtgttgctgtgaagctccaaaggatcagagttctgtcaagatggcatgcccaagaggaaggacaccatttcccctttgtttctttctgatgatttgcctcatggctcagctgggagcttccaatgttgtactcatggcgaacaacactaccttgtcgttggatgatgtcgaggcaacttttactccagcagtggaaggttcaggtgtaagtggcgttctttatgctgtggaacctaaggatgcatgcagtccattgagagcgaaagcgattcaaggctctgtctcaccttttgcgttgattataagaggcggttgccaatttgatgacaaaattagaaatgcacagaatgctggattcaaggctgctgtagtatataataatgaagataatgacatccttgtttcaatggctggaagctcgcttggtgtccagatatatgcagtgttcatctctaaggcatcaggggaggagctgaagaaatattcaggccaaactgatgcagagttatggataataccaacatatgagaactcagcttggccaatcatggcaatttcattcgtatcactgcttgctatgtctgctatcctagttgcatgtttctttgcgaggagacaccagatcagacgggacagggcaagacttccccgagctcaggagtcccatggaatgagcagtcaattagttaaggcaataccaagccttattttcacaaaagtgcaagaagacaactgtacatcagcaacatgcgccatttgcttggaagactacagtgttggagaaaagataagagtgctaccttgtcgacacaagttccatgcggcttgtgtggacctatggctcacctcatggagaacattctgccctgtatgcaagcgggacgcaagtgctggaacgtcagacccccctgtatcagagtctacccctttgctttcatcatccgccacacgcttgccggaatcaactgtgttggcttccttgcggtctacagcagcagcgtctccccccaggacgatcagccggcatcctttgttgcggtcaatatcccgcaattactctgtttcaggttccagtatccttcgcacccccgactctaggtttgatgcaaactcatctatctgcacaagtggaagcaacttggaccttgcaaatgtaccatccccatggtctggcacttggcaccgtgcgtctgctcactctttgtgcaggggctacttgtccccaccgatcggcatcaggaatacctcagcacatgtctcgcgttctgccaatggatctcccagtcgttacgtaggctcatcacgcatgtcccatggatcttcagggcagcagcatcctcacctgaggcactgcacattgtcaggcccgagcctgttcaccatggtgccccagtcaccgcaacagaaccagttgcagcatggtggatactcggaaacaaatctgtcggctgccgcatcggctcaatcattccgtcagctctacctgcagcattgccctgattctgacacgtcgtctcagtcacttccagggtgctgatctcttgctgcaatattcactgattcttgcgcccatgagaaatcttgcctggtgctgaattgacatgtggattttgagctcgtcagcatagttcaccatgatgataaaaaaaagagaaagaagtttggagtagttttacatgtggaaacaaaactgcttgtaagaagagagaatgtgcagccccagagtgtgagcaattttacatgcttgagtgtacaggggtttggagtagtcttggacttgcttattttgaggcatgtattgcagtcataggttactt

SEQ ID NO: 118459 - DNA, 2451 bp, Zea Mays
cgtacagatatatacctatgtgttacaataaaaatgaaacatgataggttgtcatagcagatgttcgcagcagatgatataaataagagatttataccgtgataaataaaaaaatatagagaatattatttgtagaatgaagtttaaaatataggatgaaatagttataggaccgtaatccatctgtgggacatcgcatgctgggaccgcgggtgtgggatagggacggatgacaaagcaagagcagaaaaaagaactttcaccatcctccctatcaatacaagattcatctacacaaattataatatactccgtgcgaaggaaagatcaaattagagattcattcgatcaattctgattgtttccttccattccaaaccaccttcaattctgatttctgcgggtgtgggatatcgtccccccttgccattccaaatcctcctctgcaattttctcatggcagctgacgtttccatcccaactcgatccgcgtcaaccgcccgctaattcctcctagttctagtcccctctctcctgcgccgactcatctttttcctcgtgtcactcccctgctgctgctgctgccgggaagatcaaatcccgtcaaaaggctccaaaggatcagagttctgtcaagatggcatgcccaagaggaaggacaccatttcccctttgtttctttctgatgatttgcctcatggctcagctgggagcttccaatgttgtactcatggcgaacaacactaccttgtcgttggatgatgtcgaggcaacttttactccagcagtggaaggttcaggtgtaagtggcgttctttatgctgtggaacctaaggatgcatgcagtccattgagagcgaaagcgattcaaggctctgtctcaccttttgcgttgattataagaggcggttgccaatttgatgacaaaattagaaatgcacagaatgctggattcaaggctgctgtagtatataataatgaagataatgacatccttgtttcaatggctggaagctcgcttggtgtccagatatatgcagtgttcatctctaaggcatcaggggaggagctgaagaaatattcaggccaaactgatgcagagttatggataataccaacatatgagaactcagcttggccaatcatggcaatttcattcgtatcactgcttgctatgtctgctatcctagttgcatgtttctttgcgaggagacaccagatcagacgggacagggcaagacttccccgagctcaggagtcccatggaatgagcagtcaattagttaaggcaataccaagccttattttcacaaaagtgcaagaagacaactgtacatcagcaacatgcgccatttgcttggaagactacagtgttggagaaaagataagagtgctaccttgtcgacacaagttccatgcggcttgtgtggacctatggctcacctcatggagaacattctgccctgtatgcaagcgggacgcaagtgctggaacgtcagacccccctgtatcagagtctacccctttgctttcatcatccgccacacgcttgccggaatcaactgtgttggcttccttgcggtctacagcagcagcgtctccccccaggacgatcagccggcatcctttgttgcggtcaatatcccgcaattactctgtttcaggttccagtatccttcgcacccccgactctaggtttgatgcaaactcatctatctgcacaagtggaagcaacttggaccttgcaaatgtaccatccccatggtctggcacttggcaccgtgcgtctgctcactctttgtgcaggggctacttgtccccaccgatcggcatcaggaatacctcagcacatgtctcgcgttctgccaatggatctcccagtcgttacgtaggctcatcacgcatgtcccatggatcttcagggcagcagcatcctcacctgaggcactgcacattgtcaggcccgagcctgttcaccatggtgccccagtcaccgcaacagaaccagttgcagcatggtggatactcggaaacaaatctgtcggctgccgcatcggctcaatcattccgtcagctctacctgcagcattgccctgattctgacacgtcgtctcagtcacttccagggtgctgatctcttgctgcaatattcactgattcttgcgcccatgagaaatcttgcctggtgctgaattgacatgtggattttgagctcgtcagcatagttcaccatgatgataaaaaaaagagaaagaagtttggagtagttttacatgtggaaacaaaactgcttgtaagaagagagaatgtgcagccccagagtgtgagcaattttacatgcttgagtgtacaggggtttggagtagtcttggacttgcttattttgaggcatgtattgcagtcataggttacttctgctcaatagtttatgtgttgcctctgtctggtttc

SEQ ID NO: 118460 - DNA, 852 bp, Zea Mays
cctcgctcctcatccaaattatccaatccactcgattccgattggcaactacccttcaccccgcgcgcgcaaccgctagctcctgccgccaagcgcaaccggacgaccgccgccctccctacgccaggaggtgcccaggtgtaggtccttcgccggcgacgaacacccacaagagcaaccgcaagggcatgtgacaagctgccgcctgcctttgccgcaggcaatgtgctccgacatgtcgggtcagcgccaccaccacgcaaccagcagggagaatgcaccggaagataatggttaccatcgcactccccatggtgcggatcatctcgagcagagccaggctgcagatacagataataagcatataaatcatctgtccacagatgacaatgttccctccagtgcttcaggccacaaacatggtgctatcagccgccatccatctacatcttctgttgatgatcgctccatcaagtccggtgatgattctgatggggccgagagtaccagtggcagaagcagtaatacagagatctcatttatgaataatgataccatctggataccacctcaagcggcagataaggaggatgaggcccagagttttgctacgagcattgcttatgacgacgacgatgacgattatagtgatggtataaagtggggccagtcaagtttcccatcccctggtaagcagcatgacgccgacactagcaatcatagggaggaacgagaaaaggcaatgctagaagctatgaatggccagctgaaggtacttgtcagtcggtttctcgcatctgctggcattccatcttccaacgaagagggtagcgatagctggcttgatattgt

SEQ ID NO: 118461 - DNA, 4188 bp, Zea Mays
ataataccttctattttctatgcctctaacaatcaggaaaaggacctgttggagagagctattggtaaaatgatggagatatgcagtcccaatgttgttctggtcgagaaaactgtttcacgaaacattcaagaacttcttctgaaagaaggtgtcactctaattctcgatatgaaactcaaccggctacaaagaattgcacgctgtacaggctctcccataatttcgttttcagaagttttggataaaccaaagctgaagcaatgtgactactttcatatcgaaaaatttatcgaggagcacaacaacgccagtgagggtggaaagatgccatctaaaacattaatgttcttggaaggctttccacgtccactcggttgcacgatactgctaaaaggagcaaacagtgaagaattgaagaaagtcaaacaagtaatgcattttacggtctttgcagcatatcacttgatccttgaaacatctttctttgaagatcaaagggtttttctaaatgataaaagtacccccaaagaaatttctgttactgctacagaaggggcatcaccaactgcttatgatgttgctgctcttagtggtgctatccctagctttccttcacatggtgaccctccagcacttagactattccatgccacttctaatagctatgctgatgtgaacaaacctttgacatatccagaaaatggggatgcattcagttcagtatccagcagctctgcaaatgaccttgaacaaggtacaagtatcaggcccaataatgctgagaggttaacatcactagtccaagggccactaagaaaactgttcactgacatgttacgtcaccagaatatttacttacctgttacatcattgcaagaggcaaatgatattagtaaggaagtcagggctgaatcaagtcaagaaactgttattaatggtttccataggccagagatagaagagtctgtggtttcaattgaaaatggagattccataaatgatgcccagaaacaagaaattgctcaagcaataatgccaagaggttcttctgcaaatgataaagatgcagaatcgtctgttatgggagacaatggggcacatagtacaagtatcattatcaaagagaaatatgtcgatgatgatcaagctgatgatgcacttgattctcacagcatactgattttgatgtctagccagtgcccggaaaagcaggttatctgtgagcaaagtcatttaacccgtataaaatactacgggagttttgatgtgtccttgggcagatatttgcaagatattctgcagaatcagaaactgagttgctcctcatgtggagagcctccagagtcgcacatgtactcttacacgcaccgcaatggaaatttgaccgttctagtgaaacatctggtgccccaacaccatttgcctggtgaatctgaaggaaaagtatggatgtggactaggtgctcaagatgtgatcatgaacatggggtatccaaaccaactccaagagtactaatatcagctgaagcgcgtaacctctcgtttgggaaattcctggaactcagtttttcgagccactctgcagcaagaaggctgggctctaaagttgctatgtttcggtactcatctgttgagatctacactacctgcaaaccacaacctactctccagttcgtcaaccccatcagacaggattggtttgaaggacaaaggaggaatgttcatgctaaaggtatggcgcttttctctggggttgcaagatttctacagaacttgaagaatgaacatcctgatgcaataacgttagcaatccattgtggccttgcattccctgttaaggacttcactgaactagaagagttgttgataaaagaaaaggcccagtttgagagttctgtggacaaggccactgatcaaaatggggtaccaacctcttctgtgcatgaactgttgaatataaattggtactatcaggaccttctacttgagctttacatttgggaccgccgtctacatcaattattctattgtaaatctgtcaaactagaaagtgtttctaattacaagaatcttgctgatactgttgatgggatctgtggtgataaattcggtgttgataagaaaattgatgaatttacatatgatgaaactacggcagctttgggggtagccagtaccacagaacctgcaagtaacaaacttgaccatcaatcaggggatgctgcagcatccttacttgatgaaagccaggaagctgggcactcagaaattccttgcaatggaggtagtaaagctgagaaatcttccattgctcatggtcaaataaaggtagatggcacaacaaaaaccggaaatgatccttgcttcgaaatatccaatgataagaaggtccaggtcaatcttacagtagcagatccaatatctatggaacaggagcgttgtagcactctccaacagttcaaatatccttattgggatgacagggaaaggtggatttggaattcaatttctgagtcacaattggcttacaggaatgacattcaaattggatatttggaaaaattcgaactcattaacaattatttgccacattaccttcctcccttgtttgaacaacatgatgatgcggactctccgcatttcgcggtaggtcctggtggtaatattctgtgcataatggaagatgagatatccagcataatagctcgtgctcttgccatatctgacgaacgccgccatttgatagatttaaaatttgagaatggaatggattactccaagggagagcatgctaaagcaatggagaaatcctatagttttctgtctgaaaattctttcacctcatcaccatggtcatctacagattctgaagcaagcttgtcatctctgtcttcattttcatcattttcatctgatgacttttctggttatgatagctcttctttattgtcctcgatgcatccagaaatgactgtgaacgggaaaataactctgaaaggcaaatattcagtcactgttgtatatgacaatcaattctttgcactccgaaaaaagtgttgcccatccgagcttgcatatattacttccttaagccgctgcaagaagtggaatgctcaaggtggaaagagcaaggcctattttgcaaagacaacagatgacaggttcatcataaagcaaatcaagaaaacagagttcgattcatttattaaatttgcacctgattactttaggcatgtttaccattctctggacactggaagccaaacttgccttgccaagatattaggaatatatcaggttaagcagattagacatggcaaagaggtaaagatcgacttgatggtgatggaaaatcttctctttggccacaatatttcacgaatttatgatctcaaaggtgttactttttcgcgacgcgtcactgactcaaatgatcatgatactgtttacctggaccaaaattatgttgaggacatgggtttttctccaatctatattggtggaagaacaaagcatcttttgcagcgtgcaatatggaatgacacgtctttcctcacttcggtgaatgtcatggactattctctacttgtcggagtggacaaagagaagcatgaacttgtgtttggcatcattgattatctgaggcaatatacttgggacaaacaattggaaacatgggtgaagacttctctggtagtacccaagaatgtttcaccaactgtaatttcccccaaggaatacaaaaaaaggtttaggaagttcatggcaaagtacttcctgtcagttccagacacatggagctctgataattcatctaatccatgcaaatcctttggtcagagcaatcacaagttagcggaagtccacaatggtgatagcctgcttcagcacccaaatgaagctgaggggtgtgtctaatcacgtgcaggacttcctggcattttttaagcctatcccattgttgtttggcttttcactttgtaaaatggtgtacattggaggacctcactgttgatctatccaaaagtttgtgtttttaggcaaattgttggacaagtggggtccacaggacatgtacctatacaaatgttcattgttaatttcacaattattatagtgaaattaagaatttgtatgatcattttttggacctatcacttgtgtgactgaagctgtctattcttc

SEQ ID NO: 118462 - DNA, 985 bp, Zea Mays
cattttcatgaagcccagtaagggaagggagagccgattcatttgcatttttctgagcagatgcagatcgatcccgagttccgctgactgcagaggagagagatctagagcgagggagggagggaaatgggccacgaggctgcggcgccggggtcgtcggtgctcggccgcgcggtggaggaggtgcgctcggccctcaacgagcacgccgacgtggttgccgacctcttcggtcgcgtctcctccgaagtgcgcaccggcttcgcgcccgccgtcgactccttcgttggcttcttccacgccgtcgactggaagtttctggtgtattccttgctgagagattaaatacgttcctggcgcaaaactggaagagcttctctacccaaaactattttgatccccagggccttttcatttcggtcatctggtctggccctctcctcctgataacgatccttattctggtgaacactctcgtgacgctctgcacgctaatggtaaggtggaaaagggcagagctcaggcatcgcgctcggcaagctcgtgacaagcaggactgatctgaaacctgcgtctatgtatcattcggtggcaagtagaaagtcgtgttcttgctacggttggtctaaccaagaatcacatccctggaaacggtgcccatttcattaggtagcagaatataacgttaagatggtcagattttgctcttgtggacccttttggtgcccggatagccatttactacgctgcaatattatcacgtcacgcgatttctttgggcgaggacactaggcctgtgataatgatgtgtccatttgttcgatgctgaacctctgaacctcggaaccggttgatagttgttgttttcctagctgtgtcgggtcgggtgcagcatgctctgattgttgattacctcaagaataattcgttggactgctgaattttagccatctttacagatgttccgatctgaaactgtcgctcg

SEQ ID NO: 118463 - DNA, 1345 bp, Zea Mays
cattttcatgaagcccagtaagggaagggagagccgattcatttgcatttttctgagcagatgcagatcgatcccgagttccgctgactgcagaggagagagatctagagcgagggagggagggaaatgggccacgaggctgcggcgccggggtcgtcggtgctcggccgcgcggtggaggaggtgcgctcggccctcaacgagcacgccgacgtggttgccgacctcttcggtcgcgtctcctccgaagtgcgcaccggcttcgcgcccgccgtcgactccttcgttggcttcttccacgccgtcgactggaaggagccttggctgatcagcatactatctttccatgccattctgctactggttaccatcatctcgaggaggaatatcaatttccagctcatcttgtcagctctaacattttctggtgtattccttgctgagagattaaatacgttcctggcgcaaaactggaagagcttctctacccaaaactattttgatccccagggccttttcatttcggtcatctggtctggccctctcctcctgataacgatccttattctggtgaacactctcgtgacgctctgcacgctaatggtaaggtggaaaagggcagagctcaggcatcgcgctcggcaagctcgtgacaagcaggactgatctgaaacctgcgtctatgtatcattcggtggcaagtagaaagtcgtgttcttgctacggttggtctaaccaagaatcacatccctggaaacggtgcccatttcattaggtagcagaatataacgttaagatggtcagattttgctcttgtggacccttttggtgcccggatagccatttactacgctgcaatattatcacgtcacgcgatttctttgggcgaggacactaggcctgtgataatgatgtgtccatttgttcgatgctgaacctctgaacctcggaaccggttgatagttgttgttttcctagctgtgtcgggtcgggtgcagcatgctctgattgttgattacctcaagaataattcgttggactgctgaattttagccatctttacagatgttccgatctgaaactgtcgctcgaatttcactgcatctggtgtcggtgtgcaagctattcctgatgtttgtgggcacttgaaaatgttctctggttgtactatggactgaatgatgcatggcatccgttgtcagcttcgtgtgtgaaagggggatgctttcttgttttgccagagttgcaagagaggtacacattcgcaatccgtgtgtttggttgcccgtgtcgcctggtgcatggcccatgggatgcagaaataaaacaaactcattgtttggtt

SEQ ID NO: 118464 - DNA, 526 bp, Zea Mays
atatcatatatatctatactatacttaaagcaccggttttaacggtcgtcatgcgtcattttttacaaataatctctcacagctatttcaaattaatctgttgcacgtctatagatgtcaaacgacgtccgacacgggctagatacacgcgggccacaactatagcacaggcacgtcatgccagtctgctaactgtatcgggccagcccgttaacccgtcgatccatttaattaaatcagtgtaacgacgcccgacacgggctagatgcacgcgggccacaactatggcacagacacttcatgccggccttctaactgtgtcgggccagcccgttagctcgtcgatccatttaattaaatcagcgtaactcatgccctgatagaagaagggcaggagacactaagtgaaattgtctaaccactagaacatcacactaagatatttttaatattgaatataaattatatataggtatatacgtttttttgtaaaataaaaaataatcgtgtcgggccggaccagcac

SEQ ID NO: 118465 - DNA, 345 bp, Zea Mays
atggcggaggtcatgcacttgcgatgggatgtgagccgatggtggttttgtgcgctggatggcgacgagggaattgggttgcgattccttccatggcgaggcgtggattgtgtttggggcacagaggatatgggcggggcatccgcggttcatggaagaacgattgggcggggtggtcctgcgcgtcgtcggcgatgggattcctgcatgttagattgttgcgaggcgtggatagcggtgaggggatgtgtttccttctatggcagtgacatgatttttccttacatggccgaggcattgatcgatgaggggtttgcggcgaggaccatgcggatgcaggggtag

SEQ ID NO: 118466 - DNA, 2226 bp, Zea Mays
cgccaacagcgcttgtctcgcccggtcgccccctctcgcgcgcggtccttgatggcccgtgcccgtttcctcctacacctgctcgtcctctccgccgcttgcgtctccaccaatgccgccgccaccgggttcagcttctcccggttcgtgagcgcggaccgcggcgccaacgtgacggtgctgggcgacgccaacatcgaccagggcgcgctgcagatcacgccggactcgctcaacgacgccgccacctacctcacccacaagtccggccgtgtgctgtacgccaccccgttcaggctctggcaccgcgaggaggccggtggccgtcacggcagcagcagcaagctggccaacaccaccgccgggggcaagagggtggcgtccttcagcaccgtcttcacagtcaacgtgttccggcccaacggcacggagcccgcggaagggctggcgttcgtgatcgcgccgtccgcggagggcccccccgcggggagctccggcggctacctcggcctcaccaacgcgtccaccgacggcgacgccgccaaccggatcgtcgccgtggagctcgacaccgagaagcagccgtatgacccggacgccaaccacgtcgggctcaacgtccacagcgtcgtctccgtcgccaccgcctcgctcacgccgctcggcgtccagatctcgcccgccgcccccgccaccaagtacgacgtctgggtcgactacgacggcgccgcgcgccgcgtcgccgtgcgcgtggccgtggcggggaccgcgaagcccccgcgcccggtcctcgccgcgccgctcgacctcggggcggccgtggccgagtggtcctacttcgggtttgccgcgtcgaccggacgcaagtaccagctcaactgcgtcctggcgtggaacatgacgctggagaagctcccgtccggcgacgacggcggtggcaggaggcgggcgctcgggctcgccgtgggcgtcgccgtcggagtggccgtgggcgtggccgcggtggccgtcgtcctggcgtacgtgtgcgtggcgaagcgacggaaggcgcgcagcggcgaaggcagcggcagcgccatcaccggcaccatgatccggagcctggccggcgggccgcgcgagttcgagtatcgcgagatccgcagggccaccaacaacttcgacgacaggatgaagctggggcagggcgggtacggggtcgtgtaccggggcgtcgtggtcggcgaccacaccagccccggtggcgtcggcagcgccgtcgatgtggccgtcaagaagttctcccgcgccagcacgcagggccagaacgacttcctcgccgagctcagcatcatcaaccgcctccgccacaagcacctcgtccgcctcgtcgggtggagccacgacaatggcgagttgctgctggtgtacgagttcatgccgaacgggagcctggaccagcacctgttcacgccggcggcggggcggcagctgctggggtgggagctccggtacaacatcgtcaagggcgtggcgtcggcgctgcactacctgcacgacgagtacgaccagcgcgtggtgcaccgggacctcaaggcctccaacatcatgctggacgccgccttcagcgcgcgcctgggcgacttcggcctggcgcgcgccatcgagaccgacaagacctcgtacatggaggaggccggcggcggcgtgcacggcaccgtcgggtacatcgcgcccgagtgcttccacaccgagaaggcgacgcgcgagtccgacgtctacgcgttcggcgccgtcgtgctcgaggtggtgtgcggccgccgcccacgctgcgacatcgagggcttccacttcctggtcgactgggtctggcgcctccaccgcgacggccgcgcgctggaggccgtcgacgcccgcctcgacggcgcgttcgacgccgcccaggcggagcggctcatcctgctgggcctcgcgtgcagccacccgaccccagccgagcggcccaagacgccggccatccagcagatcctgctcgggtccatgccgccgccgccggtgccgccgttcaagccgtccttcgtgtggccggccaccgacgcgggggcggggctggacaccatgtcgaccacggcgggcaccaccacgagccagctcagcttgacgtcggcgtcgacgtggagcggcagcttcatgaaaggcagcctgaggcacgcgttcgagcaagaagccaccgattccttggcgtag

SEQ ID NO: 118467 - DNA, 2200 bp, Zea Mays
cgctgatgccttccttagcttcttctctgcgtcggccatcatggagccctggtcttctcctctaactccggtggtcgactctccgttcttctcggttgtccctgtatctctaactcccacaatgtaagttctctttgataaatatcctaggttcacctctccagtagcaagccccatcgtctagatttttttctatttgcccagccatctcctatctgtgcacgtactcaagaagttcactcacgtcagctgatccttatcatcctgtgagcgtgcatgggaagcctcactctgtatattattctaccagccatcctcatctcttcctcactagagcacattattctctggaatatctcaccacgccagctcctgggacgcgcgtccatctactgcgctcggttccctggaaaatcttcaccactcggcctctctgtcacgtattccttcagcctgggatttttcctgacatcgttctcatccgcgcgggtggggtgggaacaaaatttgccgccgttcagggaaaaatctcgccaccgccccctgttctttttatatgcgcacacacggtggtcttcctgctcgcctggctgcgcgtccaggagctcccatcgtggcgcagcttcttcccaagccgcgctccacctccgatggcgcttggccgcccagctctcccgctgtccgcccgcctggcgcccagaccatggccgcggctctcctccagctcgccctcaagccccagcccggatcttcccgttcctggccgcgcccctggtccctgccatggcggccgttccctggtcggagtggatcctcagctcggaggcttcctcgagctcgaccgcccacctccctgctcggtccctgctccagcgcctgttccagctccagtacgccgagttcctcgctgtctgcgccatggagctcgcaccgacgaccgtcagttggtcctcctctagccgcgcgtggtgcgcgctctccctggctcatgtgcccaacgccgtcggctctagtctctcgctcggggtggttccgtcgtcttcctcaggctcgacacgccggtccgacagccgccatcccctgcttggtcatggtacctagccgtcgcgcccctggctcggctctgctcgcccctgtgctgtcgctcagctcgctgtggagcttgtccaccatggtactctgcattctgctgcgctccagaccatcggatcctgcgctcaccccggccgcgacctcgtcgtcgttcctcagctcgcgggtgccgttgtttcgtgtgcttggccatcagcgttcaacggccgtcacgacatccccagtctatcgcgtcatgctccggtcgtcgatcggctgaccgtcgtcgtcgtgttctctgcttccctcgtcggtcaacctcgccgcggctaagtccatccgccgtgctatgtgctgtggtctctggtcgagggacatcaatactctatgtcccttgctcacctccctggtcgtgctcgccgggacactattctctagccaactaccgtcggtggaagccctgccatcgatatcgcatgatattggttgtcttcttcgaccacgtcattgcctcacaggatttggacaccttgtcgacactcgaccacgtgttcgctcgttaccacgccatcttcagcatcatggttctataagactccgcgcactcatcggcacccggctgtcaatctccaccacgcagcgctgcatcggacttaccctgtatgatgttcgacgacaagcccaaaccagaatttatcaatattctcacaagtattgagtcacgtttgaatgctggtacaataattaatcacgtgatgcggaggaaaagagccaagtcgaccccaagcgtgggctaatccgcaggatgatgctgatggacgaaccggaagatggataatctgaacgagtgtcaagccaaaggatgctcgccaagtggtcgcctaacaaacactaacctagtgttactcaggcaagccccgtaaggattggatgcgtatgtaggcctgttgatcaaggactatcttaactggccacatgccctggaaatgggacagggtaagcttgaacccggctattccatacgtgaaaagacaaccgcgcactgggcgtgggagatggtgggagtagcgtgtaccctcctggctagaggctggatggaggagtacgatgctcccgggtagcgcagacc

SEQ ID NO: 118468 - DNA, 2200 bp, Zea Mays
cgctgatgccttccttagcttcttctctgcgtcggccatcatggagccctggtcttctcctctaactccggtggtcgactctccgttcttctcggttgtccctgtatctctaactcccacaatgtaagttctctttgataaatatcctaggttcacctctccagtagcaagccccatcgtctagatttttttctatttgcccagccatctcctatctgtgcacgtactcaagaagttcactcacgtcagctgatccttatcatcctgtgagcgtgcatgggaagcctcactctgtatattattctaccagccatcctcatctcttcctcactagagcacattattctctggaatatctcaccacgccagctcctgggacgcgcgtccatctactgcgctcggttccctggaaaatcttcaccactcggcctctctgtcacgtattccttcagcctgggatttttcctgacatcgttctcatccgcgcgggtggggtgggaacaaaatttgccgccgttcagggaaaaatctcgccaccgccccctgttctttttatatgcgcacacacggtggtcttcctgctcgcctggctgcgcgtccaggagctcccatcgtggcgcagcttcttcccaagccgcgctccacctccgatggcgcttggccgcccagctctcccgctgtccgcccgcctggcgcccagaccatggccgcggctctcctccagctcgccctcaagccccagcccggatcttcccgttcctggccgcgcccctggtccctgccatggcggccgttccctggtcggagtggatcctcagctcggaggcttcctcgagctcgaccgcccacctccctgctcggtccctgctccagcgcctgttccagctccagtacgccgagttcctcgctgtctgcgccatggagctcgcaccgacgaccgtcagttggtcctcctctagccgcgcgtggtgcgcgctctccctggctcatgtgcccaacgccgtcggctctagtctctcgctcggggtggttccgtcgtcttcctcaggctcgacacgccggtccgacagccgccatcccctgcttggtcatggtacctagccgtcgcgcccctggctcggctctgctcgcccctgtgctgtcgctcagctcgctgtggagcttgtccaccatggtactctgcattctgctgcgctccagaccatcggatcctgcgctcaccccggccgcgacctcgtcgtcgttcctcagctcgcgggtgccgttgtttcgtgtgcttggccatcagcgttcaacggccgtcacgacatccccagtctatcgcgtcatgctccggtcgtcgatcggctgaccgtcgtcgtcgtgttctctgcttccctcgtcggtcaacctcgccgcggctaagtccatccgccgtgctatgtgctgtggtctctggtcgagggacatcaatactctatgtcccttgctcacctccctggtcgtgctcgccgggacactattctctagccaactaccgtcggtggaagccctgccatcgatatcgcatgatattggttgtcttcttcgaccacgtcattgcctcacaggatttggacaccttgtcgacactcgaccacgtgttcgctcgttaccacgccatcttcagcatcatggttctataagactccgcgcactcatcggcacccggctgtcaatctccaccacgcagcgctgcatcggacttaccctgtatgatgttcgacgacaagcccaaaccagaatttatcaatattctcacaagtattgagtcacgtttgaatgctggtacaataattaatcacgtgatgcggaggaaaagagccaagtcgaccccaagcgtgggctaatccgcaggatgatgctgatagacgaaccggaagatggataatctgaacgagtgtcaagccaaaggatgctcgccaagtggtcgcctaacaaacactaacctagtgttactcaggcaagccccgtaaggattggatgcgtatgtaggcctgttgatcaaggactatcttaactggccacatgccctggaaatgggacagggtaagcttgaacccggctattctatacgtgaaaagacaaccgcgcactgggcgtgggagatggtgggagtagcgtgtaccctcctggctagaggctggatggaggagtactgtgctcccgggtagcgcagacc

SEQ ID NO: 118469 - DNA, 2335 bp, Zea Mays
tttctttctttcttttatgcccgtctccttttcttaatcttttttcccctgacgagcgttcgagcgcgcgaagccctgggcctgcgcgtatcttcctgcagggtttcatttcgtcctcccggcccctccctctctttattagctttcctaatgatttcctctggcctcagctcgagctcgctcgtgcgtgggccaatataatcctccacaaatcccaccccgcctctcatcacggcctcccctcccctggtactatacgcgtgttccgccgcgagctccattagcgcggctagctcccatgctcatcgctttcgctgacctttgagagccatattctgttcctcctcctcctcctcctccttcagttggtagcgctcgtcatcattccaggcagcaagatcgcatgacacacagctgaagctcggctttggcgcttcttggtgaccgaagcacgcgcagcatccatccgccatggagagtgccggcggacgaccagaggcggcggcggcggcggtgctcaaggtcaagggaagagacgccggaagaagaccgaacggggctcactcgtcttcttcctgcctgcaacaccgacactccagaagaacaacgagcgcgtcgtacgtaaatgctcccgacgtgtcgccgcgactctccgccggtcacatacctgcggccatcagtcgcagtgaggtgctcgacgacacaaggcgttcgctcgacctccctgaccagtttcccgagcatcgcgtcgccgcagccacagagagagctgaaagaagcggttcgaagtctgccgcggacctggcctgggagatagccgtcctggaggagcaagtcgtccgcaaggagctgcacctgctgtccctgtacagagccgcgttcgaccagtacctcggcgtctcccctcgcgcgtctgctcaggaaccgcgccatgagcgcagcagcagaagggctactgctgctgacgacgaaggcgcccttcgcctgaggagcatcaaggagtctgcgtcctacagcctaccaacgctctccgattctaaacgcgtagagctctccaggtgctcctcagggcggtccagcctggccaacttcctgagcgcctcgatcgctgagtacgtgcctaagatctcgtgcaagctctcggaggacatactgcggtgcgtctccgccgtctactgcaagctcgcgagcaggccgctgtcgcaggaggaggaggaggcgaggtccgagacgccgccgttcacgccttctctctcggtctcgtccgcgtcgagctccttctccctcaagaagcagcaccccgtccgtggctggagccctcggtgctactacaacgccgacgcgactgcgaccccggacgcgtacgcttcgtccggcgggagcagtgggcggtacagtggggtgatggttttcccagggatacatgtagacgaggagaagtttgagtatgcctgcaaaatgctggacactatcagatcgctgatcaaacggctggagaagattgatcctagaaagatggcacatgaagagcagctctgtttctgggtcaacatccacaatgccttggttatgcatgctttcatggcctatggattacaggaaaaacggatgaaaagcactgacttgattctgaaggctgcatacaatgtgggtgggcattcagtgaactcccaaactatccagaactcgattctaggatgccagtcccaccgcccttcactgtgggttcggacactatttacgccgacgaaaaaatctgggagctccatacatccatatgcgcttcagtacgcagagccaattgcgcactttgcgctctcgaccggcgcgttttcagacccacctgtgaggctgtacacagccaagaaactgtaccatcagctggagcaagccagggccgagttcatccaagcaaatgtcatggtccggaggcagaccatcttcctgcccaaggttctccacttctatgcgaaggatgcttccctggagctacctgaccttgttgacatagtgtgcgagagcatgcctgagctgcagcgaaaagagatcaggcagtatcttaggaggaggatcgacaagtgtgttcagtggttgccctacaagtcttctttcaggtacactgtgcatagcagtttggctgagtaggcacttttttttcttctctatgtgcttgtaaataaggagccatgattctaagaacagtcgtctgttggggtgtgtgtgtgtatgtaaaactatattgtgacagttctttctttcttagaggaaaattacagcttatcttaaatcctctttgtgctttaccacactactacagatttgcagatttcagttg

SEQ ID NO: 118470 - DNA, 2228 bp, Zea Mays
tttctttctttcttttatgcccgtctccttttcttaatcttttttcccctgacgagcgttcgagcgcgcgaagccctgggcctgcgcgtatcttcctgcagggtttcatttcgtcctcccggcccctccctctctttattagctttcctaatgatttcctctggcctcagctcgagctcgctcgtgcgtgggccaatataatcctccacaaatcccaccccgcctctcatcacggcctcccctcccctgttggtagcgctcgtcatcattccaggcagcaagatcgcatgacacacagctgaagctcggctttggcgcttcttggtgaccgaagcacgcgcagcatccatccgccatggagagtgccggcggacgaccagaggcggcggcggcggcggtgctcaaggtcaagggaagagacgccggaagaagaccgaacggggctcactcgtcttcttcctgcctgcaacaccgacactccagaagaacaacgagcgcgtcgtacgtaaatgctcccgacgtgtcgccgcgactctccgccggtcacatacctgcggccatcagtcgcagtgaggtgctcgacgacacaaggcgttcgctcgacctccctgaccagtttcccgagcatcgcgtcgccgcagccacagagagagctgaaagaagcggttcgaagtctgccgcggacctggcctgggagatagccgtcctggaggagcaagtcgtccgcaaggagctgcacctgctgtccctgtacagagccgcgttcgaccagtacctcggcgtctcccctcgcgcgtctgctcaggaaccgcgccatgagcgcagcagcagaagggctactgctgctgacgacgaaggcgcccttcgcctgaggagcatcaaggagtctgcgtcctacagcctaccaacgctctccgattctaaacgcgtacacgcgcaggagctctccaggtgctcctcagggcggtccagcctggccaacttcctgagcgcctcgatcgctgagtacgtgcctaagatctcgtgcaagctctcggaggacatactgcggtgcgtctccgccgtctactgcaagctcgcgagcaggccgctgtcgcaggaggaggaggaggcgaggtccgagacgccgccgttcacgccttctctctcggtctcgtccgcgtcgagctccttctccctcaagaagcagcaccccgtccgtggctggagccctcggtgctactacaacgccgacgcgactgcgaccccggacgcgtacgcttcgtccggcgggagcagtgggcggtacagtggggtgatggttttcccagggatacatgtagacgaggagaagtttgagtatgcctgcaaaatgctggacactatcagatcgctgatcaaacggctggagaagattgatcctagaaagatggcacatgaagagcagctctgtttctgggtcaacatccacaatgccttggttatgcatgctttcatggcctatggattacaggaaaaacggatgaaaagcactgacttgattctgaaggctgcatacaatgtgggtgggcattcagtgaactcccaaactatccagaactcgattctaggatgccagtcccaccgcccttcactgtgggttcggacactatttacgccgacgaaaaaatctgggagctccatacatccatatgcgcttcagtacgcagagccaattgcgcactttgcgctctcgaccggcgcgttttcagacccacctgtgaggctgtacacagccaagaaactgtaccatcagctggagcaagccagggccgagttcatccaagcaaatgtcatggtccggaggcagaccatcttcctgcccaaggttctccacttctatgcgaaggatgcttccctggagctacctgaccttgttgacatagtgtgcgagagcatgcctgagctgcagcgaaaagagatcaggcagtatcttaggaggaggatcgacaagtgtgttcagtggttgccctacaagtcttctttcaggtacactgtgcatagcagtttggctgagtaggcacttttttttcttctctatgtgcttgtaaataaggagccatgattctaagaacagtcgtctgttggggtgtgtgtgtgtatgtaaaactatattgtgacagttctttctttcttagaggaaaattacagcttatcttaaatcctctttgtgctttaccacactactacagatttgcagatttcagttg

SEQ ID NO: 118471 - DNA, 2109 bp, Zea Mays
cgcgtgttccgccgcgagctccattagcgcggctagctcccatgctcatcgctttcgctgacctttgagagccatattctgttcctcctcctcctcctcctccttcagttggtagcgctcgtcatcattccaggcagcaagatcgcatgacacacagctgaagctcggctttggcgcttcttggtgaccgaagcacgcgcagcatccatccgccatggagagtgccggcggacgaccagaggcggcggcggcggcggtgctcaaggtcaagggaagagacgccggaagaagaccgaacggggctcactcgtcttcttcctgcctgcaacaccgacactccagaagaacaacgagcgcgtcgtacgtaaatgctcccgacgtgtcgccgcgactctccgccggtcacatacctgcggccatcagtcgcagtgaggtgctcgacgacacaaggcgttcgctcgacctccctgaccagtttcccgagcatcgcgtcgccgcagccacagagagagctgaaagaagcggttcgaagtctgccgcggacctggcctgggagatagccgtcctggaggagcaagtcgtccgcaaggagctgcacctgctgtccctgtacagagccgcgttcgaccagtacctcggcgtctcccctcgcgcgtctgctcaggaaccgcgccatgagcgcagcagcagaagggctactgctgctgacgacgaaggcgcccttcgcctgaggagcatcaaggagtctgcgtcctacagcctaccaacgctctccgattctaaacgcgtacacgcgcaggagctctccaggtgctcctcagggcggtccagcctggccaacttcctgagcgcctcgatcgctgagtacgtgcctaagatctcgtgcaagctctcggaggacatactgcggtgcgtctccgccgtctactgcaagctcgcgagcaggccgctgtcgcaggaggaggaggaggcgaggtccgagacgccgccgttcacgccttctctctcggtctcgtccgcgtcgagctccttctccctcaagaagcagcaccccgtccgtggctggagccctcggtgctactacaacgccgacgcgactgcgaccccggacgcgtacgcttcgtccggcgggagcagtgggcggtacagtggggtgatggttttcccagggatacatgtagacgaggagaagtttgagtatgcctgcaaaatgctggacactatcaggtggtattttgtgacccagtagatcgctgatcaaacggctggagaagattgatcctagaaagatggcacatgaagagcagctctgtttctgggtcaacatccacaatgccttggttatgcatgctttcatggcctatggattacaggaaaaacggatgaaaagcactgacttgattctgaaggctgcatacaatgtgggtgggcattcagtgaactcccaaactatccagaactcgattctaggatgccagtcccaccgcccttcactgtgggttcggacactatttacgccgacgaaaaaatctgggagctccatacatccatatgcgcttcagtacgcagagccaattgcgcactttgcgctctcgaccggcgcgttttcagacccacctgtgaggctgtacacagccaagaaactgtaccatcagctggagcaagccagggccgagttcatccaagcaaatgtcatggtccggaggcagaccatcttcctgcccaaggttctccacttctatgcgaaggatgcttccctggagctacctgaccttgttgacatagtgtgcgagagcatgcctgagctgcagcgaaaagagatcaggcagtatcttaggaggaggatcgacaagtgtgttcagtggttgccctacaagtcttctttcaggtacactgtgcatagcagtttggctgagtaggcacttttttttcttctctatgtgcttgtaaataaggagccatgattctaagaacagtcgtctgttggggtgtgtgtgtgtatgtaaaactatattgtgacagttctttctttcttagaggaaaattacagcttatcttaaatcctctttgtgctttaccacactactacagatttgcagatttcagttg

SEQ ID NO: 118472 - DNA, 1173 bp, Zea Mays
gctttattaccaatcacattcctggctgttatccatctcttgtgccagcacaatgatgctttgtcatatctagggagaagtgagtaaaagccatgagtgatgattatgcttctcttcttcttttccttcttaatgacgtactgccagtacgtacgtgctgttgtcagggaactgtatccgaattccaaattttgaacatgatttagcaagacagacagagagaaagagaatagttgactagttgtaaacttgtaatgtatggatcatgcctttcattcgatggctactgatcttgcttcgagcgcagtctgccgcggacctggcctgggagatagccgtcctggaggagcaagtcgtccgcaaggagctgcacctgctgtccctgtacagagccgcgttcgaccagtacctcggcgtctcccctcgcgcgtctgctcaggaaccgcgccatgagcgcagcagcagaagggctactgctgctgacgacgaaggcgcccttcgcctgaggagcatcaaggagtctgcgtcctacagcctaccaacgctctccgattctaaacgcgtagtatgagcagcgtctcttctctccgaccaatccttccacctttggctctgtttctactaccagctggttcttgagtgttgactgttgacgacagaaaccatctgatctaacacacggctcttggtggtgttctgctgaagcacgcgcaggagctctccaggtgctcctcagggcggtccagcctggccaacttcctgagcgcctcgatcgctgagtacgtgcctaagatctcgtgcaagctctcggaggacatactgcggtgcgtctccgccgtctactgcaagctcgcgagcaggccgctgtcgcaggaggaggaggaggcgaggtccgagacgccgccgttcacgccttctctctcggtctcgtccgcgtcgagctccttctccctcaagaagcagcaccccgtccgtggctggagccctcggtgctactacaacgccgacgcgactgcgaccccggacgcgtacgcttcgtccggcgggagcagtgggcggtacagtggggtgatggttttcccagggatacatgtagacgaggagaagtttgagtatgcctgcaaaatgctggacactatcaggtaagcaaccatgcaaaaaaaaaaaaaaaga

SEQ ID NO: 118473 - DNA, 1819 bp, Zea Mays
atctcttgtgccagcacaatgatgctttgtcatatctagggagaagtgagtaaaagccatgagtgatgattatgcttctcttcttcttttccttcttaatgacgtactgccagtacgtacgtgctgttgtcagggaactgtatccgaattccaaattttgaacatgatttagcaagacagacagagagaaagagaatagttgactagttgtaaacttgtaatgtatggatcatgcctttcattcgatggctactgatcttgcttcgagcgcagtctgccgcggacctggcctgggagatagccgtcctggaggagcaagtcgtccgcaaggagctgcacctgctgtccctgtacagagccgcgttcgaccagtacctcggcgtctcccctcgcgcgtctgctcaggaaccgcgccatgagcgcagcagcagaagggctactgctgctgacgacgaaggcgcccttcgcctgaggagcatcaaggagtctgcgtcctacagcctaccaacgctctccgattctaaacgcgtagagctctccaggtgctcctcagggcggtccagcctggccaacttcctgagcgcctcgatcgctgagtacgtgcctaagatctcgtgcaagctctcggaggacatactgcggtgcgtctccgccgtctactgcaagctcgcgagcaggccgctgtcgcaggaggaggaggaggcgaggtccgagacgccgccgttcacgccttctctctcggtctcgtccgcgtcgagctccttctccctcaagaagcagcaccccgtccgtggctggagccctcggtgctactacaacgccgacgcgactgcgaccccggacgcgtacgcttcgtccggcgggagcagtgggcggtacagtggggtgatggttttcccagggatacatgtagacgaggagaagtttgagtatgcctgcaaaatgctggacactatcagatcgctgatcaaacggctggagaagattgatcctagaaagatggcacatgaagagcagctctgtttctgggtcaacatccacaatgccttggttatgcatgctttcatggcctatggattacaggaaaaacggatgaaaagcactgacttgattctgaaggctgcatacaatgtgggtgggcattcagtgaactcccaaactatccagaactcgattctaggatgccagtcccaccgcccttcactgtgggttcggacactatttacgccgacgaaaaaatctgggagctccatacatccatatgcgcttcagtacgcagagccaattgcgcactttgcgctctcgaccggcgcgttttcagacccacctgtgaggctgtacacagccaagaaactgtaccatcagctggagcaagccagggccgagttcatccaagcaaatgtcatggtccggaggcagaccatcttcctgcccaaggttctccacttctatgcgaaggatgcttccctggagctacctgaccttgttgacatagtgtgcgagagcatgcctgagctgcagcgaaaagagatcaggcagtatcttaggaggaggatcgacaagtgtgttcagtggttgccctacaagtcttctttcaggtacactgtgcatagcagtttggctgagtaggcacttttttttcttctctatgtgcttgtaaataaggagccatgattctaagaacagtcgtctgttggggtgtgtgtgtgtatgtaaaactatattgtgacagttctttctttcttagaggaaaattacagcttatcttaaatcctctttgtgctttaccacactactacagatttgcagatttcagttg

SEQ ID NO: 118474 - DNA, 256 bp, Zea Mays
ttggtaagcaattcatttgattattgttccattagaaatttatagtttttcgtgtatgtaacctctgtttcttcttaggtacaccggaattcatggcaccagaactctatgacgaggaatataatgagcttgtagacatctatgcttttgggatgtgtttactggagcttgttacatttgagtacccatattgtgaatgttcaaatgcagcacagatatatagaaaagtatctgatgttagtttacttgtccatcc

SEQ ID NO: 118475 - DNA, 2612 bp, Zea Mays
cagaaccctgccaaagggacccctaatctgatgtgcacctgagttcgaagccggacccctaatctgatgtgcacctgagttcgaagccgaattcacgactgcaattgcaaaaccctagctaccgcttcgccgaattccctgtcctccgcccgcttcgccgaattccctgtcctccgcccgcttcgccgaatttcctctcctccccgcccgccgcccgtcaccgcggcttcgtctgcgcttgtccctcccgttccaaggagcacgtgcttctcgccgcgccgttcgcccgccgccgccgccaccggttcatcgccagctatgtcttctcaggtcgacagccgcagccagtccgccgggaagcgcgcgcgcaccgacggcagccggcgtgaggacgactgggtttgccccagctgcaagaacgttaacttcgcctttcgcaccacttgcaacatgcgcaactgcaaccagtccaggccagcagatcacacgaaggccatgcagaccccgcctcgctatcccacatcaggaggttacatgagcccagggacgccaccgtcgatgtaccttggtggtggtgctcccccatatggctcttcaatgtttaacgggcctgcaatgacgcgctatggtatcacacagttccctgggggttctgcgtatccatatggatatggtggccgcatatcaatggggagcccctacgggccaatgcaaatggctgggccaaccgcatactctggtggatctatgatgggagcaggtggaatgtatggaatgcccatggacaggtatgggctaatacctgctggttctggtccaatgggcacgagagctggctcatattctgatgaagattctcagaagaagtctgcaggagctggccgtgataatgattgggagtgtccaaattgccacaacatcaactttggcttccgcacagtctgtaatatgagaaagtgcaacacacctagacctgaaaaccagggatctaagcctgatggtttaagagggtcaaaaccaaagacaccagagggcagttggaagtgtgagcagtgcaataacataaactatcctttccgaacgaaatgcaatcgtccccaatgtggagcagaaaagccatcacagacgaacaatgcaaatgaatcagcggaagatcaggacaatcagtgagtcctagaacagtaatgagggtcaagaaggtccagcgtcgtcgtcaaggttcagtctgaatgtggggtacatctgtgtcagtagtcgccgttacaagtttcttccccttgagaacttagttgagtcggggccttggagttggcaatggagtcttgccttccttaatcactgcggataatggtcaagaacatcaatttgttatgtggtttgtcaagaacatccatcttgcctttcctggctgaacttggttacttgtctttgttactggtactctggataaattaccatatgttatatgaatgtcttttatatgtgtcatagaatatcactcatctgttatgaagtatcacaactgtcaccattttgttttggttttgttctggtcattgttttcaatttatggttggtttggtatttttacaggttctttctgaatggttgtgatggcaacctttctttccttccaaagtagttttcttagagatgtttgcaactttccctggtagcaatagttaggtcttaagttgacagctgacatcttggttgcataactgcatatgttactgttatcatcttccatgttgtctggagctttagctgttcaagtatcaccattcagtgttttggttagaagagatgctccttggtgaagtgacgtgcatctcattttgcagtggtagtagactaatcaccctgcatgcttgtctctaatgcaactacttcactgacttggtgccattggacttagttttcgtcatgtaaaattacaaagctttttatcgaagctacgacttctgcgtgagtttcaagacagcagtgagcaggcagatggatcttccttgtcctgctgctggagcactgacacagtgacactgcggattggcagcagtccagtgagtttcaggacagtcttacaaactgatgtggctaccatttcgcatcggaaaacaaggtgaggaatttgcttatagtgtctcgagcgtcttgagtcttgccagatctgatttggaaattcgatatggtgttgagcattgtgatagtcagagtcaggatcttttaatgtagccatttcagtatttgctcggagtgatgcttgtcttatttttattcttcctttattctttttttcattatgttctgtgtctagcactgttatttctcatcctaccttaatgtaaatttcgtcttctcatttcgcctattttttttttcttgtagcatatccttttcttacaatttgtcattgctcttgagttaatttaaatcaagagtcctcttgttttgtctttttttttatgtttcttgatttgttgctgacggtatggtgttgtccaaagcacgaagaaacgggagattttgcgttggaggaggcgtttcctcgcgtgggcctgcagccatggcccacacctaggggtgataatgggctataaattttacactat

SEQ ID NO: 118476 - DNA, 1488 bp, Zea Mays
gaagccggacccctaatctgatgtgcacctgagttcgaagccgaattcacgactgcaattgcaaaaccctagctaccgcttcgccgaattccctgtcctccgcccgcttcgccgaattccctgtcctccgcccgcttcgccgaatttcctctcctccccgcccgccgcccgtcaccgcggcttcgtctgcgcttgtccctcccgttccaaggagcacgtgcttctcgccgcgccgttcgcccgccgccgccgccaccggttcatcgccagctatgtcttctcaggtcgacagccgcagccagtccgccgggaagcgcgcgcgcaccgacggcagccggcgtgaggacgactgggtttgccccagctgcaagaacgttaacttcgcctttcgcaccacttgcaacatgcgcaactgcaaccagtccaggccagcagatcacacgaaggccatgcagaccccgcctcgctatcccacatcaggaggttacatgagcccagggacgccaccgtcgatgtaccttggtggtggtgctcccccatatggctcttcaatgtttaacgggcctgcaatgacgcgctatggtatcacacagttccctgggggttctgcgtatccatatggatatggtggccgcatatcaatggggagcccctacgggccaatgcaaatggctgggccaaccgcatactctggtggatctatgatgggagcaggtggaatgtatggaatgcccatggacaggtatgggctaatacctgctggttctggtccaatgggcacgagagctggctcatattctgatgaagattctcagaagaagtctgcaggagctggccgtgataatgattgggagtgtccaaattgccacaacatcaactttggcttccgcacagtctgtaatatgagaaagtgcaacacacctagacctgaaaaccagggatctaagcctgatggtttaagagggtcaaaaccaaagacaccagagggcagttggaagtgtgagcagtgcaataacataaactatcctttccgaacgaaatgcaatcgtccccaatgtggagcagaaaagccatcacagacgaacaatgcaaatgaatcagcggaagatcaggacaatcagtgagtcctagaacagtaatgagggtcaagaaggtccagcgtcgtcgtcaaggttcagtctgaatgtggggtacatctgtgtcagtagtcgccgttacaagtttcttccccttgagaacttagttgagtcggggccttggagttggcaatggagtcttgccttccttaatcactgcggataatggtcaagaacatcaatttgttatgtggtttgtcaagaacatccatcttgcctttcctggctgaacttggttacttgtctttgttactggtactctggataaattaccatatgttatatgaatgtcttttatatgtgtcatagaatatcactcatctgttatgaagtatcacaactgtcaccattt

SEQ ID NO: 118477 - DNA, 1485 bp, Zea Mays
gaagccggacccctaatctgatgtgcacctgagttcgaagccgaattcacgactgcaattgcaaaaccctagctaccgcttcgccgaattccctgtcctccgcccgcttcgccgaattccctgtcctccgcccgcttcgccgaatttcctctcctccccgcccgccgcccgtcaccgcggcttcgtctgcgcttgtccctcccgttccaaggagcacgtgcttctcgccgcgccgttcgcccgccgccgccgccaccggttcatcgccagctatgtcttctcaggtcgacagccgcagccagtccgccgggaagcgcgcgcgcaccgacggcagccggcgtgaggacgactgggtttgccccagctgcaagaacgttaacttcgcctttcgcaccacttgcaacatgcgcaactgcaaccagtccaggccagcagatcacacggccatgcagaccccgcctcgctatcccacatcaggaggttacatgagcccagggacgccaccgtcgatgtaccttggtggtggtgctcccccatatggctcttcaatgtttaacgggcctgcaatgacgcgctatggtatcacacagttccctgggggttctgcgtatccatatggatatggtggccgcatatcaatggggagcccctacgggccaatgcaaatggctgggccaaccgcatactctggtggatctatgatgggagcaggtggaatgtatggaatgcccatggacaggtatgggctaatacctgctggttctggtccaatgggcacgagagctggctcatattctgatgaagattctcagaagaagtctgcaggagctggccgtgataatgattgggagtgtccaaattgccacaacatcaactttggcttccgcacagtctgtaatatgagaaagtgcaacacacctagacctgaaaaccagggatctaagcctgatggtttaagagggtcaaaaccaaagacaccagagggcagttggaagtgtgagcagtgcaataacataaactatcctttccgaacgaaatgcaatcgtccccaatgtggagcagaaaagccatcacagacgaacaatgcaaatgaatcagcggaagatcaggacaatcagtgagtcctagaacagtaatgagggtcaagaaggtccagcgtcgtcgtcaaggttcagtctgaatgtggggtacatctgtgtcagtagtcgccgttacaagtttcttccccttgagaacttagttgagtcggggccttggagttggcaatggagtcttgccttccttaatcactgcggataatggtcaagaacatcaatttgttatgtggtttgtcaagaacatccatcttgcctttcctggctgaacttggttacttgtctttgttactggtactctggataaattaccatatgttatatgaatgtcttttatatgtgtcatagaatatcactcatctgttatgaagtatcacaactgtcaccattt

SEQ ID NO: 118478 - DNA, 1267 bp, Zea Mays
gaagccggacccctaatctgatgtgcacctgagttcgaagccgaattcacgactgcaattgcaaaaccctagctaccgcttcgccgaattccctgtcctccgcccgcttcgccgaattccctgtcctccgcccgcttcgccgaatttcctctcctccccgcccgccgcccgtcaccgcggcttcgtctgcgcttgtccctcccgttccaaggagcacgtgcttctcgccgcgccgttcgcccgccgccgccgccaccggttcatcgccagctatgtcttctcaggtcgacagccgcagccagtccgccgggaagcgcgcgcgcaccgacggcagccggcgtgaggacgactgggtttgccccagctgcaagaacgttaacttcgcctttcgcaccacttgcaacatgcgcaactgcaaccagtccaggccagcagatcacacgaaggccatgcagaccccgcctcgctatcccacatcaggaggttacatgagcccagggacgccaccgtcgatgtaccttggtggtggtgctcccccatatggctcttcaatgtttaacgggcctgcaatgacgcgctatggtatcacacagttccctgggggttctgcgtatccatatggatatggtggccgcatatcaatggggagcccctacgggccaatgcaaatggctgggccaaccgcatactctggtggatctatgatgggagcaggtggaatgtatggaatgcccatggacaggtatgggctaatacctgctggttctggtccaatgggcacgagagctggctcatattctgatgaagattctcagaagaagtctgcaggagctggccgtgataatgattgggagtgtccaaattgccacaacatcaactttggcttccgcacagtctgtaatatgagaaagtgcaacacacctagacctgaaaaccagggatctaagcctgatggtttaagagggtcaaaaccaaagacaccagagggcagttggaagtgtgagcagtgcaataacataaactatcctttccgaacgaaatgcaatcgtccccaatgtggagcagaaaagccatcacagacgaacaatgcaaatgaatcagcggaagatcaggacaatcagttttcgtcatgtaaaattacaaagctttttatcgaagctacgacttctgcgtgagtttcaagacagcagtgagcaggcagatggatcttccttgtcctgctgctggagcactgacacagtgacactgcggattggcagcagtccag

SEQ ID NO: 118479 - DNA, 2563 bp, Zea Mays
gaagccggacccctaatctgatgtgcacctgagttcgaagccgaattcacgactgcaattgcaaaaccctagctaccgcttcgccgaattccctgtcctccgcccgcttcgccgaattccctgtcctccgcccgcttcgccgaatttcctctcctccccgcccgccgcccgtcaccgcggcttcgtctgcgcttgtccctcccgttccaaggagcacgtgcttctcgccgcgccgttcgcccgccgccgccgccaccggttcatcgccagctatgtcttctcaggtcgacagccgcagccagtccgccgggaagcgcgcgcgcaccgacggcagccggcgtgaggacgactgggtttgccccagctgcaagaacgttaacttcgcctttcgcaccacttgcaacatgcgcaactgcaaccagtccaggccagcagatcacacggccatgcagaccccgcctcgctatcccacatcaggaggttacatgagcccagggacgccaccgtcgatgtaccttggtggtggtgctcccccatatggctcttcaatgtttaacgggcctgcaatgacgcgctatggtatcacacagttccctgggggttctgcgtatccatatggatatggtggccgcatatcaatggggagcccctacgggccaatgcaaatggctgggccaaccgcatactctggtggatctatgatgggagcaggtggaatgtatggaatgcccatggacaggtatgggctaatacctgctggttctggtccaatgggcacgagagctggctcatattctgatgaagattctcagaagaagtctgcaggagctggccgtgataatgattgggagtgtccaaattgccacaacatcaactttggcttccgcacagtctgtaatatgagaaagtgcaacacacctagacctgaaaaccagggatctaagcctgatggtttaagagggtcaaaaccaaagacaccagagggcagttggaagtgtgagcagtgcaataacataaactatcctttccgaacgaaatgcaatcgtccccaatgtggagcagaaaagccatcacagacgaacaatgcaaatgaatcagcggaagatcaggacaatcagtgagtcctagaacagtaatgagggtcaagaaggtccagcgtcgtcgtcaaggttcagtctgaatgtggggtacatctgtgtcagtagtcgccgttacaagtttcttccccttgagaacttagttgagtcggggccttggagttggcaatggagtcttgccttccttaatcactgcggataatggtcaagaacatcaatttgttatgtggtttgtcaagaacatccatcttgcctttcctggctgaacttggttacttgtctttgttactggtactctggataaattaccatatgttatatgaatgtcttttatatgtgtcatagaatatcactcatctgttatgaagtatcacaactgtcaccattttgttttggttttgttctggtcattgttttcaatttatggttggtttggtatttttacaggttctttctgaatggttgtgatggcaacctttctttccttccaaagtagttttcttagagatgtttgcaactttccctggtagcaatagttaggtcttaagttgacagctgacatcttggttgcataactgcatatgttactgttatcatcttccatgttgtctggagctttagctgttcaagtatcaccattcagtgttttggttagaagagatgctccttggtgaagtgacgtgcatctcattttgcagtggtagtagactaatcaccctgcatgcttgtctctaatgcaactacttcactgacttggtgccattggacttagttttcgtcatgtaaaattacaaagctttttatcgaagctacgacttctgcgtgagtttcaagacagcagtgagcaggcagatggatcttccttgtcctgctgctggagcactgacacagtgacactgcggattggcagcagtccagtgagtttcaggacagtcttacaaactgatgtggctaccatttcgcatcggaaaacaaggtgaggaatttgcttatagtgtctcgagcgtcttgagtcttgccagatctgatttggaaattcgatatggtgttgagcattgtgatagtcagagtcaggatcttttaatgtagccatttcagtatttgctcggagtgatgcttgtcttatttttattcttcctttattctttttttcattatgttctgtgtctagcactgttatttctcatcctaccttaatgtaaatttcgtcttctcatttcgcctattttttttttcttgtagcatatccttttcttacaatttgtcattgctcttgagttaatttaaatcaagagtcctcttgttttgtctttttttttatgtttcttgatttgttgctgacggtatggtgttgtccaaagcacgaagaaacgggagattttgcgttggaggaggcgtttcctcgcgtgggcctgcagccatggcccacacctaggggtgataatgggctataaattttacactat

SEQ ID NO: 118480 - DNA, 2648 bp, Zea Mays
taatctgatgtgcacctgagttcgaagccgaattcacgactgcaattgcaaaaccctagctaccgcttcgccgaattccctgtcctccgcccgcttcgccgaattccctgtcctccgcccgcttcgccgaatttcctctcctccccgcccgccgcccgtcaccgcggcttcgtctgcgcttgtccctcccgttccaaggagcacgtgcttctcgccgcgccgttcgcccgccgccgccgccaccggttcatcgccagctatgtcttctcaggtcgacagccgcagccagtccgccgggaagcgcgcgcgcaccgacggcagccggcgtgaggacgactgggtttgccccagctgcaagaacgttaacttcgcctttcgcaccacttgcaacatgcgcaactgcaaccagtccaggccagcagatcacacggccatgcagaccccgcctcgctatcccacatcaggaggttacatgagcccagggacgccaccgtcgatgtaccttggtggtggtgctcccccatatggctcttcaatgtttaacgggcctgcaatgacgcgctatggtatcacacagttccctgggggttctgcgtatccatatggatatggtggccgcatatcaatggggagcccctacgggccaatgcaaatggctgggccaaccgcatactctggtggatctatgatgggagcaggtggaatgtatggaatgcccatggacaggtatgggctaatacctgctggttctggtccaatgggcacgagagctggctcatattctgatgaagattctcagaagaagtctgcaggagctggccgtgataatgattgggagtgtccaaattgccacaacatcaactttggcttccgcacagtctgtaatatgagaaagtgcaacacacctagacctgaaaaccagggatctaagcctgatggtttaagagggtcaaaaccaaagacaccagagggcagttggaagtgtgagcagtgcaataacataaactatcctttccgaacgaaatgcaatcgtccccaatgtggagcagaaaagccatcacagacgaacaatgcaaatgaatcagcggaagatcaggacaatcaggtctttgtttcagaaccttcactatggtcctcaacattttctacacctttatttagaacattaagttgcatgccttattaatatatcactactatttttaatcatttccttgccctcatgtttgcttgacatagcttaataaattatgtccttactgttacagtgagtcctagaacagtaatgagggtcaagaaggtccagcgtcgtcgtcaaggttcagtctgaatgtggggtacatctgtgtcagtagtcgccgttacaagtttcttccccttgagaacttagttgagtcggggccttggagttggcaatggagtcttgccttccttaatcactgcggataatggtcaagaacatcaatttgttatgtggtttgtcaagaacatccatcttgcctttcctggctgaacttggttacttgtctttgttactggtactctggataaattaccatatgttatatgaatgtcttttatatgtgtcatagaatatcactcatctgttatgaagtatcacaactgtcaccattttgttttggttttgttctggtcattgttttcaatttatggttggtttggtatttttacaggttctttctgaatggttgtgatggcaacctttctttccttccaaagtagttttcttagagatgtttgcaactttccctggtagcaatagttaggtcttaagttgacagctgacatcttggttgcataactgcatatgttactgttatcatcttccatgttgtctggagctttagctgttcaagtatcaccattcagtgttttggttagaagagatgctccttggtgaagtgacgtgcatctcattttgcagtggtagtagactaatcaccctgcatgcttgtctctaatgcaactacttcactgacttggtgccattggacttagttttcgtcatgtaaaattacaaagctttttatcgaagctacgacttctgcgtgagtttcaagacagcagtgagcaggcagatggatcttccttgtcctgctgctggagcactgacacagtgacactgcggattggcagcagtccagtgagtttcaggacagtcttacaaactgatgtggctaccatttcgcatcggaaaacaaggtgaggaatttgcttatagtgtctcgagcgtcttgagtcttgccagatctgatttggaaattcgatatggtgttgagcattgtgatagtcagagtcaggatcttttaatgtagccatttcagtatttgctcggagtgatgcttgtcttatttttattcttcctttattctttttttcattatgttctgtgtctagcactgttatttctcatcctaccttaatgtaaatttcgtcttctcatttcgcctattttttttttcttgtagcatatccttttcttacaatttgtcattgctcttgagttaatttaaatcaagagtcctcttgttttgtctttttttttatgtttcttgatttgttgctgacggtatggtgttgtccaaagcacgaagaaacgggagattttgcgttggaggaggcgtttc

SEQ ID NO: 118481 - DNA, 1176 bp, Zea Mays
atggacagcgtttttgcgctgccatacaagcgcgtgccacatccggcctatggcaatgcccgtattccggcttacgaaatgatccgtttttcggtcaacattatgcgtggctgctttggcggctgctctttctgttctatcaccgagcacgaagggcgcattattcagagccgttccgaagattcgatcattaatgagatcgaagcgatccgcgacaccgttccaggttttacgggcgtgatttccgatcttggtgggccaactgccaacatgtatatgttgcgctgcaaatcgccacgcgctgaacaaacttgtcgccgtttgtcgtgcgtttatccggatatttgtccgcacatggacacgaaccacgaaccaacgatcaacctctatcgccgtgcgcgtgatctgaaaggcattaaaaagatcctgattgcctctggtgtgcgttatgacatagccgtagaagatccgcgctatatcaaagaactggcgacccatcacgtcggcggttatctgaagattgccccggaacataccgaagaagggccgttatcgaagatgatgaagccgggcatgggcagctatgaccgctttaaagagctgttcgatacttactcaaaacaggcaggtaaagagcagtatctgatcccctatttcatctccgcgcaccccggtacgcgtgatgaagatatggtgaatctggcgctgtggctgaaaaagcaccgcttccgcctcgaccaggtgcagaacttctatccgtcgccgctggcgaactcaaccaccatgtattacaccgggaaaaacccgctggcgaagattggttataagagcgaagacgtcttcgtaccgaagggcgacaaacagcgtcgtttgcataaagcgttgttgcgttaccacgatccggcaaactggccgttaatccgccaggcgctggaagcgatgggcaaaaagcatctgattggcagccgtcgcgattgcttagtgcctgcgccaaccattgaagagatgcgtgaagctcgtcgccagaaccgcaatacccgtccggcgttgacgaaacatacgccgatggcgacccagcgtcagacgcctgctacggcaaaaaaagcgtcgtctacgcaatctcgtccggtgaatgctggtgcgaagaaacggcctaaagcggcggttggacgttaa

SEQ ID NO: 118482 - DNA, 1103 bp, Zea Mays
cacaagagctggtatcctttcctggttcatcctaatcgcggtcttggcttgctttttctgcattacacgcaggagctgctgcgagccatgcacgtcgctcgccgcccttgtgaactgtcacgggccttcccgccggcgcctctcctttcccctcccggctcccggctcctcacgcacacttgcacggcatggacgatatattgcgtacctgcagctcgacggctttgctctcatcaactgtgtcgaagcatctagcctagtggtggcgcgacgcgataatggactctgagagcgaggagcagggctcgtcgccggagacagagtcggatcccccgccgtcgccgtcgcagctgccgctgctgctgaacccggcgtacgcgcggtgcaagtcggtcgtccacgacgagctgcgcagcttccgcgtgttcctgcagtggtgcgcgctggaccacagcacctgcgcggggcgcgccgcgtcgtacgcggtgttcgtggcgctggcgctgctggtgcccgccgcggtgtcgctgtcgctgcgcgccgacacggcgctgtcgcgggcctccgcgtccgccatcgccttcaaccgcgtggcgcaggcccccgccacggggctcgccgtcgtgtccttcgccacgctggccgccttcttccgccgcttcggcggcctgcggcagctgctgttcctcgacggcgcgctccgcgacgacaccgccttcgtgcggcgcggctacgcgcgggagctggaccgcgcgttccgcaccctggccgcgctcctgctgccctcgctctgcgtggaggccgcgcacaaggccgtcttcttcttctgcaccgttagggtggagccgcccgccgccgtgctcctccccttcgccacgccgccgctggtgctgccgtgccgcgcgatgccgctggtcgccacggtggcgtcgtgggtgtaccagcacgggggtggttcctgctgtgtgcgtgctgtccgccttcacctgcgagctccagatcctgcgcttcgagggcatctaccgcatgttcgacgtcgaggcggcgcccaccgccgctgaaatcttcgcggaggacggcggcatccgcacgcaggttgctcg

SEQ ID NO: 118483 - DNA, 2541 bp, Zea Mays
ccagcctttcccatccgcgcgcgcccgggaataggggccgcccgcaccatcgacgccggccaattcacccgccgtcgtcaagtgctggcgccggcgggctggctccctggcaccggcgccgccgccccggacatggccggagcgccgtcgtcgctagcgcgcctcctcctcctcctcctgctagctgccggatgcctcctcccgctggtcgctgacgccgcgcggctcacgctgtccctcgcgcccgccgccgacgcgctcctcaggctcaaggccggcattaaggacgacggcggcgcgctcggcagctggtcccccgacacgagcccctgcgccgacggcgggcccagctggaagggcgtcctgtgcaacaaggacggcgtgcacggcctgcagctcgaggggatgggcctctccggcacgctcgacctgcgcgccctcaccagcctgcccggccccggcctccgcacgctgagcttcatgaacaacgagttcgccggcccgttgcccaacgtcaaagagctcagcggcctccgcgctgtctttctgtccgagaacaagttctccggtgtcatccccgccgacgcgttcgccgggatgggctcgctcaagaaggtggtcctgtccaataacgacttcactggccccatcccggcgtcgctcgccgacgcgcccaggctcctggagctgcgcctcaacgacaacaagtttcagggcaagatcccggacctgaaacaggaggagttgacggaagtcaacctcgcaaacaatgagctcgagggggagatcccggcgagcctcaaatccatgacatcggacatgtttgccggcaacaagaagctttgcggcccgccgctcggtgccaaatgcgaggcccccccgacgccgtcaccaaaggcgcatccgcaggcctccgtcaaagaaggcaccacgccgtcacaagcagcagcagacaccgtggcatccacgggcgcgtcgtcagcagacgacccgaagcaagacgaaggccaggagcccgtcgagggctccatttcgttcggcgtctccgccgcgttgcttggcacgcttttgatcgccggcgtggcgttcatcgcgctgcggaggcggagggggtacaaaaccaagaacttcggcccgaccgcgtcgtcgtctcgcccctcggggccgccaagggtcgagccgcacccgccggcggcaaaggcgcccgccgccgccgggggcgtggcgcacggcggcggcgcggcgcggaaggcggagcaggggcgactgacgttcgtgcgcgacgaccgcggccggttcttcgagctgcaggacctgctcaaggcgacggcggaggtgcttggcgccgccaacctcggcgtgtgctaccgcgccacgctcacgacgggccagtccgtcgtcgtgaagcggttcaaggagatgaaccgggtgggcagggaggacttcgaggagcacatgcggcggctgggccgtctcagccaccccaacctcctcccgctcgtcgcctactactaccgcaaggaggagaagctgctcatccacgactacgtccccaaccggagcttggcgaacctcctccatggcggcggcgagagcggcgggatgaagaaggcggcggtgcactgggcagcgcggctgaagatcgtgaagggcgtggcgcgggcgctcagctacctgtacgacgagctgtgcatgctcacggtgccgcacggccacctcaagtcgtccaacatcctgctcgacgcccaccacgggccgctgctgacggactacgcgctggtgccggtgatgaaccagtcgcacgccgcgcagctcatggtggccttcaagtccccggagcggaagcagttcggccgctcgtccaagaagagcgacgtctggtgcctcggcctgctcatcctcgagatactcactggaaggccgccgacctacgacccgcccaaggcggcggcgccctcaggcgagctgtcgtcgtcccagcagaagccggggccggcggcgggcaacaccgacctggtgaccgtcgtggggtcgacgccggagggcgagtggctgaacaccgtggtggaccgggacctgcggggcgaggaggaggaggacaaggaggagatggtgaagctgatcagggtcggcatggcgtgctgcgagagcaacgtggacaaccggtgggagctcaagaccgccatcgagaggatcgaggagctcaaggcgaaggagcgccccgacgaggagcaagcgacggtgatcgacgaggactacagcgatgttgccctcaactgatcatcgacacgaaccggccgggaatcgatcgatagggagggttgtgcgcaagctgatgatatgagcccaaaatgtgatgacctgcatgcatgccgagaccctaaacatggactagtactgtgtattcttatatacctttgctggttgttaattgccggtggtaggtttttggagagaaaagaagctacttatatataatcacacagatcttagtttgcttttctcagtgaacagaaatctattacaaagcatctggtggac

SEQ ID NO: 118484 - DNA, 441 bp, Zea Mays
tgagtcgtcgcaaatcgtcgcaacgcagagacaccgaactatcatatatataggtctgcatgatattgatggttgcaatgtagtggtaaaacaggtagattaaaataacaaaatgtatatgtatagccaggatcaccaatgaattacaaaatcttttttcataacaatataacacatttatatataagttatcatgatattaatatgttcccattgcaacgcacgggaactaacctagtaattaattaatttattacctcctttcgacgaaccagccggcaccaaaagatggatcaccgtgcacggagcgtgcgtccgttgcgggaaacgacggggatctaggcgacgccgtgacggtgatgctcccgttcacgtttcgcagctttcgctgcacccctttgattcacggtggccccacagaaaagcccatgtccacggggc

SEQ ID NO: 118485 - DNA, 2680 bp, Zea Mays
ctcgtctcgtcacacactccactcgaacgcactacttgatcggccaaagccaaacgaactgggctccctcccctccacttcctctccccatggcgcagcagctcccctgcgtctcgtcgccgcgcccgctgctcgccgtgcccgcgggccggtggcgcgccggcgtgcggggccggcccaatgtggcgggactggggcgggggcggctgtctctccacgccgccgccgcgcggcccgtggccgaggcggtgcaggcggaggaggacgacgacgacgacgacgaggaggtggccgaggagaggttcgcgctgggcggcgcgtgccgggtgctcgcgggaatgcccgcgccgctcggcgccaccgcgctccgcggcggtgtcaacttcgccgtctactccagcggtgcctccgccgcgtcgctgtgcctcttcgctcccggcgacctcaaggcggatagggtgaccgaggaggtgcccctcgatcccctgctcaaccgaacgggaaacgtgtggcacgtgttcatccacggggaccagctgcacggcatgctctacggatacaggttcgatggcgtgttcgcccctgagcgcggacagtactacgatgtgtccaacgttgtggtggatccatacgctaagtggtaagccgaggtgaatatggtgtgcctgcgcctggtggtagttgttggcctcaaatggctggtatgatccctcttccctataataagtttgattggcaaggtgacctaccccttgggtaccatcagaaggaccttgtcatatatgaaatgcatttgcgtggattcacaaagcacaactcaagcaagacaaaacacccaggaacttacattggtgctgtgtcaaagcttgaccatctaaaggaacttggagtgaactgtatagagctaatgccctgccatgagttcaatgagctagagtacttcagctcctcttcgaagatgaacttctggggatattccacaataaattttttctcaccaatggcaagatattcttcaagtggcataagagactctggatgtggtgccataaatgaatttaaagcttttgtaagggaggcccacaaacggggaattgaggtgatcatggatgttgtcttcaatcatacagctgaaggtaatgagaaaggcccaatattatcctttagggggatagataatagtacatactacatgcttgcacctaagggagagttttataattattctggttgtggaaataccttcaattgtaatcatcctgtagtccgtgaatttatagtggattgcttgagatactgggtaacagaaatgcatgttgatggttttcgttttgaccttgcatctatactgaccagaggatgcagtctatgggatccagttaatgtgtatggaagtccaatggaaggtgacatgattacgacagggacacctcttgttgccccaccacttattgacatgattagcaatgacccaattcttggaaatgtcaagctcattgctgaagcatgggatgcaggaggtctctatcaagttggtcagtttcctcactggaacgtttggtcagagtggaatggaaagtatcgcgataccgtgcgtcagttcatcaaaggcacagatggatttgctggtgcttttgctgaatgcctatgtggaagtccacagttataccaggcaggggggaggaagccttggcacagtatcaactttgtatgtgcacacgatggatttacactggctgatttggtcacatacaatagcaagtacaacttgtcaaatggtgaggacaacagagatggggaaaatcataatcttagctggaattgtggggaggaaggagaatttgcaagtctgtcagtccgaagattaaggaagaggcaaatgcgcaatttctttgtttgtcttatggtttctcagggagttccaatgttctacatgggcgatgaatatggtcacacaaagggagggaacaacaatacgtactgccatgaccattatgtcaattatttccgttgggataagaaggaagaacaatcctctgatttgtacagattctgccgtctcatgaccaaattccgcaaagaatgtgaatctcttggccttgaggacttcccgacttcagaacggttgaaatggcacggtcatcagcccgggaagcctgactggtcagaggcaagccgattcgttgccttcaccatgaaggacgaaaccaaaggcgagatctacgtggccttcaacaccagtcaccttccggtggttgttgggcttccagagcgctctgggttccgatgggagccggtggtggacaccggcaaggaggcaccatatgacttcctcaccgatggcctgccagatcgtgctgtcaccgtctaccagttctctcatttcctcaactccaatctctatcctatgctcagctactcctccatcatccttgtattgcgccctgatgtctgaaagaagcagatacaatagagtatactatagcggttgttctctaggctgtagcatgcagtggaaactggaaaatgttggggttgctctgttgtcggtagtttacatgcgcatgtcggtatgtgtagctaaagctggtggatctcagttctcagatcggactcgagacggggaaaaccattgcccagttggctggttctctgaagttttgtttggtgtaaagaaatg

SEQ ID NO: 118486 - DNA, 2925 bp, Zea Mays
ctcgtctcgtcacacactccactcgaacgcactacttgatcggccaaagccaaacgaactgggctccctcccctccacttcctctccccatggcgcagcagctcccctgcgtctcgtcgccgcgcccgctgctcgccgtgcccgcgggccggtggcgcgccggcgtgcggggccggcccaatgtggcgggactggggcgggggcggctgtctctccacgccgccgccgcgcggcccgtggccgaggcggtgcaggcggaggaggacgacgacgacgacgacgaggaggtggccgaggagaggttcgcgctgggcggcgcgtgccgggtgctcgcgggaatgcccgcgccgctcggcgccaccgcgctccgcggcggtgtcaacttcgccgtctactccagcggtgcctccgccgcgtcgctgtgcctcttcgctcccggcgacctcaaggcggatagggtgaccgaggaggtgcccctcgatcccctgctcaaccgaacgggaaacgtgtggcacgtgttcatccacggggaccagctgcacggcatgctctacggatacaggttcgatggcgtgttcgcccctgagcgcggacagtactacgatgtgtccaacgttgtggtggatccatacgctaaggcagtggtaagccgaggtgaatatggtgtgcctgcgcctggtggtagttgttggcctcaaatggctggtatgatccctcttccctataataagtttgattggcaaggtgacctaccccttgggtaccatcagaaggaccttgtcatatatgaaatgcatttgcgtggattcacaaagcacaactcaagcaagacaaaacacccaggaacttacattggtgctgtgtcaaagcttgaccatctaaaggaacttggagtgaactgtatagagctaatgccctgccatgagttcaatgagctagagtacttcagctcctcttcgaagatgaacttctggggatattccacaataaattttttctcaccaatggcaagatattcttcaagtggcataagagactctggatgtggtgccataaatgaatttaaagcttttgtaagggaggcccacaaacggggaattgaggtgatcatggatgttgtcttcaatcatacagctgaaggtaatgagaaaggcccaatattatcctttagggggatagataatagtacatactacatgcttgcacctaagggagagttttataattattctggttgtggaaataccttcaattgtaatcatcctgtagtccgtgaatttatagtggattgcttgagatactgggtaacagaaatgcatgttgatggttttcgttttgaccttgcatctatactgaccagaggatgcagtctatgggatccagttaatgtgtatggaagtccaatggaaggtgacatgattacgacagggacacctcttgttgccccaccacttattgacatgattagcaatgacccaattcttggaaatgtcaagctcattgctgaagcatgggatgcaggaggtctctatcaagttggtcagtttcctcactggaacgtttggtcagagtggaatggaaagtatcgcgataccgtgcgtcagttcatcaaaggcacagatggatttgctggtgcttttgctgaatgcctatgtggaagtccacagttataccaggcaggggggaggaagccttggcacagtatcaactttgtatgtgcacacgatggatttacactggctgatttggtcacatacaatagcaagtacaacttgtcaaatggtgaggacaacagagatggggaaaatcataatcttagctggaattgtggggaggaaggagaatttgcaagtctgtcagtccgaagattaaggaagaggcaaatgcgcaatttctttgtttgtcttatggtttctcagggagttccaatgttctacatgggcgatgaatatggtcacacaaagggagggaacaacaatacgtactgccatgaccattatgtcaattatttccgttgggataagaaggaagaacaatcctctgatttgtacagattctgccgtctcatgaccaaattccgcaaagaatgtgaatctcttggccttgaggacttcccgacttcagaacggttgaaatggcacggtcatcagcccgggaagcctgactggtcagaggcaagccgattcgttgccttcaccatgaaggacgaaaccaaaggcgagatctacgtggccttcaacaccagtcaccttccggtggttgttgggcttccagagcgctctgggttccgatgggagccggtggtggacaccggcaaggaggcaccatatgacttcctcaccgatggcctgccagatcgtgctgtcaccgtctaccagttctctcatttcctcaactccaatctctatcctatgctcagctactcctccatcatccttgtattgcgccctgatgtctgaaagaagcagatacaatagagtatactatagcggttgttctctaggctgtagcatgcagtggaaactggaaaatgttggggttgctctgttgtcggtagtttacatgcgcatgtcggtatgtgtagctaaagctggtggatctcagttctcagatcggactcgagacggggaaaaccattgcccagttggctggttctctgaagttttgtttggtgtaaagaaatggtggtccatcatctactcaaatttttttctcttttttaatgaaataagttgactcaaaatcaactcattcttcaacttaataattagtatatacacaaggaataaattaattctatcaaatttatgaaatgaaatccaacattattcgaaggactgacgactactaacacggcactgctcccggagaaagaggaaaacctggcaaatggattacgggtacgagggtcggctaaagtaaaga

SEQ ID NO: 118487 - DNA, 246 bp, Zea Mays
atgaggaggacctcgatctgggaagtcctatgttgcggcggcgtagagttgcttggctgcggagatgtggagaaggtcggcaatggcggagctatggaagttggcgcggagtcgcttgcctgcaccgaaggcgatatcgtcgaagtcgatcgacgaaggaagcctccagttgcctgcacggaagacccccaccgaagaaccgcacgaacaagaaaaaagtcttatgtcctcatgtctacgaggtag

SEQ ID NO: 118488 - DNA, 884 bp, Zea Mays
cctccccttcctaatctcgataggggtgcgcgaggacgaggagaaaaaacagaggaggaaaaaatatcaccttctcttcctgcattcccctgctcgatccccggcgaggaattcgcccccgaatccatcgatttgctcagtccagtccgccgatccgtggatcgattcgtgcgtgggctctgtcctccccggggttccgatctggtcctcgcctcgccggaggaggagctggaggagatgaacggcaccgggggcagccaccaccagcagcagcacaggctccggcagcagcagcagcagcaggcgctcctgatgcagcaggcgctgcagcagcagcagcagcaacatcagtaccagtccggcgtcctcgccgccgcggcagccgcggccatgacccagatggaacctatttccaatggcaatcttccacctggctttgatccttccacttgtcgcagtgtgtatgttggaaacgtgaaccctaatgtcacggagagccttttgattgaagttttccagagtgctggccttgtggaaagatgcaagctcatacggaaagagaagtcatcctttgggtttgtggactactatgatagaaggtctgctgctctagcaatcatgacccttcatggccgtcacatatatggacaagcaatcaaggtgaactgggcatacgcaagtacacagagggaggatacgtcggggcatttccatatttttgttggtgatttaagttctgaagtgaatgatgcaactctttatgcctgtttctcagcatatccttcttgttcgtaagtccttagttctttgtattgtgatggcatctatgatgagcttgacctgcagccgatgctttcaaatattgacttgttattcaaatctcg

SEQ ID NO: 118489 - DNA, 1846 bp, Zea Mays
cctccccttcctaatctcgataggggtgcgcgaggacgaggagaaaaaacagaggaggaaaaaatatcaccttctcttcctgcattcccctgctcgatccccggcgaggaattcgcccccgaatccatcgatttgctcagtccagtccgccgatccgtggatcgattcgtgcgtgggctctgtcctccccggggttccgatctggtcctcgcctcgccggaggaggagctggaggagatgaacggcaccgggggcagccaccaccagcagcagcacaggctccggcagcagcagcagcagcaggcgctcctgatgcagcaggcgctgcagcagcagcagcagcaacatcagtaccagtccggcgtcctcgccgccgcggcagccgcggccatgacccagatggaacctatttccaatggcaatcttccacctggctttgatccttccacttgtcgcagtgtgtatgttggaaacgtgaaccctaatgtcacggagagccttttgattgaagttttccagagtgctggccttgtggaaagatgcaagctcatacggaaagagaagtcatcctttgggtttgtggactactatgatagaaggtctgctgctctagcaatcatgacccttcatggccgtcacatatatggacaagcaatcaaggtgaactgggcatacgcaagtacacagagggaggatacgtcggggcatttccatatttttgttggtgatttaagttctgaagtgaatgatgcaactctttatgcctgtttctcagcatatccttcttgttctgatgctcgagtcatgtgggacaacaaaactggacgttccaggggttatggttttgtctccttccgtaatcaacaggaagctgaaactgctataactgaaatgactggaaaatggcttggaagcagacaaataaggtgcaattgggcaacaaagaccaattcagaagagaaaccagaaactgacaatcataatgcagttgtactaacaaatggtagctccaccaattcagcaacagatgcaagccaggatgcaggaagtaaagagaacccagagaacaatcctgattgtactactgtatatgttggcaaccttggacatgaggttaatcgggatgagcttcaccgccacttctataacttgggggtcggggcaatcgaggaaatccgtgttcaacaggataaggggtttggatttgtgagatatagcacccatggggaagcagcattagctattcagatggccaatggattggtagtccgtgggaaatcaattaagtgctcatggggaaacaagccaactccacctggcaccacctccaagcccctaccccctccagttgcttcataccagcctgctgtagcaatgtcaggtgtcccacaaggtttcacagcagccgaacttcttgcttaccagaggcagcttgccttaagccaggctgcagcagggcagattgctggccagcatggtctcgcgggtcaggtttctgcaggtcttcttgctgctgctggttctcaggccctctacgatggctacccgaaccagtcatcagcccagcagcttatgtactacaactagagttcaagaggacggcgttggccatcgtcgccctgttttttattttgtggttcatgtactatttgtgtgagagttcttgatctcttgtcgccgcggaattgtgttactatcttattactgtaccattgaccatttttcttgtgagattcatttgagtagtcactttaacagagtaagagatgtattctatgtgacttcgcgattgattaatgtaatgctcccctgtgcatagaagtatggaagaaaaaaaatacagaaa

SEQ ID NO: 118490 - DNA, 2028 bp, Zea Mays
ctgcacggcgaacgcgagtctcctaaacgataccgggcgggcaggcacacgagcgcgagcacgcacgagttcgcgagtccccctgacccccacgtgcgcgtcgttggaaccaaggattggattagcctcgccgacgacgaggagagaagagctggtggctggcgaggggctcgcggggatggggatctcgaggcccctggcgctccttctggcgctgctgatcgccgtcgccggcgcgaccgccgaggagcccgtagtggcggcggactcggtggccggcgcggtggaggccgcggcggcgctcagggtggaggaggctgcggaggccgcggcgctcagggccgagctggagcagctccgggcgaagatctccgccttagagtcagacatagcagtgcgatctctcgaactgaagaataaggacgatgtcatcgtgaacctagagaaagccattgcggagaagtcaaaggctattacctctatgcagggcgagattgcttctctccaggcaaaaggatctctagctgccgaggagcaggctaacaaggccaatgccaaggctgttgaacttgagaagcagattgacaagctcaaaaaggatattcaagcacaaagtagtcagaaagcagcactagaatctagggccaacgatgcagagaacaaggtggaaaagttgaatgaaaagcttaatacaatgcaaaaggaaagtgatgagcaaaaacgcaaaatcaagaagacagaacgtgctcttaaagtcgctgaggaggaattgatgaggttgcagttagaagcaactgctaaatcaaaacagctgactgaggttcatggagcatggttaccaccttggttagcgacacactatgctcgttacatggaggttgtctcaggtcactggaattatcatggaaaacctgctgtgcagaatgttttgcataaggcatcagaaaaatcagcacatgcaaagaaatgggctgaaccacatattgagactgctaagatgaaatggattcctgttaaggagaaattggttgtcctcaagaaaaatgcagaaccttatgtacagaaggtatcgacaagatcagtggagttttatgagtcatcaagggatgctgtgacacctcacgttgtcaaagttaaagagtttgctcatccctactaccaggaagccaagaagttttctaagccttacattgatcaaattgctgagatcactaagccacatgttgagaaagttagaactactctgaagccatacactaagagagcagttcatgcgtatgggtcatttcttgggtctgcaaccacataccatcgacaggctcaggcgaccatcatggactacctccatcagcatggggtacccaagtcatttgcaacgaaggagttagtttggttcctggcttctgccttgctagctctgcctgtcttcgtcatatacaggcttgtagtagagaccttctgcaccaaaaagaacagaaggcctcgtggcggtaatggtaacggtaaccatggccagaagagacacaagcggcgatacgccgacaagtagaccaatctacccaacactttagggttcagcatgttgtgtttgcattgtcgcgcatctttgagcaatgagcaagattgggttgctcctccctcccggaggcactgttgaaccatacatggaggaaggagactcgggtcatgggcaccctttaccgtgagaagcgttgtagcctacaccaccaatatttctctttcttttacttcttcccaggtgtactatggacttcggtgcaggtgcagcggaccttttatattatctgcactttgctggggttcagggggttaggcctttgttttattggtcgttgtttattgtaacttgtgaattcgtttgagttcgtctgtttgtttttttggctggcgacctacattcgaacttgttagttgaagtttaactcaagttgctggagtgtcatgaacaggagaagagtgtctaactgacattgatgtaagcgaggagggcactaggaactttgtggt

SEQ ID NO: 118491 - DNA, 1959 bp, Zea Mays
ctgcacggcgaacgcgagtctcctaaacgataccgggcgggcaggcacacgagcgcgagcacgcacgagttcgcgagtccccctgacccccacgtgcgcgtcgttggaaccaaggattggattagcctcgccgacgacgaggagagaagagctggtggctggcgaggggctcgcggggatggggatctcgaggcccctggcgctccttctggcgctgctgatcgccgtcgccggcgcgaccgccgaggagcccgtagtggcggcggactcggtggccggcgcggtggaggccgcggcggcgctcagggtggaggaggctgcggaggccgcggcgctcagggccgagctggagcagctccgggcgaagatctccgccttagagtcagacatagcagtgcgatctctcgaactgaagaataaggacgatgtcatcgtgaacctagagaaagccattgcggagaagtcaaaggctattacctctatgcagggcgagattgcttctctccaggcaaaaggatctctagctgccgaggagcaggctaacaaggccaatgccaaggctgttgaacttgagaagcagattgacaagctcaaaaaggatattcaagcacaaagtagtcagaaagcagcactagaatctagggccaacgatgcagagaacaaggtggaaaagttgaatgaaaagcttaatacagaggaattgatgaggttgcagttagaagcaactgctaaatcaaaacagctgactgaggttcatggagcatggttaccaccttggttagcgacacactatgctcgttacatggaggttgtctcaggtcactggaattatcatggaaaacctgctgtgcagaatgttttgcataaggcatcagaaaaatcagcacatgcaaagaaatgggctgaaccacatattgagactgctaagatgaaatggattcctgttaaggagaaattggttgtcctcaagaaaaatgcagaaccttatgtacagaaggtatcgacaagatcagtggagttttatgagtcatcaagggatgctgtgacacctcacgttgtcaaagttaaagagtttgctcatccctactaccaggaagccaagaagttttctaagccttacattgatcaaattgctgagatcactaagccacatgttgagaaagttagaactactctgaagccatacactaagagagcagttcatgcgtatgggtcatttcttgggtctgcaaccacataccatcgacaggctcaggcgaccatcatggactacctccatcagcatggggtacccaagtcatttgcaacgaaggagttagtttggttcctggcttctgccttgctagctctgcctgtcttcgtcatatacaggcttgtagtagagaccttctgcaccaaaaagaacagaaggcctcgtggcggtaatggtaacggtaaccatggccagaagagacacaagcggcgatacgccgacaagtagaccaatctacccaacactttagggttcagcatgttgtgtttgcattgtcgcgcatctttgagcaatgagcaagattgggttgctcctccctcccggaggcactgttgaaccatacatggaggaaggagactcgggtcatgggcaccctttaccgtgagaagcgttgtagcctacaccaccaatatttctctttcttttacttcttcccaggtgtactatggacttcggtgcaggtgcagcggaccttttatattatctgcactttgctggggttcagggggttaggcctttgttttattggtcgttgtttattgtaacttgtgaattcgtttgagttcgtctgtttgtttttttggctggcgacctacattcgaacttgttagttgaagtttaactcaagttgctggagtgtcatgaacaggagaagagtgtctaactgacattgatgtaagcgaggagggcactaggaactttgtggt

SEQ ID NO: 118492 - DNA, 609 bp, Zea Mays
gtgtgcacatgtgtctggcagcgtgccccaaggagctgcaggtggagcgcggtggcacggtggcgtgccggagcgcgtgtgaggcgttcgggcaggaccagtactgctgcagcggcgcgtacgcgacgccggcggcgtgccgcccgacggcctactcgtccatcttcaagtcggcgtgcccgcgcgcgtacagctacgcctacgacgacggctccagcaccttcacctgccacagcgccgccggctacaccatcgccttctgcctccctccgtcgtccgggttgcacggctctgatgtcactcccctcgtttcgccgccggcgtctgggcaaagcaccggcagagttggcggcgatggcgtcggaagcgccgaccagccgcctcatcctgctactggcaacagtgatggagggggctaccatcagctgtggatgacgatgtcgctagccagcacgctccacgatcagctgtggcttctgctgcctctgcctgcagtgctcttgctcctcctctgaccaccctcccggcctcccctcgctcaccatgaagatgaaatgaagctcttgtactatctttcatgatgatgaggaggaggaggggacgacaata

SEQ ID NO: 118493 - DNA, 988 bp, Zea Mays
acggccgactccgaggccgacacgccctgtgaattgtgatgtgacacgatccatcattcgatccatgacatgacatgcatgttcaccatcaaccaccacaatcagcattagatccatcctacctttcggtcttgcaccacgggcgtggcgaggtcaccgatggcgcgctgcgcgtcgtagagcacggagacctcgccggtggcgaggtccctgcgcgtgacctggcggtcccagaacccgtcgatctcgcacagggtgtctccgggctcagccgagcggaagatcctgcccctgacgcagcgggcgtcgccgccgccgaagccgaggaaggagcggcgggtccggcagtagctgagctgggcctcgagcccggactcggcgcagacgacgcggacgtcgccggaccactcgcaggcgggcgacgggaagaggcggatcagcaggccggggcacccgataacgtacgtctcggcgtgccggagcaggcggagctcccgcgcgccgcgcaccgcggcctccacgctggcgccgtggaaccgcggcgcggggctctggcaccacaccagccgcacctccccgcgggcgtccgtggcgtgcagcgctgtcacgggcggccggtgcgagacctgctccaggagcacgttgaggccgccgccgcagccggaggtggtggagacgtggtgcgtctcccctagcaccgggttgtagggcgcgaagccgaagatggggggccgcgtcgtggagatgctccacgccaccacgcacgccaggcgctccaggctgtcgcgcccccgcgcgcaccgccccagcaggtcctcgccggcgcagtacacgccctcgccgtacagctgcagctgcgacttgggcaggttgaacgtcgccggcagctggggaaatgattgttcagtcaaagtcagaaacgcgtgagctggtggcagaacgtggcactcgcgtgacgcgtcgcatattcgcacgcacgcacctggaa

SEQ ID NO: 118494 - DNA, 1939 bp, Zea Mays
agggaaggactgatgtcatacaagcagttcatccaggaacttgaagatgatgtttcaccagttgaagcgcaaagcagatatgaggagtacaagtcagagtacatcacaactcagaagaaagcttactttgccctccataaggatgaagattggttaagaaataaataccatcctacaaaccttgaaaatgtcattgaaagaaggaatgaactggcaagaactactgcagatgatttcttcctacaattgcaaagtggaagtctggacaccggtccaggtttgactggttcggcagtgagcaaatcaggaaataacagcagtaaaaatctagatgctgtggaaggggatggtaaaaaggggaaacttggaaaaggttccgacgattcatattatgctgctcccaaggctcacccagttagttctgaagttcgtcgaattcgaattgatattgagcaagctcaaggtctcatttgtaaacttgattctgagaagggtattgaaaacaacatcctctcaagtagtaatcatgaaaagccagacatggataagtcacatggttcaatggggccaattgttatagtacaaggatcatctactgtgaagggtcttgagggtactgagttgctggacactcttgttacttatttatggcgtatccatggtgtggattattatggtatgtctgagacaaacgaacctaaaggcctaaggcatgtgaaagcagatgcgaggacatataatggggctagctcaagtgccaccgaatgggagaataagcttgattcattctggcaagatagaattcaaggtcaggatccattagaaatattgaaagcgaaggagaagatcgatggagctgctactgaagtattggatccatatgtgaggaaaataagggatgagaagtatgggtggaaatatggatgtggagccaagggctgcacgaaacttttccatgccgctgagtttgtccagaagcatattaaactgaagcacacagacttggtggttgatctaacttcaaaagcaagagaagatatttactttgaaaactatatgaatgacccaaaggcgcctggtggtacgcctatcatgcagcaacctgctccaaggggaaaaggcagacaaaggccaccaatagagagtcggctgagggatgagcgtggtaatcataggctcgacagtgatgggtccggtgaaaatcccgacgatcctgtttatgattcgtttggtgatccaactatgcatggcgccttccctccagatattcctgctccccctgttctaatgcctgtgcctggtgccggtccgcttggaccgtttattcccgcaccgccggaagttgccatgcatatgttgagggatcagggcgcgccacctccttttgagcccagtggaggtccacatcctaggaaagcagggaggggcagcggcggcggcggtcctccaatgcgtggtccgtccccagtcttcagtgctcctccgcctcatcatatgcatgaccctcgtcgaatacgaagctaccaagacctggatgctcccgaggacgaagtgaccgtcatggactaccgaagcttgtaggcttgcctccagatactcgtttaggtaaacattacagtgcgaaatcaaaacatcttgctctgtctaaaatcaccgcggaggaaccccagcaggcatctcagcacctgtgtctcgactcctgagctgtcatcttctcactgtttgtgaaacgaaacacactacaggacgctcgacaaaataggccaccgtgaaacacggtgttagctcagtctgtgcaacgcgaaagattttcgtccatgtttgagcactgtaaaacactgttcccaacataacgtccagctggacagagtagagtttaaatatggttagtgagatggatagtttgatggagataagatttattaggggattatctctt

SEQ ID NO: 118495 - DNA, 1614 bp, Zea Mays
aatggatgtaacagcagtggcagcatcaccagcaacagcacctcttctggcgcctagaggaggaaggagacagaccagaggtgctctggctctaatcgtggctgctgtctgtcgctgcctactcgtactccgcgctgtggaggtccgtcatggagaaggacctcggggaccgaaacgacccggccctcgccatctggccggcggtggcgtgcgcgctcagccgcggggacgggaacgtgggcggcctcctgcccctgagcccgccgcgcccgtgctggccctcgtcctcgtcctcgtcgtccgcgccctcctcgtcgtcctcctccaccaccgcgtggtccggggccagcagcggcggcaggtacgcggtggccagcgcgctgcacgacgcccgccgccgcgaccacgcccgcagcacgcgccgccgcttgttgaacgggttctccggcttcgcgatctccttggcggccgccgtcgcagccgcctccgccaggctcgtgaacgacttggacttgcccgcgtagaagttggacaggccccgcctacgaattcgttcctcggttagttcggtgttcaaggattatatattattactattctcattatagggcaagaaagagaggatcagcagggaaatgcattgctgctgtcaaaaccacgactgctgctaaggatgggaagaaaaaacacttctcttcttttctatgtacacatctcttgtcattgctagctactctactcggatctaaaccagcctcttacaatttcgctacaagaacattatttttcgcagcaaaaaaatcggatttttatccataaaacatgttgtctccagcagcggtcggttttgcaggagcaatttctagcggcatagtagaagaaacaacaccaagcagtagcagcagttactaatactagcggtagatcagatcaggaagagaaaggggattagcagagaagcaagcagcttacttggtgggcagggcatcgtccaaggactggagcgtggccagccccatcatgccgagcccctgcgccttgccttccacctcctcctcctccccgtcgctgccctccttgtcggacgcggagttctcgccgatggaggagctgtcggacgacgccgcgccgatcgacgaggcctccgacagcgcctcttcctccctccccgccgccgccgcctcaccgccacgctcttcctcttccttctcacgttcttggaccaagtacccgttggcgtccctcatcctgtccgcgtcctccggatccggcttcccgctccccgactgccggaagccgccgtgcgccggccgcgccaccgccgtggacatgcccgcgaccaaccaacctacctacctacctaacaaccgaacctaccaaccgaccgatcagcgaatccggcccggcagagcctccgccgcggcgcacctcgggccccggcgcccggatcgaccggccggcgcgcaggaggagagccgcggagcgattgagcgaaggcgagaaatcccggcgcgcgcgagcgagatgggtgggtgggtcagtgggtgggtgggcggagaggcagggagggggaggagacgggcggggaagggaaaggggcgagggggacaggat

SEQ ID NO: 118496 - DNA, 875 bp, Zea Mays
aaaagcctcggcggcttggcgctagccgctaccgccttgttgcattctatctatgcgttgtccttagcttgtccgcccgcccctccctcgtcttacctcctcctctctacggccggccagatgagctccacggccatcgacgtcctctcggcgctgccgccgatcaggaccgcggcgccggagccgggtgcggagaagaagcagcaggaggaggacggctcggaggcccaggagccggagcccacgacgccgacgtcggaggcgagcaggctgcggcctccgtccgagtgcccgccggcgccgaggaagcctgcgcggccgccgtcgacgcccgccaagcgcaggttcccggcgccgcgccgcgccttcttccccgtgccgcgcgacctcaacgccgtgttccgcgccctgccgcccaagaagcggatccgggcgggctgacggccgggccggtccgcgccgccgcggctcaagcggccgcttccaattgggttctagctacctggcgtacgtgcaggacgacgacgacggcaggcatccactcctgtactccgccaaaggccagccgcgcgcgtgtggtgcactcgtccttcaaggaccatggcgtcaaaacgcagtcttgggagtttcttgcacaccttggtttgtccttccggcatggtacaaactacagactcgagatccagagttctcgtacaaatcgtgggttaggttcattatttgcgtggaggagtaaaaactgtagaactggacaaggctattgtttatttacatacggatcatgaatgggaagaattaatggaagaaaattcccgaggatggatccgtttcagtatattcgtcattataaaactaaagctcacagtttgccaaaa

SEQ ID NO: 118497 - DNA, 124 bp, Zea Mays
gaggaaagcaaactgagactacaacaatgggttacaggttcttggtgcggagcataatgccagttcacaccggaaatgtcgaatcacaaccggaaaaaagaagagtgatcctgccggggagcaa

SEQ ID NO: 118498 - DNA, 308 bp, Zea Mays
aattgtttgatgtggctaagaggagttactattgaagggggtctttcattctttgaacttctagccacctggtataggatcctaaggacaacagagactccatccatccttagcaatgaccatgatcaatgttagcaaaaccatatatatcctgctctcaatcagtaattcagtatcaaccagtggttgctgttgcagcttccttccagtctggtggttatctgaagcagcaattcctacaccttcaacagcctatgcagtctccacaggagtagtgcaacctcaatccactgttgcaacaacaaata

SEQ ID NO: 118499 - DNA, 1456 bp, Zea Mays
ataaggatctgtcttacttatgcagtctagtttaattaattgaattaatttattgttattttttggtaaattccgaatcctaaaattcggtataaattctgataattgcttccgttttagattcgaaaaagtataatctgtggcgcccaacggtactcatactcagcgcccccagaccgcgaggagttgtcggcggcggccacgagtggcgtgcatattgcagtgacgtcccgaaggattcatcactccacaaccgttgtgtccgaggcttcgacagcggaggccgtaacgatgcaatcggaagcgccgatatcggactattgtgttctccagttcgacctcgaagattcggagacaaagaacatcgccatcgggcactctatcagctacgatgatatctccttagggggacacctctgggggattaactgctaccctcgtggggatagggaagaggaaaagggcgagtacttttccttattcctctaccttattggcgactcaaaaggcaaaggcgtcaatgtcatcttccatgttttttgtctggaaagagaaggcgaagcatctgccttctccagtttctccgatgataagaggctagccaaagtgttctcaagtaaatgccccgaataccctgaaggccaccgaagccatgggtggcataagtttatgaagcgaagcgttcttgagtcattctttatagtaaatggtagggtgacgcttatatgtaccatcatggttctgggtgccggcaccattccagtgccaccctccaacataagttctgatcttggttgtctgctcaaatccaatgtcggtacagatgtttcattcattcttaaaggcaagatgatccaggctcaccgtgctgttctcgctgcccgctcgccagtcttcaaagctcagctatttggcaacatggccgacgccacagcgtcatccatcacactgcaggacatggagccagcaacttttgaagctatgcttgccttcatgtacacagatgagatgcctgaagataacgagcttggaggctctcccactcaaatggtgcagcatctgcttgctgcggctgaccgctatgcattggacagactgaaactgatgtgtgctcggaagctatgggacattatttcgatggatacatttgcttctactctagcctgcgcctatatgcacagctgtgcagagctgaagagcaagtgcattggcttctttgccgtggagaataatttcaagaagatagtgttcacagctggtttcatatggttggtgcaggaatttcccgatcttgctgatgagctgaaagagacaattgggatatagtacaacatgctgaaacctctacgtgtatatagtctacgtattcaaccgtggattcactgtgtgccattttggaactatgtatggttgatcttgttaccatatttcttgaattgctgatcttgtagatttc

SEQ ID NO: 118500 - DNA, 288 bp, Zea Mays
aggatggatcacatagtcgggggcaagttcaagctcgggaagaagatcaggagtggatcattcgggaaactttacctcaccgtgaacgtgcagaatggcgaggaggtggctgtcaaactggaatcagtcacatcacgacatccacagcttcactatgaatcaaaactatacatgcttttgcagggtggaactgggattctgcatcttaagtggttcgggtggaggggcagtacaatgtcatggtgattgatctgcttggtccaagtatggagacttatttaactgctg

SEQ ID NO: 118501 - DNA, 3742 bp, Zea Mays
atggacccggacgacgaaccagcggcgcagcggaaagccgtcgacttgcacctgccgcgcgacacggagcctgcctcctcgcccgcgtgcacccgccgcgccgcgccgcgcgtgctcagctactgtgacgtccctttcgcctccgcctcggcgcagcgctgcgcatcattcccgcagcgccacggagagctggcgcacgcccgctcggcctccttcgcagcctggatcgaaggcggctcggcgtcggcgccggcggcggcactcgagcgggccatgtcgcagtacggcggtgcggacggcgcgctgccagagttcgtcggcgccggcggtggcgagggcatcttccgcgtgccgctccgcgcggcgatgcacccggcgcgcccgccgccgctcgaggtgcggccccacccgctgcgggagacacaggcgggcgcctttctgaggacgctggcctgcgacccgcggcgacggcagctgtgggcgggcgccgagtccggggttcgagtgtggggcctccacgaggtgttccgtgggtggtggccgggcgccgggccgcggcgccgcggtgacgaggaggccgcgccgttcagagagtccgtgccggtcccgcccgcgctctgcgccgctgtcgacggcgctaacgggatggtgtggacggggcacagggacggcaggatcagggcgtggcgcatggaccacgccgcgcccgccggaggatactccgccggcagtgcgcccatgttcaaggaggccctctcgtggcaggcgtacagtcgcacgccggtgctcgccatcgtcgtcacgttgtacggtgaaatttggtccggatcagaaggcggtgccataaaggcatggccttgggacaccattgctaagtccctctcatttacatcaggagaacgtcataacgctgcctcgctggttgaaaaatcttatattgaccttagaaaccatgctacaattggtaacatgtgctcattgcctgctgctgatgtgaaacacatgctcgcagacaactgccgagcgaaaatttggagtctaactagcatgacatttgctctttgggatgctaagactagggaacttttaaaagtatttggcatcgatggacaagtcgacttagctcgtcctgaggccccagtaatgcccgaacaattcatagaggaagagattaaagtaaaacccacaaaaagggagaggccgcaaggttctttcacattttttcagaaatctaggaatgccttgatgggcgcagctgatgctgtacgcagagttgcaacaaaagggacatttgtcgaagataatcggcgaactgaagcagtggctcaagcaatgaatgggacaatttggtctggttgcacagatggttcaattattgtttgggatggaaatgggaatagactgcgagaatttcattaccatagttcttctgttcgatgcataaagacactcggagacaaggtttgggtgggctatgcaagtggcactattcaagttgtcgatgtcgaaggtaaccttcaggcaggatggattggtcatagctgcccagtcatagacatggcaattagtgattcttacattttttctttggcacatcatggtggtattcgaggatggcctctaagttcccctagctccctagatgatattctatgctatgagttggctagcagggaactgttatacacaaggctagagaaccttaaaatactggttgggacttggaatgttgcacaagagaaagcttctcctgaagcactaaggtcatggttgggtggtgcattttttgatgttgggctggtggtggttggtttgcaagaggtcgagatgggtgctggagttcttgccatggcagctgccaaagaaagtgtagggcttgaaggcagtgccaatgggcagtggtggatagacagtattggcaaaacacttgatgagggaatatccttccacagagttggttcaaggcagttggcaggactacttattgctgcatgggcaacgaatgaccttaggccacatgttggtgatgttgatactgctgcagtgccatgtggctttgggcgtgctattggcaacaagggtggcgtcggattaagaataagagtctttggtcgcaggatatgttttgtaaacaatcattttgctgcacatcaagagaatgttagccgccgcaatgctgattttgaccgcatttatcggacaatgactttcaccaaacctcagggatctgcagcttctgctacagctgtccaattgcataaagcagtgagtgctaatgaaaatcaagcagatgaaggtaggcctgatctggcagaagctgatatggttatcttccttggtgatttgaactaccgacttgatggcatcacctatgatgaagcaagggacatggtctcccagaggagctttgactggcttagagaaagggatcaacttcgagcggaaatgaaggcgggaaatgtgtttcagggaatgcgtgaaggcccaatcagatttcctccaacctacaagttccagagacaccagtcgggtctctcagggtatgattcaggcgagaagaagagaatacctgcttggtgcgacaggatactgtatcgagatagccgtcctgtaccaatagctgaatgctcattagagtgccctgtcgtcgctgcaatcacagcgtacgaatcttgcatggatgtcacagacagtgaccataaacccgtgagatgtacattcagcgtcgatattgcaagagtagacgagctgataaggaggcaagagtttggaaaaataatcgaatctaacaaaaaggttcgctctttgcttcgagagctccgttctgttccggacaccgtcgtcaacgcgaacaacattacattggaaaatcaccaagaagatgtcatcctccggataactaataactgtgaaaccagcaaggccgcttttgaaatcctgtgtgaaggccagacagtcagaaagcagggcggaacccaatctgaggagctgctcccaagggcgtcctttggcttcccactttggcttgaggtccaaccatcgatgggtctcatcggcccaggagaaacagcggaagtcgtcgtgcgccacgacgacttcctgacgcaggaagagtacgtcgacggagcacagcggaaccggtggcgcgaggccacccgagacctggaggtcgtgctctcggtgacagtcacgggcagctccagctcctcggccgaggccgtcgcgcacagggtcaccgtccggcactgctgcccggcgcctccggctcccctgcccgccaaccggcgctctgccgctgcctcgcctcgtgacgacgttgccgcgtcggataaccagtcgaaccacctgcaccgttccgatctcgccagcttcggtagctcggaggtgcgtgacctgtgcgggggcttgtgaaagcgagtttcgctgcctttgcttcatcgtcctgcattcctgctccttacatgtgcgtcgtcctgccgttctttgcgtgtcgaatcaaaaagcgagagagaaagaaagagagaggaaaaaaaaggaagaaagaagagagtgcaattgttgtaattacctgtagtaggtaaaattttcaagctaaccttttttttttgaccttcttaagttaagtagtagatgtggcattgaaattgtgttggtgcaaagtggagtgagtgtatggttgtatgtatagtaatggaggttgtatgcttgtatagtctattgattggacgatgctttgctccta

SEQ ID NO: 118502 - DNA, 852 bp, Zea Mays
caagaacagagcagtactgcaggagagcgagtgagctgtccaaagcgtccggccaaacccgcgtgtgtccaccactcctcctgcacaagcaccgccacaatgcggccgcacaccctggcgctgctcctgctcctgctggccacgccggcggcgacgcgtctggcatcggccgcctgcgcgggcgagaagttccccgcggggcgggcgtacgcggcgtgcgaggacctcccgaagctgggcgcgtcgctgcactggacgtacgacgcggcaaagagctccctgtccgtggcgttcgtggcggcgccggcggcggccggcgggtgggtggcgtgggggctgaacccgacgggcgagggcatggccggcgcgcaggcgctggtggcgctggcggggtccgggtccggctccgcggcgcccaccgtgcggacgtacaacatcacggggtacgtcccgctggggaacgtctcgacgccgctggacttcccggccaccgacctcgccgcggacgccgcagccgggggcaggatccgggtgtacggcacgctgcagctgcgcgaggggatgagggccgtgaaccaggtgtggcaggtcggcgcgtcatccaccgccggcgcccccgacaagcacgcgttccagccggacaacctcggcgccaagagcaagctcgtcctcgccggcaagtcccccgcggcggcgtccccgtcgcccgcccccgcgcctcatgcgtccggcggcggcgcggcgtcgtccaagtcccccaacgccgccgcggccgcggccggcgtggccgcgccggtagccctcgtgctcgcgctggtgggattcttggcgacggtttgttttaggctgtga

SEQ ID NO: 118503 - DNA, 878 bp, Zea Mays
attcgaccagtctgtcttcgctagggtttttagcccgtataagagccccttcctcactccggaaccccattccccgccgcctcgcgcccccgctcgcttcacttctctaggtgcgcaccgatcagaaggtgcctgcctcctcctcgtcggcgaaagtatcccgctggtttccttgttcctttgctcgatgtttgctcatcgcctcatgtttgcgtgtttgctgttgtttgtcggtggtcggtgggtgacggagcagagatggcggtgccgctgctgacgaagaagatcgtgaagaagcgggtcaagcagttcaagaggccccacctcgaccgctacaagtgccttaaggtttgaatctccaccctcttgtcatctctggaatggactgttcttcggaggtggatctgtgtacttgatagaagtcgatggtttgtagagcagcgatattcttatgttgccttggcactggcttaacacatgatgtattgatacagtatgattacgtgcctggtttaatcttgcctagatccgcatcgttaatgtttgtaactgtaattagctacgagcgctggtttaatcgtacctagatggttagatccaaccggcttattttgtaactagcccatatatagttttcttgaatggcatgccgatgcttggtgacagcagatttgcgttacctagactgcaagtgcttcaaactgaagtattgaactgcctctgtttgggttgaataagtgtatttgaactcccacggacatatatatagcagcatagataattacattgcttatcccttgcccaatggaattttctcgcttgatgtcatggaatttttcgcatgtttctatttttatgtagagaaacataacaatcat

SEQ ID NO: 118504 - DNA, 818 bp, Zea Mays
attcgaccagtctgtcttcgctagggtttttagcccgtataagagccccttcctcactccggaaccccattccccgccgcctcgcgcccccgctcgcttcacttctctaggtgcgcaccgatcagaagagatggcggtgccgctgctgacgaagaagatcgtgaagaagcgggtcaagcagttcaagaggccccacctcgaccgctacaagtgccttaagccaagctggcgcaggccaaagggtattgactcccgtgtcaggaggaagttcaagggatgcaccttgatgcccaacattggttatggttctgacaagtcgaccaggcactacctccccaacaagttcaagaagtttgtggtccacaacgtttctgagctggagttgctcatgatgcacaacaggacctactgcgctgaaattgctcacaacgtgtccactaagaagcgcaaggagatcgtggagcgtgctgcgcagctcgacattgtggtcacgaacaagcttgctaggctccgcagccaggaggacgagtagtctggtttcttgtcttaacgacgaactggatgttgccattcctttctgtaggaaactactttgcttgtgtcttgttagtactgaaaaccagagtcactcctacctttttgcaatcagtagctactaaaatgtggcagattccactatttccttgcatctatctaaattatatgcgttacatggtttcacctgccatcttgacattcgttgataatacatagcgctcattaggccaagctctgccgttccccagagttcccgagagtttatccaatagagtaattct

SEQ ID NO: 118505 - DNA, 938 bp, Zea Mays
agtctgtcttcgctagggtttttagcccgtataagagccccttcctcactccggaaccccattccccgccgcctcgcgcccccgctcgcttcacttctctaggtgcgcaccgatcagaaggtgcctgcctcctcctcgtcggcgaaagtatcccgctggtttccttgttcctttgctcgatgtttgctcatcgcctcatgtttgcgtgtttgctgttgtttgtcggtggtcggtgggtgacggagcagagatggcggtgccgctgctgacgaagaagatcgtgaagaagcgggtcaagcagttcaagaggccccacctcgaccgctacaagtgccttaagccaagctggcgcaggccaaagggtattgactcccgtgtcaggaggaagttcaagggatgcaccttgatgcccaacattggttatggttctgacaagtcgaccaggcactacctccccaacaagttcaagaagtttgtggtccacaacgtttctgagctggagttgctcatgatgcacaacaggacctactgcgctgaaattgctcacaacgtgtccactaagaagcgcaaggagatcgtggagcgtgctgcgcagctcgacattgtggtcacgaacaagcttgctaggctccgcagccaggaggacgagtagtctggtttcttgtcttaacgacgaactggatgttgccattcctttctgtaggaaactactttgcttgtgtcttgttagtactgaaaaccagagtcactcctacctttttgcaatcagtagctactaaaatgtggcagattccactatttccttgcatctatctaaattatatgcgttacatggtttcacctgccatcttgacattcgttgataatacatagcgctcattaggccaagctctgccgttccccagagttcccgagagtttatccaatagagtaattct

SEQ ID NO: 118506 - DNA, 837 bp, Zea Mays
agtctgtcttcgctagggtttttagcccgtataagagccccttcctcactccggaaccccattccccgccgcctcgcgcccccgctcgcttcacttctctaggtgcgcaccgatcagaaggtgcctgcctcctcctcgtcggcgaaaagatggcggtgccgctgctgacgaagaagatcgtgaagaagcgggtcaagcagttcaagaggccccacctcgaccgctacaagtgccttaagccaagctggcgcaggccaaagggtattgactcccgtgtcaggaggaagttcaagggatgcaccttgatgcccaacattggttatggttctgacaagtcgaccaggcactacctccccaacaagttcaagaagtttgtggtccacaacgtttctgagctggagttgctcatgatgcacaacaggacctactgcgctgaaattgctcacaacgtgtccactaagaagcgcaaggagatcgtggagcgtgctgcgcagctcgacattgtggtcacgaacaagcttgctaggctccgcagccaggaggacgagtagtctggtttcttgtcttaacgacgaactggatgttgccattcctttctgtaggaaactactttgcttgtgtcttgttagtactgaaaaccagagtcactcctacctttttgcaatcagtagctactaaaatgtggcagattccactatttccttgcatctatctaaattatatgcgttacatggtttcacctgccatcttgacattcgttgataatacatagcgctcattaggccaagctctgccgttccccagagttcccgagagtttatccaatagagtaattct

SEQ ID NO: 118507 - DNA, 792 bp, Zea Mays
agtctgtcttcgctagggtttttagcccgtataagagccccttcctcactccggaaccccattccccgccgcctcgcgcccccgctcgcttcacttctctagagatggcggtgccgctgctgacgaagaagatcgtgaagaagcgggtcaagcagttcaagaggccccacctcgaccgctacaagtgccttaagccaagctggcgcaggccaaagggtattgactcccgtgtcaggaggaagttcaagggatgcaccttgatgcccaacattggttatggttctgacaagtcgaccaggcactacctccccaacaagttcaagaagtttgtggtccacaacgtttctgagctggagttgctcatgatgcacaacaggacctactgcgctgaaattgctcacaacgtgtccactaagaagcgcaaggagatcgtggagcgtgctgcgcagctcgacattgtggtcacgaacaagcttgctaggctccgcagccaggaggacgagtagtctggtttcttgtcttaacgacgaactggatgttgccattcctttctgtaggaaactactttgcttgtgtcttgttagtactgaaaaccagagtcactcctacctttttgcaatcagtagctactaaaatgtggcagattccactatttccttgcatctatctaaattatatgcgttacatggtttcacctgccatcttgacattcgttgataatacatagcgctcattaggccaagctctgccgttccccagagttcccgagagtttatccaatagagtaattct

SEQ ID NO: 118508 - DNA, 696 bp, Zea Mays
actcgccagctcccccgtcctcctccatcgcgctgcgcgtttgcaactcccagtcccacctccggcgcgtctgccagccagtagtcagtagacttgatcatgtcgtcgcggaagcatcacgagctgccggagggaggagcaggggaagcggcgccggccgcacggcggtgtgggacaccgagagctccctgtacgactcgtacgagctggccgccgtgcgccggctcctcgacaagcgcctcctcgccctccgcgacgctgaagagacgaggggcaagggcaggcaactggtggtcgtgccggtcgtcagcagcaggggggtccaccacaggaggaaggccacgctgagggcgctcttcagggcggtggccacctgtgcggccccgccgaggcaggcgccgccgctcgcctgtgcctgcgctgctggcatggtccatgaccaccagggtggttccgcggtcgagccggaggatctgccgtcccacggtcaactttgatgatcatccctgtgtttagtccatttgttcttgcattgcattggcgcaagttgtttttttccttttgtgtttatctattgctgtgggggtttttttacgctgtcctgttcatgcgatggttggccattgaagagtactgagcccaccggatctgtatacgtgaatctgcgtgaagcatacgaaagcttttggcggtgaa

SEQ ID NO: 118509 - DNA, 1974 bp, Zea Mays
atgtcggcggccgccgtcctgtgccgcctcggcctccgcctccgccgcctctccacgctctccgaactccccgcggtcgcggcgggagcgccgcagccgcagcacccgacctcgaaggacgcctacttcgcggcggtgcaccacctctccaccatcgtgcggcgggacttctacctggagcgcaccctgaaccgcctccgcctcccgtccccgttccccaccgacctagcgctccgcgtcatccgcgccgccgcccccgccgcgccgctccacgccacgcgcttcctttcctggctccgcgccaagccgtccttcgccgcctcagccgagcacttcgacgcgctgctcctcccactcgcgcgcgcgcggctcttcccccacctctggtccctcgcctccgacatgcgaggcctcggcctccccctctcgccgaccaccttctccgcggtcatctcgtcctacggccactcccgcctccccgaccaggccgtcgaggtgttcaatcgcctccctcgatttggctgcccgcagaccaccgaggtctacaacgccctcctcgacgcgctctgcgccaacggcaacttcaccggcgcctacaagctgctccgcaggatggcgcgcaagggcgttgcacccgaccgcgccacgttcagcaccctcgttgactcctggtgcgcggcggggaagctccaggaggcgcaggcgttcctcgatgacatggcgggccgcgggctccgcccaccggtgcgcggccgtgacctcctcgtcgacgggctcgttcgcgctgggcatctggagcaggccaaggcctttgccctccgtatgaccaaggaaggcatcctccccgacgttgctacattcaactcccttgccgaggcgctttgcaatgctggagacgtggacttcgccgtgtctcttcttgctgatgcttccagtcgaggcctgtgtccagacatctcaacatacaaggtgatgctaccggctgtggccaaggttggcaaaattgaggaggcattccggctgttctatgcggctgttgaggatggccatcgtccattcccgagtctatatgcggcaatcatcaaggcgctttgtaaggcaggacgctttgcagatgctttcgctttctttggtgatatgaagacgaaggggcatccaccgaatcgccctgtgtatgtgatgcttgtcaaaatgtgcgtgaggggcggtcggtttgtggaagctgcaaactacctcgttgagatgagtgaggcagggttcacaccccgggcaccgacctttagtgctgtagttgatggccttcgacattgtgggaagcatgaccttgcccggagattggaacagcttgaggtgtccctgaagggaaattagatagggtttggttctggagttagttaggatggaacaactcttcaggagcagcttcgttcgaggattttgggaagcataattttctatttttagaaccactcgattttatatgaaatcatccaaacaaaaataaattaggagcataagggctcaattttaccatatttcggaaccaaacactatcttaagataacgtttagttccgaagtatggtgggacagagccatttcactctcagtttattgttgtttggattggttccacgtacgatggagtgattctaaaaatgaaaaaatatgttcattcccaaaatcttctggacagagccgcttccggggacggagctgttgtatcccaagtgactatggaagcaaacgctatctaaatagatggggaactagatgcggttttctcttccagtttggaccttgcaagctgtgtggtgctgctactagattttcaggtagaaatgacacttatatttcttcttcgtgtaaatttaatctcgtcataagccagtaaaatctgctgttttgttgtgcctaacaagatttaccaacttttcaagtgtccaaaataagattgatggattgttattttttt

SEQ ID NO: 118510 - DNA, 975 bp, Zea Mays
atggctgtcccacaagttgacaagaaaatgcttggtgaacttgaagccatgggattcccaactgcacgttcagttagggcactccatttttcaggtaattccaatcttgaatctgctgtaaactggcttctggaacatgaaagtgacccagatattgatcggctaccactgattccaagagaaataagcattgaatgcggtgacacatcagatgaagtaagaaatgacgttgaaggaatgagggatactgtgcaggagcagaaacctaaagaacacactgaaactgggagacagaatgagacatcccagttggaacgagaaccaaatgcagatggacaggaggaagaagatagaaagaggatattagcactatataagcaaaaacgagacgaggaagggagggcaagagggcggatacggagtcaattacaagaggatcagagggagaggattcgagctgctaaagaccttatggaagcaaagagaagtctcgaggaaaatcaaaggaagcgggtgatggagagtcgggtagcagatcaagaggaggagaaaagagcgagggagaggatacgccagcgtatagctgacgataaggtaaagcctgctggacgcgccgtcgttgcgtcagagcagctgagagactgcctgcgaaccgtgaagaagaaccacagggatgaccctgctgcagtggcaagagcgtaccaggtgttgctcaagattgttggcaacgtagcgaagaacccaggggaggagaagttcaggaggatccggctcagcaaccctgtgttcaaggacagggtgggcagcgtgcgaggcggcgtggagttcctggagctgtgcgggttccgcaggttcagcggcatcgggtacctggtgatgccgagggacaaggtcgacgtggctctgctcaccgccgccggcgtcgagatcgcgtcggccttggagaacccctacttcggcctgctctccaagtga

SEQ ID NO: 118511 - DNA, 294 bp, Zea Mays
atggcgagaagagatatgggaattgacggggcaggcgcggtaatggcgagaagagatctggtaccttccatccgcgggcgcatccactgccgagatagagttgaacgccagcgggatttgagggcacggtggatgcacgatttggggagaggaggaggaggtggtggaccttccatccgcgtgatttggtggcgcaaccttccatccgcgggcgttggtggcgcggggtgcgggggcgatgcggccgcgaggacggcggctgcgatgcgggccgagctggacctgcgcggctga

SEQ ID NO: 118512 - DNA, 300 bp, Zea Mays
atgttgaaagactacatgttcaaactcaaagaaaaagaagagaaatacaggcaacaggagaacaaaaagatacagactctacttgtaaagaggcacgagaattcaataatgtcaagggccaacacaagcttcagccgtccatcaagcagaagcttcaatacaagtcctggctccacatccatctggagcaaccaagtttctgccaaagttcaactgcctgccttagagaacttccctgctgaaaaagatatgcacacaaaaagagttaggaacagagaggatgtgaaagacgccaattaa

SEQ ID NO: 118513 - DNA, 460 bp, Zea Mays
actgcgtccagccgccccttcctcaatcgcgcccagcggctcccatggcgagctcgccgggatgccatgctccagccgacttccctccccgtcttctccctgcttctgctcggagctccagctcagctccctccgtgcgtccgcgacctttgccgtggggctccttcctgcgcgcgccggacgccgggttgtcttcaacctccagccgtggatttcctgccgtggagcttcgttttcccgtgcgcgcgtctcatctccatagcgctcggctctcctcctccctgtcctctgtgcgcgcgtgtgagaggtgaccaggcctagaataggtgtgaagtgtgtgtgcgtgctgggcgtgatgggtggagtgggccactgtaaccgggatacatatacactgtcttgtggagggggaaagggaatgcataatgggaattatcaatagaattcttctcgttccttt

SEQ ID NO: 118514 - DNA, 653 bp, Zea Mays
ttgattttttctgctcgctgctcgctggacgctgagttctctggtgtttgcgcaccgtgaagttcctccagtgccgtggctttccagttccttctagtcgcgcgcgcgaagttctctgctcgccacgacgtgtcgagctttcgcgtcgagtttctttcttccgtgaccggttgtcgtcttcgagccgattcttggttgtcgtagtatttttagttatcccaactgcgtttgtggtcgtcaagcgtgtctgttgccatgaactcgtccctggtgcccactctgtctctggtccgcgcttccttcagctcggccaggtggggcatcattccatgctgtgctcgcccaagtcactgccatcaaatcgtcggagtcgctcaactcgccaatcacatcttggcctattgtcaattttctatacgtcatggtacaaccccgttgttaaatccggtctccaacccgtcatggcgttcgtcgtcctctggtcccaacccgacccatctgtgcactcgctcctcatccatcgggtttcggcgtgtttgtgtttacagtcgagtcgtcgaacccatcatcccctgctcgacccccacctcaccagctcactccaaacacgatctcgtcgtcgttccgtgcgtcgtcaagaaatcccaagcgtc

SEQ ID NO: 118515 - DNA, 522 bp, Zea Mays
ctgtcattcttccctaacctcatagtcaagcccctctctacaaattattcagataacacaatagttatcactgaattggtaaccatcggtgtgcataacacaatatttaccaaaataagaaccaacgtcgccagtatggggccagtgaggttagggttggacttgagcacgatctgctcgagcgaggatgatgatgtgaacagcgcgggcggcgccgaagcagccgaagatggagagcgtccggaggtgcggcaggccacgcagcgaggcggggtcgagcctggccccgggcctgcagggcggggtggtgacgtcggggcccaggtggaggcgggtggcgcggagaacacatgcttcgtcgggcgcgagctcgcactgcaggctcggccacggcgtgtcggtgtagggccgcgggtggagttgcggccacgtcgtgtcaccgaggaggtccgccatcacctgaaagatggccgccagctccgccctcgatagctccagcgccggcgcgtcccctccggggat

SEQ ID NO: 118516 - DNA, 1450 bp, Zea Mays
ttcttggtgaggtctacgtgaaggtagtggaacgagatcaccttccgagacgagaaaggaatcactcgttttcctccgggcacattcctccgagttcggacggcaacgccttttatggccgccgttgcctcctccttctcgcggttctccttccgctgcgccgtctgcccctccccgctccgcgtccgcttttcgcagccccatccgcccgcgcggctccgcgtctcctccaccgtcgttgctctccacaagcgcaaccccaagcggctcaagtacgccgccgagcgccagttcacgtctctttggtggctgggttttgcgcgaacgaagagaggggatgccgggttgctgcgggtggaggtggagccctccggcggggacttctggaagcttgaccccattatcgacctcatcaatcgcggcgccgtcggggtgatccctactgacaccgtctactccgtcgtctgtgacctgagtaacaatgaatcgattgagcgccttcgcagactgaaaggcattggagactccaagcctctcagcatcctgtgtcgctcattacgtgacatcgatacctacacaacaggatttcctcaaggcactaaccaagggcaagctaacatttttcgtgttgtcaagcgtgcaatacctgggccttacacatttattttacctgcaagcaagcagtttcctaaacaatgtataaagcatggttcttccacaaggtatgcaaaaaggaggcaggttggcgtccgaattccagatgatcccatctgccaggcaatattgcaaaatcttgatgaacctttgatatgcacaagtgtcaaatatctatcggaggatgaatggatacttgatccagtaatcattgcagatctttatgagccactggggcttgattttattgttgatggcggacctagaattgctgacccttctaccgtagtagatatgatgggagcaaaccctactgtaattcgtcagggaaagggtctaaagttggattggatggtagcaaaagatgaagaggaggacgaggcacagtcgatgttttctttcaaatcagcttgaaatttgcttcgcctgacctgtatgggctggcactttgctatggtcccccaaccgaagcgtcttctttcaactgcatataggatgtcagttgttagctgtaagcatagatgtcgaacacgaactgcgtgctgtaaatatgcaaggcgatgtaagcgaactggcagaatttgctcagtagcaacctttgctggaggtgatggaaagtttcctgctggttttcttgaactttgccgtgtacgcctaccagaatttccgtcctggaaggttccatattattccaattcatcctgcttctgtgatgcttttaattcgagaagcataactttttgggataattatgattatatccttcgctagacttgtaattattattttaccctct

SEQ ID NO: 118517 - DNA, 1417 bp, Zea Mays
ttcttggtgaggtctacgtgaaggtagtggaacgagatcaccttccgagacgagaaaggaatcactcgttttcctccgggcacattcctccgagttcggacggcaacgccttttatggccgccgttgcctcctccttctcgcggttctccttccgctgcgccgtctgcccctccccgctccgcgtccgcttttcgcagccccatccgcccgcgcggctccgcgtctcctccaccgtcgttgctctccacaagcgcaaccccaagcggctcaagtacgccgccgagcgccagttcacgagaggggatgccgggttgctgcgggtggaggtggagccctccggcggggacttctggaagcttgaccccattatcgacctcatcaatcgcggcgccgtcggggtgatccctactgacaccgtctactccgtcgtctgtgacctgagtaacaatgaatcgattgagcgccttcgcagactgaaaggcattggagactccaagcctctcagcatcctgtgtcgctcattacgtgacatcgatacctacacaacaggatttcctcaaggcactaaccaagggcaagctaacatttttcgtgttgtcaagcgtgcaatacctgggccttacacatttattttacctgcaagcaagcagtttcctaaacaatgtataaagcatggttcttccacaaggtatgcaaaaaggaggcaggttggcgtccgaattccagatgatcccatctgccaggcaatattgcaaaatcttgatgaacctttgatatgcacaagtgtcaaatatctatcggaggatgaatggatacttgatccagtaatcattgcagatctttatgagccactggggcttgattttattgttgatggcggacctagaattgctgacccttctaccgtagtagatatgatgggagcaaaccctactgtaattcgtcagggaaagggtctaaagttggattggatggtagcaaaagatgaagaggaggacgaggcacagtcgatgttttctttcaaatcagcttgaaatttgcttcgcctgacctgtatgggctggcactttgctatggtcccccaaccgaagcgtcttctttcaactgcatataggatgtcagttgttagctgtaagcatagatgtcgaacacgaactgcgtgctgtaaatatgcaaggcgatgtaagcgaactggcagaatttgctcagtagcaacctttgctggaggtgatggaaagtttcctgctggttttcttgaactttgccgtgtacgcctaccagaatttccgtcctggaaggttccatattattccaattcatcctgcttctgtgatgcttttaattcgagaagcataactttttgggataattatgattatatccttcgctagacttgtaattattattttaccctct

SEQ ID NO: 118518 - DNA, 1351 bp, Zea Mays
ttcttggtgaggtctacgtgaaggtagtggaacgagatcaccttccgagacgagaaaggaatcactcgttttcctccgggcacattcctccgagttcggacggcaacgccttttatggccgccgttgcctcctccttctcgcggttctccttccgctgcgccgtctgcccctccccgctccgcgtccgcttttcgcagccccatccgcccgcgcggctccgcgtctcctccaccgtcgttgctctccacaagcgcaaccccaagcggctcaagtacgccgccgagcgccagttcacgtctctttggtggctgggttttgcgcgaacgaagagaggggatgccgggttgctgcgggtggaggtggagccctccggcggggacttctggaagcttgaccccattatcgacctcatcaatcgcggcgccgtcggggtgatccctactgacaccgtctactccgtcgtctgtgacctgagtaacaatgaatcgattgagcgccttcgcagactgaaaggcattggagactccaagcctctcagcatcctgtgtcgctcattacgtgacatcgatacctacacaacaggatttcctcaaggcactaaccaagggcaagctaacatttttcgtgttgtcaagcgtgcaatacctgggccttacacatttattttacctgcaagcaagcagtttcctaaacaatgtataaagcatggttcttccacaaggtatgcaaaaaggaggcaggttggcgtccgaattccagatgatcccatctgccaggcaatattgcaaaatcttgatgaacctttgatatgcacaagtgtcaaatatctatcggaggatgaatggatacttgatccagtaatcattgcagatctttatgagccactgggtctaaagttggattggatggtagcaaaagatgaagaggaggacgaggcacagtcgatgttttctttcaaatcagcttgaaatttgcttcgcctgacctgtatgggctggcactttgctatggtcccccaaccgaagcgtcttctttcaactgcatataggatgtcagttgttagctgtaagcatagatgtcgaacacgaactgcgtgctgtaaatatgcaaggcgatgtaagcgaactggcagaatttgctcagtagcaacctttgctggaggtgatggaaagtttcctgctggttttcttgaactttgccgtgtacgcctaccagaatttccgtcctggaaggttccatattattccaattcatcctgcttctgtgatgcttttaattcgagaagcataactttttgggataattatgattatatccttcgctagacttgtaattattattttaccctct

SEQ ID NO: 118519 - DNA, 1872 bp, Zea Mays
attcctcctcctccgaagcagcaggcagcagctgcatcgcacctcacacctctcgtgtccatcgatccagccgccgccgcagctgcagctctcacttcactgttgctgtgccacctcctcgtcgcctgtagtgtctgtcgatagataaacgcccgcggaatgagagggaaggagcggaagctgcagcgggcgcgcgcgtgcaagggctaggactagcggttgcaacgtcggcgcgcgcggcgtacgtcgggcatggattgggatctcaacgcggcgggcgcgtgggacctcgcggagctggagcgggaccacgcggccgcggcgccgtcgtcggggggccacgccgccaatgctgccgcggcgggcacggggacggagagccgcccgccggcgcccggggcagcaggggcacccgccgagtgctccgtggacctgaagctgggcgggatgggcgagtgcgagcccggcgcggcccgcagggagagggaggccgcggcgggggcggcgaagcggccgcgccccgccgggcccggcgggcagcagcagcagcagcagtgcccgtcgtgcgcggtggacgggtgcagggcggacctgggcaagtgccgcgactaccaccggcggcacaaggtgtgcgaggcgcactccaagacccccgtcgtcgtcgtcgccggccgcgagatgcgcttctgccagcagtgcagcaggttccatctacttgcggagttcgacgccgacaagcgcagctgcagaaagcgtctggacgggcacaatcgccgccgcaggaagccacagccagacaccatggcttctgctagctttatcgcaagccagcaaggcacgcgattctcaccatttgcgcatccaagactggaggcgagctggccgccgggggtgatgaaaaccgaggagagtccatatcacatcactcaccaaatccctctgggctccagcagcagcagcaggcagcagcatttcgtggctctgggagccgccacgcctgcctacgccaaggaaggccggcgcttccctttcctgcaggagggcgagataagcttcgccaccggcgtggtgctggagccgccggcggcggctccagcgtgccagccgctcctcaggacgggagcaccatccgagagcagcggcgccggcggcagtaagatgttctccgatcaggggctggctcgcgtgctcgactcggactgtgctctctctcttctgtcagcgccggccaactcctccggcatcgacgtcagcaggatggtccgcccgactgaacacgtccccatggcccagcagcccgtggtcccgggcctgcagttcggcagcgcgtcgtggttcccgcgcccccaggcttccacgggcggctccttcgtcccctcctgccccgccgcggtggagggcgagcagcagctgaacgccgtgctgggccccaacgacagcgaggtgagcatgaactacggcgggatgttccacgtcggcggcggcagcggcggcggcgagggctcctcggacggcggcacctcgtcgtcgatgcccttctcgtggcagtagtcgtcgtcacttgtcagcagccgctgcgttctctcatctttcgcgcttcagacgatctggtagggagatactggctttagtgatcactgatcagcattgatttctgttctttttcctgcattcgctttgttgaatcggctctgctcgccagcattcgtgtggacattttttgaacataattctgtgttcgtttccctcacattatctttgctacggtgacacctgccggctgctgaccgtagcatgttccttctcttgtgacttgttctcgagacgtccatttgatgcagggcgcatccagaatttttcagttgcagtgca

SEQ ID NO: 118520 - DNA, 1766 bp, Zea Mays
tttttttcgttatcttttttctctctctctttttcctgaaaaccaaagagatgaaaaaccttcatctcgttcgttcgtttcctcctgtagctacggtacctgaattattggcacgcctttttcctttctcccggcctcctcctgcgctcgctgctgctgctgcacactgctctcaggcaggcctagcgttcgtttccttcactttctctgacgccctgatgcgaattaacatctgctgctccccaatcgtctgctcaagattcagcccgctgccacggacacgtgagctcctgcgcttgcttttccgagcggtttcttgctttcacgccctttggcggcgacgggacgggatgcccccccccccccccccccggtactctgccattggctcctcctctagtcggcgctgcttgcttcccggcgacagttcgccaccgccgcagatgaagcgccgccacggtttggcgtgccgcgttgagcgagacaggggtgtactcccagctttggctaccatcaatcatttgatgtttaggtgccgcgttgtgagctgtactgctacagtatctctgcagaatgtattctgtagtagtatgaaaaggttccatctacttgcggagttcgacgccgacaagcgcagctgcagaaagcgtctggacgggcacaatcgccgccgcaggaagccacagccagacaccatggcttctgctagctttatcgcaagccagcaaggcacgcgattctcaccatttgcgcatccaagactggaggcgagctggccgccgggggtgatgaaaaccgaggagagtccatatcacatcactcaccaaatccctctgggctccagcagcagcagcaggcagcagcatttcgtggctctgggagccgccacgcctgcctacgccaaggaaggccggcgcttccctttcctgcaggagggcgagataagcttcgccaccggcgtggtgctggagccgccggcggcggctccagcgtgccagccgctcctcaggacgggagcaccatccgagagcagcggcgccggcggcagtaagatgttctccgatcaggggctggctcgcgtgctcgactcggactgtgctctctctcttctgtcagcgccggccaactcctccggcatcgacgtcagcaggatggtccgcccgactgaacacgtccccatggcccagcagcccgtggtcccgggcctgcagttcggcagcgcgtcgtggttcccgcgcccccaggcttccacgggcggctccttcgtcccctcctgccccgccgcggtggagggcgagcagcagctgaacgccgtgctgggccccaacgacagcgaggtgagcatgaactacggcgggatgttccacgtcggcggcggcagcggcggcggcgagggctcctcggacggcggcacctcgtcgtcgatgcccttctcgtggcagtagtcgtcgtcacttgtcagcagccgctgcgttctctcatctttcgcgcttcagacgatctggtagggagatactggctttagtgatcactgatcagcattgatttctgttctttttcctgcattcgctttgttgaatcggctctgctcgccagcattcgtgtggacattttttgaacataattctgtgttcgtttccctcacattatctttgctacggtgacacctgccggctgctgaccgtagcatgttccttctcttgtgacttgttctcgagacgtccatttgatgcagggcgcatccagaatttttcagttgcagtgca

SEQ ID NO: 118521 - DNA, 1142 bp, Zea Mays
accgcagcccgccccactaactattgactgtcggattccctacccgtcggcgacaatccgctgcccccaatctgcctggtaggtctcgcacctccggtcatggctgccgaagctggcccaatctccaaggtcctcatcgtcatagcaatgcagaaggaggcgacgccgctcgtccacaagttcaatctcgtcgaggcgcccgcccaccaatccacttttcctaaaggtgccccatgggtttggtaccatggcagctacaaaggcctccacattgaccttgtattgcctggaatggatgctgttcttggagtcgacagtgttggtacagtaccagtagctgttgtgactagtttctccattcaaacattgaagccagaccttatcattaatgcgggcactgctggtggcttcaaggccaaaggagcaagcattactgatgtattccttgcatcagatgttgcattccatgacaggaggataccaatacctatttttgacatgtatggaactggagcacgcaaaacttttgcagctcctaatatcttgaaggagctcaatttgaaggttggcaagttgtcgactggggattctctggatatgtgtccccaggataaggagttgatactgcgcaatgatgctacaataaaggacatggagggagctgctgtagcatatgtcgctgacatgttctcgacaccagcgatctttgtgaaagctgtgactgatatcgtggatggggtgaagccaacgtatgaggagtttctgcagaacctgattgccgtgacgacggcactggagctggcagtcaccaaagtggtggatttcatcagcgggaaacgcatctccgatctttgaaagctcgtggtcacgaaatccaacatccccctgctctgatgcacgatgctaggctaggatacaatacaacgttgggtcaatgattttttttggaggtgttctatacgtgaggttttaccccttttgcaatggctcttgatctattcctgaataccgaccagagcagttgtctcttgctaaacagaaggaatgtaaagtgagcaaacatgccattgatcgttgcgaccaaactaacaatgtctgtgcgctgctaaggcacgcatcggcgactattctagagacgattc

SEQ ID NO: 118522 - DNA, 1067 bp, Zea Mays
accgcagcccgccccactaactattgactgtcggattccctacccgtcggcgacaatccgctgcccccaatctgcctggtaggtctcgcacctccggtcatggctgccgaagctggcccaatctccaaggtcctcatcgtcatagcaatgcagaaggaggcgacgccgctcgtccacaagttcaatctcgtcgaggcgcccgcccaccaatccacttttcctaaaggtgccccatgggtttggtaccatggcagctacaaaggcctccacattgaccttgtattgcctggaatggatgctgttcttggagtcgacagtgttggtacagtaccagtagctgttgtgactagtttctccattcaaacattgaagccagaccttatcattaatgcgggcactgctggtggcttcaaggccaaaggagcaagcattactgatgtattccttgcatcagatgttgcattccatgacaggaggataccaatacctgttggcaagttgtcgactggggattctctggatatgtgtccccaggataaggagttgatactgcgcaatgatgctacaataaaggacatggagggagctgctgtagcatatgtcgctgacatgttctcgacaccagcgatctttgtgaaagctgtgactgatatcgtggatggggtgaagccaacgtatgaggagtttctgcagaacctgattgccgtgacgacggcactggagctggcagtcaccaaagtggtggatttcatcagcgggaaacgcatctccgatctttgaaagctcgtggtcacgaaatccaacatccccctgctctgatgcacgatgctaggctaggatacaatacaacgttgggtcaatgattttttttggaggtgttctatacgtgaggttttaccccttttgcaatggctcttgatctattcctgaataccgaccagagcagttgtctcttgctaaacagaaggaatgtaaagtgagcaaacatgccattgatcgttgcgaccaaactaacaatgtctgtgcgctgctaaggcacgcatcggcgactattctagagacgattc

SEQ ID NO: 118523 - DNA, 137 bp, Zea Mays
tcatggaaagacacatgccagacaacagactcaaaggaaaataatgacgacaacaacatggaccacccataaaatagatttagcagagaccaatacatgggaaaatggatttaaaaaatgtacccttgattccgagc

SEQ ID NO: 118524 - DNA, 2456 bp, Zea Mays
ctgagacccacgcacgcacgcttatcggcattcggcaacccacgaaagagcacagcgaccgccgaccggtgccggagcctgccgcacaacgatccggtcgcgcccgtccgtggcccagagaagatcccaaccccgcccgtccgccgcggactcccgggcccgccgcctcgtccgttttccgaatcggccgcgcggggtaccgcggcgccgggggccgcccggagctccgtccgagtccgttgccgggagccagccagggcgcaacgcgagcgcaatggcggaggtggggagccgggtgcgcgggttcctgcggaaccggtggctggtgttcgtggcggcgatgtggatgcagtcgtgcgccggggtcggctacctcttcggcagcctctcgccggttatcaaggcctcgctcggctacaaccagcgccaggtcgccgggctcggcgtcgccaaggacctcggcgacagcgtcggcttcctcgccggcacgctctgcgccgtgctcccgctctgggccgcgctcctcgtcggcgccgcgcagaacctcgtcggctacggctgggtctggctcgccgtcacgcgccgcgtccccgtgcccccgctctgggcgatgtgcattctaatcttcattggtaacaatggggagacatacttcaacactgccgcacttgtctcgtgtgttcaaaacttccccaagagccgtggaccaattgttggcatcctcaaaggattcgctggattaagtggtgcaattctaacgcagatttatgcaattgtacactctcctgatgatgctgcactgattttcatggttgcagttggcccaacaatggttgttatagctttaatgttcattgtaagacctgttggaggccacagacaagtgcgaccttctgatggcacaagtttcacatttgtatacagtgtctgcttgctgttagcctcttatcttatgggcgtcatgttattggaagaccttgttgacttaagccagtcagtgactgtcgtgttgaccgtgattctaatcatgtttctattagttccaatagtcattccagttctactcagcttcttttcggatgatgacgagactttgtatgcactattgttgccatcacctcggaaagaagaagcaagtgcatcaacatcttctgaggagcaacatgaggttatactcagcgaggtggaggatgaaaagccaaaggatgttgatttacttccagcctcagagaggcaaagaaggatagcagaattgcagacaaggttatttcaggcagctgctgttggtgctgtcagggttaagaggaggaaaggtccacggagaggagaggatttcacactgatgcaagcgctcatcaaggctgatttctggcttctatttttctcccttctgctgggctctggatctggtctcactgtgattgataatcttgggcaaatgagccagtcattgggttacgaggaaacccacatatttgtgtcaatgattagcatctggaactttcttggacgtattggtggagggtatttctcagagattattgtcaaagattacgcatatccaagggcgatcgcattagcgatagctcaagtcctgatggcgatcgggcacttcaacttcgcgatggcttggcccgggacaatgtacatcggcacgctgctcgtcggagtaggctacggcgcgcactgggccatcgtgccagccgcagcctcggagctgttcggggtgaagaacttcggagcgctgtacaacttcctcacggtcgcgaacccagcaggctccctggtcttctcgggggtcatcgcgagtggcatctacgacagtgaagcagcgaagcaggctcagcagcgccacaactccacgtcgctggcgatgagtggcagagtggctggcatggtctctggagccgctccgtcgttgaagtgcgagggcgccgtctgcttcttcctctcatcgctgatcatgtccgggttctgcatcatcgcttttggcttgagcttgatcctggtctaccgcacaaagatcgtgtacacaagtctatacgggaaaccgcgtacttgaaggatcaaccctaaagggacacagggttatcaaagcatacttcaatttttaatttattagtctggtaccccatgcctgtacaggtacagtgtcggtcttcccgttgttgtgcacaggttctcaagcagcatttcaacttttcaagtatgtggctgcaaatgggagcttcagtatagcgaagcatgtgagagtagaaagtccgtctgtggctggactgggacgctgtccttggctcaagttttgctgtatttggttgtgaaaaatttgtgtacacatgtaataagctagagacgtttcgacgcatgtcagagtggagaacatattcttttatgatttgttgaaacttgcgtatttgtatctatcacaaagaaaacagtccaacttgtcaaccggc

SEQ ID NO: 118525 - DNA, 2081 bp, Zea Mays
tttaggtaaactatggggatgtttagatggccgcctaagccgccgccgcccgccacacttcccacgccaccagtgtggcgctcgttttgagcgccacaggtgtggcgcggcgtggccgccggcgcgccgatccaaactagccctatgtatctgcgcaccgtttaacatgtcgccgccggttggaattccctactccattccgagctgccgccatcgccaccactgcgccgccaattcgaatcggatccccactccgttccgagctgccgccatcgccaccgctgcgccgccgattcgaatcggatccccactcctttccaaactgccgccatcgccaccgctgcgtcgccaatgggctcgacgtgcctgtcgtgcggcgagggcgcggtggtggcagacgcggactcgggcgtgctcgtctgcacctcatgcggcatcatccaggacgccggcggcgcggagttcgtccaccagtccaccttcaacgagtcggggggcctcgatcgccgcgtctcctccctcgtccgcaacgactccgactccgcctaccgcgaccagaagctcgccatcgccaccgcgggcatcacctccatcgccacccgcctcggcctgtcccacacccgcgccgaggaggcgctccgcatggccaagtccgccaccgacggccagctcgccaccccgggcagcgccttcctccctgccctcgccgccgcctgcgcccttctcgtcgcgcggtcccaccgcctcccgctctccctcgccgaggccgcggaggccgccttctgctccgcgcccgccctcgccgacctggtctcccgcgtcaccgcccagctatccctccctcccctcccatgcttcgactacaccgccgcgctcgaccgtgccgtgcacctctcgacctcgctcaacgccgccgcgcccgacaagacggacgccattctcgcccaggcccggttcctcttccgctgcgcatccaagtggtcgctcaccacggggcggtttccacttcccctcgtcgcggctctgctcgccttctctgcggaggtgaacggggtcacttctgtctctttggaggacattgcaagggacatctcggcaggattgaggaccagcctgctccgatacaaggagctcgttgacgccctggtgcatgtcgcggggcacctgcttccatggggtgccgatgtcaatgccaagaacctgctcctcaacgctccggtcttgctccggctcatggagatgcggtcacaatcggacccttctgaagagtttcttatgagctgcgctccgaacattgctgcaattgtgcaggctaactctaaagttgatgacgaagtgtctaaataccttcacattactccagtgggttctgatgactttgatttcgataatcttgagccagaggagaaagaatttgaaaatcagaatatctcagagaagggcctatcagatgcttaccaaaatgtcttaaataggcttgcccagctacagaaacttgggaaggttggtaaaggtactgacaggaggaagcgattgaaaggaggactggagctggagccatgcatggacacagtgaataatggttggagaaaggacatgctgcttgaggatgtggtggatattgacgttggctatgatgcacctccaccatcgtttactgctggtttggagttgcagaagcagaggagagcacgtattgaagctgctaagcagcgaattgatgcaactaggaaggctcctgctgctccagctgcaaaagcaaataactcagaagacgttgtaagaaaaaaattgaccatgaagaatcgagggggaaagaagaaggatgatatcgatcatatccttcccagtgacaatatgacaggttgttcaggtgctaggaaaaagagacgaagaggttcctgtgacagtattgattgggaagattgcatcattgagctcctgctactgcatggtgcaaatgaagctgagattgaacaaggccagtacagaagattgttggagttgcatgtattcagtgcagtaagtggggagaattgaaaaatggtaatgctatgtctcaagtcctcaatatatgatct

SEQ ID NO: 118526 - DNA, 418 bp, Zea Mays
ggtaattcttgatttagaagcacgagttgatcgttcaaagttctagtgacaatctaaaggaaatgtgagcaacttacatttgttactaaaagaagctagatcagtatatagctccaggttgctccagaaccaaattattgggatgacaagtcttctcagacaagcgtacaacagtaaccatagactctgtatcttaaaacaacaatatttccaatcaaattgagctggctaagatgccttcacgaggtcaaagacagcgatgaatggcatcagacgggagttttttgctattttggtattcaaaactaaacgcttctctctaatggtactcttaatattagattatttataatagtacttttaagtggagtgttttgctaaaataatatttagggtgcttttaattctttttattttt

SEQ ID NO: 118527 - DNA, 649 bp, Zea Mays
gtagtctcaagtgttcgccgttgccttcgctgtattagctgctggtgctatagttctgacactcaatgttctactgctgggtgggaacatcatcttcttccaaagcctcagtcttctcggatactgtctgttcccgctggacgtgggggctctgatttgcatgcttaaggacagcgtcatactaaagatggttgtggtgacggtaacattggcatggagctcttgggcagcataccccctcatgagtgctgctgttaacccaaagagaaaggccctggcgctgtatcccgtgttcctcatgtatatctcagttgcatgtctcataattgctatagattaaggcgggcatggtttctacagaactaacagaagaattacaggattttgttttctagctggatcatcaaaatgcatattattttctttttttggctgcgtatagatctgggttcacattgttattgtagtttttgctggctgcttcaatactttatttcattttgtttaagaaaaaaatcacagggatttagaatgtagtcaatcaaatgtatgaatgttgtatagccatacagatatcttgctgtttcgcatctatgtggataatctggaatggactgctgaagcctgaataagtgaattactctgtttt

SEQ ID NO: 118528 - DNA, 778 bp, Zea Mays
gcacatctgcaacatcgatctccacacacaaacatccatcaaagaaacaagcgcccacgaacaactacctcgccaccaacaatggcctccaggtcctccattgtactcgccacggtgatgttggctgcgctgttcgcggttggtttctgcaccaccccgctcaccttccaggtcggcaagggatccaagcctggccacctgatcctcacccccaacgttgccaccatatccgatgtggagatcaaagagcacggtggtgatgacttctcctttacgctcaaggagggcccgactggcacgtggacgctcgacaccaaggccccactcaagtaccccctttgcatccgctttgctgtcaagtctggcggctaccgcatcgccgacgacgtcatccccgccgatttcaaggctggcaccacctataagaccacactcagcatctaatcaacctctcatgatgaattatatttcaaaagagctcacctagcgcatgtgttacaagacaatattattttttcaatggctttttttggcaccagaccacccaagaaataagttatgctacatgtctcttctgacgccttgttgtgttgggttgatattattacataaactaaatacattatttatttaagattttaggagaaatatgttgatctgatccaccttcattatcgagatggttgtacatttgattttccaatgttttaatacttatgaaattctttgtttttgttgtttctatgcctggattaataaagtttgttttatcattttt

SEQ ID NO: 118529 - DNA, 709 bp, Zea Mays
cacacacacacatccatcaaagaaacaagcgcacaagatcaaatacctcgccgccaacaatggcctccaggtcctccatcctgctcgccatggtgatgctggctgcgctattcgttgttggtttgtgcaccacccccctcaccttccaggtcggcaagggatccaagcctggccacctgatcctcacccccaatgttgccaccatatccgacgtggagatcaaagagcacggtggcgatgacttctcctttacgctcaaggagggcccgactggcacctggacgctcgacaccaaggccccgctcaagtaccccctttgcatccgctttgctgtcaagtccggcggctaccgcatcgccgacgacgtcatccctgccgatttcaaggccgacaccacctataagaccacactcagcatctaatcaatctctggtgatgaattagatttcaaaagagctcatctagcgcacatgttagcaagacaatattattttttctatggttattttgtggaaccaaaccacccaagaaataagtgatgctagatgtaccttctgaccttgttgtattgggttgatattattacataaactaaatacattatttatttaagattttaggagaaatatgttgatctggtccaccttcattatcgagatggttgtaaattacattttccaatgttttcatacttatgaaatgctttgtg

SEQ ID NO: 118530 - DNA, 973 bp, Zea Mays
tgttttttatttcttttttatgagaggagtgcatgtcatgcgtttattttgaacttttgcatgagaggaaaagagctaggacctacttatagcaattgtatacacgtgttagtctttgaactagctggcctgggttctttcacagaacaaaaataggctggccagcgatgtctgtggcgtgccatacgtcaatgtctagcttccttgcctccattttccataaatacatgtgcatctgcaacatcgatatccacacacacacatccatcaacgaaacaagcgcacaagaaaaaatacctcgccgccaacaatggcctccatgtcctccatcctgctcgcaacggcgatgctggctgcgctgtttgcggttggtttgtgcaccaccccgctcaccttccaggttggcaagggatccaagcctggccacctgatcctcacccccaatgttgcaaccatatccgatgtggaaatcaaagagcacggtggcgatgacttctcctttacgctcaaggagggaccgaccggcacctggacgctcgacaccaaggcctcgctcaagtaccccctttgcatccgctttgctgtcaagtctggtggctaccgcatcgccgacgacgtcatccccgccgatttcaaggccggcaccacctacaagaccacactcagcatctaattagcctctcatgatgaattagatttcaaaagagctcatctggcgcacatgttagcaagacaatattattttttctatggttattttgtggcaccaaactacccaagaaataagtgatgctacatgccccttctgacgccttgttgtgttgggttgatattattacataaactagatacattatttatttaaggttttaggagaaatatgttgatgttgaccacattcattatcgagatggttgtacatttgattttccaatgttttcatacttatgaaatgctttgtttgtgtagtttc

SEQ ID NO: 118531 - DNA, 683 bp, Zea Mays
cacacacacacacacatccatcaaagaaacaggcacacaagaacaaatacctcgccaccaacaatggcctccaggtcctccatcctacttgcaacggcgatgctggttgcgctgtttgcggttggtttgtgcaccaccccgctcaccttccaggttggcaagggatccaagcctggccacctgatcctcacccccaatgttgcaaccatatctgacgtggagatcaaagagcacgggggcgatgacttctcctttacgctcaaggagggcccgaccggcacctggacgctcgacaccaaggccccgctcaagtaccccctttgcatccgctttgctgtcaagtccggtggctaccgcatcgccgacgacgtcatccccgccgatttcaaggccggcaccacctataagaccacactcagcatctaatcagcctctgatgatgaattatatttcaaaagagctcacctggcgctcacgttagcaagacaatattttttctatggttattttgtggcgccaaaccacccaagaaatatgtgatgctacatgtcccttatgatgccttgttgtgttgggttgatattattacataaactaaataaattattcatttaagattttaggagaaatatgttgatatggtctacctccaattaatcagctaagggcatcccattccaccc

SEQ ID NO: 118532 - DNA, 504 bp, Zea Mays
atctgcaatcaacgacggcgcgtctcgacggtactgctaattagcctcctagccagcctccgcctggaggtccatccccgacctcgacgcttcccggccaaacgccgacgcccctcaccctcggcgcagcgccgcagcgtcgcggtgctccatacccatccccctccatggtcggcgcctgcatcccccggcatcgcggtgctggatcccctccctctctcgcgttacgctagagttcgagaaggggaaaagcgacgtagggttcggcaacgacacctctgtgtcccctcctccctcgcgcactcattttccttcgtctcgttgctactcagagtgcgttccatccgagcggtgatgtgagatgtgtcccccctattcttcatcggtttgcttgcaatgattgagatagatgtgctcattcgccttgcagaaaatgaaaaataaagatatctttgtgcccagattcagagatggtttgactacctaatcatatatgcatggtac

SEQ ID NO: 118533 - DNA, 756 bp, Zea Mays
catgcgcatctgcaacatcgatctccacacacacacatccatcaaagaaacaggcacacaagaacaaatacctcgctaccaacaatggcctccaggtcctccatcctacttgcaacgtcgatgctggctgcgctgtttgcggttggtttgtgcaccaccccgctcaccttccaggttggcaagggatccaagcctggccacctgatcctcacccccaatgttgcaaccatatccgacgtggagatcaaagagcacgggggcgatgacttctcctttacgctcaaggagggcccgaccggcacctggacgctcgacaccaaggccccgctcaagtaccccctttgcatccgctttgctgtcaagtccggtggctaccgcatcgctgacgacgtcatccccgctgatttcaaggccggcaccacctataagaccacactcagcatctaatcagcctctgatgatgaattatatttcaaaagagctcacctggtgctcatgttagcaagacaatattttttctatggttattttgtggcaccaaaccacccaagaaatatgtgatgctacatgtcccttctgatgccttgttgtgttgggttgatattattacataaactaaataaattatttatttaagattttaggagaaatatgttgatatggtctacctccaattaatcagctaagggcatcccattcaaccctcatgattgtactgttatcccaggcggtctctcaacgaacatgtccttatgg

SEQ ID NO: 118534 - DNA, 721 bp, Zea Mays
tccacacacacacacatccatcaaataaacaagcgcacacgaacaaatacctcgccgccaataatggcctccagatcctccattgtgctcgccacggcgatgctagctacactattcgcggttggtttgtgcaccaccccgctcaccttccaggtcggtaagggatccaagcctggccacctgatcctcaccccgaacgttgccaccatatccgacgtggagatcaaagagcatggtggcgatgacttctcctttacgctgaaggagggcccgaccggcacctggacactcgacaccaaggccccgctcaagtaccccctttgcatccgctttgctgtcaagtctggtggctaccgcatcgccgacgacgtcatccccgccgatttcaaggctggcaccacttataagacgacactcagcatctaatcagcatctgaagatgaactatatttcaaaagagctcatctggcgcacgtgttagcaagacaatttttttctttggttattttatggcaccaaaccacccaagaaataagttatgctacatgtccatatgatgccttgttgtgttgggttgatatttttacataaactaaatacattatttatttaagatctttggagaaatttgttgatctggtctagctttattattgagatggttgtacatttgattttccaatgttttaatacttatggaatgctttgtttgtgttgtttc

SEQ ID NO: 118535 - DNA, 559 bp, Zea Mays
atggcctccaggtcctccatcgtgcttgccatggagatactggttgcgctgtttggggttggttcgtgcaccacccctctcaccttccagtcggaaagggatccaagcctagccacctgatcctcactcccaacattgccaccatatccaacatggagaacaaagagcacagcaacaatgacttctcctttactcctaaggagggcccgaccggcacctggatgttcgatacctaggccccgctgaagtacccctttgcattcgctttgctgtcaagtctagcggctactgcatcgctgactacgtcatccctgctgatttcaaggtcggcaccacctataagaccacactcagcatctagtcagcctctgatgatgaattatatttcaaaagagctcatctctcgcacgtgttagaaagacaatattttttctatggttattctgtggcaccaaaccacccaagaaataagttatgctacatgtcccttctgacgccttgttgtgttgggttgatattattatataaactgaaatacattatttatttaagattttag

SEQ ID NO: 118536 - DNA, 2204 bp, Zea Mays
tttgttagttacaacactaacgattcctccactttctaagaaagaggttattacaccttgcaacctaactttagtccccttatgctagaactccaaagccttttgtttccaatgataaagcataggatcatagttctgcaaccaatcaaatcctaagataacatcatatgaacccaactctagaattctcatgtcagtgctaaaagaatggccattacaccaccattctactgcaggtaccatagaatcactcaccgactccttaccattagccacctttaccttgacagcaggacaactgatagatggtaaccccacttgctgcacaaaagcagaattaatgaaagtagtagaactgcatgtgtccaccaataacaaaaatgcttgatccttcaccaatgcttgcaaacgaatattctgcatacttttagtaccagaaatagctagcatcgacggtttacaagactccttgtctgatgacagcccccctcgtagaagtcgacctctacctttctccaaaacttcagagtgcaactttgccaatagcacaacacgattcaccgtagttggtacttgacacaacactgagccccgaatatcaggtttgaggcccttcacaaattgttgcccaaagaaaatttcatccaacgtaggattgtgcatagcagtggaataacgtaacccaacaaactcctctacatactcatccactgaacccgactactgcagatgaagcaggtcatgcatagcttgggggtactcataagaaccaaaagtactcaccactacagcagtaaactgattccaatttcaaagaggttgattcaacttgtaaacctgcagctatttcgctgccttgccttccatatgcatagaggctgccatcacccacaacgatgcctgagcatgatagagagtaaagtaatccttgcacttagcaaaccaaatagaaggatggtcaccctgaaagttgggaaaccacaatttcatcatagaagcatttccaccaccatcatcacgtccatgtcgatgtccacctgcaccatgatcatgcattggatgccgcccatcctgatcaaattcatccatctgatgtggagaaggtacgcctccagaatccgaatatagttcagaagaaggttccccaaactggtccatccgctcagccatccgttccaaagtcaaggctaccaccctcttccatatttcatcaatatgccgtgccatgacatcctgatccttcgccacttgctccgccatagatgatgatagacttgctgacccatcaactgttggtgattggtctccaacttttgcaaccgtccactgatggagtccagcgctgcaaacatcttatcccaccgagtctcatccgaacgattcgtctccgccattgcttccaagacgaagcgcgtctgcaccgaaggtcgagcagacggagccatgatgccaccccgacgaacgacgtccctgaaccacccaccaagcacagaaagatgcctcccaggacaatgaatctggtaccagttgtaatgcccctggccgccgaggagagttcctcgcagacgtgagccgcatacatgagtaggagaactgtctccagtacgcgagaggaaaaaggaagcagcgaagaaacctatgcaaacaaggttatccaagctgctaaagaaccagggctacgtccttaccataatccatatccgagagttgaactgatgaacccatgggcatgggctatttttgcacatacctcaatactaatccatgcatagatgttgtttacacttcgcagtgggaggcaatgcaactcaatagctgattttgatcttactggacatttagtgtggccaagggcagtcctgatgaacaactaactatctcaacaccctgaaactcttaagggatgttcagtaatcgagctacgatctgggattggtgagaaaattcactgccagactccctgctgcctttggttgtatgaaagctaaatatattatgacctgttgtatgcatttctggcgtattgtgtagccgtttctgcaagggtggtagagcataaatgatgcagttaccttctatacttgcatcattccttattattcagttgaagtgccacacatattgttagataaatgctgcacttcagatatccattgtgtatcgtgttacctgtttaattgcaacacatttgaatgtctttactt

SEQ ID NO: 118537 - DNA, 862 bp, Zea Mays
atttttgactgactaaattagtgctctattgaacactgaatgctgaatgactgacactggattattatttctcgtagcacagactctcgcgaagcgcgaacaatctactcgttcaaataaaaaccaatatgatatgtggtaacttcaccttggtttcatacaccttttcagttgaactgatgaacccatgggcatgggctatttttgcacatacctcaatactaatccatgcatagatgttgtttacacttcgcagtgggaggcaatgcaactcaataggtaacataattgcatttaaagttctgttctaccagttctgtgatggtatggatgattctatttaagcctcaatgtctcagcattagttatattggtggattcctcaaagtatgattgttcacatttattcattaccatggcagcaccgcttacagacattttaatgattggtgcagctgattttgatcttactggacatttagtgtggccaagggcagtcctgatgaacaactaactatctcaacaccctgaaactcttaagggatgttcagtaatcgagctacgatctgggattggtgagaaaattcactgccagactccctgctgcctttggttgtatgaaagctaaatatattatgacctgttgtatgcatttctggcgtattgtgtagccgtttctgcaagggtggtagagcataaatgatgcagttaccttctatacttgcatcattccttattattcagttgaagtgccacacatattgttagataaatgctgcacttcagatatccattgtgtatcgtgttacctgtttaattgcaacacatttgaatgtctttacttacctggtattttttgtgt

SEQ ID NO: 118538 - DNA, 624 bp, Zea Mays
atctacaacaggagatcatcatataagtaaacattgcattacacgaatgtctagaacccagctgaaacaacatgctccaaacatgctaccaacattcaacagagaatggaaaaaacacttatttacaccagaagagagatgggatcacaacaagtacaaagagaagaagctcatgggtcagttaaatctactgatctgcaggtgcttgtcaagaatactgacaataatgttgggaggattgtcaaagcactattgtttgggcaacctttcaagttatgttctcgagctgaagagattgatgcaactgccagttctggaagtgatctttctcttcacttagaccttcttccatgccctcaagagcctaaatatgcgttgcatttacgagtttctgttgtgaggattcctgattgtggtgtgcttgcttctttaaagataaattcatcctttggaggaagtgagtaccaagacatggtagatcaagctttgaacgagtactttaagtttgataggttcctagcaagaggagacgtttttggtatacaaaacagttggaagtgtgtctcaagctgctgcctggcatgcaataagcaggataataaactgaatcttggcatgcaataa

SEQ ID NO: 118539 - DNA, 1257 bp, Zea Mays
cggattgaacaggtttacaggcgcgctcccgcacgcatgccccaacccttttttgacaagctcagcgtccaccactaaacgtaagatggcggcggagaccaaaccggctgcggccatcggggttgccggcgagatggaggtggaggcataccgccgcctattcccggtggccttcctggagcgccacctgggtgagtccgtccgcatcgatgcccgccgcctgagagaggcccgcaccaccaccgtcgccctcggcgccgtgtcctccgcgcatggttccgctctcgtccgcgttggcgacaccgccatgctcgcgtcggtcaagctcgaggtgatgtcgccctcggccgagtacccagacgaaggatccgtctctgttgagttccacatgccgcccatctgctccccgctggttaggccaggccgatctgcggaggtggcaccagtcatctccaaggcccttgaagacgttttgatgagttccagaatgctaaatttgaaggacctctgtttgataactgggaaggcttcttggctagcatacctggatatctattgtttgaatgctgatgggtctctgtttgatgctgcacttatttcagcagtggctgcctttacacatttggagattcctttagtttctgttggtgacgatggtaaattatttactgttggaggcaatgacggaaaaaacaaatttgaattggtaaacagagaaaagaggaaactgacacttggcgacattccattgtcccttacatgtgcacttcataaaggatctatactaacggacccaacttctgaagaagaatcaattatagagacctatgtgactgttgtcgttgattcttcagaccgcctagtgtcattacaaaaagttggaggcacagtgacatccatggcaactattaaggagtgcattagcttggcgaaagaaaggaggctgaggctaagagaaattctgatagactctgtcaaagccatggaagtcgaccatactgaataattctgcaaatacattcagttaatctaaccggattatttcttgatggttctctgtgcctcggctgcactgattgtaacagcatttttgttgggttagtccaagtatgtagctatttgtactccgcacatgatttttgacttaagtagccagacaattttatctgatgagcatgtctgcaatgcaccatttctcgcaagttgctatcttgtaacaccctaattcacattttgcagtattttaatttatttttc

SEQ ID NO: 118540 - DNA, 125 bp, Zea Mays
taaaaacccagaagaaattttggagataggatggaatgtaccagacccaaataaaatatttaaaactcatgtaaatgtgtttacatgcctaaaaaatagatctagctttagaaaaatgaaaacaa

SEQ ID NO: 118541 - DNA, 1230 bp, Zea Mays
ttattcgttcctagaaatgcaccagtgagtaggattcttgattttctttttctcttttcctttttcagaggaacgcagtatcactggatggtttctaaacggagggccaacaggatccgaagatgatgatataagtttcacactgaccgtggaaacgtttagcttcgaagagctctctgctgcaactgataatttcagtagcaccctcaggataggctctggggggcaagccacagtctatgaaggccacataccccacattggacaggttgctgtcaagcggttgagaaccaatgattttccctctaagcaaagggcatttcttatggaggtctatgtgctcaattcaactaaccaccctcacattgtgaaactactcggttgctgttctgagggaacagaacgacttcttgtgtatgaatatgtaaagggggggacattgcgtcatcgattgaaagagttgaactggtatacgagaatgagaattgcacgtgacacagctacagttctggagaaactccatctccaatccgatccaccaatcatccacagggactttaaatcagacaacattttattaagcacaaaccttagtccaaaggtttctgatttcgggatagctaaaattgccccagctggggatgagcttactgcagcaacatcagaaacgttgggaacgtatggatatgcttcaccagggatttttcgtccattaaatgcgacagtcatgacagatatctacagttttggggttgtgctcttggagatcattactggaaagcctgccattgatcatagtaaagaaggagatgaacattatctagttcactgggccgcaagcaagtcgaaagatgggaactttgaggaagtacttgatccaaggttacgtggctctgtatccagaatggtgctcagcgaggctcttgctgtggtggataggtgcactgggacagaacctgttggccggcctcggattagagaaatcattagagcccttcgccatgtggtgtccatatctcaggatgatactccgggtgcgtcatcgtcagcagcgagctagatacgtgcatggggtctgtcactccatcttcgatgaagcatataagaggcaaatgctgacaagaaagcaaaaactgtcgactgatgcgcatctgctgtttactgattaaaatataattcatgcatgtgactgttagactgtgtgctatatgtaagagactctgccttcca

SEQ ID NO: 118542 - DNA, 98 bp, Zea Mays
agaaaagggcaagcgggagatggggctgaggtgagcagcgcgactacgtatggagccgaagtcgagcgagtcgtggagccaagcaatgaggctaagcg

SEQ ID NO: 118543 - DNA, 1261 bp, Zea Mays
aatcaactcaccatattgcaatttgactcgatcatcacacgaatgatgacgaccttcgattgatgtcttcgaccgagcacttgatgagcgatgcacacgggcctcgcttctttaccaattaacatccttagacttctcccgaactatacccggttcaaatttgcaagaacgccgatgattttttttggttcggggttttcgtcgaacatctgatgagtgacatacggaacttcactgtcttccctatccacagtcccatcttcaagctcatctccacacacatcctaaccactactcaagcaacatcgtttcccttaacagaactacgacgtggagagaaagatggccagtgaactggaacgaagctggcgacgtggaatggcgaggaaatggaagcgccatgggggatggaatccgacgattcgatgacgtgcgcaggctaggatggtccagttaggacaggaggcgcatcaatggggagtccacaacggcatgcccagatcccgcgtcgcacgaccatgcccgcgaccaaaacccaccacgcttccgctgcgcacagcgatgcgacgaccaggggaaaagcagggagaggactcggcgaccagcgcgcaggggagctcgacatgggcgcggcgagcagagcaggcaggacgccgggcatcgtgggcgagcctgaagccaaacgccggccagggagcaagcaaggcggccatggcgcgcaaggagctcggtgagcggcgagatgagggggtgagccaaggagtcggtgagcaccagagaaggagatccggcgcagagagcagccagagagaggggcacagggaggaaaaagatctgggcgcgcgccagggagctgctcgggtgggcgcgcgtcacgtggaggaagatgagcagggactcgacgccggcgagccacagataaatgagaggaagagagcgccggcagaggaagctccacggcgagtagagagggaagtagaggagcggctgggcgcagggagaatgcgcgtgcacggagcttggctgggagatggagcacttcggctggccggacttgggcagtggttggccgagcagtggagcacggtgtggagaactcggccggacgtagggagatgcgcaaatggaggagcctatgcgcgtgggagaagaagaggagtgagcaggggaggggcgcgcggcatgggagcaggcgcgcgtgcagggaagctctggccagggagatgaagcgcgcagagggtagatagaggagggacggctg

SEQ ID NO: 118544 - DNA, 1266 bp, Zea Mays
agagcaaagcatacacgcgcgcagtcactcacgcacgcccccagctctctccttctccctgctcgctcgctcgccatggacgctccgagcagctggaagagtcctgcgcgcgccaagtgaccggagaagctgcgagatcagagtagttgcttgccgctcccgtgccaccaaattagattggacgtagctagcagctagctgagccgtagtgcgtagcggcagctaggctgctagctcgatcgttatagctgcgtactagtggtgtcgcagcagaagcagtagccagcttcagtagccgatccggtggtaaaagcaactttttttggacatggcggcggagggagccccggtgctggtgaggcatgctggcggcgtggaggagctgcggcagctcccgccggggttccggttccgccccacggacgaggagctcgtggtgcagtacctccggcgcaaggccttgggcgcgccgctccccgccgccgtcatccccgtcgtccgcgacctctacagcctcgacccctgggacgccgtcgacgtgccggccgcccctggtacatacacgatcgacgacggcgcttcgaaccaccagcagcatccatcgtttctgtcagtactcagtagtagtaggagaaagaactaaaatcgcaagcttttttctttgctttttccctacgatcgatccagatgcgagcagccaaggcgagagatacttcttcgcggtgcggccggcgggcggcgtcggaagtgctaggagggcgaccgcgagcgggcggtggaggccggcggggaaggagaagccggtggccctgccccgcccgtgcggcggcgggagcctcctggtgggcgtgaagagggcgatggcgttcgttccccggcggaagaagaagaaggcggcggcggcggcggccctggcgatcggctgggtcatgcacgagtaccgcctcgccgcgccgctgcacaagcacggctgcagcctggcccaggctcagggagagtgggtcgtctgccgcgtcttccagaagggcagcggcaggccgaggaggaggaggcaacgaccggtgtcaccgtcaccgtcgtccgctagcagctgcgtcacggacgggtcgtcgtcgtcgagctcggacatggacgaggtcagcagctagctagcggccgccgccccagctagccaaccaagggccggcacgacaagccaagaacacgtataccaccagctgacagctcgcagctagctgccggcggactgcctgctgtgccaatctc

SEQ ID NO: 118545 - DNA, 1549 bp, Zea Mays
agagcaaagcatacacgcgcgcagtcactcacgcacgcccccagctctctccttctccctgctcgctcgctcgccatggacgctccgagcagctggaagagtcctgcgcgcgccaagtgaccggagaagctgcgagatcagagtagttgcttgccgctcccgtgccaccaaattagattggacgtagctagcagctagctgagccgtagtgcgtagcggcagctaggctgctagctcgatcgttatagctgcgtactagtggtgtcgcagcagaagcagtagccagcttcagtagccgatccggtggtaaaagcaactttttttggacatggcggcggagggagccccggtgctggtgaggcatgctggcggcgtggaggagctgcggcagctcccgccggggttccggttccgccccacggacgaggagctcgtggtgcagtacctccggcgcaaggccttgggcgcgccgctccccgccgccgtcatccccgtcgtccgcgacctctacagcctcgacccctgggacgccgtcgacgtgccggccgcccctgatgcgagcagccaaggcgagagatacttcttcgcggtgcggccggcgggcggcgtcggaagtgctaggagggcgaccgcgagcgggcggtggaggccggcggggaaggagaagccggtggccctgccccgcccgtgcggcggcgggagcctcctggtgggcgtgaagagggcgatggcgttcgttccccggcggaagaagaagaaggcggcggcggcggcggccctggcgatcggctgggtcatgcacgagtaccgcctcgccgcgccgctgcacaagcacggctgcagcctggcccaggctcagggagagtgggtcgtctgccgcgtcttccagaagggcagcggcaggccgaggaggaggaggcaacgaccggtgtcaccgtcaccgtcgtccgctagcagctgcgtcacggacgggtcgtcgtcgtcgagctcggacatggacgaggtcagcagctagctagcggccgccgccccagctagccaaccaagggccggcacgacaagccaagaacacgtataccaccagctgacagctcgcagctagctgccggcggactgcctgctgtgccaatctcaaagagaggcgcaagcgcaactcaagcttggtttgctctctctctcttgcgggcattgctttgcttgctccggtctcatccaacatttgttgtcattttattgtctagtttgaatactctagtattaattttaatcatcttcacacacacgtggattagagttaatactagaatacctaaacaaagtctaattagttttctttttcttttttcccaactttctttgttatttcttttcttactttccactctgtgtaattaatgtaatgaggtgtaatttaattagcgagagaagcatgcattactgcctgattagttaaccgcaaatcaccacctactcaggttcagcaagcttcttgccttcttgttgagagcttccagaaccaagtcggaaagagagtcaaaaacatagaaaa

SEQ ID NO: 118546 - DNA, 847 bp, Zea Mays
gacaatgagggattaacgatgaactagtattggtttcgatcactggcggtgctctgctgtatctgttcctgcagtagcaagcatattgccactcactggcagtctggccggcactgccttagtagcagctcctctgtctggattgcagcatctatcggtcgtcgatcgtttcatgctttcgcttgttaatttgacgccgacgctgacagttcgttttgggtcacccagggctgcagcctggcccaggctcagggagagtgggtcgtctgccgcgtcttccagaagggcagcggcaggccgaggaggaggaggcaacgaccggtgtcaccgtcaccgtcgtccgctagcagctgcgtcacggacgggtcgtcgtcgtcgagctcggacatggacgaggtcagcagctagctagcggccgccgccccagctagccaaccaagggccggcacgacaagccaagaacacgtataccaccagctgacagctcgcagctagctgccggcggactgcctgctgtgccaatctcaaagagaggcgcaagcgcaactcaagcttggtttgctctctctctcttgcgggcattgctttgcttgctccggtctcatccaacatttgttgtcattttattgtctagtttgaatactctagtattaattttaatcatcttcacacacacgtggattagagttaatactagaatacctaaacaaagtctaattagttttctttttcttttttcccaactttctttgttatttcttttcttactttccactctgtgtaattaatgtaatgaggtgtaatttaattagcgagagaagcatgcattactgcctgattagttaac

SEQ ID NO: 118547 - DNA, 558 bp, Zea Mays
gaggtagagtcgcaagtggtggtggtggtggagacaacaatgacgacgaaggccgccgccgccgtcgccaccgcttacgtcaggaccagaaccacggtagcgctccggctgctggcgttcgcggcgtcgctcgcggccgccgtggtcgtggtcaccaaccggcaggaccgctggggaatcaccgtcaccttcaagatgttcgccgtctgggaggcgttcgtggcgatcaacttcgcctgcgccgcgtacgcgctgctcacggccgtctacgccaagaagctcgccagcaagcactggctgcaccacatggatcagttctcggtgaacctgcaggcggcgtcgaccgccggcgccggcgcgatcgggtcggtggccatgtgggggaacgaggccagcgggtggttcgccgtgtgccgcttctaccgcctctactgcgacaggggcgccgtctccctcgcgctcgccttcgtcgccctcgccgccctcgccgtcgccaccggcctctcccgcttcccagcgcacgacacacaggcagtagtcgatcacccagatgattag

SEQ ID NO: 118548 - DNA, 882 bp, Zea Mays
gcatgcagtcacatgcggcatagaattagcagctagcgacggtgaggaggatcgaaaggaagaagacgtacgagatgaaaagagagcgaggcttacatggcgatgagagtggtagctctggtagccaaggatgacttgcctgtgtgctggccacgctcccctcatgcaaggaccatctcgtgtcgaccgacgagcgagcgagcgatcgatcgatgagaggatgacgaagcttggggtgtacgttggtctctcacgggcagtctccttggctagccctgactcactcttaccgcccatgctagcctctgcatctctcgtgttgctgtacagattactggtcagtgacctagctagtatgcaagacaatgcgcttcgtcagcatgtcacgagcgatgcacgacatgcatgcatggacgacgcataatatatttgatgagggcgtggctattttttcttccccatgacggtgaatccaagccgaacgaggacacgagagaaggtcggcgagcgagaagaactgtcctggattgagagaagaactttcctgaagacagtatatatatccagttattatgtactgtacaattcaggttccagctaccagcttctttaatttattagcaagagcacagccagctccaatcggttttcagtccacattactggaccgtttgttacacagctccacctccctagcttacgtttaaaggcttatacgtttaatctattacaagcaaattaattgagccatgtaaatgtactaaatatgtgtctccctagctggctagctgtagacccaaaattaatgtactaaatatgtgtctccctagctgtagacccaaaattaatttcatggagctacagatactcacatctacgaaa

SEQ ID NO: 118549 - DNA, 195 bp, Zea Mays
ttcatgaagccattagaaattccagagtggaaatgggagcatatcgccatggattttgtggtgggtctacttcgttcccctcggggcagggatgctatatgggtggtagtggatcgcttgactaagtctgtacattttattcccatgtagaccacaaattcagcttcagatttggttcccttgtatatgaaggaa

SEQ ID NO: 118550 - DNA, 883 bp, Zea Mays
attatggttattgttagcagccatacgttttggccatttgagctattcgagcaatttgcttccaataattcaagtttttacagacttaatggttatgcactagatgatgtaacgttctcggttctccccttccgtaccgccagtcggtacttcagttattagtcagcagattgtgaagaaacagctgtctccaaagcgagaagacgaagaaaggggaaatcgagagatgagctaccagagagtccctcccgaggaaccctaccctcctccaggacatcctcgatctcaggcgcacccttacccaccgccaccagatgtgtacccgcctccccctcggggccatggacatccaccaccaccccatggcgtgtacccgccgccgccgcagggtccttaccccccaccacagcagcctccaccggggtaccagggctacttcaacgaccagcagcgtccttactacccgccgccgcatggagagcatcaacacaaccaccaccagggaaaccagggtagctcctctgggttcctcaaaggatgtttggctgctctctgctgctgctgcgtgctggaggaatgctgcggctgcttctgagacgtgagatgtccgggaatccgatcgcaagttatcgtcgctagcattcgggagcaccccagttattatcatataatagtaactgtgcttgtaaataatctggagcagcagtgttcatgagctcccagccccgcatttatattctcataatttgtagtacgttctatgatttatccgaaaataaaggactctatatatgggattctaaataaggtatttgcatatttcatgggattcaaacagtttttttttgtccgtaaggcgcatttccggccgtttggacacgtg

SEQ ID NO: 118551 - DNA, 1465 bp, Zea Mays
cttatataaaccaccatgagcagccagcaaccttactactctccacttcctgccaagtgccaacaagtcccctcttcttcgtctccaaagagacaaaacccaagagaggatcgtacgtcgtagggatcttgttcaatggcggacgcggacctgacaccaaaccactcgctcctcctcaagatgcctgcggcttcggcccacgcccactccccaagcctctcgagcctcctgttatacggccaggagagccatggcgaagcagcgcctgcaaacgcaaatgcaaatgcggcagcagcaacggtggaggacgccgcctcacttgagacctcttctgcagtggttgacagtgcatctccaatggagaggaagaggaaggctacagcagaagacagtgctgcaatcagctctcctcaaccaaaggactgcaagcaggagagcaagagcaggagggggaagaggccccgaaaggagaccgaggagaagagcagcactgatgaagacgaggcctccaaggggtacatccatgtgagggcgaggaggggccaggcgacagacagccacagcctcgcagagagggtgaggagagagaggatcagcgagaggatgaggatgctgcaggcactggtccctggctgcgacaaggttactggaaaggccatggttttggacgagatcatcaattacgtgcagtccctgcagaaccaggtcgagttcctttccatgaggattgcctccatgagcccagtgctgtacgggttcggaacgaacagtgaaggccttcatgatcatcacgcaccaaagatgggaggcgtgtcgttccaggaagccgccattgcagtgccagcaggtccagcggcagcggtgagccaagctagcagtaggccggctccatctgaagccaccatgaacaccgcttgcactaccacgccctactcagtctcactgcaggcccaggcttccatctcattctctccctctcaggaaaacggcggcacttattacctggtgcagcaagcggtgggggagcaggcaacgaggcaggaggagctgctgctgagccagttggtgttcagcaacatgtgctcgttccagtaggggggcagggcaggcaagagtgtttgcgcgagcggaagcgaggaaagagacccccacccacacacccatgcacattgagtcattgacaataggaggaaatgatgctgcaagatttggctagtaggagcgccagatgagtttcagatccgagcggcaagcggagcctgctgtttgtttgcacattttgagagactttgtagtttgtaatgtttctagctcctgtatgacgattttctcggcggctgcacctgacctgcccaccgtcaccagctcaccgttgtagtagtctccgatgagcaaatcggttgttaatacgtaagagaggagagctatttttgttcttaggcaaacaatgcttaactgtttcatt

SEQ ID NO: 118552 - DNA, 1716 bp, Zea Mays
cttatataaaccaccatgagcagccagcaaccttactactctccacttcctgccaagtgccaacaagtcccctcttcttcgtctccaaagagacaaaacccaagagaggatcgtacgtcgtagggatcttgttcaatggcggacgcggacctgacaccaaaccactcgctcctcctcaagatgcctgcggcttcggcccacgcccactccccaagcctctcgagcctcctgttatacggccaggagagccatggcgaagcagcgcctgcaaacgcaaatgcaaatgcggcagcagcaacggtggaggacgccgcctcacttgagacctcttctgcagtggttgacagtgcatctccaatggagaggaagaggaaggctacagcagaagacagtgctgcaatcagctctcctcaaccaaaggactgcaagcaggagagcaagagcaggagggggaagaggccccgaaaggagaccgaggagaagagcagcactgatgaagacgaggcctccaaggggtacatccatgtgagggcgaggaggggccaggcgacagacagccacagcctcgcagagagggtgaggagagagaggatcagcgagaggatgaggatgctgcaggcactggtccctggctgcgacaaggttactggaaaggccatggttttggacgagatcatcaattacgtgcagtccctgcagaaccaggtcgagttcctttccatgaggattgcctccatgagcccagtgctgtacgggttcggaacgaacagtgaaggccttcatgatcatcacgcaccaaagatgggaggcgtgtcgttccaggaagccgccattgcagtgccagcaggtccagcggcagcggtgagccaagctagcagtaggccggctccatctgaagccaccatgaacaccgcttgcactaccacgccctactcagtctcactgcaggcccaggcttccatctcattctctccctctcaggaaaacggcggcacttattacctggtgcagcaagcggtgggggagcaggcaacgaggcaggaggagctgctgctgagccagttggtgttcagcaacatgtgctcgttccagtaggggggcagggcaggcaagagtgtttgcgcgagcggaagcgaggaaagagacccccacccacacacccatgcacattgagtcattgacaataggtactgttgcaagctaagtttcattgattgggaggccgacgactgaaaggtgaaagctgcctctgccacctctgccctctcatgtctgaaaactacacttaacctactatgatttgaattgttaggccatcatgctaagatccgctaaaactaacagaacagcatgttctttgatggtctctggacaggaggaaatgatgctgcaagatttggctagtaggagcgccagatgagtttcagatccgagcggcaagcggagcctgctgtttgtttgcacattttgagagactttgtagtttgtaatgtttctagctcctgtatgacgattttctcggcggctgcacctgacctgcccaccgtcaccagctcaccgttgtagtagtctccgatgagcaaatcggttgttaatacgtaagagaggagagctatttttgttcttaggcaaacaatgcttaactgtttcattattcaacgacccaactcccagcatctcaacgaatcatagagtgatggacgatcagttttttcc

SEQ ID NO: 118553 - DNA, 147 bp, Zea Mays
gcttggaaagtttggaaacacggcaactcatgtgtgtttgaaaatgctacaccaagcatccaggaagtactgaggactgtcagcgctgaaggcactctatggtgtagggctggagcaaaaaagctccaggagctcttggtcagggac

SEQ ID NO: 118554 - DNA, 1163 bp, Zea Mays
tctgggtattctcaacctggagatgtttggatgggccctacgcgtcaaggccatgggctggtctccctatccgagtgcaccgtaatgcaaaggccctcgttgatgtggctattacctcagtggtaggcagtggtgaatctgtgaagttctggtctgatcgttggctccttggtaaaactgtggctgaacactatccaactcttatccaagtgatttctagaagggctttaaagcgaagaacagtagctgaggggctcacaaatcgtcaatgggtgtcagatattcggggaggattgtctgtaacggtcctagtagagtatctgcagctatggaacttggttgatgggatagttctgcaacctgacatcgcagaccaacacatctggcgcctctctgctcatggtacttattgtagcaaatcggcctatgatgctctctttgttggctctatcccttttggcccttggcgacgtgtctggaagacctgggcccccttaagatgcaaattctttgtatggttggcaatcaaaaacagggtttggacagctgatcgacttgcaaaaagaggtctgccccatccagttgcttgccctctgtgtgatcaggccgaggaaaccatccagcatattcttgtctcctgcgtgttcgctcggcagatatggacgtccatgctacacaatttaggcctccttgccattgtgcctcagcatggatgcactcgtttctcaaattggtggtgtcaaagtatcaagaaagtggagaagagtctaagaaaaggtcttaattccttgatcattttggttgcttgggagatttggaagcaccgtaatgcttgtgtttttgagggggttgtgccctgcacccagcgagttcagagtgctgtgattgaggagggcaacgtctggtgtttggctggtgcatcagctctgcaggacctcctgctgcgccagctccctaggggaccttagcagttttcctgctggtagtcgtttttggtcgggttgttaccttgtgtgtgtgtggtgcgctgtgttattgccggaggggtctcggcctaggggcctttgtaattaggggttgacaagtcttgtctctcctatgttctttttttcttcttaatttaatgacacgcagctctcctgcgtttgttcaaaaaaaaaaaa

SEQ ID NO: 118555 - DNA, 1053 bp, Zea Mays
attacctcagtggtaggcagtggtgaatctgtgaagttctggtctgatcgttggctccttggtaaaactgtggctgaacactatccaactcttatccaagtgatttctagaagggctttaaagcgaagaacagtagctgaggggctcacaaatcgtcaatgggtgtcagatattcggggaggattgtctgtaacggtcctagtagagtatctgcagctatggaacttggttgatgggatagttctgcaacctgacatcgcagaccaacacatctggcgcctctctgctcatggtacttattgtagcaaatcggcctatgatgctctctttgttggctctatcccttttggcccttggcgacgtgtctggaagacctgggcccccttaagatgcaaattctttgtatggttggcaatcaaaaacagggtttggacagctgatcgacttgcaaaaagaggtctgccccatccagttgcttgccctctgtgtgatcaggccgaggaaaccatccagcatattcttgtctcctgcgtgttcgctcggcagatatggacgtccatgctacacaatttaggcctccttgccattgtgcctcagcatggatgcactcgtttctcaaattggtggtgtcaaagtatcaagaaagtggagaagagtctaagaaaaggtcttaattccttgatcattttggttgcttgggagatttggaagcaccgtaatgcttgtgtttttgagggggttgtgccctgcacccagcgagttcagagtgctgtgattgaggagggcaacgtctggtgtttggctggtgcatcagctctgcaggacctcctgctgcgccagctccctaggggaccttagcagttttcctgctggtagtcgtttttggtcgggttgttaccttgtgtgtgtgtggtgcgctgtgttattgccggaggggtctcggcctaggggcctttgtaattaggggttgacaagtcttgtctctcctatgttctttttttcttcttaatttaatgacacgcagctctcctgcgtttgttcaaaaaaaaaaaa

SEQ ID NO: 118556 - DNA, 420 bp, Zea Mays
atacagtcacttgaggagagtgctgaattgttgagagagagatgtttgaagttccataaaaggttgcctgaagggctaggggaagcatacgatggagatattgcatttgccagctcacttgaaacatttggaggaggccacaatgatccaattagtgttgcttttggtgggcctgtaatgaccaaatttacaattgccttacgagaaattggaacatacaaggaagtcctgcgctcccaggttgagcacatgttaaatgacagattactgaattttgttgacattgatttgcatgatgtgaaggatgctcataagcgctttgacaaggctagcctctcatatgaccagattcgtgagaagtacctatcattgaagaaaggtcacttcactttcccatgtcgaggcaaagaagagatatga

SEQ ID NO: 118557 - DNA, 159 bp, Zea Mays
gtgacatttgaccatatggatatggctttgtcaaaagcattcaagtctgccgtcgtagatagcatactatgtattccccagcaccaacagatggtgttgtgtgagttggaaaatacttttcagcattgcaagaaaaaagcaactactctaggagaggta

SEQ ID NO: 118558 - DNA, 130 bp, Zea Mays
ttttttgtttatatagttttcttcttttaccttgtatcgtgtattaatctaaaacttggattctatgcaacactagttttttggttgtgtttaattttgtcacgtgattttcttggtcccccatgatttc

SEQ ID NO: 118559 - DNA, 878 bp, Zea Mays
atccagagacgaatcccatcgtgttgtggccggagagacgagaggactccagagagattccgacaccgctgggctcagatgccgccgccgccgccgccgccgcagcagcagcagcagcagtccggcatgactctctgccgcctccccacggccactcttggccttcccctttctctcccctgtttgctacctcgttcccgcccccgcctgtgcttcgccgcacgtcatgccagggccgtcgccgccagggcttcctcatcctctccatcaccggactcttcattcggttcgcggatggaggagtccgtcaagaagacggtggccgacaaccccgttgtcatctactccaagtcatggtgctcatattgcatggaggtgaaggcgctcttcaagcggatcggtgtgcagccccatgttatcgagcttgaccatctcggtgctcaaggaccacaaatacagaaggtattagagaggctgactggacagtctactgttcctaatgttttcatcggtggaaagcatgttggtggctgtacagatactgtgaagctgtatcgcaagggggagctagctagcatgctgtccggcctggatatcaacattaacaactcatgacaagtttgaccatgttttgcaagtatagttttgatgtttgagagacttgggcagtcatgtattgagtttttttaacttatgcagattctttatgtctgcaagaaaaaaaaaagctgtgtcatttacacatttttgtttggtactctgattaaatcattgaatttgaccactgtatgcaaattgctagaaagaaaaacgaacgaactcacagattatgtgttcttggcaatttcttctcttattttttcccccaagcacataca

SEQ ID NO: 118560 - DNA, 491 bp, Zea Mays
taaaccctaaaccctggacaaacgatggcttagtttacaaaacagaggggtagaatcacaaagttgaaacacaatagtaccctgttattgaattgtagaaaagaaaatgaaaaaaaaaactgtcgttggttgctaatactatgtgttgtagatactgtgaagctgtatcgcaagggggagctagctagcatgctgtccggcctggatatcaacattaacaactcatgacaagtttgaccatgttttgcaagtatagttttgatgtttgagagacttgggcagtcatgtattgagtttttttaacttatgcagattctttatgtctgcaagaaaaaaaaaagctgtgtcatttacacatttttgtttggtactctgattaaatcattgaatttgaccactgtatgcaaattgctagaaagaaaaacgaacgaactcacagattatgtgttcttggcaatttcttctcttattttttcccccaagcacataca

SEQ ID NO: 118561 - DNA, 1473 bp, Zea Mays
aggcacacaccaggcaaggattgcattgttagcatccatcgccggtcgccatatcgatctgtggacgaagctactccagatggatcggttggcgccgcctgtcgccgtggaggtgccggtggtgcatcgacagcaacagcagcagttcgtccatcactcacaggtccaccagcagcaacgtacgcaccagcagcagcagcaccagaacggcggcggcagcaagcccggcggccgcaagtgctgcccgctgcgccggtcgcgcaaggggtgcatgaagggcaagggcgggccggacaaccagcagtgccctttccggggcgtccgccagcgcacctggggcaagtgggtggccgagatccgcgagcccaaccgcggcgcacgtctctggctcggcacattcggcagcgcgctcgaggccgcgcgcgcctacgacgccgccgccagggcgctctacggagactgtgcgcgcctcaacctgcagctacctcctccctcggcggctgcaggaggaggaccggcaatcgtggcgtctccgtcccctgacaccgtggctggccctgctgctgctgctgctggcgggcacagccgccaccaccagtacctgcagcagcagcagccctccatggcggcgcctatgatgatggtgcactcatcctgctgctccgccgacgcgtcgtcgtccaactccgactccaactccaactccagctcgtcgccggtgaccatggcggccgcggcaacctcgcccacgtacacccaccaccagacgacgttccaaatgccgccgccgccgccgtcttcgtgcggcgtgatgatggctgccgtccagggctgccacgtcgacgacaccaccaccaccacgatggcgatgcagcgccatcagcagatgttgcgcgagctggcggcggctcctctgcatcaggaggcagatgacttcgaggacttcatgacgcggctgcccaaggctgaggacttcggcctgcagggcttccaggaggtgcctcccgaggtgttcgacgaagccgccggcatctgggaccacacggccgcctggtcgtcccccaccatgatgatcgactccgccggcgcccagcgccagcaggtcgtcgattcgtcgtccctcttcaactctcgttgatcgatgacgccgtgcgccctgcaccagctacttcgttgctagctgcatcgagagctgccagtgtacgtggcgaagcgagtcgatgcgcgggcccactggttcgtgagttacttacacatcaagtctcaagacgtaccagatggtggttactcgtgggttttatatttggataatgtttcatatttgtaaaatatatatactatagtagtggtgtcttaaacatatatactttgatagctatatagtcttttgggtttgctatctgcatgagcggctagctacctcttgtacagtactaccatatatagatatatcaatttcgtttttcctgatta

SEQ ID NO: 118562 - DNA, 537 bp, Zea Mays
atgcggccatggcgagcaggaaaaggactcggtgcgggagttcgacgtgtcgtggcaagcagaggggcactgccgcgcacagggaacatggcatggcgcggacgggcgagctcgacgagcacagggacgatctgggcacgagctgtgcgcaggcacacgcgcaggggacttcggctgggcgcgcggccgactggagggagccggcgtggccatgtgagcagggtggagggagtagaggcgctcgccatgagagagggagagtccggcgagctgcgcgcaggaggctccgagcagagggagcagaaccgacgccgtggatgggaggagcagagcaccggccaacagagaaccgagagggagaggaaggagctggaggccagcaacaccggcgagctcggctggggaagaagctccacggcgagcttgagggagaagatgagcaggggctggggcgtgtggagaagccagcgagctcgggcacagggagacggcaaggccgagcgactggatttgtacccagggcggcccagcggataa

SEQ ID NO: 118563 - DNA, 1431 bp, Zea Mays
taattacccagcgcacacctcgcattactggtatttctaacttaatcgtatacgtatacaaagcatcttattttacgatcataaaaccgagagtaaaaatagcgaatcggctcaccacatcacaactcgatttggtagttgcctgagccacgacggtcttcagcttgacgacaagatcgaatagagaatggtgagcgtgaggatttcatagcgaggatgagcgacatcttggattcttggtccgacatttaatcgaacacatcagaagcgaggtacagcaggaatggcagtgaggcttgacggcgaacgtcatgacgacgaacgacgaggtcgacgacgcgattagagattaaagccgagcgagccgagagggcgcactggcgagcaggaaacaagacgcgacaacatgaggcctgacccggcgaacagcgacgcggagaacaaagtgaggtcacgggccgggcgaactttattgcgcggactgctttgcagtcaggacggctaagagagtttcgcgcgcggccaacagatagcttgcgcgcagggacagaggacaggaagggcacgggccgggctcggccatcggcgcggcaatccgaagcttcggccagcaggacaccgagcagaagttcgacgcacacagggagatggacgccgagagcttgaagcagactggagcaccactacgcgcaggggagagccacggcttggagacgcgccgcgatggagagcttcctgggcgcgtggccagagaggaaattcgagctgggaagatgccggggctgggcagaggatgggctcgagctagaggcgagctcggtcgggacctgggcaccgggcgcgcgagatccagcgagcgcaggggcgcggcacagggagccgggcgagcagggagcttcgcgcggcccacgatgaaggagaaggggcgcgcggggatggggcagagggaagctcgacggcggccgagcgaaggggcgagcgcagggatagactcggcggggaagcaaggagatgggcttcgagctgagcagagcgcggcgaagggctgcagcgctggggctcgactggaagaagagcgctcggctggccggagatgagagcgagtgcgtgcaagcagggagagagagacacgcggggaggagtaggcgctgggagagagaacgcggcatgagcagagagggaggagataaggccgcgtcaggggagaacggcggcggaatcttcaccggcggtgagcggcggccaaaaaatatcacgcagtcaggtacggtggctggggagaggatgagaacgactgagacacaggaaaatcttgcgccggctgaacggatagggacgagcggctgggagatttttttgaagcagagcgcgcgctgggaattgcagcttgccggggagcagaacacagaggaagataccgtgaggagataa

SEQ ID NO: 118564 - DNA, 4287 bp, Zea Mays
atccgtaattccgtatcattgtttctctcctgagtctcctccttatcagagaggagctggggaaagtgctccctccgcctccatccgtccgtcgtcgcccggcgaatcgatcgaagctagcaatcaaatcagaaagagcaagagaagcgcccgagtccctaggccggaaagctatggacagcgccgccaactggcggtcaacgcagggcaccgaccctgccgccggcggcgtcgatccaaacgcggctgcccccgccggaagcgactggcgcacccagcttcagccagaggcgcgccacaggatcgtgaataagataatggagactctgaagaagcacctgccagtatcagtaccagaggggctgactgagcttcacaaaattgctgtgcgttttgaagagaaaatctatactgcagccaccagccagtctgattatttgcggaagatttcgctgaaaatgctgtccatggaaagtcagacaaagacacaacagaaccctggaaatgttcaagtgattccaaatcaaaaccctcctggtccagcacctggccttcctccacaagttagtaatccagcacagtcatcagctatcccattgatttctcagcaacagacacggcaatcaaatgcctctacatctgttcaaggttctcttcctagtcttggtcagaactcgtcgagtgtcagccaggcatcgacgctgcataatatgtctgtcatgccacaaaataccatgaacaatggtttagcacaaggtactccacaagatatgtatgctgcacaaaggcaaatggctggtaggcagcagcaacaacaacaacaacaagcacataatcagttaatttatcaacaacagaaatacttgaaccagaaattgcagcagaattcacttatgccatcgcacattcagcagcagcaacctttattgcagtcaacacagatgcaatcttcacagcagcccatgatgcaaatgtcatctggtcttcagcctgggcagactgccattccacaaactcagtccatgacgatgcattcagctacacaaagtggtattcaacaaaacccattgaattcagtacaacaatctgtgcaaccattactccatcagcctacacaatctgtagtgaggcagcagcaacatccacagtccatgcaccagcagtcttctctgcagcaaactcagccaactcaacagcccaacattcctttgcaacaacaacaaccacaattaatgaaccagcagtcaaatttacagcaaaatcagttaatgaatcaacagagtggtgttgtggagacgcaacagcaacaaaggctgccagttcagtcaaataatcttttgaatatgcagcaaacacagcagatgatgaaccagcaatctatgtccttgcaccagccacaacaattggcaaaccaaggaaatatgtcaagtctacatcagcagcagcatcagcaaaatcagcagcagcagcagcttctcggaactgggccaaatgcccgtatgcatatgttacagcagcaaaaggtaattcagcaaccacagcagcaacagcatgctcagcagacatcaatgggtttgatacaacctcagtctcagcagaaccaacttcagcaacctcagcaacatatgatgtcgcagttccagtctcagcctaatcaaatgcagcaacaattgggaatgcaacaaaggctccaaacttcagctggcatgctcttacaacaaaataacattgatcaaaagcaatatgttcaggcacagaggggccttcaagaagcacccagtacatctgtggattccactgctcaaactggtcatccaggcataggtgatttgcaagaggagttatatcaaatgattaagagtttaaaggaccaatactttgtggaattgaatgaattgtacaataaggtatctatcaagatacaacagattgacaaccaaatgcctgctcaaaagtcagcagagcagtatgaaaagatgaagggctttaaaggaatgctggagcgcactttgcatttcctgcaagttaacaagagcaacattcatccaggtttgagggaaaaaatccccatttacgagaggcaaattctcagtatcctaagttcacaaagaaggaaacctgtgcaggcacctgggcagcaaacgtttcagcaatctagtgggcaagctcctagctctaacatttcacagcaacttcagacttcccaaggtttgcagcagcatgatagtcatactagtcagatgcctcaagcaagtttaccaagtatgaacacaggagtacaaacctctggagcacctgcgcctcaaggaacaaactttggtgttccaacaacacagcaaaatgtcacaaatgcaccacaggctggctctaatttggagaatgctcagggaaataattttaatcatgtgcagcatggttcaatgggtgctgctttgcaacaggaaaggactggtcccatgcagggtgcattgaatgcacagcagcagtccagtagcaacatgatatccaacaatgcaatgagtacaatgcagactaataacaatgcaaatgcgaattcattgcagcagttaaagcagcaacgtcaggagcatcaaatgatgcaaagtcagcaaatgaagcagcgccagcagatgatgcaacagatacaacaaaagcaaacgcttcaaccgcagctcccaatacagcaactaaagaaacaacagcagcaagggcagatgcagtttccacagcttcattctggaaatgatgtgaatgagctaaaggttaggcaaggagctgcaatcaaatctggaatgtatcaacagctgagccagcgtaactattatcagcagataaaacagggtggtgtctttccaatttcttctccgcaaaccctccaaacatcgtccccacaaatttcacaccattctcctcaggttgatcagcacagtctgttgcaatctcaagtcaaaaccgggacaccattgcattcagctaactcaccatttgtcccatctccatcccctcctgtggccccatcaccgatgccaatggattcggataaaccactatccaacttatcttcagttactagtgctgggcaggctggacatcagcaaacatctcttgcacctcaaacacaatctatagccgttaacacaccaggtatatcagcgtcacccttgcttgcagaattcacaagtgctgatggaagtccggccaatgtaccaactcaagttccagccaaatcaagcgcagcagaaaggcctctggaccgtttgcttaaagcattgcgaacaacacagcgtgagtccctaagtgctgcagtcagcgatattggatctgtcgtgagtatgattgacaggattgctggatcagcgcctggtaatggttctagagctgctgtaggagaagatcttgtcgctatgacaaagtgccgcttgcaagccaggaacttcataactcatgacgggagtggtgcatcaaagaaaatgaagcgggacacgagtgctatgcctcttaatgtgtcatcagctggaagcgtgaatgatagcttgaagcaatcatatggtgttggtactccagagctacaatcaactgcaacctcacgtgtcaagtggcaaagggctgaggtaaaccatgctctgatggaggagattcaggagataaaccaacagcttatagatacagagctccatgtctctgaggatgatgctgagtccttcactacatctgaggggggcaaagggacggtcattagatgcacattcactgctgttgctgtttgccccagcttgaaatccgtgtttgcgtcagcgcagatgagtccaattttgccgttgaggttgcttgttcctgctagctacccgaaatgctccccggtgcttctagacaagtttcctgatgaacaatgcaggaactcagacgacctgtctaccaaggccaagacaaagttcagcgtattgctccggggtctagctgagcccatgtcactgcgagaaatcgcaaggacatgggatgcttgcgctcgcaaagtgatcacagagtatgcccagcaaaccggaggaggcagtttcagctcgagctatggttgctgggaaagctgcgtaggcgcttgttaattgcttatattgtatctattattattattataagtatttatgtgtcgagtaaaatagaaaaaaaaacagtgtgtctgctgtatactccatccttttgctattgggtcaatgttggcttgataaatatggtcgtgtacagtacagtgtatgcgtcagtccggttagtatcatgtatgctttgcctcta

SEQ ID NO: 118565 - DNA, 4253 bp, Zea Mays
gcgaatcgatcgaagctagcaatcaaatcagaaagagcaagagaagcgcccgagtccctaggccggaaagctatggacagcgccgccaactggcggtcaacgcagggcaccgaccctgccgccggcggcgtcgatccaaacgcggctgcccccgccggaagcgactggcgcacccagcttcagccagaggcgcgccacaggatcgtgaataagataatggagactctgaagaagcacctgccagtatcagtaccagaggggctgactgagcttcacaaaattgctgtgcgttttgaagagaaaatctatactgcagccaccagccagtctgattatttgcggaagatttcgctgaaaatgctgtccatggaaagtcagacaaagacacaacagaaccctggaaatgttcaagtgattccaaatcaaaaccctcctgcacctggccttcctccacaagttagtaatccagcacagtcatcagctatcccattgatttctcagcaacagacacggcaatcaaatgcctctacatctgttcaaggttctcttcctagtcttggtcagaactcgtcgagtgtcagccaggcatcgacgctgcataatatgtctgtcatgccacaaaataccatgaacaatggtttagcacaaggtactccacaagatatgtatgctgcacaaaggcaaatggctggtaggcagcagcaacaacaacaacaacaagcacataatcagttaatttatcaacaacagaaatacttgaaccagaaattgcagcagaattcacttatgccatcgcacattcagcagcagcaacctttattgcagtcaacacagatgcaatcttcacagcagcccatgatgcaaatgtcatctggtcttcagcctgggcagactgccattccacaaactcagtccatgacgatgcattcagctacacaaagtggtattcaacaaaacccattgaattcagtacaacaatctgtgcaaccattactccatcagcctacacaatctgtagtgaggcagcagcaacatccacagtccatgcaccagcagtcttctctgcagcaaactcagccaactcaacagcccaacattcctttgcaacaacaacaaccacaattaatgaaccagcagtcaaatttacagcaaaatcagttaatgaatcaacagagtggtgttgtggagacgcaacagcaacaaaggctgccagttcagtcaaataatcttttgaatatgcagcaaacacagcagatgatgaaccagcaatctatgtccttgcaccagccacaacaattggcaaaccaaggaaatatgtcaagtctacatcagcagcagcatcagcaaaatcagcagcagcagcagcttctcggaactgggccaaatgcccgtatgcatatgttacagcagcaaaaggtaattcagcaaccacagcagcaacagcatgctcagcagacatcaatgggtttgatacaacctcagtctcagcagaaccaacttcagcaacctcagcaacatatgatgtcgcagttccagtctcagcctaatcaaatgcagcaacaattgggaatgcaacaaaggctccaaacttcagctggcatgctcttacaacaaaataacattgatcaaaagcaatatgttcaggcacagaggggccttcaagaagcacccagtacatctgtggattccactgctcaaactggtcatccaggcataggtgatttgcaagaggagttatatcaaatgattaagagtttaaaggaccaatactttgtggaattgaatgaattgtacaataaggtatctatcaagatacaacagattgacaaccaaatgcctgctcaaaagtcagcagagcagtatgaaaagatgaagggctttaaaggaatgctggagcgcactttgcatttcctgcaagttaacaagagcaacattcatccaggtttgagggaaaaaatccccatttacgagaggcaaattctcagtatcctaagttcacaaagaaggaaacctgtgcaggcacctgggcagcaaacgtttcagcaatctagtgggcaagctcctagctctaacatttcacagcaacttcagacttcccaaggtttgcagcagcatgatagtcatactagtcagatgcctcaagcaagtttaccaagtatgaacacaggagtacaaacctctggagcacctgcgcctcaaggaacaaactttggtgttccaacaacacagcaaaatgtcacaaatgcaccacaggctggctctaatttggagaatgctcagggaaataattttaatcatgtgcagcatggttcaatgggtgctgctttgcaacaggaaaggactggtcccatgcagggtgcattgaatgcacagcagcagtccagtagcaacatgatatccaacaatgcaatgagtacaatgcagactaataacaatgcaaatgcgaattcattgcagcagttaaagcagcaacgtcaggagcatcaaatgatgcaaagtcagcaaatgaagcagcgccagcagatgatgcaacagatacaacaaaagcaaacgcttcaaccgcagctcccaatacagcaactaaagaaacaacagcagcaagggcagatgcagtttccacagcttcattctggaaatgatgtgaatgagctaaaggttaggcaaggagctgcaatcaaatctggaatgtatcaacagctgagccagcgtaactattatcagcagataaaacagggtggtgtctttccaatttcttctccgcaaaccctccaaacatcgtccccacaaatttcacaccattctcctcaggttgatcagcacagtctgttgcaatctcaagtcaaaaccgggacaccattgcattcagctaactcaccatttgtcccatctccatcccctcctgtggccccatcaccgatgccaatggattcggataaaccactatccaacttatcttcagttactagtgctgggcaggctggacatcagcaaacatctcttgcacctcaaacacaatctatagccgttaacacaccaggtatatcagcgtcacccttgcttgcagaattcacaagtgctgatggaagtccggccaatgtaccaactcaagttccagccaaatcaagcgcagcagaaaggcctctggaccgtttgcttaaagcattgcgaacaacacagcgtgagtccctaagtgctgcagtcagcgatattggatctgtcgtgagtatgattgacaggattgctggatcagcgcctggtaatggttctagagctgctgtaggagaagatcttgtcgctatgacaaagtgccgcttgcaagccaggaacttcataactcatgacgggagtggtgcatcaaagaaaatgaagcgggacacgagtgctatgcctcttaatgtgtcatcagctggaagcgtgaatgatagcttgaagcaatcatatggtgttggtactccagagctacaatcaactgcaacctcacgtgtcaagtggcaaagggctgaggtaaaccatgctctgatggaggagattcaggagataaaccaacagcttatagatacagagctccatgtctctgaggatgatgctgagtccttcactacatctgaggggggcaaagggacggtcattagatgcacattcactgctgttgctgtttgccccagcttgaaatccgtgtttgcgtcagcgcagatgagtccaattttgccgttgaggttgcttgttcctgctagctacccgaaatgctccccggtgcttctagacaagtttcctgatgaacaatgcaggaactcagacgacctgtctaccaaggccaagacaaagttcagcgtattgctccggggtctagctgagcccatgtcactgcgagaaatcgcaaggacatgggatgcttgcgctcgcaaagtgatcacagagtatgcccagcaaaccggaggaggcagtttcagctcgagctatggttgctgggaaagctgcgtaggcgcttgttaattgcttatattgtatctattattattattataagtatttatgtgtcgagtaaaatagaaaaaaaaacagtgtgtctgctgtatactccatccttttgctattgggtcaatgttggcttgataaatatggtcgtgtacagtacagtgtatgcgtcagtccggttagtatcatgtatgctttgcctctatttacagaacttggttttataactttttttcgtcaccttttatatctaaatattttttaatagtctttttttt

SEQ ID NO: 118566 - DNA, 1472 bp, Zea Mays
aacagtgcaatctacagtgcaaaatagtcgaccctttaaacggcctgctggagatggcctaatatgcttataaatctccataacatactagcataaaagaatatgttgcctcaaagttcagctattatagtaggtatatgccaccttccgcttgcaagccctctagagataccatgctaacgttggtacaatgtactttgttttatcagctagtttatatgatggtcagtactgcctagtcagatttcattctatttctgtctcttgactttatggtaataatgcaatgaagtcgttggcatcctttagtaaattagtttaatagtatcattccattattttgatcttctgtttcatgttcaattttgtgttacaatacagttgcgaacaacacagcgtgagtccctaagtgctgcagtcagcgatattggatctgtcgtgagtatgattgacaggattgctggatcagcgcctggtaatggttctagagctgctgtaggagaagatcttgtcgctatgacaaagtgccgcttgcaagccaggaacttcataactcatgacgggagtggtgcatcaaagaaaatgaagcgggacacgagtgctatgcctcttaatgtgtcatcagctggaagcgtgaatgatagcttgaagcaatcatatggtgttggtactccagagctacaatcaactgcaacctcacgtgtcaagtggcaaagggctgaggtaaaccatgctctgatggaggagattcaggagataaaccaacagcttatagatacagagctccatgtctctgaggatgatgctgagtccttcactacatctgaggggggcaaagggacggtcattagatgcacattcactgctgttgctgtttgccccagcttgaaatccgtgtttgcgtcagcgcagatgagtccaattttgccgttgaggttgcttgttcctgctagctacccgaaatgctccccggtgcttctagacaagtttcctgatgaacaatgcaggaactcagacgacctgtctaccaaggccaagacaaagttcagcgtattgctccggggtctagctgagcccatgtcactgcgagaaatcgcaaggacatgggatgcttgcgctcgcaaagtgatcacagagtatgcccagcaaaccggaggaggcagtttcagctcgagctatggttgctgggaaagctgcgtaggcgcttgttaattgcttatattgtatctattattattattataagtatttatgtgtcgagtaaaatagaaaaaaaaacagtgtgtctgctgtatactccatccttttgctattgggtcaatgttggcttgataaatatggtcgtgtacagtacagtgtatgcgtcagtccggttagtatcatgtatgctttgcctctatttacagaacttggttttataactttttttcgtcaccttttatatctaaatattttttaatagtctttttttt

SEQ ID NO: 118567 - DNA, 686 bp, Zea Mays
acacacacctgtagagtctagactagtcctcttccacttcctccttccagtaggttccaccccaattccctcaagggatcgagatgaacaactccacctcgccggcggtggactggggtgacgactccgcgggggagatggactctgaggacgcagcgccttcctcctccatgggcatcagcatcgccattggcagcatgatggaggtcgacgccgacgaccgccaacccagtccgcctcccgacgccgacttcttcaacgccttccccgacgacttcgacgaccaagacctcgactgattgccgccgccgcttctttgctcgcccggaccccttccgccagttgggagtcgtatacgaacctacctacttccaaggaagcaccagtcatccatcaccttgtacatgtttttatgttgcagcactagtggtgtttaattgtcagctgcgatcatgtgagaacctgacctggtacattatgtatataagaagaataagaacctgttaacttatatggtatagtatgtaagttcatggcagaatgttcttgttggttggattcgtgcgcagttgagcagtgctggtgttgtaatgtgatggtcgcgactgcgttgttcgcatttgtgatggttttgcttttcattggtgaatggtgaatggtgaagacaaagctgaatctactaatta

SEQ ID NO: 118568 - DNA, 495 bp, Zea Mays
atgaggaaaaggtggtacgacaaccatcagatgaccgtgaagagcctagtcgatctcctggagagaggcgccggtggcggcggtgccagcggcggccgcggcgacgtcgtcggcagtaaacttgcccttagctttgtcggcggcgcggccccggccttgcggtcgaggagcgccttatggtccttgtcgagcttcagcttggtgacgatcaccttggaggggtggatacccacgttcacggtggagccgttcaccttctcacgggtgatccgctcgacgtggatgatccagcagcggcggtacacctgcacaaccttcccctcacggcccttgaagcccggcggacatgagaacgcggcggacggaggacggggccgtgaagtgcgccttgcggcacttccggcgggagctcgtgacgcggggattgcgcttcatggcggcggcaggatggacgctcctgcttacctgggaggccactttggtggcggcggctag

SEQ ID NO: 118569 - DNA, 1718 bp, Zea Mays
tattttcgcatgggttcactgatcaagttgtgtgtagtttgcattggtggccatagagttcccatgttcatgtcctgctacttttcttttaaatatggtgcttcatgcgcctgtgtacacatacaaacatattacatgtctaacaacttggaccagagcaagtgaaaattgttacatatataataaatccaccctgacatcagcctgtgcctacaagtcttgcccccatatatagcagagggaagacaccaaaccacaaggaaaagtagcaaaagaatttgaagagggattgaggggggaggggagctgtctccttcgatctcgttcttgcctttttgcctctctcgaggtcagcttctggtggattcagcaaaacaaatggcgtagagcggggagcaagagattacgcacgccgcgggcaccgatttccttcaagaatctgcaagaagcggaggatctgtcgagtccgactgttctaagaagcagctcgattctcgaaaccctagctagcaaagtagcaagctagctacaagagaaggaagctggcgaacaggtggtgggacgaggggcggctcggcctgccggagccatccctaggcaagaaccaagaagaaatggcgccttcgtccaaggacggcgccaccgagcagccgacgagcggtgggagcggcgacgaccgggagaacggcaccggtgagcccaaggaaggtgcggtggtcacgggcaaccggcggccgcgcgggcggccgccgggttccaagaacaagcccaagccacccatcttcgtgacacgtgacagccccaacgcgctgcgcagccacgtgatggaggtggccggcggggccgacgtcgccgagtccatcgcccacttcgcgcgccgcaggcagcgcggcgtctgcgtgctcagcggcgccggcaccgtcaccgacgtcgcgctccgccagcccaccgcgccgggcgccgtggtcgccctccgcggccgcttcgagatcctctcgatcaccggcacgttcctgccgggacccgcgccgccgggctccacggggctgaccgtgtacctcgcgggcggccaggggcaggtcgtcggcggcagcgtggtcggcacgctcatcgcggcgggccccgtcatggtgatggcgtccacgttcgccaacgccacctacgagaggctgccgctggacgacgccgaggaggatccagggcaggcgcagctgcctcccggccccggcggaggcccccctctgataatgggcgggatagccgatccctcggcgatgccaatgttcggcggcggcggcggcggtgtgccgccaagcctgatgatgccaggaggcgccgccgcctccggtgcgggcctgcagctcgggcacgaggggcttgcttgggctcgtgcacggccaccgccatactaggaggggatccatgtctgagaaattcgagtagaaatggaggatcgttcatcgctccggcagcctcaaggacgagctgagtgcgactcatcatatagttacttcaagctagaactgaagatcgaattaagcatgctgccaggagcaaataaaaggttgttcgactagctaatacactatctggtaagaaggtaaactagtactttatactacgactacaaactgcatgcatgtgagataccatcgagcttgcactgtatatatatggtttagatgcagcgtgataaattagatgacgggatgattatt

SEQ ID NO: 118570 - DNA, 2035 bp, Zea Mays
attgggtgcagtcgagtagttgccacctaaccgtggcggaggcgcagtgctgttgcgagatgtggctgtgatcgagcgagataactaaaagcctccccacataaatgcaagggcgacgagacggcaagcaagcggacgcgaacaaacccccttattccatagcgagcgcgagcagcggcgccgggaggactgctgcgatggggggagacgccagcaccatcgaggggggcccgctcccgcatctcggcggccggccggcctcccgcgtgcccgacaccccgctggtgcgcacggcgggggacgccgcgcgcatggtctgggacgagtccaagcgcctctggggcatcgggctgcccatcggcgtgggcatgctgagcatgtacgccatcagctccatcacccagatattcatcggccacctcggcaacctcccgctggccgccgcctccatcggcctctccgtgttcgccaccttcgcgctcggcttcctcctcggcatgggcagcgcgctcgagacgctctgcggccaggccttcggcgccggcgaggtcgccatgctcggcgtctacctgcagcggtcttggatcatcctcgtcgccgcctgcgtcgtcatgacgcccgtcttcgtcttcgccgagtcgctgctcctgctcatcggccaggacgccgacgtcgcgcgggagtccgccaggttcgccacctacatcgtcccctccatctacgccatgggcatcaacttcgccgccagcaagttcctccaggcgcagagcaaggtcaccgtacccgcctggatcggcttcggggcgctcctcgcctgtgccctcctcaactacctgttcgtcagcgtgctcggctggggcctccccggcgccgccgccgcctacgacatcgcgcactggatcatcgcgctcggccaggtcgtctacatcatcggatggtgcaaggacggatggaaaggatggtccgtagccgccttccacgaaatctggccattcgtcaggctctccctcgagtccgccgtcatgctctgcctcgaggtatggtacatgagcctgatcaccgtgctcaccggcgacctggaggacgcccagattgccgtggactcactaggcatatgcatgaacataaacggatgggaggccatgatcttcatcggcctcaatgccgctatcagtgtccgagtctccaacgagcttggctccggccgtccgagggccgcgtggaacgccgtcatggtcgtcgtcggcgaggcgctggtgatcgggattctgtgcatggcactcatcctcatcttcagagacagcttctccatcattttcaccagcgacaccaccctgcagcgagccgtcgccaggatcgccggcctgctcggcctcaccatggtgctcaacagcgtgcagcccgtggtttcaggggtcgcggttgggggcggatggcagggcctcgtcgcctacatcaacctcggctgctactatatcttcggcctgcccctgggctacttgctcggatacaagttcagctttggagttggggggatttggtccggcatgctttgtggtatcacccttcagacgctcatcttgctaggtgtggtttggaggacagattggaaagcagaggccgcacaagcttcaggccgtgtgcaaaagtggggcggcaaaggcaccgatgaagtcaagcctctcctggaatagaattagtgtagtactatcacgcacgaagctcgtttcatttgaataaacaactgggcaatacgccttatccctttcagaagcacagctcatttgctttcccatcgaatctgatagcttccctttcccctcctccgtgtagttaaattgatgtctctgtatgaacactgtttgaggcgactagtatgaaccctgtttgcggcgactagacgtattgaacatactttttttttcttccagttgactcagcatgacttgaacagtctcaaattgtgtgtaaaggatttactcgctagcagttggtgtaatggtggcaggaatgatgttcttcaggatcagatgag

SEQ ID NO: 118571 - DNA, 759 bp, Zea Mays
aaaggagggataaaagatatatgaaggcaacacggggctcatgacatcgcttacacaccacaacctggcagtcctgacatccgcaacgccatcctcgccggcaccgcctcctgcgctccgctctcctggtggcagggagtgcagcagatgcatcccatggccgccggggacctgaactcctgatcccttcgctgctggtggtaaggagagtccctggccctagctgctcggacggatctgttcccctgtcgctctggcgatccgcaaccacatgatgttccgaatccaatccgcccgcccgctggctctcttcgatttcttccgttttgttttttttttttttttttgcttgctgctacatcgtgcaagaaacaggagttctaactcgtgcgtacctacccactaccatcttcgcgcggaaatcgttgcactcttcccgcgtccctcggcgctcgcccatcgccatcttcccgctcgcgcgcgcttgactcagctcatcgccatggccgtcgccattttccctgtatcctgtagaatttatttccgccatggccacgcccagcgagctcagcgcgtccgcccgctctcggcttggcgccttggccgcgcgcacgcgcgcgcaggcggccccgcgtcctatgtattggccgcagcttcctctcgtccgcacaccctggccgtaacaaaagaataaagcagcatggatgggacaagagcaggataaagtaacataaagcagaatagcagcataaaacagcg

SEQ ID NO: 118572 - DNA, 515 bp, Zea Mays
tcaagtgatcaaagtcgtttttcaatgcagttgcttctgaatgcattgaaaaagcaagttaggcatttcactggtttgggaaatacccttatgacttacaaccttaggcctgtcattgaagaaattcaaaggtctgcggaggatagtggtgacagacgaaatttgaagatgtgcttggggatgctaaagtccatgagaaatcgttgtgatcagaattttgttgcttatagaaagggtcttggtgttgtttgcaacaaaaaaggtggattcggtgtagatgactttgttgttgaattctttggggaggtttacccttcttggagatggtatgaaaagcaagatggtattaaacatatacaaaacaacagtgaagatcaagctcctgagttttacaacattatgttagaaaggccaaagggaaaccgagatggatatgacttggtttttgttgatgcgatgcggccaactacgcgagtagaatctgccactcctgtaaccctaactgcgaagcaaag

SEQ ID NO: 118573 - DNA, 2595 bp, Zea Mays
atggtgttccggaaaggcccctggcctttcttatagcccaagccacttccttcttcctcctctcacctctctcgaaactttccccaatcccatctcctgccccccctctcccaaccctatccacgccgccgccagccctgctcgggtggtgcgcatacatgaaccatccgtcctcgtcgtcgtcctccgcccagccgccgccagccccggcggtggcggccgaggccacctccctcgcgccgggcttccgcttccaccccaccgatgaggagctcgtctcctactacctcaagcgcaaggtcctcggccgcccgctcaaggttgatgccatcgccgatgtggacctttacaagctcgagccctgggacctgcccgcccgctcccgcctccgctcccgcgactcccagtggtatttcttcagccgcctcgaccgcaagcacgccaaccgcgcccgcaccaaccgcgccacgtcgggagggtactggaagaccaccgggaaggacagggaggtgcgccatgggcccagacttgtcgggatgaagaagacgctcgtcttccacgcgggacgcgcccccaagggcgaacgcaccaactgggtcatgcacgaataccgcctcgagggcgatgacgccgcagggataccgcaggactcatttgtggtgtgccggatcttccagaaagctggaccaggtcctcagaatggcgcacagtatggagcgcctttcgttgaggaggaatgggaggaggatgacacagatgatggtttgcttccagtggagggtgttgctgctgctgaccctgaggttccccttgcttctgtggagatccctggtgctttggatagaggctatcttcaaatgagtgatctcattcagggtttggatgatcaaaatggaaatggtacacctagtttgccagtttctgatacttcaaataatagcaaccattctgaagacgtagatggaaattctggggacattttaagtgacccaaaccttggctctaattttcttcagtatgctgaacctggggagcaaaatagcttaatgcttaatggaactatcatatcaaatgcaaatgctggagatttttttgataattccagccacagtgatgggtttctagagctgaaggattttggagatgctgcaaatctggatttccctttgggcaatggatcatccatctggcctttggattgttgggcatggaaaacacctgactcagcggaatctttaaatggaactaatgatgagattcctccacttcctgatgaccagactttccagccagatgagctggaacaactgttacagtcaatacaagaagattcccatttaggctcaagtatcattgaccccccacattcttctatgacaaattcagttctgcctgatgaggattgtttgatgttctatgatgcaccgttcgattccaccatgtgtgatgatgggtttgcacagaatgggatccttggctctgcagcaaccaatctatctggtattggcatggtggacgatggtatgccatactttgatgcaatggatggtaatttatttaatgacattctgggctccatacagcagccagatggtagcagttcccatgcttttaatggcccagtccttacccaagaggtcaacaataccatgtttacatatagtccaactcaaaaggttttagaacctaatattgtagttggcgcaccatcgtctgctaggttacctgaagctggtagtcagttaaattgtgttgttttaccagatggtcaggctaagagtagtactattggaaagggatttgtaaggattttggattcgatctctgctcccccagcttttgcaggagagttcccatctaaccaccgcaaatccttggctcgtatttctggagcgcgccccaacacactccatgtttctgctgaagtgatccatataggaagtttagctgttccttctggcgcagataagtgggcgctgcaaaaggatcaaggcatggagctgctcttctctgcagattttgaacctgatgcccgtatacattgtggctgcaacaccattaccgcggtgctgcgtggtggcttctgccttttcttcgtttcagcaataatgctcttagtgagctacgaggtgggcatgtgcatctatggcaagtagcaacctggtactggtctaagataaatctcacagcatttaggttaatcctatgttttgaggcagactcaactggggtctggggcctcctgctagcttttaagtgtgccgcattgcatggcatggacctgtggggtgtttagcactagcagtaccattttgcagctcgagagctaatggtgtatgtatgaattcagtgctatttagaaatactatgagaattgcctcattggcgtgtgatgatgccatttgccatgcttgtggtcgcagtggtcaatgttagtgcaaaatattgtatatatatttgagatccaccataggaatcatgatgcttgtgcagtacagttgtgttggtgttttgagtgtttgcaggtttcaaaatgaatgttaatcgtgttgcaagccatgaatgaaagttttgaagaaaacccaagttaaaaaa

SEQ ID NO: 118574 - DNA, 2645 bp, Zea Mays
ctctcacctctctcgaaactttccccaatcccatctcctgccccccctctcccaaccctatccacgccgccgccagccctgctcgggtggtgcgcatacatgaaccatccgtcctcgtcgtcgtcctccgcccagccgccgccagccccggcggtggcggccgaggccacctccctcgcgccgggcttccgcttccaccccaccgatgaggagctcgtctcctactacctcaagcgcaaggtcctcggccgcccgctcaaggttgatgccatcgccgatgtggacctttacaagctcgagccctgggacctgcccgcccgctcccgcctccgctcccgcgactcccagtggtatttcttcagccgcctcgaccgcaagcacgccaaccgcgcccgcaccaaccgcgccacgtcgggagggtactggaagaccaccgggaaggacagggaggtgcgccatgggcccagacttgtcgggatgaagaagacgctcgtcttccacgcgggacgcgcccccaagggcgaacgcaccaactgggtcatgcacgaataccgcctcgagggcgatgacgccgcagggataccgcagtgaaaatggacatgggcagattgtaacgcgaatttgtaaccaaagggctaagcttacttctttgacgccactgattgtacacttacaaatgcactgtacttagtactgacactgatttctaaacttgttcgcacaggactcatttgtggtgtgccggatcttccagaaagctggaccaggtcctcagaatggcgcacagtatggagcgcctttcgttgaggaggaatgggaggaggatgacacagatgatggtttgcttccagtggagggtgttgctgctgctgaccctgaggttccccttgcttctgtggagatccctggtgctttggatagaggctatcttcaaatgagtgatctcattcagggtttggatgatcaaaatggaaatggtacacctagtttgccagtttctgatacttcaaataatagcaaccattctgaagacgtagatggaaattctggggacattttaagtgacccaaaccttggctctaattttcttcagtatgctgaacctggggagcaaaatagcttaatgcttaatggaactatcatatcaaatgcaaatgctggagatttttttgataattccagccacagtgatgggtttctagagctgaaggattttggagatgctgcaaatctggatttccctttgggcaatggatcatccatctggcctttggattgttgggcatggaaaacacctgactcagcggaatctttaaatggaactaatgatgagattcctccacttcctgatgaccagactttccagccagatgagctggaacaactgttacagtcaatacaagaagattcccatttaggctcaagtatcattgaccccccacattcttctatgacaaattcagttctgcctgatgaggattgtttgatgttctatgatgcaccgttcgattccaccatgtgtgatgatgggtttgcacagaatgggatccttggctctgcagcaaccaatctatctggtattggcatggtggacgatggtatgccatactttgatgcaatggatggtaatttatttaatgacattctgggctccatacagcagccagatggtagcagttcccatgcttttaatggcccagtccttacccaagaggtcaacaataccatgtttacatatagtccaactcaaaaggttttagaacctaatattgtagttggcgcaccatcgtctgctaggttacctgaagctggtagtcagttaaattgtgttgttttaccagatggtcaggctaagagtagtactattggaaagggatttgtaaggattttggattcgatctctgctcccccagcttttgcaggagagttcccatctaaccaccgcaaatccttggctcgtatttctggagcgcgccccaacacactccatgtttctgctgaagtgatccatataggaagtttagctgttccttctggcgcagataagtgggcgctgcaaaaggatcaaggcatggagctgctcttctctgcagattttgaacctgatgcccgtatacattgtggctgcaacaccattaccgcggtgctgcgtggtggcttctgccttttcttcgtttcagcaataatgctcttagtgagctacgaggtgggcatgtgcatctatggcaagtagcaacctggtactggtctaagataaatctcacagcatttaggttaatcctatgttttgaggcagactcaactggggtctggggcctcctgctagcttttaagtgtgccgcattgcatggcatggacctgtggggtgtttagcactagcagtaccattttgcagctcgagagctaatggtgtatgtatgaattcagtgctatttagaaatactatgagaattgcctcattggcgtgtgatgatgccatttgccatgcttgtggtcgcagtggtcaatgttagtgcaaaatattgtatatatatttgagatccaccataggaatcatgatgcttgtgcagtacagttgtgttggtgttttgagtgtttgcaggtttcaaaatgaatgttaatcgtgttgcaagccatgaatgaaa

SEQ ID NO: 118575 - DNA, 2537 bp, Zea Mays
agggaacgttgaagagtcccgtcccgtcgtgcaccaacatgccgccgcagctgctcgccagctccattattgcctctactccgccatctccttcctaatcgctcgcctcgtttcatcacctgagctctcctaatctcattcaccgttgcttgctctttgaattgcctttgcccccatttgctttcctgtttcttccatcccatccgtaccagctgacggtgcccgggttccatgcccagcggccagcgccttgtgacctgatccgcggctcgtccattcctccctccgtgaatggctcctccagcagggtctggggcagcgacggagggagggccggcacggcggcgcggcaccggcaccggtaccagccccggccgcaccaaagtgtgggtcgagccgccgggcaagagccaccaccagaccccggcgcggtcgctgcccccgccctcgcccccggccccgtcggtggcggccaagagggtgtccgtggtgtactacctttgccgcaaccgccatctggagcacccgcacttaatcgaggtgccgctcgccgccccggaggaaggtctctacctgcgagatgtgattaaccgcctcaacgtgctgcgcgggaagggcatgtcctccaagtattcctggtcttgcaagaggagctacaagaacggcttcgtgtggcacgatctgtccgacgacgacctggtgctccccgcgcagggcaacgagtacatcctcaagggctccgagcttcttgaccgctcgccgccgctagatcggcagcagaatggcgttagcaacccaaaggtggagggcctcaagccatgcaaggaagagtcccctcagtcgcggggctcgcaagaaggatgctcgtcgtcatcgtcttcgtctgcccttggcaaggagatctcacctccacctgccactcgacggccacagcagcaggcgcaatcagcagtgctgccatcgtcgtcggcttccaccaaccatgaagatgacctgtgcccgaccgcgcattcaggctcgtccggcaaccagtcccctgaacctgcaggaagaaatgctccattgtcagaggctagctccccgggaccttccgaatacagggtctgcagacccatcggagctcaggatgccgcgacacaaacagatgacagtgagagggatgttgctaaaacccatacttgcgtggtcggagtgtccatggatacgacgttagatgctgagattcaggaatgtcatcaaaggagctcactgctgtcaccaaaggtacccaagattgttcaggaatcaccggccctgtgttcctctgatgcttcaccgggtgtcagagttgagaccttggagtccctaataagagcagaagcctgtaggagaagtagctttagaacactagaggaggaacacatgcttggcccaattggtgtgaaactgaagccagccaatttgctaatgcagcttatcacttgtggatctatatctgttaaagaacaccgaggctttgggttcatcccaacgtacaggcctcggtttacacaagttgagttcccttcgtcagtgttctccactcctgtggcattgcgacaccttgacaaaatcccctgcaatacaagaacaatcgggacgagagctccagagtctgaacgtttcagtgggagcttggttgagaccaagatgcaggacgagtcaaggagaggaatcagctcactcaaacgctcatcatcttatgacgaggatagagtttatagagcagcacattccaaaagtgatacagaaaactcttgtgagtcaggtagtttcaggtgtcttccgcagactatcagaatcatatcatgtaagcaatcgagaaatggaacaatactctcccctttctctgatgtgagaaacagctctagtcaacaagaatatagtactagatcctcaccactgggttcatcaaagagtgcaagcaataggatgactgatccatcactgggtaaagtagattcattccacaaggaaaaggacatgatcaagatcgaagaaagcttccttctggagctcgggttataatccaatctgcacctttgtgtgaagatagtgatggcagcaatgaatcactgtaaggggctgtgttacatatgttttttttctttttatttcattttactgagaatgacatttgttggaatttggtgcttgtgtgtggcatagcttttggagtaggttcaaaggtattgattttgtaaactgtgaatgtgatagtcaacattttctcacaccttgaagaagagaatactttatcttgctttaaaaggtctgcttttgtatcttaatgcagtcagtttactggctttatttcttcatcaagtaaacaagcatgggttgtttatcaggcaacgactgctatgcaagcagtgcttctgtgcaagcgtggaagcaaaccatctgatccattatattacgatctaaccacagatacaaccatggtttgttagggggttttttttataaagattattgagctggtggtggaaaggtttaagtgttgaatgtgacttacg

SEQ ID NO: 118576 - DNA, 185 bp, Zea Mays
ctttgtttgtgttttatacaatttttaaacacgtggatgccaagttcacggccatgtttagtgagcatgttgctcgaagtttccggtacgcttctgaaatcggtcgtaacttatgctaagtaccatgaatatcattttttcatgcacggttttccaagtttcgagtgacctgcagttcaaatttg

SEQ ID NO: 118577 - DNA, 257 bp, Zea Mays
tagaatgaaattaataatacacaaatagccttagaaattcatgaaattttatggaggcataacatatgtccacatataatcctccaaaatatttggactataaaatttacaatatgttagtgtttcattcatttcactttcacttgttgcatgaattacacgtgaaatcactataagtatccaagtttcaacataatcaatacttcactttatcattttcatttggagacatgaggttatattcttacagaatgttt

SEQ ID NO: 118578 - DNA, 1133 bp, Zea Mays
atgagctgcttccagcccggaaccgaggctaactccgccagccgactcggaccggtggtggtgtcgtggaagctgcgcagccacgggcgggcctgttcgctgttcgcagccgtgcctcgatcgccgcccgtgccagaggtctctctccaatggcggtgacgagcgccgcagcccgccgcttcctcgcgctcgcgcccgcccggggaccccgcgccttctggtcggcctcgtgtccacccgaccccgacgcaccttccgcctcgtcgacgtctaccgacaacaacagcaggaggaagaagaaggagccgtccgggtccgcccaccaccgcctcgccgccgtcatggacgccgtcaacgagcgcaagctcccacccgagctcagtgggcgcggcaacgcagtaaggtctgaaactgacattgtaaatgtcgttgaacaaagaatatggcattcaatggaggaagggcactttgaaaatctaccagggaagggcaaacccttaaacctcacttcaaatcctcatgccgatcctgccgaagacaccctttacaggatactttcaaagaatggttgtgcacctgaatgggttgaactgaataaggaaattcgtggcatgatcttgagctggaggtcggcattaaggaaagcatgggcaaaccgctctgaagatgatgattctaactggagtgatgacagcagggctctccaggagcgaattcgccagataaatgataaggttttccggtacaacctgatagtaccctttgggcgtcagttgtttggtctgaactgggacaaggagctggacaagttgaaggaagaataaaggacaaagaggtggacacattggtgaacatagcatggaggacttttgttgtatcaaaatgacctgtaactaggaatacctgataggacatacacatacttaagaaaaaccatgaaagctgagtataggtatttacacgtaggcttttattagtttatatatttttggagaaccaagttttccggtgtttccggtgctgtagccgattttgtgataaaactctgtcacatgggtaaaacctgagataatttcttagcggtaaaactcgatctatgccacatgggctaagctccattaggtcttcttttc

SEQ ID NO: 118579 - DNA, 93 bp, Zea Mays
cttgttaatctgagcagaaatgattacccaactcagaacaatgaaaagagcagatatgtcttagtagcaggcagatgaattattgttgtacct

SEQ ID NO: 118580 - DNA, 840 bp, Zea Mays
gttgatgctctcaagcgcagcctttttcatggcctccaccctctccctcatgctggcgtcgctcatcagctcctccaccctgccggcgatgtgctccttggtgatgacacccgatccgtcggcctcggcccggagcccgaccttccagacgtcgcatatgtacccctggttgacgaactggtcagcgaagtagggccaggcgaggaagggcaccccgttccggacgccctccatggtcgagttccagccgcagtgcgagacgaagcacgcgaccgaagggtgcgacagcaccctctgctgcggcgaccatgcgaccaccatgccgcggccagttgcacggacacggtcgaggaagccgtcggggtagtcgtggacgtcgccgccgaggacgatgtctgggcgcacgacccagaggaacggccggccggagagctccagccctagggcgagctcccggaactggcgcgtgtcgaacatggtgaagctgccgaaggcgacgtacacgacggacatcgccgcctgcgcgtcgagccaggacatgcacgcgtcgtcctcgggccgccagaagtgccccaccaccgccgtcttgctgccactgccacggcgctcgcccgtgaggagaggcccgacggggacgatccgcgggaagcgcgcgaatgtcgccggctcggcgccgtggaaggagttgcagaggacgaagtcgcatttgtccaccgcgcggatgccgccgacgaggtaccggaagagcgcttcctgcccgtcgtggttgcctatgcagttccacgcgagttgggacgtctgcatcaccggcatgtccacggacagctggaacgtgccttg

SEQ ID NO: 118581 - DNA, 217 bp, Zea Mays
gccccgaggcggcgcgactagtggccattgtggacgttgcggcaggtccgcagcctccgaagcgtacggtcgacgcggcggggggcgagcggccgcgggaaaggggaaccttccggccgtggggagggaccagggaggcgcgcaggtggaggcggcgtcttccgggcgactggagcctgcctgaccggcgggtgagcatcccactccgccggtttcg

SEQ ID NO: 118582 - DNA, 369 bp, Zea Mays
gggctggatcatccggaaaaatgtcctttatgtgagcaggagagggagacaattgaccatctgcttgtgaattgcgttttctcaagagaatgttggttcctccttctaaggcaattcgggctgcagggtttggccccccaaccaacggatattaattttatggagtggtggcatcaagcaaatgaagctattcaggggtccttcagagatggcctaaactccctcattatgctgggcgcttggattttgtggaatcatcggaacagatgcatctttgatggcctttcccctaatgttgctaatttcctaatccatgtgggggatgagcgccgtctgtgggagactgccggggccaaggggttgacatcc

SEQ ID NO: 118583 - DNA, 939 bp, Zea Mays
cccccggacccccgtttccttccgatccccatccgccatcccccgttcccgttcttctccttccgtccgaccgtccctcgacactgccgaggccgaacctagcagccgcccacccgacgcccaatccgccggtgcaatcgcaatctccgagggttaatcgactaccggcggctacggcgccgccagtctcctggcttaggctgccaggggatgcgaggagccagcgcagcgcggccgccggccagccgcccccgccccactgcctataccgccagctacagtcggaaacggctgcaaggcagtcggaagagggaagccgcagccgggcactgactccgatccccactctagccaaccccacgcggaccggtccacctcggacgaccacgacgccatctcgcacgcgtgcttccacccaaccacacaaatcttctctcccaggcctaaccttcctccccgcgagctgcctctactgattttgcactggcatgccgtgacgcggaaagatgtggagatccatcttggactgatttcttccttactcggttattcgccctctgccggcgcaagatccattttagtttgcccccctcccccaaattggactacccaaggtgcggggacatccgcctatgtttgaacagttctgttggagcatgctctgttttaaattgactgaacctccatgccctatgctgaatttgcttctcagagagctattttttcattaatgttttttatgtttgctgcaaaagctttaatttttcttgtcaaactagattgtgttgtttagggagcttgcacaacgattaattggaaggaacatacgaaagaaaagaaccggaaggattaatcatgctgtatatatataagctatccttgacgctgcttgttgtttgctggttattgcaggttgaagataccttggtagtcagagca

SEQ ID NO: 118584 - DNA, 1573 bp, Zea Mays
cccccggacccccgtttccttccgatccccatccgccatcccccgttcccgttcttctccttccgtccgaccgtccctcgacactgccgaggccgaacctagcagccgcccacccgacgcccaatccgccggtgcaatcgcaatctccgagggttaatcgactaccggcggctacggcgccgccagtctcctggcttaggctgccaggggatgcgaggagccagcgcagcgcggccgccggccagccgcccccgccccactgcctataccgccagctacagtcggaaacggctgcaaggcagtcggaagagggaagccgcagccgggcactgactccgatccccactctagccaaccccacgcggaccggtccacctcggacgaccacgacgccatctcgcacgcgtgcttccacccaaccacacaaatcttctctcccaggcctaaccttcctccccgcgagctgcctctactgattttgcactggcatgccgtgacgcggaaagatgtggagatccatcttggactgatttcttccttactcggttgaagataccttggtagtcagagcatagaataagggtggactgttattaattttccataggatggaatccttgtggaagctgacctacttgctcgagccggcatcacttgctctcattgccacagctatctctgtggcctatgcatccgcatcgcgtgctctagattatggcaaagagatggagagaaacttggatttttcagaggcttccattacattggatcggtcacaggcactaatgattccccttgcaagctcatgcagtctgttgctgatgttctacttgttctcgtctgtctcacatcttgtgactgcttttactgctgtggcctctgcgatggcactgttcttttgcctgtctccgtatgtcacttatctcaagatgcagttcaatctaatggacccattcgtgtccaggtgttgttcaaagtcttttacacggttgcaaggtttgctgatgctcttctgcatagccacagtcttagcctggttggtttctgggcattggttgctaaataacctactgggaatttccatatgtatagcgtttgtcagccatgtgaggcttcccaacataaaaatctgtgcgctgcttcttgcctgcttgtttgtgtatgatattttctgggtgttcttctcagaaaggttctttggagcaaatgtcatggtttctgttgccacccagaaggcatctaatcctgttcacacagtagcaaataagctcagcctgcccggattgcaattgattacaaagaagctggagcttccagtcaagcttgtatttccaaggaatttgttgggtgggattgttccaggaagcaatcctggtgactacatgatgcttggccttggagacatggtaggcccaataaattgtatcttgcaaatatttattgctttattttgcttttagtccttttctttttataacgtctgctgttagtccttgaaccctccttgagtggttctacttttaataccccaatgtttgctgagcttcatattgtttgtcttgtctatatgtat

SEQ ID NO: 118585 - DNA, 2003 bp, Zea Mays
cccccggacccccgtttccttccgatccccatccgccatcccccgttcccgttcttctccttccgtccgaccgtccctcgacactgccgaggccgaacctagcagccgcccacccgacgcccaatccgccggtgcaatcgcaatctccgagggttaatcgactaccggcggctacggcgccgccagtctcctggcttaggctgccaggggatgcgaggagccagcgcagcgcggccgccggccagccgcccccgccccactgcctataccgccagctacagtcggaaacggctgcaaggcagtcggaagagggaagccgcagccgggcactgactccgatccccactctagccaaccccacgcggaccggtccacctcggacgaccacgacgccatctcgcacgcgtgcttccacccaaccacacaaatcttctctcccaggcctaaccttcctccccgcgagctgcctctactgattttgcactggcatgccgtgacgcggaaagatgtggagatccatcttggactgatttcttccttactcggttattcgccctctgccggcgcaagatccattttagtttgcccccctcccccaaattggactacccaaggttgaagataccttggtagtcagagcatagaataagggtggactgttattaattttccataggatggaatccttgtggaagctgacctacttgctcgagccggcatcacttgctctcattgccacagctatctctgtggcctatgcatccgcatcgcgtgctctagattatggcaaagagatggagagaaacttggatttttcagaggcttccattacattggatcggtcacaggcactaatgattccccttgcaagctcatgcagtctgttgctgatgttctacttgttctcgtctgtctcacatcttgtgactgcttttactgctgtggcctctgcgatggcactgttcttttgcctgtctccgtatgtcacttatctcaagatgcagttcaatctaatggacccattcgtgtccaggtgttgttcaaagtcttttacacggttgcaaggtttgctgatgctcttctgcatagccacagtcttagcctggttggtttctgggcattggttgctaaataacctactgggaatttccatatgtatagcgtttgtcagccatgtgaggcttcccaacataaaaatctgtgcgctgcttcttgcctgcttgtttgtgtatgatattttctgggtgttcttctcagaaaggttctttggagcaaatgtcatggtttctgttgccacccagaaggcatctaatcctgttcacacagtagcaaataagctcagcctgcccggattgcaattgattacaaagaagctggagcttccagtcaagcttgtatttccaaggaatttgttgggtgggattgttccaggaagcaatcctggtgactacatgatgcttggccttggagacatggccattccagggatgcttctagctctggtactcttttttgataatcggaagttcaaggatgtgaattttccaccagatgtgtctcccccaaaacggcggaattatgtgtggtatgctgtaacaggttatggtattggcttggtagctgcactagctgctgggatcttgtctcagtctcctcaaccagccttactgtacctggtgccatcgacactgggacctgtcatgtacttgtcatggttacggaatgagctatgggagctatgggaagggtctgggacgattctgaacgagaaagctcatttgttggaggtctgagatccaagtggacaataagaaggatctgaacccaccgtgattgaatctaattaaacaatacttgacctcctcataccgaaggagagtatttataagctagaatgttcagtcatgtaagccatcacctagtttcgctcgcaagaggaaacacttacaaatcatgtaactgtttgtaatagaaaagttcaatgcatttcagctttttaacca

SEQ ID NO: 118586 - DNA, 1887 bp, Zea Mays
cccgttcttctccttccgtccgaccgtccctcgacactgccgaggccgaacctagcagccgcccacccgacgcccaatccgccggtgcaatcgcaatctccgagggttaatcgactaccggcggctacggcgccgccagtctcctggcttaggctgccaggggatgcgaggagccagcgcagcgcggccgccggccagccgcccccgccccactgcctataccgccagctacagtcggaaacggctgcaaggcagtcggaagagggaagccgcagccgggcactgactccgatccccactctagccaaccccacgcggaccggtccacctcggacgaccacgacgccatctcgcacgcgtgcttccacccaaccacacaaatcttctctcccaggcctaaccttcctccccgcgagctgcctctactgattttgcactggcatgccgtgacgcggaaagatgtggagatccatcttggactgatttcttccttactcggttgaagataccttggtagtcagagcatagaataagggtggactgttattaattttccataggatggaatccttgtggaagctgacctacttgctcgagccggcatcacttgctctcattgccacagctatctctgtggcctatgcatccgcatcgcgtgctctagattatggcaaagagatggagagaaacttggatttttcagaggcttccattacattggatcggtcacaggcactaatgattccccttgcaagctcatgcagtctgttgctgatgttctacttgttctcgtctgtctcacatcttgtgactgcttttactgctgtggcctctgcgatggcactgttcttttgcctgtctccgtatgtcacttatctcaagatgcagttcaatctaatggacccattcgtgtccaggtgttgttcaaagtcttttacacggttgcaaggtttgctgatgctcttctgcatagccacagtcttagcctggttggtttctgggcattggttgctaaataacctactgggaatttccatatgtatagcgtttgtcagccatgtgaggcttcccaacataaaaatctgtgcgctgcttcttgcctgcttgtttgtgtatgatattttctgggtgttcttctcagaaaggttctttggagcaaatgtcatggtttctgttgccacccagaaggcatctaatcctgttcacacagtagcaaataagctcagcctgcccggattgcaattgattacaaagaagctggagcttccagtcaagcttgtatttccaaggaatttgttgggtgggattgttccaggaagcaatcctggtgactacatgatgcttggccttggagacatggccattccagggatgcttctagctctggtactcttttttgataatcggaagttcaaggatgtgaattttccaccagatgtgtctcccccaaaacggcggaattatgtgtggtatgctgtaacaggttatggtattggcttggtagctgcactagctgctgggatcttgtctcagtctcctcaaccagccttactgtacctggtgccatcgacactgggacctgtcatgtacttgtcatggttacggaatgagctatgggagctatgggaagggtctgggacgattctgaacgagaaagctcatttgttggaggtctgagatccaagtggacaataagaaggatctgaacccaccgtgattgaatctaattaaacaatacttgacctcctcataccgaaggagagtatttataagctagaatgttcagtcatgtaagccatcacctagtttcgctcgcaagaggaaacacttacaaatcatgtaactgtttgtaatagaaaagttcaatgcatttcagctttttaacca

SEQ ID NO: 118587 - DNA, 1962 bp, Zea Mays
gaccgtccctcgacactgccgaggccgaacctagcagccgcccacccgacgcccaatccgccggtgcaatcgcaatctccgagggttaatcgactaccggcggctacggcgccgccagtctcctggcttaggctgccaggggatgcgaggagccagcgcagcgcggccgccggccagccgcccccgccccactgcctataccgccagctacagtcggaaacggctgcaaggcagtcggaagagggaagccgcagccgggcactgactccgatccccactctagccaaccccacgcggaccggtccacctcggacgaccacgacgccatctcgcacgcgtgcttccacccaaccacacaaatcttctctcccaggcctaaccttcctccccgcgagctgcctctactgattttgcactggcatgccgtgacgcggaaagatgtggagatccatcttggactgatttcttccttactcggtgaggaactccaaaccatccagctaggttattcgccctctgccggcgcaagatccattttagtttgcccccctcccccaaattggactacccaaggttgaagataccttggtagtcagagcatagaataagggtggactgttattaattttccataggatggaatccttgtggaagctgacctacttgctcgagccggcatcacttgctctcattgccacagctatctctgtggcctatgcatccgcatcgcgtgctctagattatggcaaagagatggagagaaacttggatttttcagaggcttccattacattggatcggtcacaggcactaatgattccccttgcaagctcatgcagtctgttgctgatgttctacttgttctcgtctgtctcacatcttgtgactgcttttactgctgtggcctctgcgatggcactgttcttttgcctgtctccgtatgtcacttatctcaagatgcagttcaatctaatggacccattcgtgtccaggtgttgttcaaagtcttttacacggttgcaaggtttgctgatgctcttctgcatagccacagtcttagcctggttggtttctgggcattggttgctaaataacctactgggaatttccatatgtatagcgtttgtcagccatgtgaggcttcccaacataaaaatctgtgcgctgcttcttgcctgcttgtttgtgtatgatattttctgggtgttcttctcagaaaggttctttggagcaaatgtcatggtttctgttgccacccagaaggcatctaatcctgttcacacagtagcaaataagctcagcctgcccggattgcaattgattacaaagaagctggagcttccagtcaagcttgtatttccaaggaatttgttgggtgggattgttccaggaagcaatcctggtgactacatgatgcttggccttggagacatggccattccagggatgcttctagctctggtactcttttttgataatcggaagttcaaggatgtgaattttccaccagatgtgtctcccccaaaacggcggaattatgtgtggtatgctgtaacaggttatggtattggcttggtagctgcactagctgctgggatcttgtctcagtctcctcaaccagccttactgtacctggtgccatcgacactgggacctgtcatgtacttgtcatggttacggaatgagctatgggagctatgggaagggtctgggacgattctgaacgagaaagctcatttgttggaggtctgagatccaagtggacaataagaaggatctgaacccaccgtgattgaatctaattaaacaatacttgacctcctcataccgaaggagagtatttataagctagaatgttcagtcatgtaagccatcacctagtttcgctcgcaagaggaaacacttacaaatcatgtaactgtttgtaatagaaaagttcaatgcatttcagctttttaacca

SEQ ID NO: 118588 - DNA, 754 bp, Zea Mays
tactcccgtagtttcgacatacagtgcacctgcttctggttattgatgatttgcgaattcacctcaggattttttttttcaaaagcagcatgactgcatcatacagatttgattctttttttctgcctagtctgtaatctatcaactttgctcttgttttttgagtaaaatttattcgtatcactgatgtcttgaatttaatcacctagattttttcttcctccaggccattccagggatgcttctagctctggtactcttttttgataatcggaagttcaaggatgtgaattttccaccagatgtgtctcccccaaaacggcggaattatgtgtggtatgctgtaacaggttatggtattggcttggtagctgcactagctgctgggatcttgtctcagtctcctcaaccagccttactgtacctggtgccatcgacactgggacctgtcatgtacttgtcatggttacggaatgagctatgggagctatgggaagggtctgggacgattctgaacgagaaagctcatttgttggaggtctgagatccaagtggacaataagaaggatctgaacccaccgtgattgaatctaattaaacaatacttgacctcctcataccgaaggagagtatttataagctagaatgttcagtcatgtaagccatcacctagtttcgctcgcaagaggaaacacttacaaatcatgtaactgtttgtaatagaaaagttcaatgcatttcagctttttaacca

SEQ ID NO: 118589 - DNA, 588 bp, Zea Mays
aatgcagataaggggttcgttggcgttgttctccaaatcagacacagacaaggacaatgttcatcaggctgaacaagatagaagaagtaacatggagccagatggtgtggtagtcaaaagtagcagtgcatcatcgcgtactaggaattaagctagctaagggagaccatggtttgaacctttggatctgctgtctgtgtttccatgcttccagttcagagagctgggctgctaacaagtcggttagtcagatcggattccccttgtgttctcaatcagcagttacagtagtgatgtactcatgtagccggacgcagtggcatgctataatgctagcgtgaccgtctaggtaaatgccaccgattagagatggcaatggtacccacgacccgataactgataggtatttattttattagggtatgtatgtaggctaaatattctacctatgggtctgttattaagcaaaaatcttcatccaatagataaatgggtattagaacgttccgccttcacctatacctgttaacccgtgggtataaaatacacaatataaacttagcccaagcatgaactttaactttagtc

SEQ ID NO: 118590 - DNA, 108 bp, Zea Mays
taacccctcacaactatttgaaattaatccgatgcacgcctatagatggccaaacggcgtcccggcatgggccagacgcccgcgggccacaactctagcacagaaacg

SEQ ID NO: 118591 - DNA, 104 bp, Zea Mays
gtttgagttcatgcatgtgacttattttaaaaacttgagctcacaaactttctcttatttggtctctgtatggtggaattatatcattttataatctatgttcg

SEQ ID NO: 118592 - DNA, 3281 bp, Zea Mays
ctgccaggtgctgaactgtaacatgcagtgccctattcccaggtttttggaccgacagcaaagcagaaggaattgtatgaccaggccattattcctattgtaaatgaggttttagagggatttaattgcaccatatttgcgtatggccagacaggcactggaaaaacatacaccatggaaggcgagtgcaggagagccaagagtggaccgaagggtcaattacctgcagacgctggagttatacctcgggcagtgaagcaaatctttgataccctggagaggcagaacaccgagtacagtgttaagatcacgttccttgagctgtacaatgaggaaattacagatcttcttgctcctgaagagatatctaaggctgcatttgaggataaacagaagaaagccttacctcttaatcttatggaggatgggaagggtggagttcttgttcgaggtctcgaggaagaaattgttacgaacgcgagtgaaatattctctctgttagaaagggggtctgcaaaacgccgcactgcagagacattactgaacaagcaatctaggtcaatctcagccagtcttcttttgaactataccgctacaacaaactttatgtgctcattactacttttaacattttagccggtcccactctctattctcaatcactattcacataaaagaggcaacccctgaaggagaagagctgataaaatgcgggaagttaaatctagttgacttggctgggtccgagaacatctctcgttctggagctaaggagggccgtgcaagggaggctggcgaaattaataaaagcttgcttactctgggtcgtgtgattacggcattggtcgaacaccttggacatgttccttacagggacagcaaactcacaagattgctgcgtgattcattaggaggaagaacaaagacttgtattatcgctactgtttcaccctctgtgcattgtctcgaagaaaccctgagtacattggattatgctcaccgggcaaagagcattaagaacaggcctgaggtaaatcagaaaatgatgaaatctacattaattaaagatctttatggtgaaattgaccgacttaaggcagaggtatacgctgctcgagaaaaagttggggtgtacattcccaaagacaggtatcagcaagaggaaaatgagcgaaaggcgatggctgatcagatagaacaaatgaatgcttctttggaagtaaaccataagctaattagtgatctgcaacaaaattatgattctgagcttcaacattctgctgatttgagcaaaaagcttgaagtcacagagaaatgtctggaccacacaagcaacctactctctacgacaaaagaagatcttaaacaggcacagtataatctaaatgagaaagattatataatttcagagcagaagaaagcagaaaatgctttaacacaccaaacgtatgtgctgagatcagatctggaacaatatactcgtgataatacttcactatattcaaagattgctaggggagacaagctaagtgcaacaaataggtcagtcgtgaatacattccaaactgaccttgcttcgaagttggatattctttccaatacactcaatgcatcaatagaccaacaaaatatgcatctaaaatctgtggaggacttatgccaatcttatgttgattcccatgacaaggctacttctgagctgaaaaagaagattttggcttcaaaatcattatacatgtcacatatggaagctttcctaaatgttgtcctcgtacataaagcaagtgcaaatggcacactagaagatatatcatcactgtctgctgcaagctgctgtagtcttgaccagctactagtttgtgttgagggagaggcacagaatatatttaatgacatccataatttgttaaccatccaccgaagcgaaatgacgcacttcactcaagaattaagggagagtttccaaataagcttggataggacaaaagaaatgtccacctatattattgggctctttgacaagtacgttgaggaaacctccaaattgcacagtcactcaaataatactcatgaagcacaaatgaaaagcattgaagactttcagatggtttatgaggagcaatcaaaatcagtggagcagaagcttttagcggagataagcagtttagtatctaaacatattactcgacaaagagagttggtgggcgttagattgagctctctgggcgatgctgcccgtggaaataaggcatttttggatgaacacacatcggccatggagtttgtcacaaaagatgctaagaggaagtgggaaacgtttgcagagcaggctgaaaatgactgcaaagctggctccagcttttctgcagctaagcatagccgcatggaaaccatgcttcaggagtgcgcatgcactgttgactccgccgttcagcaatggaagaagtcacatgctgctgttaacgatctcagcagaaagcaagttgctgaagttgaagcactcgtcaggactgcaattgagaacaacgagcaacatgaactggaagttgcatcttctcgagctgtggctgaagaagacgcctccaataacagcaaggacatagctcagggcgttgaaaatctgttggaagaggcacggaattcaagttcaagagtggtctcaacggtggaggctcacttcggtgagctacagatgctgcaagagagccactcgagccaggctgccggtatcaacatgcacgccgacaaggctctccaaaccagttacaaggactacgaaccctcaggtgaaactccggtgaggtctgagccgaacgtgccaagcaaaggctcgattgaatcgctgcgagccatgcccgtggagaccatgatgaatgagttccgtgagaaccatccgtatgaacatgaatcgagcaaagaatctaagttatctcagatacctcgcttgccgctcgcgacaatcaactgagacattcacttccctatgtgcagtgtacttttattagtagggcgtcaatttgccggttttggtgtcccttgtgcacttgtgctaggttaaccatggggtgtgagctgccttggctctctccagtgcatttcccttttttcccgcattcaattatctgtaatgttctgttgtgccttgtacgatactgatattgtacagcatcagatatgtgccaaagctagcttgaattgcatgactcattacattggaatctgaatgttgcgttgcattgtgcaaataattgataaggttttgatataaggttgcattgcac

SEQ ID NO: 118593 - DNA, 3147 bp, Zea Mays
ccaggtttttggaccgacagcaaagcagaaggaattgtatgaccaggccattattcctattgtaaatgaggttttagagggatttaattgcaccatatttgcgtatggccagacaggcactggaaaaacatacaccatggaaggcgagtgcaggagagccaagagtggaccgaagggtcaattacctgcagacgctggagttatacctcgggcagtgaagcaaatctttgataccctggagaggcagaacaccgagtacagtgttaagatcacgttccttgagctgtacaatgaggaaattacagatcttcttgctcctgaagagatatctaaggctgcatttgaggataaacagaagaaagccttacctcttaatcttatggaggatgggaagggtggagttcttgttcgaggtctcgaggaagaaattgttacgaacgcgagtgaaatattctctctgttagaaagggggtctgcaaaacgccgcactgcagagacattactgaacaagcaatctagccggtcccactctctattctcaatcactattcacataaaagaggcaacccctgaaggagaagagctgataaaatgcgggaagttaaatctagttgacttggctgggtccgagaacatctctcgttctggagctaaggagggccgtgcaagggaggctggcgaaattaataaaagcttgcttactctgggtcgtgtgattacggcattggtcgaacaccttggacatgttccttacagggacagcaaactcacaagattgctgcgtgattcattaggaggaagaacaaagacttgtattatcgctactgtttcaccctctgtgcattgtctcgaagaaaccctgagtacattggattatgctcaccgggcaaagagcattaagaacaggcctgaggtaaatcagaaaatgatgaaatctacattaattaaagatctttatggtgaaattgaccgacttaaggcagaggtatacgctgctcgagaaaaagttggggtgtacattcccaaagacaggtatcagcaagaggaaaatgagcgaaaggcgatggctgatcagatagaacaaatgaatgcttctttggaagtaaaccataagctaattagtgatctgcaacaaaattatgattctgagcttcaacattctgctgatttgagcaaaaagcttgaagtcacagagaaatgtctggaccacacaagcaacctactctctacgacaaaagaagatcttaaacaggcacagtataatctaaatgagaaagattatataatttcagagcagaagaaagcagaaaatgctttaacacaccaaacgtatgtgctgagatcagatctggaacaatatactcgtgataatacttcactatattcaaagattgctaggggagacaagctaagtgcaacaaataggtcagtcgtgaatacattccaaactgaccttgcttcgaagttggatattctttccaatacactcaatgcatcaatagaccaacaaaatatgcatctaaaatctgtggaggacttatgccaatcttatgttgattcccatgacaaggctacttctgagctgaaaaagaagattttggcttcaaaatcattatacatgtcacatatggaagctttcctaaatgttgtcctcgtacataaagcaagtgcaaatggcacactagaagatatatcatcactgtctgctgcaagctgctgtagtcttgaccagctactagtttgtgttgagggagaggcacagaatatatttaatgacatccataatttgttaaccatccaccgaagcgaaatgacgcacttcactcaagaattaagggagagtttccaaataagcttggataggacaaaagaaatgtccacctatattattgggctctttgacaagtacgttgaggaaacctccaaattgcacagtcactcaaataatactcatgaagcacaaatgaaaagcattgaagactttcagatggtttatgaggagcaatcaaaatcagtggagcagaagcttttagcggagataagcagtttagtatctaaacatattactcgacaaagagagttggtgggcgttagattgagctctctgggcgatgctgcccgtggaaataaggcatttttggatgaacacacatcggccatggagtttgtcacaaaagatgctaagaggaagtgggaaacgtttgcagagcaggctgaaaatgactgcaaagctggctccagcttttctgcagctaagcatagccgcatggaaaccatgcttcaggagtgcgcatgcactgttgactccgccgttcagcaatggaagaagtcacatgctgctgttaacgatctcagcagaaagcaagttgctgaagttgaagcactcgtcaggactgcaattgagaacaacgagcaacatgaactggaagttgcatcttctcgagctgtggctgaagaagacgcctccaataacagcaaggacatagctcagggcgttgaaaatctgttggaagaggcacggaattcaagttcaagagtggtctcaacggtggaggctcacttcggtgagctacagatgctgcaagagagccactcgagccaggctgccggtatcaacatgcacgccgacaaggctctccaaaccagttacaaggactacgaaccctcaggtgaaactccggtgaggtctgagccgaacgtgccaagcaaaggctcgattgaatcgctgcgagccatgcccgtggagaccatgatgaatgagttccgtgagaaccatccgtatgaacatgaatcgagcaaagaatctaagttatctcagatacctcgcttgccgctcgcgacaatcaactgagacattcacttccctatgtgcagtgtacttttattagtagggcgtcaatttgccggttttggtgtcccttgtgcacttgtgctaggttaaccatggggtgtgagctgccttggctctctccagtgcatttcccttttttcccgcattcaattatctgtaatgttctgttgtgccttgtacgatactgatattgtacagcatcagatatgtgccaaagctagcttgaattgcatgactcattacattggaatctgaatgttgcgttgcattgtgcaaataattgataaggttttgat

SEQ ID NO: 118594 - DNA, 94 bp, Zea Mays
aagaaataaacacctgcaaaagcagagagaggccttagcaaccaagagacaccacaatcaggtccaagcaaatctacaacatctaattcaagaa

SEQ ID NO: 118595 - DNA, 122 bp, Zea Mays
agtgccatatcatgggctttaaagtatgtgcgggtgttcatataaaatactacggagtaataacacatatccaaaacatgtgttatctaaaacaggtgttcgctcaaacaaaaatccgataa

SEQ ID NO: 118596 - DNA, 1028 bp, Zea Mays
gtcgtcgtcacgggtgtttccttcccctctcccccctttctcatctcgcggttcttctccaaatctcggagagttttgatcagaaacttcacgtcgcttccatgacgcgtgcagtgcatgagatcggcatggccaactcaactagctaggacggacgacacggagaagaaaacagatcgcgccaacacgcataagatggaaaaaagtgtatggatagatagatagatactcgtcacaccgcatgcgcacttgcgcagcatctgctcctgaattcctccgttcctgaaccagtagatcattttgtttaacagcagggtgcagggcccgtttctgttgctcggcacccgtcccatcccacccacctgctcacgacgacaggccagcacgacacggagggaggaagtagccaggccacctcgcctcgcctctactctcccgcggtcccgccccataccatgtccgactacaaccgctacggccacagctacagctacggcggcgggtacggccaagggccagcgccctcggccccgccggcaccgcacatgcccaccgctacatccgccgccccgccctcctcctcctcatacggcgcgtacgccgggtacccgcccgcctaccctccgccgccctcgcaggcggcgggcggattcggtcccgctggctccggctacggcttcgtccccgtcgcgttcccgccggggacgcacccggacgtcgagcgcgccttccgggccgccgaccgcgactgcagcggcgccatcgacgagcgcgagctgcagggagcgctctcctccgcctaccaccgcttcagcgtccgcaccgttcgcctcctcatgttcctcttcaacgacccctcctcctccacgccgtcacggatggggccaacacagttcgtatccctctgggattgccttgggcaatggcgggtgagtgattgcagggtttctcagtttacttatagttataaaaagactgctcaattgctacagtcttgttgtgccactgctccaatttgtgatgcataa

SEQ ID NO: 118597 - DNA, 1470 bp, Zea Mays
gtcgtcgtcacgggtgtttccttcccctctcccccctttctcatctcgcggttcttctccaaatctcggagagttttgatcagaaacttcacgtcgcttccatgacgcgtgcagtgcatgagatcggcatggccaactcaactagctaggacggacgacacggagaagaaaacagatcgcgccaacacgcataagatggaaaaaagtgtatggatagatagatagatactcgtcacaccgcatgcgcacttgcgcagcatctgctcctgaattcctccgttcctgaaccagtagatcattttgtttaacagcagggtgcagggcccgtttctgttgctcggcacccgtcccatcccacccacctgctcacgacgacaggccagcacgacacggagggaggaagtagccaggccacctcgcctcgcctctactctcccgcggtcccgccccataccatgtccgactacaaccgctacggccacagctacagctacggcggcgggtacggccaagggccagcgccctcggccccgccggcaccgcacatgcccaccgctacatccgccgccccgccctcctcctcctcatacggcgcgtacgccgggtacccgcccgcctaccctccgccgccctcgcaggcggcgggcggattcggtcccgctggctccggctacggcttcgtccccgtcgcgttcccgccggggacgcacccggacgtcgagcgcgccttccgggccgccgaccgcgactgcagcggcgccatcgacgagcgcgagctgcagggagcgctctcctccgcctaccaccgcttcagcgtccgcaccgttcgcctcctcatgttcctcttcaacgacccctcctcctccacgccgtcacggatggggccaacacagttcgtatccctctgggattgccttgggcaatggcggggaatttttgacaggtacgacagggaccggagcggcaaaatcgactcccgtgagctgaccgaggctctccggagccttggatatgctgttccaccttctgtcatcgagcttcttatagcgaattacagcaatggtgtgcccagcaatggcgcgctagactttgacaactttgtggaatgtgggatgattgtgaagggtttaaccgagaaattcaaggagaaggatacgcgctacaccggctcggctactcttacatacgatggtttcttgtcaatggtgatccccttcatcgtcccttagctgtgctgtatgtagttcggtaacttgatagtagtcatcaaccatggttctagtaggagtgctctcccctagtctgtgcgaaaggttttttttttctcttcttcgtttctgagtcttgtctaccttgttcgttttgtacattaataacctcgatttgtttgtttcatgggatttacatcgttttggactatgaaatcttccaaggattgaaagtcatatgccatccttcagtattcctgga

SEQ ID NO: 118598 - DNA, 685 bp, Zea Mays
gccagactctcttccttgctcctgtctctcctcacgccatctcttctctctgtccctaggctgcacgacagcagcagggagcaggcgtctctcccatggccgttggcctcccctagcacgcgatgcccccttgcttcatctcccccacacctccatggcatttctctggtatgggacgtcgattgggagcaaccctgaggcccccactgcagcttctccgctccccggctccctgaccaagggacctcaagctccagcaagccatggatggcgctcttcctcagctcgggcttggcctccgctaggccgctgtctgttcatctgcgtcgggctctaggacgccacctctctcactgctcggctcgccatgcatatcggccacggcgtggtcaagcccaatcgatgagcctgctgtgcatgcgtccagcacaaggtagaagaagactgctccctctatgacatgtgggtcccaagcacatttgcatcttgtacacaaaattccagattttcgtgttgtattcaaaaattcatatcttgtgttttagagctcctaaaatcgtgaaatttattttgttgtattccttatgaaattctctaactattggatctatatgttggtatgttttagtggaaaagtttttatgtagaaattcgtatttaaaaactggtttagagaataaacaaa

SEQ ID NO: 118599 - DNA, 1140 bp, Zea Mays
atggattcagagtccgtgtaccagaactgcaaggagttggagtcagagttcctcacctcccttgtcgcccatgctccctcgcccgaggaggcaatggttgcgatgggcgcagccgcagacgcggggggcttcgcgaggttcgacccgccctcaccacttgacccctacgacgacatcgctaccacccaggccctcttccccgagttcaacgccgtccctgcggacgcgcttgctcgccacgaggacgaccgtgctaccatatccaacaactccttcagcagatcagcgacaacctcctcagcctcgcccatgacttccctgacctccactccacctcaggatggtgttcccgtcctctccatcttcaccgtcgttgtggatcctgagcacaacgtcacgccggacacggatgtgagctctggcaagccactgatgtcttcttcttcagcatcagccaccgtcgccaccagcaagctggcgtcacccttgatttggacaggcatcacccttgatttggactggagtcacccttcctcaatggctcccacgccatcacagaaggctatcctcacccttgatttggacaggcggcacagtatgcagaagggcgcttgcaacctattcgatgaaatgcccacgagcgcctggaggatcctcaaccctgcgttccacctcgagaagctcaagctcatgctgccggtgttttctacgtgttgcgaagagcttgtcagccgatgggcacaagcacttggtcctgacggctcgtgcgagcgggacgtggacccggagcttcagacactcaccggagatgtcatctctcacactgcgttcgacagcagctacctcgaaggaagaaagattttacatctgcaggtcgagcaagttgagcgcctcatgtccatcattgacaagttcaccgggatacatgtccttgcctactagaaacaacagaaggatgtgtcaaatcaaaaccgagattgtgtcaaatcttcatgtctgattggtaaaaggatgcaagctatgaaagaaggtgaaagtgacaaagacgacctgctgggcttactgttggagtcaaatgtgagagagaccaaagagaacggcagcctgcccagccaaggaatgaccattgaagacgtcatg

SEQ ID NO: 118600 - DNA, 704 bp, Zea Mays
atcgggatgaggctggccgccgcgccaccgggccacgtgcgcctgcaggggcccgaggggggagggggcgtgcaaccgcgagggggcgtgcaaccgcgaggggccgtgcagtctgtcgcgccgggcgagccaggcttggccgcacgcgcagggaaggacgggctgggcgctggctgatccgatggttggcctcacaggcctgcaatggtgcacaaggccgccatggcacgagctcgtcggggatcaggtgccgagtggccgccgcgcgcaagggagaagaggtgggggccacgaccaggggccctgcggcgtagcacgccaaggggagaggacgccgagggaaaggaggtataaggagagactcacctgcgtatgcgatgaccaataaccgcctctccgtgatttggatctggggacgaagtgcatatgtgagcagatgggagagatctgtaaatcccaaatttggatggaataatttttttatacaaaaagctttggaaattatggaaccctacgtgattaattgttctcttctcttttgcatatgtaaataaagagatcaagttgaataaattaaaaatgcattcatgctgatgtattattttgtgtgaagcattttatttgaataaaggaatcacaatttaaatttgaattcaaattataaatgagaatataaaacagaaaatgaataaaaaaagaaagaa

SEQ ID NO: 118601 - DNA, 738 bp, Zea Mays
atccctctccagctcattccagcgcactccaccctttgctcgatgtcatccccagctccttcaagcagctgacatctagattcttttcttcactcggaccatgctgctgctccattcatggctgcgagtccacctccgccgagctgccagtgctccagctcgctccttcctcgccttcaatctcttggtcgccgcgcccctcagctcgcgtagcttgctggtggcccggccactcgccctcggcctcaccttcaggccgcaacgccatcggctcctcgtccggctttaacttcgtcgtggccaacagcttcaaatccttgtagcgtgtctccgcactctgcgtcatcgccgtcatggtttttggagttcatcgtgacacgctgtcgatgatctacgtatggcggaagatcttcgcaagttcacgcagcttcgtggtaattaattttgatggcgatctgcgttatttagcgctatgtttgtttcctttgtgtgtttttgtgtgcgatcgtagagggagatttgatgctgaagccgaagccagcgtgatgcttctcggttgttcgatgaaatggtcgagttaagtattagtgaactatattctctacctctgttagcagagtcattagatagattggctaagtatgttgatttgattatcttgtttgccatatacccattgtggcggtgttagatattggttaaactgcttcatatatacggtgtgtagtttaattaata

SEQ ID NO: 118602 - DNA, 358 bp, Zea Mays
gcctgtctgtcattagataaggagccttcagctgtttgtttttcatggcctctacaaatatttttgtctgtatatatcctatcttgttaatccaatcaagtctttatagtttactgctgtttgtttttactggttagctgtttgtaaactatctctaaaagcaaatcttttactgttgtttgttctattatatatcctatcttgttaatccaattatctctatttgttggttttagaagttagatggtctctatttacaagtgttttacaagtgtatttatttacaagtgtatgtatttacaagtgtatgtacaatttatatatctttaatgatagaaagagagaccaaaatttgaat

SEQ ID NO: 118603 - DNA, 1866 bp, Zea Mays
cactctaacataaactaatcccacgataattacgtcccggcggatatcacccacatctcctgttgctactggagctcgactcatctcgtcctccgtcgcgagacaagaaagtagtaggaagggaggaagatagaggggttgcgtcccagccccacctgctatctcctctcttcttccccttcctcggcggctttccaccattcaggttcagactggaggggccttcctgccaatctccagtgcgtgttcttcagtggaggcgccggccggactcgcgatggagcgggacggccagcagacccgccgcgacaagctcatcatcgatacggatcccggcatcgatgatagcatggctatcctaatggcgttcagagcacatactctggaaatcattgggctcacgaccatattcggcaacgtcgacacagaaggcgcaacatgtaatgcactattgctgtgtgagagagcaggacatcctgaggttccagtagcagagggcagccacgagcccctaaagggaggaaagccccgtattgctgattttgttcatgggtcagatggcattgggaatctgtttcttcctgcaccctctgctaagaaggttgaggaaagtgctgctgatttcatggttaataaggtctctgagtttccaggagaggtctctgtgcttgctttgggacccctgacaaatgtagcattggccatcaaacgagacccttcctttgcaagcaaggtgaataaaatagttgtactgggtggagctttcttcgtggctggaaatgtcaaccctgctgctgaagcaaatattcttggagacccagaagcagctgacatagtttttacttcaggagcagatgtcattgtggttggcattaacataacaacacaagtctgtttgacagatgagggtctcttggagctaagaaactcaaaagggaagcatgcaccgttcttatctgagacgtgcaagttctacagagattggcatgtcaagtctgatggcttccatggaattttccttcatgatcctgtgagcttcactgccgtgcttcatcccgagtacttcacattcaagaagggtgtggtgagagtggagacccagggcatttgcactggccacactttgatggatcagggattgaaaaagtatgcctttttttctgaataactcataaagattgactatttgatgtttgttagtttcaacaatcttacatacactacatacacattaatatgacataaatctcaccaaattacttataactcttggagtaagcaaaccaaggcaaaagttaccccacaggactatgtttcaacaaatttctatttcacaattgtttctgcttgttcctactatggtgcaggtggaattcagagaacccttggtcagggtataaaccgatttcagttgcatggacggttgatgtgccaaaggttattggctttgtaaagaagctgctcatggcaccatgagcaaggtaccgccatttagcgacatcaatgctctctgatgcccaagaaaatttggcaagtacagagccactctcccagctgcattatacttatttcctggacctggaaagcttcctgttcctccaatagtaagaggatcaccatggttcttttagttgaggtcttaatgatttagatcgacttctatactgcgactaaaaatatcgatatcacaagagtggataaccgtgtctaagccatttcgtccttcaaatctgggagtcaaattgtgaaagcttatgcagcagtctcaaataccatgatgtaaattctggcgtatgacagcatgtctcacacatttgtatcaatacatttcgaatcaatgagatttcccataccctcagtgcatgc

SEQ ID NO: 118604 - DNA, 1645 bp, Zea Mays
cactctaacataaactaatcccacgataattacgtcccggcggatatcacccacatctcctgttgctactggagctcgactcatctcgtcctccgtcgcgagacaagaaagtagtaggaagggaggaagatagaggggttgcgtcccagccccacctgctatctcctctcttcttccccttcctcggcggctttccaccattcaggttcagactggaggggccttcctgccaatctccagtgcgtgttcttcagtggaggcgccggccggactcgcgatggagcgggacggccagcagacccgccgcgacaagctcatcatcgatacggatcccggcatcgatgatagcatggctatcctaatggcgttcagagcacatactctggaaatcattgggctcacgaccatattcggcaacgtcgacacagaaggcgcaacatgtaatgcactattgctgtgtgagagagcaggacatcctgaggttccagtagcagagggcagccacgagcccctaaagggaggaaagccccgtattgctgattttgttcatgggtcagatggcattgggaatctgtttcttcctgcaccctctgctaagaaggttgaggaaagtgctgctgatttcatggttaataaggtctctgagtttccaggagaggtctctgtgcttgctttgggacccctgacaaatgtagcattggccatcaaacgagacccttcctttgcaagcaaggtgaataaaatagttgtactgggtggagctttcttcgtggctggaaatgtcaaccctgctgctgaagcaaatattcttggagacccagaagcagctgacatagtttttacttcaggagcagatgtcattgtggttggcattaacataacaacacaagtctgtttgacagatgagggtctcttggagctaagaaactcaaaagggaagcatgcaccgttcttatctgagacgtgcaagttctacagagattggcatgtcaagtctgatggcttccatggaattttccttcatgatcctgtgagcttcactgccgtgcttcatcccgagtacttcacattcaagaagggtgtggtgagagtggagacccagggcatttgcactggccacactttgatggatcagggattgaaaaagtggaattcagagaacccttggtcagggtataaaccgatttcagttgcatggacggttgatgtgccaaaggttattggctttgtaaagaagctgctcatggcaccatgagcaaggtaccgccatttagcgacatcaatgctctctgatgcccaagaaaatttggcaagtacagagccactctcccagctgcattatacttatttcctggacctggaaagcttcctgttcctccaatagtaagaggatcaccatggttcttttagttgaggtcttaatgatttagatcgacttctatactgcgactaaaaatatcgatatcacaagagtggataaccgtgtctaagccatttcgtccttcaaatctgggagtcaaattgtgaaagcttatgcagcagtctcaaataccatgatgtaaattctggcgtatgacagcatgtctcacacatttgtatcaatacatttcgaatcaatgagatttcccataccctcagtgcatgc

SEQ ID NO: 118605 - DNA, 2339 bp, Zea Mays
cgcatcgtgccgtacatttcctagcttcctgctctggctgcctcctcctccgcgtacgcgtatagatatttgtgctgacgagaccaattctattttatttgttatcttgtttggtggtggttgtctgccctccatgcatctcgccatcttctatttataatagccccgccttctctctgttacacgccatacaattctcacacgcgcgcgcccaacacactagcctgcaggatcgtcgagcgcgaggcggctgccccgccggccggttcgttcgctctatagcttgagaccgatcctagctaggccaagacgatatcggcggcgatgatgatggacgcggcgaggatcgtagagtacttcaagggcaagtgcatcctcgtcaccggctcaacagggtttcttggaaagatccttgtggagaagatactgcgggtgcagcctgacgtgcgcaagatttacctgcttgtacgcgcggtcgacgagccatcagcgaagcagcgcgtccaacaagaggtgatagacacggagctgttcggcctgctgagagagaaacacggcaagggcttccagcagttcgtagaggccaaggtcgtcgctttggccggagacatcgtatacgacggcctggggctggaggcagccgtgctggacgcgctggccaaggacgtcgacgtcatcgtcaacatcgcagcaaccaccaacttctacgaaaggtaatcttaattaagcaggacgtcgaaaagaatgttgtatgttttgaacgacttcgacgatgcatgcatggctatggctattacttgcagatacgatgtttcgctggacgtgaacgtgctgggagtgaagcacctgtgcatgttcgccaagcagtgcgcgaggctcaggatgctcatgcacgtctccactgccttcgtctcgggcttcagggagggcctcatcctggagaagcccatcaagcccggcgagtcgctgcgggagggcacgtacctggacgtggacgcggagctgcgcctcgtcaaggaggtgaagaagtcgctggcggcgaacggcgatggcgacggcgacagcacggagcggaaggccatgaaggagctgggcctccggcgggcgcggcacttcgggtggtccaacacgtacgtgttcaccaaggccatgggggaggccgtgctgggccagcagctccggggcggcgacgtccccgtggcggtgatgcggcccagcatcatcaccagcgtccggcgcgacccgctgcccgggtggatgcagggcacccgcaccatcgacagcatcatcatcggctacgccaagcagaacctgtcctgcttcctcgccgacctccgcctcgtcatggacgtcatccccggggacatggtggtcaacgccatgatggcggccgtggtggcgcactcggaggcgttcgcgccgccgctgccgcaggtggtggtgtaccacgccacctcgtcgctgcgcaacccggccacctacgacgtgctctaccagtccggacgccgccatttctacgagaacccgcgcgtcggcaaggacggcagggtcatccccaccagggagatgtacttcttcaccagcatcgccaggttccacctctacatgactctcatctacaaggtgccattagagattctgcaccttgtgaatctgctgctctgtggccttctctcgcggctctacaacgacctcaaccgcaagtacaagtttgtgatgcatctggttgacgtctacggcccattcgccttcttcaaaggatgcttcgatgacataaacctggagcggctaaggctggcaatggcgatgaagacccctgaggatcaaatgttcaatttcgaccctaagaccatcgactgggacgattacttcaccagaatccacatccctggtattctcaagtatgtgtgcaagtgaagccttctttcttcagtctatttgcagcatgcacatgcttcttcttcgccttcttactatcgaaagttaatggctcatattctttatgaaagaaatttataccactctgtttggttgtacctgttctatggatcgaccgggtgttaccaagaaacaaaaataattcgatctctgctagattgatatagttctgtatgggagagactgaggcccctcatatcgtaaatcaatagtgatcgtcaaacgagtgtatgctgtgttaggtggcagccaatatgtatcttgattaattgagaacttgtaatctgtgtcatatgtacgcgtgtcactgtcagtgacaatgaaaagcaaatgtaatatctatttataatggcagtgaaattcaggaaagagaactagttaatcagaaagtagggttttct

SEQ ID NO: 118606 - DNA, 2270 bp, Zea Mays
cgcatcgtgccgtacatttcctagcttcctgctctggctgcctcctcctccgcgtacgcgtatagatatttgtgctgacgagaccaattctattttatttgttatcttgtttggtggtggttgtctgccctccatgcatctcgccatcttctatttataatagccccgccttctctctgttacacgccatacaattctcacacgcgcgcgcccaacacactagcctgcaggatcgtcgagcgcgaggcggctgccccgccggccggttcgttcgctctatagcttgagaccgatcctagctaggccaagacgatatcggcggcgatgatgatggacgcggcgaggatcgtagagtacttcaagggcaagtgcatcctcgtcaccggctcaacagggtttcttggaaagatccttgtggagaagatactgcgggtgcagcctgacgtgcgcaagatttacctgcttgtacgcgcggtcgacgagccatcagcgaagcagcgcgtccaacaagaggtgatagacacggagctgttcggcctgctgagagagaaacacggcaagggcttccagcagttcgtagaggccaaggtcgtcgctttggccggagacatcgtatacgacggcctggggctggaggcagccgtgctggacgcgctggccaaggacgtcgacgtcatcgtcaacatcgcagcaaccaccaacttctacgaaagatacgatgtttcgctggacgtgaacgtgctgggagtgaagcacctgtgcatgttcgccaagcagtgcgcgaggctcaggatgctcatgcacgtctccactgccttcgtctcgggcttcagggagggcctcatcctggagaagcccatcaagcccggcgagtcgctgcgggagggcacgtacctggacgtggacgcggagctgcgcctcgtcaaggaggtgaagaagtcgctggcggcgaacggcgatggcgacggcgacagcacggagcggaaggccatgaaggagctgggcctccggcgggcgcggcacttcgggtggtccaacacgtacgtgttcaccaaggccatgggggaggccgtgctgggccagcagctccggggcggcgacgtccccgtggcggtgatgcggcccagcatcatcaccagcgtccggcgcgacccgctgcccgggtggatgcagggcacccgcaccatcgacagcatcatcatcggctacgccaagcagaacctgtcctgcttcctcgccgacctccgcctcgtcatggacgtcatccccggggacatggtggtcaacgccatgatggcggccgtggtggcgcactcggaggcgttcgcgccgccgctgccgcaggtggtggtgtaccacgccacctcgtcgctgcgcaacccggccacctacgacgtgctctaccagtccggacgccgccatttctacgagaacccgcgcgtcggcaaggacggcagggtcatccccaccagggagatgtacttcttcaccagcatcgccaggttccacctctacatgactctcatctacaaggtgccattagagattctgcaccttgtgaatctgctgctctgtggccttctctcgcggctctacaacgacctcaaccgcaagtacaagtttgtgatgcatctggttgacgtctacggcccattcgccttcttcaaaggatgcttcgatgacataaacctggagcggctaaggctggcaatggcgatgaagacccctgaggatcaaatgttcaatttcgaccctaagaccatcgactgggacgattacttcaccagaatccacatccctggtattctcaagtatgtgtgcaagtgaagccttctttcttcagtctatttgcagcatgcacatgcttcttcttcgccttcttactatcgaaagttaatggctcatattctttatgaaagaaatttataccactctgtttggttgtacctgttctatggatcgaccgggtgttaccaagaaacaaaaataattcgatctctgctagattgatatagttctgtatgggagagactgaggcccctcatatcgtaaatcaatagtgatcgtcaaacgagtgtatgctgtgttaggtggcagccaatatgtatcttgattaattgagaacttgtaatctgtgtcatatgtacgcgtgtcactgtcagtgacaatgaaaagcaaatgtaatatctatttataatggcagtgaaattcaggaaagagaactagttaatcagaaagtagggttttctgatatggatggagatgtatat

SEQ ID NO: 118607 - DNA, 107 bp, Zea Mays
cacttttgaagatttacatcgaggcgaaaagcgacggactgaattaaacggatttcggcttcgatatttcaatctgcatttgatgcaattgattttagacaaattcc

SEQ ID NO: 118608 - DNA, 1464 bp, Zea Mays
atcggcgtcgccatctccggagtgccacgcctaggagctattctctctagtactgcggcgacttcactccaagcctcccccttcagcgatcagcacacatcacgtaaagcgcaaccaaatgatttccaccaccgtcgctgctcaccccgccaccgtcacagcgctgcggcgaaggtacccgcttcgccctcgccagccactctgtgctccaatcttcacggcggcgacgaggcagtgcatggctacggcgaagccctcggtcacaaacgcgctcgctaacctatccgttgagagcgcccccgcggcgcttcccaagctttcgttcccgatactggtgaatagttgcactgggaaaatggggaaggctgttgctgaagcagctgtctcggctggtcttcagttagttcctgtatcattcagtgccattgaggtccctgatcgaaagattgaaatatgtgatagagaaatttttattcatgacccatctgaaagtgaaaaaattctgcctaccattgttaaagaatacccaaatgtcatagttgtagattacactgtgcctgatgctgttaatgcaaatgctgaactctattgcaaatttggtttgccatttgtaatgggcacaactggtggaaataggcaactcttgcacaaaactgtgcatgatgcgaatatctacgctgtgatatcccctcagatggggaagcaggttgttgcttttcttgctgccatggaaattatgtcagagcaatttcctggtgcattttcaggttacaagctggaggtcatggagtctcatcaagcaacaaaattggacatttctgggactgccaaggctgttatctcttgttttcagaagttgggtgtatcgtttgacatgaatgaggtaaagcaagttagggatcctgaggagcaggtaacgttagtgggtgtcccagaagaacatctcgggggccatgccttccacatgtaccatctcacttcgcctgatgggacagtttcgtttgagttccagcacaatgtatgtggccgttcaatatacgcagaaggaactgttgatgcagctatgtttctctacacaaagattcaatcgggtgcgagcaagaaattgtatgacatgattgatgtcttgagagaagggaacatgagatgaggtccatgttggcgtcagatgagctttcatgtaccaatttgcaagctcaattccaccgtgaattaggttacttttacaatgtacccttcccaatttaccagttaactcactttcagttttgaattggctgcttcaatgatggaaggtactccgttccagagtgtatgcaattttagtttctctaggtatattgattttggcgttttgctatacacctatatgcaatctatagattgtagtaaaaaaaatgtattcagaaaggccagaatgatctacaatttgaaacggagtaatgcttagggacttaatgcttt

SEQ ID NO: 118609 - DNA, 806 bp, Zea Mays
cccttcttctcgagctgtagtcctagtccactacaaaggtgttggagtcctggtattcttgctggtgtgcatcctctctttcagccaccaagtttgttgtctagtgcatcgcgtgtcatggtgaccacgcccactcgagctcaccctcaccatggccagcattcgtcggaggttgtctcggtcatgtggtgccagttccctactcctcgtaggttagtgaagctcacaccatttactacttgaactctaccactgtctgttgctgggaactaggtgtaaaattcgctcaaagataggttgtcaggtttctggatcccagacttagtgcagaaggctgaaactaggttttagtgtgttgagctcaactttcgagctctattgtgcccagtctatttggttttgggccaaagttctgtagcaagtttgaagaccataataagatgaacaaaattactaaagagagatgggctaggtactacacaaaattgggagtaaaacatgtccaaatcttctctgtcagacttaacgaatgctggttcagaacactaaaatggggttgcagtggttttggctctactttggtgcttcataaaaaatgttctgaatgttttcaacctaggggtgctataccaaagtagtagagctatatctaaggaataactttggtaaggtgagcttagtctgttgttgtgtaaaaattggagaaaaggttggctaaagttggactgtcaggctagacataactgaattttgttattcagttctgagaactgaattgcagcaggatgcctagtttgaaattcatt

SEQ ID NO: 118610 - DNA, 759 bp, Zea Mays
aaatttgggtccttgtggtaattaatccaagaagaattggggtaggaatgctatagcaaagtgaaagaccatgtcaaggagagaaagtgtcatacagagaattggtttgctaatataaagaatttagagaaaaaggagttgaaaaactctctgtcagattaaacatgtgttgtttcagacttctaaaattggaatgtttcagtgtttttgctatgttttggtgcagcatagcttgtgttttgtacgattttgaccttggactgttgtagcaaactggtagtgctatggtttgggagcaggcttggccaactaagttggtgtggtgctatagaaaatgatgagtttaaggtacatgtacaggagggttcaggtggacagtaaggtgtaattagaagtacttaatgttatcctctttgtaactgcataagcataaacatccatgatcatgtcatttcatgtagaactcccagcaggaatgaagattcaagctgaagtggtgactgaagagaaatctactccggtgattgaagaggaatctagacctcttcactgcaacaaaggcaagccccggtgcatgcaacccctttcttgtatttttaaaagacttttatacactttaagtctagtgaaatgtgcattaagtttataggagttgcttggaaactatttgatacattgactaccttgatatccattcctattatagatacttctttggaagtatcaaatattgtttataaaaattgcttagccctgcct

SEQ ID NO: 118611 - DNA, 1185 bp, Zea Mays
atggcgctttttaatccaaaaacgagaggcgcaccgtgcaccggtgcaagggagcggcagatagtttttttgtgcgcctccaattcccattctcctctactccatcgtcgtgcctgccggtgccaggctgccgggtgccacagtgccctgccacccagcatcgctcaatcactcgttcgatccatgctgactcacccgaatggtgtggtccggccgtcgactaaggagccgctcttctccttcggcgtcatcgccgacgtacagtacgccgacatcccggacggccggtccttccttggcgtgccgcgctactaccgtcacagtatcgccgtcctccggcgtgcggtcgagaggtggaacggcgagaggagcgtcaggttctgcatcaacttcggcgacatcgtagacggcttctgccccaaggacaggtcgctggccgccgtgcaggccgtggtgcgcgagttcgacggcttccgcggcgggccgacgtaccacatgctcggcaaccactgcctttacaacctaccccggagcgagctggtctccgtgctgcgcatgccgtcggcgtcgccgggacgcgcttactacgacttctcgccatggcccgggtaccgttttgtggtgctggacgcgtacgatttcagcgccgtggggtggccgcgcggccaccctgtgtccgcggcggcgcggcggtttctggagaagcggaacccgaaccatgacaagaacagcccgagcgggctggaggggacggaccggcggttcgtgatgttcaacggcggcgtgggcgaggcgcagctgcggtggctggacggcgtcctccgccgcgctgagcggcgcggggagaaggccgtcgtgtgcagccacctgcctatgcaccccggtgccgcgtccccgacgggtctcatgtggaactacgaggaggtgatggacgtcgtgcgccgccatggtggctgcgtcgtcgcgtgcctcgccgggcacgtccacaagggcgggtacgccgtggacgacagcggcgtgcaccaccgcacgctggaggccgcgctcgagtgcccgccgggcaccgatgcgtttggacacgtcgaggtgcacccggaccggctgaggctcgttggatcggacagaatggccagcacggagatgctgctcagcccctcgaatgagctagcttctgcgtagaacctg

SEQ ID NO: 118612 - DNA, 128 bp, Zea Mays
ccgaaaaatgtcaaagtgaaaacgacctttacccccagttacataccctaaaaccaagaattagcgggcagtggtccgaaatcccagaggctgcacttttcagcatagctttaggaaaaatgtcttcc

SEQ ID NO: 118613 - DNA, 917 bp, Zea Mays
gagtcgtctagtgtcaggtgatctgaatctcattccggtggcttctgccaagtgctgaggatcggcatccggttcggttcgtcgtcctcgtccccactccccacctgcgcagctgcgctgcgccatctcgaatcctctccttccaccatctcgaacctctccttccgtctcctccccggccgattcttccagtctccagccaccttcaactgccggccgcaagtggccccgcgtctcacccctaaccccagtgaagaatctaggcgtcgtctatccagccccgtcatcatcaccatggaggagcatgggctgtggtccagcggggccagcgacaagaacaagtccatggttgagcagctgcagaggtacggggtcatcaggtcgaccaaagtcgcggaggtgatggaggccatcgacagggggttgttcgtgccacctgggggctcgccataccacgatagccccatgccgattgggtacaatgccaccatatcagcaccacacatgcatgcggcttgcctggagctactggagaagaatcttcagcctggaatgcgagctctcgatgttgggtcaggcactggatacctaactgcttgctttgcactgatggttggaccagaagggcgagcagttggtgtcgaacatatcccagagttggttgctacttctactgaaaacatcaagaaaagtgcagcagccccacatctaaatgatggatccctcagtatacacgtttctggtaaatattagcttgttttgtgctaccataaaactcagccatgctggagcagcaaatttccaacaggtccgatgctgacttaggtgtgcacataacaacttagttgctgtgagctgagttatagttcagatacattttaatagcacttatcctttttcttttattgactgaataa

SEQ ID NO: 118614 - DNA, 1473 bp, Zea Mays
gagtcgtctagtgtcaggtgatctgaatctcattccggtggcttctgccaagtgctgaggatcggcatccggttcggttcgtcgtcctcgtccccactccccacctgcgcagctgcgctgcgccatctcgaatcctctccttccaccatctcgaacctctccttccgtctcctccccggccgattcttccagtctccagccaccttcaactgccggccgcaagtggccccgcgtctcacccctaaccccagtgaagaatctaggcgtcgtctatccagccccgtcatcatcaccatggaggaggcactggatacctaactgcttgctttgcactgatggttggaccagaagggcgagcagttggtgtcgaacatatcccagagttggttgctacttctactgaaaacatcaagaaaagtgcagcagccccacatctaaatgatggatccctcagtatacacgtttctggtaaatattagcttgttttgtgctaccataaaactcagccatgctggagcagcaaatttccaacaggtccgatgctgacttaggtgtgcacataacaacttagttgctgtgagctgagttatagttcagatacattttaatagcacttatcctttttcttttattgactgaataaaggaacctgattcagctaatgaggttgtccaatactgctctactagcagggttttgttatattgcttgtcataccatgtggatctcccccatttgtgaggttcttgtcctcgtatgatgaaatttgctgcagctttagagcctgtttggttcgtggctaattgtgcacactttgcttaagtttagtcgtctaaattgaagaactaaccttagacagaaaagttagacaaaatgtggcaagttaggcagcaaaccaaacatacctttagtattccttagtttggcactctggccttatgtgcattcagcattgttggttgttctatatacccttaacacttgatgcaccaagagatgtttaaaatggatgcagatggcagggaaggttggccagaactggcaccctatgaagccatccatgttggagctgcagcaccgcagatccccgaggcgctgatcgagcagctgaagcccggcggcagaatggtgatccctgtcgggacagtcttccaggagctgaaggttgtggacaagaagttggatggcactgtcagcataagagacgaaacgtctgtgcgctatgtgccgctcactagcaaggacgcccagttgcacgcaagctgagtgatctatcatgtcaaaaaaatgttatcctcacctgacaaggtgaggcattcaatcgaatcgctacccttgtaaatgtattaatcctactgtctcagtaaatgcgctggcttggaaataaagtaaatgatggaacatcatggaacgtttgtttttcttcagctgccccggtgttcttactatgcaacttgtttcttcagagcaaca

SEQ ID NO: 118615 - DNA, 1206 bp, Zea Mays
gagtcgtctagtgtcaggtgatctgaatctcattccggtggcttctgccaagtgctgaggatcggcatccggttcggttcgtcgtcctcgtccccactccccacctgcgcagctgcgctgcgccatctcgaatcctctccttccaccatctcgaacctctccttccgtctcctccccggccgattcttccagtctccagccaccttcaactgccggccgcaagtggccccgcgtctcacccctaaccccagtgaagaatctaggcgtcgtctatccagccccgtcatcatcaccatggaggagcatgggctgtggtccagcggggccagcgacaagaacaagtccatggttgagcagctgcagaggtacggggtcatcaggtcgaccaaagtcgcggaggtgatggaggccatcgacagggggttgttcgtgccacctgggggctcgccataccacgatagccccatgccgattgggtacaatgccaccatatcagcaccacacatgcatgcggcttgcctggagctactggagaagaatcttcagcctggaatgcgagctctcgatgttgggtcaggcactggatacctaactgcttgctttgcactgatggttggaccagaagggcgagcagttggtgtcgaacatatcccagagttggttgctacttctactgaaaacatcaagaaaagtgcagcagccccacatctaaatgatggatccctcagtatacacgtttctgatggcagggaaggttggccagaactggcaccctatgaagccatccatgttggagctgcagcaccgcagatccccgaggcgctgatcgagcagctgaagcccggcggcagaatggtgatccctgtcgggacagtcttccaggagctgaaggttgtggacaagaagttggatggcactgtcagcataagagacgaaacgtctgtgcgctatgtgccgctcactagcaaggacgcccagttgcacgcaagctgagtgatctatcatgtcaaaaaaatgttatcctcacctgacaaggtgaggcattcaatcgaatcgctacccttgtaaatgtattaatcctactgtctcagtaaatgcgctggcttggaaataaagtaaatgatggaacatcatggaacgtttgtttttcttcagctgccccggtgttcttactatgcaacttgtttcttcagagcaacagctgcc

SEQ ID NO: 118616 - DNA, 1189 bp, Zea Mays
gagtcgtctagtgtcaggtgatctgaatctcattccggtggcttctgccaagtgctgaggatcggcatccggttcggttcgtcgtcctcgtccccactccccacctgcgcagctgcgctgcgccatctcgaatcctctccttccaccatctcgaacctctccttccgtctcctccccggccgattcttccagtctccagccaccttcaactgccggccgcaagtggccccgcgtctcacccctaaccccagtgaagaatctaggcgtcgtctatccagccccgtcatcatcaccatggaggagcggggccagcgacaagaacaagtccatggttgagcagctgcagaggtacggggtcatcaggtcgaccaaagtcgcggaggtgatggaggccatcgacagggggttgttcgtgccacctgggggctcgccataccacgatagccccatgccgattgggtacaatgccaccatatcagcaccacacatgcatgcggcttgcctggagctactggagaagaatcttcagcctggaatgcgagctctcgatgttgggtcaggcactggatacctaactgcttgctttgcactgatggttggaccagaagggcgagcagttggtgtcgaacatatcccagagttggttgctacttctactgaaaacatcaagaaaagtgcagcagccccacatctaaatgatggatccctcagtatacacgtttctgatggcagggaaggttggccagaactggcaccctatgaagccatccatgttggagctgcagcaccgcagatccccgaggcgctgatcgagcagctgaagcccggcggcagaatggtgatccctgtcgggacagtcttccaggagctgaaggttgtggacaagaagttggatggcactgtcagcataagagacgaaacgtctgtgcgctatgtgccgctcactagcaaggacgcccagttgcacgcaagctgagtgatctatcatgtcaaaaaaatgttatcctcacctgacaaggtgaggcattcaatcgaatcgctacccttgtaaatgtattaatcctactgtctcagtaaatgcgctggcttggaaataaagtaaatgatggaacatcatggaacgtttgtttttcttcagctgccccggtgttcttactatgcaacttgtttcttcagagcaacagctgcc

SEQ ID NO: 118617 - DNA, 932 bp, Zea Mays
gagtcgtctagtgtcaggtgatctgaatctcattccggtggcttctgccaagtgctgaggatcggcatccggttcggttcgtcgtcctcgtccccactccccacctgcgcagctgcgctgcgccatctcgaatcctctccttccaccatctcgaacctctccttccgtctcctccccggccgattcttccagtctccagccaccttcaactgccggccgcaagtggccccgcgtctcacccctaaccccagtgaagaatctaggcgtcgtctatccagccccgtcatcatcaccatggaggaggcactggatacctaactgcttgctttgcactgatggttggaccagaagggcgagcagttggtgtcgaacatatcccagagttggttgctacttctactgaaaacatcaagaaaagtgcagcagccccacatctaaatgatggatccctcagtatacacgtttctgatggcagggaaggttggccagaactggcaccctatgaagccatccatgttggagctgcagcaccgcagatccccgaggcgctgatcgagcagctgaagcccggcggcagaatggtgatccctgtcgggacagtcttccaggagctgaaggttgtggacaagaagttggatggcactgtcagcataagagacgaaacgtctgtgcgctatgtgccgctcactagcaaggacgcccagttgcacgcaagctgagtgatctatcatgtcaaaaaaatgttatcctcacctgacaaggtgaggcattcaatcgaatcgctacccttgtaaatgtattaatcctactgtctcagtaaatgcgctggcttggaaataaagtaaatgatggaacatcatggaacgtttgtttttcttcagctgccccggtgttcttactatgcaacttgtttcttcagagcaacagctgcc

SEQ ID NO: 118618 - DNA, 1162 bp, Zea Mays
cacgtttcataatggtccagttccaaatttctcttcggttcgtcgtcctcgtccccactccccacctgcgcagctgcgctgcgccatctcgaatcctctccttccaccatctcgaacctctccttccgtctcctccccggccgattcttccagtctccagccaccttcaactgccggccgcaagtggccccgcgtctcacccctaaccccagtgaagaatctaggcgtcgtctatccagccccgtcatcatcaccatggaggagcatgggctgtggtccagcggggccagcgacaagaacaagtccatggttgagcagctgcagaggtacggggtcatcaggtcgaccaaagtcgcggaggtgatggaggccatcgacagggggttgttcgtgccacctgggggctcgccataccacgatagccccatgccgattgggtacaatgccaccatatcagcaccacacatgcatgcggcttgcctggagctactggagaagaatcttcagcctggaatgcgagctctcgatgttgggcactggatacctaactgcttgctttgcactgatggttggaccagaagggcgagcagttggtgtcgaacatatcccagagttggttgctacttctactgaaaacatcaagaaaagtgcagcagccccacatctaaatgatggatccctcagtatacacgtttctgatggcagggaaggttggccagaactggcaccctatgaagccatccatgttggagctgcagcaccgcagatccccgaggcgctgatcgagcagctgaagcccggcggcagaatggtgatccctgtcgggacagtcttccaggagctgaaggttgtggacaagaagttggatggcactgtcagcataagagacgaaacgtctgtgcgctatgtgccgctcactagcaaggacgcccagttgcacgcaagctgagtgatctatcatgtcaaaaaaatgttatcctcacctgacaaggtgaggcattcaatcgaatcgctacccttgtaaatgtattaatcctactgtctcagtaaatgcgctggcttggaaataaagtaaatgatggaacatcatggaacgtttgtttttcttcagctgccccggtgttcttactatgcaacttgtttcttcagagcaacagctgcc

SEQ ID NO: 118619 - DNA, 975 bp, Zea Mays
atggaggaggtactccgctccatcctctcttgcttctcctcccgctcccgctcccgcacccgcactcaatcccatgggctgtggtccagcggggccagcgacaagaacaagtccatggttgagcagctgcagaggtacggggtcatcaggtcgaccaaagtcgcggaggtgatggaggccatcgacagggggttgttcgtgccacctgggggctcgccataccacgatagccccatgccgattgggtacaatgccaccatatcagcaccacacatgcatgcggcttgcctggagctactggagaagaatcttcagcctggaatgcgagctctcgatgttgggtcaggcactggatacctaactgcttgctttgcactgatggttggaccagaagggcgagcagttggtgtcgaacatatcccagagttggttgctacttctactgaaaacatcaagaaaagtgcagcagccccacatctaaatgatggatccctcagtatacacgtttctgatggcagggaaggttggccagaactggcaccctatgaagccatccatgttggagctgcagcaccgcagatccccgaggcgctgatcgagcagctgaagcccggcggcagaatggtgatccctgtcgggacagtcttccaggagctgaaggttgtggacaagaagttggatggcactgtcagcataagagacgaaacgtctgtgcgctatgtgccgctcactagcaaggacgcccagttgcacgcaagctgagtgatctatcatgtcaaaaaaatgttatcctcacctgacaaggtgaggcattcaatcgaatcgctacccttgtaaatgtattaatcctactgtctcagtaaatgcgctggcttggaaataaagtaaatgatggaacatcatggaacgtttgtttttcttcagctgccccggtgttcttactatgcaacttgtttcttcagagcaacagctgcc

SEQ ID NO: 118620 - DNA, 3745 bp, Zea Mays
agaggcagaagggctggggcgcggccgcgcggggaggcgtcaagcagtttagcagccatgagcggcggcgggctggaagtgcaggttcacgtggtgggcggcgcccggagctgctttgccgcgctcccgcttcacctcatccacgacttggagcgcacctcagccaccggcgacctcccgcccgtcctcgcgctcgaacttcgcggtcccgccggcgcccgctggtccctcgcctggtccggcgccgcttcccgatccagcgccatcgaggttgcacaagagttggcagactgcatctcgctgcctgatggaactatagcacagttgagcgtagctcgttctctggccaaagctgactcgatcagtattgaaccctacagtgaggatgactgggagatactggagagccgtgctgatttggctgaagaaacaatcttgaagcaggttggcatcgtttatgagggcatgaaattcccattgtggttggatggacataatattgtgaagtttgttgtcttgtcatctttccctgagaagacagttgttcaacttgtaccaggcactgaagttgttgttgcacctaaaaaacgaaaagagaagccttctcaggatctacaaaagcaaagtgcactgaaagaacaagtcaaaataaaggcactcctgcgtgttcaagcagctgataggaagtatgcacatacattcaaatatgaaggtgtcgagataggtgtggttgtcagctatgctgtgctaattcatcctgatacagctgcaagtatttcagttggcaatctccaattagtcgctgtttcacctaaatcatcaaagaaaggactacctctaaaaggcaaagaagttggacgaaaaaaaggaatttcagtaactaaagaaaggtcccatgaagccattgtttatatcttactttcagactctgttgcaaaagggcatgttatgcttccgtactctattcgtcacttcataagtgctgatgtacattcatgggtatatattaagacatattcagccaacatcaaggaggatgaacctctagtgacaatatctcctttaaagttcaagatgcatgtgaaagatgctcatgatagcagtaaattagtcagtcaggaagtggacacttcgaggataaccagaattccttcagaaaatggtgatttcttccagaaagctcgttacagtgaaaacaaaaatattcgaggtgcagatattgagagcatttctgaatcagtgtcaaggcagaaattttttattaagcattggcttattgggcaccttaaagaaatgggcttgcatgctagccatactgagatgaattcaatagtcttgccaaccaatattttgctccatttggaagcgacagataaagaaggaaccaaaggagttgaattcttatactttctaaagcttacatctgaaaattctaatttcaacgattcacaacttaatattgagactacttggagtgttccaaccagcaatgctgatgatcttgaactgcattttgggaagttcgagcttggcgagcctgtatcttttgattccctagtggacagtggttccagtgatggtttcaagctgactcggtcttctttaggctggatggagaatgcaatgtcagatgtgacaaaaaggttatctgtgctcttatcagcaactagcctaaggttatttaacagaataaagttcccctttcctggacatgttattgtatatggacctcgaggttctggcaaaactgctttgaccagggcttctgcaaaatactttgaggaccataaagatatcttggcgcacataatatacattgattgttccaaacttgcacttggcaaggctaaggagacaaggcaagaaattgaagacagcatgtctgaagcactgcttcattcaccttcgatcatcatatttgatgatctggacagtgtagtttcagtctcctcagatcctcaagtgtctcaatcatccagttcttctgattcacttgttcaatatttggctgacattatggatgagtacaaggataagattcaaaatacatgcgggtatggacctatcgcgtttatggcttcagttcagtcacttcagagtcttcctcaagacttaacctcttctggaagatttgatttccatattgagctttctgctcttgcagtacctgagcgcaaagcactattgcaacatcaagttgaggagcatgatttattgtgttctgaggaagttctgtcagagatagcatcaaaatgtgaaggttatgatgcatatgacttggaaattttggttgatagggctgtgcacactgctgcttatcgctttcttctgccttctaatgcttgtcacaactctctgaaacgaactttgttgatggaagatttctttaaagcaatgcatggcttccttccagtcgccatgcgtgatcttaggaaatatgctcctgatgataaagatggtggttgggaggatgttggagggctagatgaagcagtaactatcattaaagagactcttgaattgccgtcaaaatacccaaatatctttaccagggcacctgtgcggttgcggtcaaacattctcctgtatggaccacctggatgtggtaaaactcacattgtgagagctgcggctgctgcttgttctttgcgattcatttcagtcaagggtccagagctattgaataagtatattggttcatctgagcaatctgttcgcgacttttttgcaaaggccgttgctgcagcaccttgcctattattctttgatgaatttgactccattgcaccccagcgaggaactcatagtgcaggagtttctgatcgtgtagttaatcagttcttgacggaactggatggtgtggaaaccttaactggagtattcgtatttgcagctacgagcaagccacagctaatcgatgctgcgctcttgcgacctggaaggtttgatcgtctagtcttttgtgatttccctcgatgggatgaacgtttagaaattctgaaggtgcattctaggacggtttcactggcaagtgatgccagtctcgaagatgttgcttctctgaccgaaggatttactggtgctgatctcgctgctattctaacggatgctggactagctgcaattcatgaacttttggacaaccaggagaacggtgttccagaaaccgaaccgtgcatcagcaaagaacttctcatgtccgtcactaggaaggcaagaccttccacaccagcagacgagaagatgcggtatgatagggagtttggtgaattcgtgtcatccaggaagtctatttcgacaaaggcaagagagtcaaaaggcaaaaaggttacactagcttgagcctttccttggccaatattaatgcgctgcaaaatttggacagtggcctacatgaaggctgctaacacgcggacttgtcaagtcatgcgacgtaggcttcctttcatttgaagagaaacaaaatctacaaagaaacctaaccaaggctcacttgtgttagtgtacttggatggaggaggaaggccattggagggacctgcaggtggtcaaaggtgtcatagtaggaaattttgtacggtaatcctgctgtaattaaagttataacacttgtcacaaattttgtacggtggtgaacggtaggaaatctatactacttattaagaaggtaagagtagtctgccgttctgccctcccccgttccgcgcgcagaaaaaaaaaatcaaaccgtggcttctcagggatc

SEQ ID NO: 118621 - DNA, 3917 bp, Zea Mays
agaggcagaagggctggggcgcggccgcgcggggaggcgtcaagcagtttagcagccatgagcggcggcgggctggaagtgcaggttcacgtggtgggcggcgcccggagctgctttgccgcgctcccgcttcacctcatccacgacttggagcgcacctcagccaccggcgacctcccgcccgtcctcgcgctcgaacttcgcggtcccgccggcgcccgctggtccctcgcctggtccggcgccgcttcccgatccagcgccatcgaggttgcacaagagttggcagactgcatctcgctgcctgatggaactatagcacagttgagcgtagctcgttctctggccaaagctgactcgatcagtattgaaccctacagtgaggatgactgggagatactggagagccgtgctgatttggctgaagaaacaatcttgaagcaggttggcatcgtttatgagggcatgaaattcccattgtggttggatggacataatattgtgaagtttgttgtcttgtcatctttccctgagaagacagttgttcaacttgtaccaggcactgaagttgttgttgcacctaaaaaacgaaaagagaagccttctcaggatctacaaaagcaaagtgcactgaaagaacaagtcaaaataaaggcactcctgcgtgttcaagcagctgataggaagtatgcacatacattcaaatatgaaggtgtcgagataggtgtggttgtcagctatgctgtgctaattcatcctgatacagctgcaagtatttcagttggcaatctccaattagtcgctgtttcacctaaatcatcaaagaaaggactacctctaaaaggcaaagaagttggacgaaaaaaaggaatttcagtaactaaagaaaggtcccatgaagccattgtttatatcttactttcagactctgttgcaaaagggcatgttatgcttccgtactctattcgtcacttcataagtgctgatgtacattcatgggtatatattaagacatattcagccaacatcaaggaggatgaacctctagtgacaatatctcctttaaagttcaagatgcatgtgaaagatgctcatgatagcagtaaattagtcagtcaggaagtggacacttcgaggataaccagaattccttcagaaaatggtgatttcttccagaaagctcgttacagtgaaaacaaaaatattcgaggtgcagatattgagagcatttctgaatcagtgtcaaggcagaaattttttattaagcattggcttattgggcaccttaaagaaatgggcttgcatgctagccatactgagatgaattcaatagtcttgccaaccaatattttgctccatttggaagcgacagataaagaaggaaccaaaggagttgaattcttatactttctaaagcttacatctgaaaattctaatttcaacgattcacaacttaatattgagactacttggagtgttccaaccagcaatgctgatgatcttgaactgcattttgggaagttcgagcttggcgagcctgtatcttttgattccctagtggacagtggttccagtgatggtttcaagctgactcggtcttctttaggctggatggagaatgcaatgtcagatgtgacaaaaaggttatctgtgctcttatcagcaactagcctaaggttatttaacagaataaagttcccctttcctggacatgttattgtatatggacctcgaggttctggcaaaactgctttgaccagggcttctgcaaaatactttgaggaccataaagatatcttggcgcacataatatacattgattgttccaaacttgcacttggcaaggctaaggagacaaggcaagaaattgaagacagcatgtctgaagcactgcttcattcaccttcgatcatcatatttgatgatctggacagtgtagtttcagtctcctcagatcctcaagtgtctcaatcatccagttcttctgattcacttgttcaatatttggctgacattatggatgagtacaaggataagattcaaaatacatgcgggtatggacctatcgcgtttatggcttcagttcagtcacttcagagtcttcctcaagacttaacctcttctggaagatttgatttccatattgagctttctgctcttgcagtacctgagcgcaaagcactattgcaacatcaagttgaggagcatgatttattgtgttctgaggaagttctgtcagagatagcatcaaaatgtgaaggttatgatgcatatgacttggaaattttggttgatagggctgtgcacactgctgcttatcgctttcttctgccttctaatgcttgtcacaactctctgaaacgaactttgttgatggaagatttctttaaagcaatgcatggcttccttccagtcgccatgcgtgatcttaggaaatatgctcctgatgataaagatggtggttgggaggatgttggagggctagatgaagcagtaactatcattaaagagactcttgaattgccgtcaaaatacccaaatatctttaccagggcacctgtgcggttgcggtcaaacattctcctgtatggaccacctggatgtggtaaaactcacattgtgagagctgcggctgctgcttgttctttgcgattcatttcagtcaagggtccagagctattgaataagtatattggttcatctgagcaatctgttcgcgacttttttgcaaaggccgttgctgcagcaccttgcctattattctttgatgaatttgactccattgcaccccagcgaggaactcatagtgcaggagtttctgatcgtgtagttaatcagttcttgacggaactggatggtgtggaaaccttaactggagtattcgtatttgcagctacgagcaagccacagctaatcgatgctgcgctcttgcgacctggaaggtttgatcgtctagtcttttgtgatttccctcgatgggatgaacgtttagaaattctgaaggtgcattctaggacggtttcactggcaagtgatgccagtctcgaagatgttgcttctctgaccgaaggatttactggtgctgatctcgctgctattctaacggatgctggactagctgcaattcatgaacttttggacaaccaggagaacggtgttccagaaaccgaaccgtgcatcagcaaagaacttctcatgtccgtcactaggaaggcaagaccttccacaccagcagacgagaagatgcggtatgatagggagtttggtgaattcgtgtcatccaggaagtctatttcgacaaaggcaagagagtcaaaaggcaaaaaggttacactagcttgagcctttccttggccaatattaatgcgctgcaaaatttggacagtggcctacatgaaggctgctaacacgcggacttgtcaagtcatgcgacgtaggcttcctttcatttgaagagaaacaaaatctacaaagaaacctaaccaaggctcacttgtgttagtgtacttggatggaggaggaaggccattggagggacctgcaggtggtcaaaggtgtcatagtaggaaattttgtacggtaatcctgctgtaattaaagttataacacttgtcacaaattttgtacggtggtgaacggtaggaaatctatactacttattaagaagagaaaaccggtaatcctgctgtaatgaaagttatggtgaatgatccgcttcttaacgtgcagcggtcgtcttggatagatcagatgtgttcgcctgcttcgtggggggctctagccacgggatagatcattgtttgcaaggagagggtgttttttttttggagatgcaaagagagggtgtagatttggttctatgggcaataaaggactgtttagttcagctatagatttttagaattctgattttagct

SEQ ID NO: 118622 - DNA, 173 bp, Zea Mays
ggttgcacatatgttccaagcgctaggactgaaaggatgccacttgctattttgctgaattataacctatgcttaatctagatgattcttcattaagtgaataggtagctgacccacattcttgctgaattataacctatgcttaatcttggatccaatcaacaaacaaataa

SEQ ID NO: 118623 - DNA, 323 bp, Zea Mays
gcaaacacaaatttacagtcatagttttcttttatggtttttacaaatacttggtttgcactattgatgaaaacatggtattgtttcaagccaaccttgagcattcatcggagaagtttgaaaatgttactatcctttctgctcttagtaaaatagttattggactgttacagaatgatcaaatattgacctatgctaatcaagagttgaacgaaagaagtgaagattcttctgtgtgcagacaaccaaaacttttcttgaattgcctcaagattgttaatacatttgttgacttacacttctaaatgggatacatgtatctg

SEQ ID NO: 118624 - DNA, 853 bp, Zea Mays
cgcccactcgtcctctcggctctcgtccagacgcccagtcgccctagccataggcccctagccctagcacagcagcacaacagcgccgccccccgcccccggtggcccggccccccgcccgttcacccgcgcaaccgcgccgcgcgacccgcgtccggcggccgcccatcgccagtgccgtgacacgtcactccgacgccgtcgccaccaaatctcctggcaacgcctcacgtcttctagttctaattccagcctcactgctgccatcacctccgcctgctgtgtgtcttccacctcgcgctgccaaagccgacaaaccctagcccaactctccctaccctcgcccatcccactcctttcgtccgattcgtggaggcgacggaggggctaaggcatgacgaccgatgggcagctcagggagtgggtctccgacaagctcatgagcctcttgggctactccaagagcgtcgtcgttcagtacgtcatcaggcttgcgaaggagtgctcttcacccggtgacctcgtgggcaagcttgttgagtttgggttcagctcgtctgcggagacccgcaccttcgcgtcggatgtctacgccaaggttccccgcagggccagcggcatcagtgaagtagtggcaacagattctggaaggaatgtccgtcgacgaacagaagaggaggatgaagaaggtggcatcggcagttctgatgaagagaaagaaatgattagagatcagcaggaaaaggctcagctagaaagaaacatgagagaaagagatgcagctaacacaaggaaggaataccatttagtaagcaatatatcaaagttcaggaaacatttctgcttcttgtga

SEQ ID NO: 118625 - DNA, 474 bp, Zea Mays
aagcaatggacaacaatgacacatctgatctgagaaaattctcaaggcaagcgtacctgcaaaagcgacgagacaaaaaaattgaggaaattcgtgatgaaattctggaccaccagtacatttttcaggatctgaaactaacagaggcagaagaaaaggagttgagatacaagatgaagatatatgatcttgtcaaggaacatgttgagactcctgatgatgttggtgcgtacaaaatgcctgaagcttatgacatgggcgaaaatgtcaatcaagagaagagattcgctgtggccatgcaacggtacaaagatcctaaggccaatgataaaatgaacccttttgctgaacaggaagcatgggaagaacaccaaataggaaaatcgaaactgcaatttggatccaaagataagaagccgtcttcagatgagtatcagtatgtatttgaagatacgattgattttgttaaatcat

SEQ ID NO: 118626 - DNA, 2385 bp, Zea Mays
atgatcgagatgcttttgccctgcaaccagttatcggaccagaagagggttatcgtcatagtgggtgagactgggtccggtaaaacaacacaaatacctcagttccttcatgagtctggttatactgcaaaaggaaaggttgcatgtactcaacctcgtcgagtagctgccatgagtgttgcagcaagagtatctcaagaaatgggtgttaaacttgggcatgaggttggttactctataagatttgaggattgcacttcagataaaacaattattaagtacatgactgatggaatgcttctaagggagttccttggtgaaccagatttggctagctatagtgttgtcatggttgacgaggctcatgagcgtaccctctccactgatatcttatttggtctagtgaaggatatttctcgttttcgaccagatctgaagttgctcatttctagtgccacccttgatgcagaaaaatttagtgactactttgattcagctcctattttcaagatacctgggaggcgatacccggttgaaattcattatacaaaagctccagaggctgattacatagatgcagcaattgtcactgttttacagatacatgttacccaatcccctggcgatatcctggtgtttctcacaggtcaggaggaaattgaaacagttgatgaaatccttaaacacagaacaaggggcttaggcaccaaaatctcagaattaattatatgtcctatttatgcaaatctgcctaccgagcttcaagctaagatatttgagccaacccctgagggtgcccgtaaggtggttctggccactaatatagcagagacttcattaaccattgatggtataaaatatgttattgatcctggcttttgtaagatcaaatcatacaatccccgcacaggaatggaatctctacttattaatcccatctcaaaagcttcggcaaaccagagggctggaagatctggacgcactggacccggaaaatgcttccgtctatacacgagttacaactacatgcacgacctagaagataatactgttccagagatccaacgaaccaatcttgcgaatgttgtgcttacactcaagagtcttggtattcatgacttggttaactttgacttcatggatccacccccatcagaagccctattaagggctctggaacaactttttgctctcagtgcactcaacagtcgtggggagttgaccaagactggaagaagaatggcagaatttccactggatcctatgttgtcgaagatgatagttgcttcagagaaatataagtgttctgatgagatcatctccattgcctccatgttgtcaattggcaattctatattttatcgtccgaaggacaaacaagttcatgcagataatgcaaggttgaatttccacactggcaatgttggggaccatatagcactactaaatgtgtataattcttggaaagaaacagactattcaactcaatggtgttatgaaaactatatacaggtgcgcagcatgaagagggcaagagatattcgggatcaactagatgggcttatggaaagagttgagattgagatttgctcaaacaccagtgatttagatgctattaaaaaagctataacatcaggtttcttccatcactctgcacggttgcagagggatggtacatataagactgtcaagaaccctcagaccgtgcatatccatcctagttcaggattagcggaggtacgtccgcggtgggtagtgtaccacgaattagttctcacgacgaaagagtttatgcgccaggtgacggaactgaagcctgaatggctggtagagatagcaccacattattaccaactaaaggatgtggaagactccggaacaaagaagttaccgaagggccaaggacgagctgcattgtagctatgatacatgaagtttcgatggatgtattgtgttggactcatcgtaggagcatcataggatgtatataactccttatatcacgaacaggatacaagatgtcacttttcattgccctgcttaggtttcagagtaagctgattgtgaatgtaaattgtgacacgaagacatgcatgtgaaccgctataattgtcacactggagggagcgccggcatgcaactttcgtgtcttccagccgctacgcttgacgatcgttcgcatcctgccgccgtcgcgactattatccaagaaaatgcatatgtgcctttcctcgccggcctcttggatatggatgtatgttgaacaaacgcctatcaagggaaggataaatgagggatgagtatgggattttgaaaaaaagaaatcctgaatctttctgtaaattgggtaagcaaattgagaaaaatggatgggttgggacggaa

SEQ ID NO: 118627 - DNA, 534 bp, Zea Mays
atttataatcatcgactttcattcattaaattacagtaggttacaatgttaccttcagtacgctttcaagacgtccgaaggtaaatacacaatcagcttcaaaggctgagcacttccaatgtgaagggaaaatgtgaacggactccatgcatgagtatttggggcaccgtatagcttcacatgaaattaaactattgcccccaatccctatgtacatggtctacaaaatttatagaggtcacctcgtccttcctcatgagacatgtcgtatacatttctcttgagctcttttgttttttcagcatcaatacatattggaagctacgttcagaattgggcttcggctgtgtgtcgacaccatgattaattcctgatgacgaagatgtccctttctccctttggcttatagaagcttccgactgaaggttgtcttgttgtccctaaaacaggcacaaaacagtggaacttatcagttcgaggactttcggcaaaggccttctttccaacaggtctcgatatcaaaatagcacaaga

SEQ ID NO: 118628 - DNA, 2245 bp, Zea Mays
ttgtgcgtcatgtcacgaatcttggccacgaacttgccccagcagaagaagcgaatttacaaagatctactccttgcctacaagactctgggcgtcgtattcggtggtcttgtcacctcccctctctacgtctacccttccatgaacctgacaaacccgaccgaagaggactatctgggaatctacagcatcatgttctggaccctgacactgatcggcgtcgtcaagtacatctgcatcgccctcaacgccgacgaccacggcgaaggtggcacatttgccatgtactccctgttgtgccagcacgccaacatcggcatcctcccgtccaagaagatatacaccgaggaggagcagggcctggtcccggctcggcccgtcgcggcccggaggcccagcaaggtgaggaggttcatcgagcggagcattacggcgagaaggttgctgcagctcacggcgatcctgggcatgtgcatgctcattggagacggcatcctcacgccggccatctcaatcctgtcagctgttgatggactaagagggcctttcccgtcggtcagcaaaccgactgttgaggctctgtccgcagggattctgatcggtctgttcctgctgcaaaagtacggcacgtccaaggtgagcttcatgttctcgccgatcatggcggcgtggacgttcaccaccccgatcatcggcatctacagcatctggcgctactaccctggcatcttcaagagcgtgtcgccgtactacgtggtacacttcttcgtgaccaaccggaagaggggctggcagctgctcggcggcaccgtcctgtgcatcacgggcgccgaggccatgttcgccgacctcgggcacttcaacaagcggtccatccagatcgcgttcctctctagcatctacccgtcgctggtgctcacgtacgccggccagacggcctacctgatcaaccacgtgggcgacttcggcgacgggttctacaagttcgtgccgcgccccgtgtactggccaatgttcgtcatcgcgacgctggcggcgatcgtggcgagccagtcgctcatctccgccaccttctccgtggtcaagcagtcggtggcgctggactacttcccgcgcgtccgggtggtgcacacctccaaggacaaggagggggaggtgtactccccggagaccaactacctgctgatgctgctgtgcgtgggcgccatcatcggcttcggcgacggaaaggacatcggcaacgcgttcggcgtggtggtcatcctcgtcatgctcatcactaccatcctgctctccctggtgatgctcatcgtctggggcacgcacgtggtgctggtggcgctctacctcgtgcccttcctcatcctggagggcacttacgtgagcgcggtgtgcaccaagatcatgaagggcggctggttgcccttcgccatctcgctcgttctggcgctcgtcatgttcagctggtactacggccggcagcgcaaggcagagtacgagatggccaacaaggtgaccctggagcggctgagcgagctgctggccgcgcccgacgtgcgccgcgccccggggctctgcctcttctacagcaacatgcaggagtggcggtggctcaccccggtgctggcgcactacatcaagaacatgcggtcgctgcacggggttaccatcttcgtcactctccggtaccaactggtggccaaggtggacgccgagagccgcatggcggtccggcgattcggtccccgcggggtgtacggctgcacgatccagtacgggtacgctggcccactgtacgaggaggaggaggaggacctcgccgggcaggtggtgcgggcggtgcgccagcatatcgagcgggaggcggcggcgtcctccacggcggaggtcgaggaggaggcggcggagctggaggaggcgcgcgcggccggggtggtgcacgtcatgggcaagacgaggttccacgtgggcaggaacacgggcctcttcgaccgcgtgctgctcggcttctatgagttcctgcataccacctgccgctccgcgctgccggcgcttgggatcccgctgcagcagcgcgtcgagatcggcatgctctacaaggcctgacgccagacatgcacctgcggctgttgctggtgcaggcttgcaggtgccggtggcttaagactgaggttgcttgatctagttgtaagtgaatctctgtgggaaggatggaataaggtgtctggtgtggaagatgaacttc

SEQ ID NO: 118629 - DNA, 1711 bp, Zea Mays
ctccgcgggcaggctcacgagcgtgcccatctccttcacgaacgtctccatggcggggccgggcaggcacatgggcacgatgatgccgtcctcgcccttggcgttcttgcacgggacgaggaaggtggccatcccggggctggtgcccacgccgacattggcgggtcctccgtacaccggattgccccagccgaagtccaggttgctgaacccagccttggttaggtccgatgccaggtacgcgcgcaccaccgtgaagtgcggccgcccgcgcagcaccatcaggtcggccaccgaccgcatgtactccacgttcacctcgcccttggcccgcttcaccagctctacggcgtacccgagcggcttggcgacgagatcacctgccgtcgcgacggcggctggcaacgcaaaggcgttgccatagtagcccttggggatggcgacgccggatttgccgccgtgggcggtcacgacgcagatcatccgcatcacctcgtcggcgtccagggcgagcgctgcggtgcggcacttccataggagccccgtgaggaggtcgaacttagaggcgcgggaccggaggtccggcgggaggttggcgcggatggccgccacctcgtggcgcccgaagaagaaggagcggtgcaccatgtcgtcgagcgggatgatgctgcccttggtgtccggcacctcgtcgtactcgcggtgcgcaaaggccggccgcggcgggtcgcgcgcctccagcagctccctcccccacaccggccggactgtcggccccgccgcgccccgcgccagctccgccacggcgcccaggaactgcacgagtccttgcgcgtcggccatcgtgtggtgcagccgcacccccaggatgaagcccccgcacgccaggcgcgtcacctgcacgccacacacgtacgagacaaggacgccgtcacgtgcctggaagaggaggagcggcgagcccaggacctcggacgagccggggacgtcaaagatgagctcctcgaggcatgggaacggcggttgcagctcgtccccgaagtgatcgagccggacgtcagcctcagcctcgatgaacagcacaccctcgccggtacaatccacggcgagcttgcgaccttctagctccctgagccgcccggcgaaagggtagtagggcacgagcgccctggctatggcgtcccggatcaccggcgcaggttcccgccctcccatgagcgcgttctggcggtagaactggatgatggggacgtggagccgcagcccgtcctggtcgtcgatgtccgagagtcgcttaagctcccgtggcgtcgcggacgccggagctaccagcaccgccggccccctccgcaccgtgaacttgagcgacgacgccattctttgcttgctccggtaacgtacagtgactcactggttctggaggtgaggtggcaagggcggttgttcgtgcctgctgctgctgggagcagcgctactgggtttggtttggtgtgccgagagggagcaggcacgttgctgggcttggtgtgtaggattatataatgaggctcgtccggttttgatttagctgttcaaagttgtgcgatcagagtgtgagcgaactgggcagtggggactgggtaatacgcagcgcgctagcgtcatgacctcctggaggtggtggaaacatgtacagttattatactactaacatatagctcgtgcttatggt

SEQ ID NO: 118630 - DNA, 175 bp, Zea Mays
ttttttgtattttttggatacattatacgaatttttcgccctagcttgggattaaatcgtgtggattcatctcagaaccaaatcggccatttcctatacatgtgttttaataaggtgtgtgtacatatatagagagcctatagtatatagtttaagctagacttttccgtcgtcg

SEQ ID NO: 118631 - DNA, 1696 bp, Zea Mays
accgtccacctccagtcctccacctctgtccctcccacgtctactctcacctcctttctctcccctccgacccccacgttactgcctgccacgttcttggcgcttcgtttctcttcgtcccatcccatgccgtccagttagttccgttggcctgataacattgtttcttggagctttcatcctctgccaaaagctcgagcggccacgaacgcttccggcgtggctcggagctggcaaccgtcgtggatttgatcttcccggggcgcctcgagctcgccggcgccagggaaggtggtgacgccagcgtccacggtcaggagatgacgaccgcgcggcagtggtggcggcgcgccacggcggcagtcaaggacaggaggagcttgtacctgagacgcgtggcggcactgcgaccacggccggcctccggggtggccgcggcggtgctgtggagccccgagctggaggcggccgtgatccgcgcgactagccatgacgagcggtctgtagactacgggaatgcggcgcgggtcttcgccctggcgcgcgcgtcgccggtgtcggtgcagccgctcatgtgggcgctggcacgccgcgccgggcggacccggtgctgggccgtggcgctcaaggcgctcatgcttgcgcacggcctacttctgcggcccgacctcgcgccacgctcggtgcgcctcggccgcattcccttcgacctcgctgacttccgcgaccgctcgtcgccgccgtccaaatcgtcgggcttctccgccttcgtgcgcgcctacttccgcttcctcgacacccgctccctcttcatcgcccaggatctagatgccgtcgccgacacgggcgagaccgacggcgaggacgcgaggctggatcacgtgaccaagcagcagcacctgctgcacctgctcctgcaaatccgaccgtacggggacggcatggagctgggcctcatcttcgaggcgatggactgcgtcgttatcgagatcttcgaggtctacagcgagatatgcacgggcattgcccggttcctcgtcgccgttctcggctcggccccgatgacgccacggccacggccgggagagacgttggcggcagcgaggcggcggagggcagtgcaggggatgcgggtactgaaaaatgccgcggagcagagcgcgcagctgtcatcgtactttgagttgtgccagagcttgggcgtgctcaacgccgccgaatttccggccgtggagcgcgtcgcggacgatgacatcagggatctcgagaagatcatcatgaaccacgtcgttgaggaaagccgcgaggacaaacaaatgaaggcgttggtcgccgtggaggaaaccccaccggcctcgaagacagtggtcacaacggagtgggtggtgttcgacgacgacgacaacgccgccgccggcgccaggccgaggaatttcgaaggttacttgaatccgttcgtcactgcgccgtgggatgcgacgccgtagcgggtaggagagacttgttggtttagcctttagagttggcaattggaatgccatccatccgtcagattagccgatgatttctcaaaatctgtcgtctatcgatttgacctactgcttttcatcagaaccttgactgaatccttgtaaatatagatgtacacgtgaaattatgaatcagtccctatgttccacgttggtgttctcttttt

SEQ ID NO: 118632 - DNA, 2109 bp, Zea Mays
tataattgtgcaattttttttctctctccagtgaacacttccgcaaccgaacatgccaccgcccaggggatccacccgcccagctctcccacaggccacagccatcgcaacagagcaacatgccaacagccatattggcgaggcggagcaatcccgtagtgggattgaaatccaaaaccctaaactaactccaatccacacttgccggcatggccctcaagcgctcggccgccgccgccagcctggggtcggcgtccgacgcctccgacggcgaagcgggcgcggcccgcaacagccaccgccgccgagtctccccgtcccgctcccgatccgagtcccctcggcccaacctcggccctagcgccgccgcttccgacaccaaccgtgagcgttccccccgcgaccacctcgactccgatgcggactccgacgccgacgccggcgccggcgccggccgcggcgcccgttcctcgaggcttctcggcgaacgttccccgagcttccactccaactcggacgctgacgtcgccgggcgctctccgtcgccgaggcgcaaccgcgagcgcacccttcacctccactctgactccgactccgacaactccaccacggccgcggccgccgcctccgatgacgccggcgacgcctcgcctttggctattgcgcaccgtgcctcgcacatcgggacctccaacgtcaaacccgtcagcacgcgcccgatggatgtgccctcgcgcgccgccgcgggatcttcccaacgtcgttccaagcgccgccccagcccccactccccggagcaccagaagcggccgccccgggtttggagtcctgaagacgaggtgaccatactgagtgctctcattgagttccgtgccaaaaaaggtcggcttcctgcgtccattcaggacacgagcaaggtacacagccagattattcatcaactcactgctaatgcttctacggctcagcttagtgataaggtcaggcgcctcaagcacaagtacaagttgctgctcactcgttcaaagaatggacgggatcctgatttgccaaccaaacatgatcgcgatgtctatcaacttagcaagaaagtttggggattgaaaagtctactactagtacgaggatctcgtgtgtcacacgaggacactgaagatgcagaagagagcaatgaagagcaggagatagaggagagtgatgaggatatagaaaatggatggggactccgtggtcgcacaggcaagaaaccaagggcattgacatttgaaaatggcaatggtaatgcaattgtcactgcaggtagggcttgccatggtgatggcagtgggagagatgatgctgagaagggaaaacaaatgtacccatacctgtgggaggctgttgaggagctttcgaaggagcatccgagtggacctatattcaggaaggcatttggtgtacttgaaaaatcaaaggcaggagcggtggaggagaagctcaggaagttcagaatgttagagatcaggcagcagctgcgtcggatggacctgatgaaggagacagtggggttggtgcttgatgctctggagggtgcatattgatgtgctggtggttttggattgtgtccggtattggtaaggtgttgctcaaaaagggcgacctaagtcttccagttgcctggaattgcagtgttatggacatatggttgggtgtgtctaattttgttgtgaaggatatgatatgtctttgaccccaactagacctagatcaaggagttatgacggctgcttgttgtcgttcctgaaatatttatgctctatgtgcttaggtgctaacttatgtctatttgtcatgccatccctatgtttctgcttaatgttagttacttcattggcttaattatctgtttctattttccatttactgcatctgtaaatatgaacatcgccatttcatcagggtttaatccagcttgatatttgttacctctcaactggatgaactggatgcaagcttggtgcttgttaggttcttctaacaagactcgcgactgggaaatgtaatatgatgtgttcatagttatttgcgcttgatgatctgtatatcacggtgctgtctttgtatgccgtg

SEQ ID NO: 118633 - DNA, 3247 bp, Zea Mays
cgcccgtgtgtgtatatatacatacgcctgtcgtactgccttccacagacaataataccgagccctctcttccattccagccttcccaggccagctgcaactactggctcatcaccagaaaccagaacgtacgccggcaacccatctccctgaaatggccgctgtggagccccggcagttcgggcgtctggagccgggctcctcgccagtgcgcgtggccacgaacggcgccaaggcgtaccctcctccggcaagccacctcccgcggcgcgctgactcccctgtccgcggctgcagcttccctcccctcgtctccccgccgcgcaggctggacgacgcgtcggacgacgaggacgaggagcaggaggactggcgagagctgtacggctcgcacctgcagctggaggtggagcccgcggtgcaggacgcgcgcgacgaaggcaccgcggacgcgtggatcgagcggaacccgtgcctggtgaggctgacggggaagcacccgctcaactgcgagccgccgctggcgcggctgatgcaccacggcttcatcaccccggcgccgctgcactacgtgcgcaaccacggcgccgtgccgcggggggactgggcgacgtggaccgtggaggtgacgggcctcgtgaggcggcccgcgcggctcaccatggaggagctggcgcgcgacttccccgccgtggagatccccgtgacgctggcgtgcgcgggcaaccggcgcaaggagcagaacatggtgcagcagacggtgggcttcaactggggcgccgccggcgtgtccacgtccgtgtggcgcggcgcgcgcctccgcgacgtgctccgccgctgcggcatcgtgccccgcaagggcggcgccctcaacgtgtgcttcgagggcgccgaggacctccccggcggcgggggatccaagtacggcaccagcgtcacgcgcgagtgggccctggacccgtcgcgggacatcatgctcgcctacatgcagaacggcgagccgctgctgccggaccacggcttccccgtgcgcgtcatcatccccggctgcatcggtggccgcatggtcaagtggctcaagcgcatcatcgtcacccccgccgagtccgacaattactaccatttcaaggacaaccgcgtcctgccgtcgcacgtcgacgccgagctcgccaacgcagaagcgtggtggtacaagccggagtacatcatcaacgagctgaacataaactcggtgataacgacgccggggcacgacgagatcctgcccatcaacagcattaccacacagcgcggctacaccatgaaaggatacgcctactccggcggcggcaagaaggtgacgcgggtggaggtgacgctggacggcggcgagacatggctggtgtgccacctcgaccacccggagaagcccaacaagtacggcaagtactggtgctggtgcttctggtccgtcgaggtggaggtcctcgacctgctcggcgccaaggagatcgccgtgcgcgcatgggaccagtcgctcaacacccagcccgagaagctcatatggaacctcatggggatgatgaacaactgctggttcaaggtgaaggtgaacgtgtgccgtccgcacaagggcgagatcgggctggtgttcgagcacccgacgcagcccggcaaccagcccggcgggtggatggcgcggcagaagcacctggagacggcggaggcggccgcgccgggcctcaagcgcagcacgtccacgccgttcatgaacaccaccgacgtcggcaagcagttcaccatgtccgaggtgcgcaagcacgcgtcgcaggagtcggcgtggatcgtcgtgcacggccacgtctacgactgcaccaagttcctcaaggaccacccgggcggcgccgacagcatcctcatcaacgccggtaccgactgcaccgaggagttcgacgccatccactccgacaaggccaaggcgctcctcgacacctaccgcatcggcgagctcatcaccacgggcaccggctacagctccgacaactccgtccacggcggctccgtcctgtcgcacctcgcgcccatccgcgaggccgtcagggctcccgcgctctccaacccgcgcgaaaagatccactgccgcctcgtcggcaagaaggagctgtcccgcgacgtccgcctcttccgcttctcgctgccgtcgcccgaccaggtgctcggcctccccatcggcaagcacatcttcgtctgcgccagtattgaagggaagctgtgtatgcgggcgtacacgcccacgagcatggtggacgagatcggccacttcgacctcctcgtcaaggtctacttcaagaacgagcaccccaagttccccaacggcggcctcatgacccagtacctcgactcgcttcccgtcggctcctacatcgacgtcaagggcccgcttggccacgtggagtacaccggccgcggcagcttcgtcatcaacggcaagcagcgccatgcgagccgcctcgccatgatctgcggcggaagtgggatcacgcccatgtaccagatcatccaggcggtgctgcgcgagcagccggaggaccacacggagatgcacctcgtgtacgccaaccggacggaggacgacatcctcctccgcgacgagctcgaccggtgggcggccgagtacccggacaggctcaaggtgtggtacgtcatcgaccaggtaaagcgcccggaggaggggtggaagtacagcgttgggttcgtcacggaggccgtcctgcgggagcacgttccggaaggtggggacgacacgctggcccttgcctgcggaccaccgccgatgatccagttcgccatctcgcccaacttggagaagatgaagtacgacatggccaattctttcgtcgtgttctaagaccgcgcgggcagtagccaattaataattaatttgatatacctacgacgtaccacggaccagatatatgtatataaaccagccgacttgccagcgtaaatttcgtgagatgcatgggatatcgttggaaggatactgtaaggtttgcacttgtactgtgctctagcctagaattaccagactagagcagcagataacataggccatgcatgttttgattttgccctcggaatgtgcaacatgtaaattctgagggtattgtttatttacttatgtatgctactactagcgtttaactattattgttgttaaccatcggacataaatatctcaaaatgttctttcacttggtttcgactt

SEQ ID NO: 118634 - DNA, 1719 bp, Zea Mays
cttcctcacaagacacaccaccgcgtgccgtgactagttagagtgtcgcactcgctactgctccaaaatggcaagccttgtgctgttgttgctcatcttactcgtgcctaccttatcgttgccagctgctcattgcaatgacaacgtcggattccagctcaagctgacccacgtcgacgcgggcacgtcctacaccaagctgcagctcctcagccgcgccattgcccggagcaaggcccgcgtggccgcgctgcagtccgccgccgtgttgccgcccgtggtggacccgatcacggcggcgcgcgtccttgtgacggccagcagtggcgagtacctggtggacctggccatcggcacgccgccgctgtactacacggccatcatggacaccggaagcgacctcatctggacgcagtgcgcgccctgcctgctctgcgccgaccagcccacgccctacttcgacgtgaagaagtccgccacgtaccgcgccctcccgtgccggtcgtcgcggtgtgcctcgctctccagcccctcctgcttcaagaagatgtgcgtgtaccagtactactacggagacaccgcgtccaccgccggcgtcctcgccaacgagacgttcacgttcggcgcggccaactcgaccaaggtcagggcaactaacatcgctttcgggtgtggcagtctcaacgcgggcgacctcgccaacagctccggtatggtcggcttcggccgtgggccgctgtcgctggtgagccagctcgggccgtccaggttctcgtactgcctgacgtcgtacctctcggcgacgccgagtaggctctacttcggcgtgtatgcgaacctcagcagcaccaacaccagctccgggtctccggtgcagtccacgccgttcgtcatcaacccggcgctgccgaacatgtacttcctgtcgctcaaggccatcagcctgggaaccaaactcctgcccatcgacccgctggtgttcgccatcaacgacgatggcacgggcggcgtcatcatcgactcgggcacgtccatcacgtggctgcagcaggacgcctacgaggccgtgaggcgagggctggtgtcggccatcccgctgccggcgatgaacgacacagacattggcctggacacgtgtttccagtggccgccgccgcctaatgtgaccgtgacagtgcccgacttggtgttccacttcgacagcgcgaacatgacgctgctgccggagaactacatgttaatcgcgagcaccacggggtacctgtgcctggtgatggcgccgaccggtgtgggcaccatcatcgggaactaccaacagcagaacctgcacctgctctacgacatcggcaatagcttcctgtcgttcgttccagctccgtgcgacattatatagctttccttgtcaggtctagcttctttagccttcaataagttcgctgctatagttcgttgttgtagctgcattagcttcacacgtagagtagccactaagattaaagtgttgtgttatccccaattatgtagcagaacatgtgtgccacacgataatcattttggtaatctctatctggtagtcacattatctctccttcatctatcttttttatttaaaaaattgcaaatgcttcttaaagtcattgcaacttttataagttttttgtatattatgagattggtccatttaaatatttaataattttaaaagtatgtattaaacaa

SEQ ID NO: 118635 - DNA, 340 bp, Zea Mays
agtgaaggattcacctggccttcggattctagccctagaccagtgtaaaagtgtggaagtccttgtgctccagttgatgccagtctcttcccagccactaggtttgctctgcacaagtgttggcacaccatcggtctgccagtagtgaccacgccggtcagtttggccatgtcgccgtggccaagacaactcagcaagagctccgagcagaaggagtgtaaattcaagacgaagtggttgtggaagaggagtttgctccagtgcctattcagcaagtggatggagctatctaactggttattgggtagaaaggtcttaagcctcttcactgcaataaagg

SEQ ID NO: 118636 - DNA, 106 bp, Zea Mays
aacacttaaaagcaattaccagatgccaagatattactatgtacaacgtccacgctattttaacttaatcgaatctgaggatagagattgttggggacttgttctc

SEQ ID NO: 118637 - DNA, 633 bp, Zea Mays
atggggatgataagctgggcgaccggcgtcgatgggacgagtaccagggagaccagcgccgacgagattgatggcaaggcgggcggatcggtgttgttccagtggagacggtggccaccaactaaagagcgcgcaagaggccaaggcggagccggaaaggcgcgacgaaccgagctctatggcgacgtggcatggagacaacgacgcagtggagctgtggcagatgacaagctcgacggcgggactcacgtagggagtgagctggagactatcgacgggtacataagggacctaggaagggaagcgagcaccagagatgcgtggtggcgctcgcagagcttgccggtgggggagaagacgatgagggcgacctcgacgtcgcagagcagggagaactcgaaggccttcttgaagatccccgagcagcgcttggagaagcgcacttgccagcccacccggtcctcgatctgccgcagttccacgcggccgcggcatgtcatggccgacccggcaggagcagaggtgaggacgccatgggagaggcagagagtcggctgggggagggatgagggaggggatgtcggctccaagggcgctggggaggggcgaccgactgaaggagatggaggctag

SEQ ID NO: 118638 - DNA, 2522 bp, Zea Mays
gatggacaaatcttggataaacagtaggctttttagcgagcaatatatcgcaggagtgagaggttttatgaagttaatttcagagcgatttgatgatagtgaggaggtactatgtccttgtagaaagtgtttgaatcggcttgccaaacctaagtcacagatacaggatcatttatatattcatggaatggcgagcacatacactacgtggatacatcatagggaagaacaattggatgctgaactgagtgaacaagccggccatctacatgagcattatagtatgaatgaggatgttcatatgaatgagcctaaaaacccggaagatagattgcctgatatggtacaagattttttcagagctcaagagggaggtgcacaaaattctatgtttgcagctgtattggatgagatgaagcaagaacttcacccaggcgcatcatacacaagattttcttttgtagtgaagttactacatattaaatctcgttaccggattagtaatgttgccttctctgctattctaaagttgttgtcattggctttcccacattgttctgtaccgacatcttataaggaagctaagaaacttattaaagcattgggacttggatatgagtcaatccatgtgtgtcctaacaattgtgttttgtttcgaaaggattatgcaaaaaataatgagtgcccagtgtgtggttcatcaagatggaaagatggtgaacaaagaaataagagtcctcagaaggtgttgcggcattttcatttgattcctagattgaagaggatgtttgcttcagaaaaaaactctgaggatgcacaatggcacaagttgaagaggaaagaagtggaaaatgagcttagccatccagctgatggtcaggcatggaaagactttgatagaaaacataattggtttggagaagatcctagaaatataaggcttgggcttgccacagatggttttaatccctttggcaaaatgagctcctcttacagtatgtggccagtttttgctatcccttataactttcctccgtgggtatgtatggagcaatggaacttcatgatgtgtctactcatccctggtcgggaatgtccgggaaaagattttgatgtatttctacaaccactagttgatgagttacaacaactttggttgggtgtttctacttttgatgcattgagtagaagggattttgatctacatgctgctgtaatctggtgtattcatgactatcccggtttgagcactttgtctggtagagttacaagaggatactatgcttgtgtacattgtgacaaagatccttgctctaaaagaataagaaataaaatatgttatataggtcatcgacgttggcttccacatgaccatccatggaggaaaaagaaggattatgatggccaaattgagaaacgtgagaagccgcatcaatttagtaccaatgagttgatgcagcaattggaaagggtaaaggaagttaaaccagggaaacatccaaacaacaataagaggaagcgagatgcaaatgatggtcaatgttggaagaaacgatcgtgcctgtgggatttgccatattgggacagatttgaaagctgcgccataacctttgatgtaatgcacattgaaaaaaaatatatgtgagtctttgcttggtacattttcttgctcttccaggaaagtcaaaggacaatattaatgcaaggcttgattttgaagacatgtgcataagaaaagatttacacttgaagcatgatggaggttcctatgtggttcctcatgccccctatacaatggataaaaatcaaaaggtagcattttatgattttttgagaagtgtaaagtttccagatggttatgcttctaacctagcatcatgcatcactgctgatggatgcaacctccaaggcttgaaaactcatgattgccatatcatacttcaacggattttaccagctgctcttcgaggaataatgaacaatgaaatatatgtagcaattgctgaactaggtaacttcttccagcaactatgcgctaggacccttaaattagatgttctgcaccaaatgaaagagaatatcccaattgtcctatgcaagcttgagaaaatattccccccctcattgtttgatgttatgctccacttgtcgatacatttacctgatgaggcaatacttagaggaccagtccaatatggttggatgtaccccgtagaaaggaggttatacactttgaaacattctgtgaggaatatggcacgacctgagggttcaattgcagaagcatatgttgctaacgaatgtttgcatgcatcttcaaggtattttgatgatcttgagacaagacacaattgtgagggaaggaatagagagcatgttgatatgagtaagggtgatatatctgttttccaacatggagtacaattacttggagccccaaggattacatatctagataaggattatgataagatggtttggtatgtgcttaacaactgtgtagaggttgaaccatatatgga

SEQ ID NO: 118639 - DNA, 169 bp, Zea Mays
ttttttgtatggttctttttcctatgcatggatacatttgtgctatctattttaccttgccatccataacatgatcaagctgaaatggttgaacatcaacgctttgctgttattttagctattcaacatcaccatttctgttcatgatggggttattacctgaatagtg

SEQ ID NO: 118640 - DNA, 303 bp, Zea Mays
atggccggcgccccgcgcagcgcctctgcgcgactctccctccccaaacagcgagcccccttccttgctgctcgtcgtggtgcccgccggctgttcggtaaaatgcgcagcaagccgcgcgctgcagcagccctcccgttcgatctccactcccctcgtcgcgtgtcgtcgctctcgtgctcgctgcgcagccccatccgcgacgccctaggcgttgccgcggagccgcgcgcgatgcctgtttcggtgaagcccctaaactgtggacgcatgtgcaacgcgaatccgagtttgacaggttga

SEQ ID NO: 118641 - DNA, 1448 bp, Zea Mays
gatgcgataaccgaccctgactttttctgcttttaccagccaggcatgaccttcgaacaatttgtacgtgagtttgccgaatggttttcacaaaaacgtccggcggcgatgatgatcggcatccgtgcggatgagtcctacaaccgttttgtcgccatcgccagtttaaataaacaacgttttgccgacgataaaccctggactacggccgcaccaggcggtcatagctggtacatttaccccatttacgactggaaagtggctgatatctggacctggtatgcaaatcatcaaagtctctgcaacccactgtataacctaatgtatcaggcaggcgttcctctgcgtcatatgcgaatttgcgaaccttttggcccggagcaacgacaaggattatggctctatcacgttatcgaaccggatcgctgggctgctatgtgcgcacgagtcagcggggtaaaaagtggcggcatttacgccggacatgacaatcatttctatgggcatcggaaaatcctcaagccagaacatttagactggcaagaatatgcattattgctgctcaatagcatgccggaaaaaacagctgagcattaccgcaataaaatcgccatttatttgcactggtatcagaaaaaaggcatcgaggttccacaaacccagcaaggggacattggcgcgaaagatatcccctcctggcggcggatatgcaaagttttactcaataacgattactggtgtcgggcattatcatttagccccacaaaatcgaagaactatcagcgttataacgaacggataaaaggaaaacgtcaggaatgggggatactatgcaacaacgattaacgcaggatttaacgcaatttctcgccagcttgccggaagatgatcgcatcaaagcgattaatgaaatccgcatggcgatccatcaggttagcccctttcgtgaagagccagtggattgcgttctgtgggttaaaaacagccaacttatgcctaatgattacaacccaaacaacgtggcaccacccgaaaaaaaactgctgcaaaaatccattgaaatagatggttttacccaacccattgtggtcacacatacggataaaaatgccatggaaatcgtggatggttttcaccgccatgaaattggtaaaggctcatcatcattaaaattacgcttaaaaggttatttgccggtgacctgtctggaaggtacgcgtaatcaacgcatcgccgcgactattcgtcataatcgcgctcgtggacgccatcaaatcaccgccatgtcggaaatcgtccgtgaacttagccagttgggatgggacgataataaaattggcaaagagctgggaatggacagcgacgaagtgctgcgcctgaagcaaattaacggcctgcaagagttgtttgccgaccgtcaatattcccgcgcctggacggttaaatag

SEQ ID NO: 118642 - DNA, 595 bp, Zea Mays
aagctggcgcaggcgttcagctgctgccagcaacgtcgattccttcttggcaaaacagagacgaatcagtttatgtgggaagggatcggcgcaaaacaccgacagcggaatcgccgctacgccgtgctcctgcgtcagccactggcaaaactcaacatcatccagggtagaaaccgcgctgtaatccaccagcaaaaagtatgtaccttcacacggtaaaatctccagccggctttcatttaaagcattcaccagaatatcgcgcttctggcgataaaagtccggtaacgcaagataatgctcaggttctgcacgtagcatatcagcaagcgccagctgtgccggggtattcaccgaaaaggtcagatactgatgtaccttgcgaatttcggcgctgatgggcgctggcgcaacacaataacccactttccagccggtcatatgataggtcttgccaaatgaagaaaccgccactgcccgctcacgcagctgcgggatgcgccagcacactggcatggccctgttgtgaaaagttgatgtgctcgtagacttcatcgctaatgacaaaaatctcgtggcccggcgatcgcctgcc

SEQ ID NO: 118643 - DNA, 1838 bp, Zea Mays
gaaagagagtgagagcacggttcgtcgcgggggaagcagagcaggagaggagctgacgcggcggcgggggcgagagtcggcggggaggcatggacgggcacggcggcggagccggtaagctgacgaggacgccgtcgtcgctactccggtcgcctaccatgcgcgcgggtcccggcaccgcatcgttccacgcgctcgacgacccggaacccgacgacaagaaggcgcaggcgccactgggcaagcctcgggcgctgctccgccgggcccaccaccggttccgccccggcccggcccagtccgcgctcctcctcctcctcccggtcctcgcgctcgccgcgctgctcatgcgcgggggcgacggcggccaccacctcgccctcctggcggccgcggcggggttcgccctcgccgccgcggccgccgtcgcgcggctccgcggcgctcgcccgcgctccccggcgctcgaggcctccgtgcggtggttcatcggcgaagatgacgacgaggagcagcgggactggaagcggagggcggggctcgggctggggctgggactggggcgccgcgcggaggtgcgggagggcgtcgagttctacagcaacggggaccgctacgagggggagttccacgggggccgctgcagcggcagcggcgtgtacagcttcttcgggaagggcaagtacgagggcgactgggtggacggcaagtacgacggccacggcgtcgagagctgggcgcgcggcagccggtaccgcggccagtaccggcagggccttcgccacggccacggcgtctaccgattctacagcggcgacgactacgccggcgagtgggccggcggccagagtcacggtatcggcgcccagacctgctccgacggcagcacgtacgccggcgagttcaagtgcggcgtcaagcacggcctcggctgctaccatttcaggaacggcgatctgtacgcgggggagtacttcgcagacaagatccagggtttcggtgcgtacagattcgccaatggacacagctacgagggatcttggcacgaaggaaagaaacaggggttcgggatgtacgtatttgggagtggggatgaacgagccggggagtgggattctggaattctgaagagctccttgcctctgtcagacccagctgttcagcgtgccctgcaggtattcaacaattcccaacatttataattgatacgccgcctccatgcttcagttgctcaaattctctcattgtgcaactaggctgctcgaagggctgcagacagcgcctttcacctcccaagagtacaagagcaggtgaacaaggccgtcatggctgcaaacagagcggctacagctgcccgtgtcgctgcgatcaaggcagtgcagaacaggatagatggcaagctctgtttcatcgatgtgtgaattgggttcaagaattgtgcccttcacctgttaacaggatagactagccaagagcggcagtgactagctgctgagtttcgcgaccggagcagcacaaccgcatgctccgtgttggttggagagaccagtacggttggcggcagccaccaatgggctgaactgctgctgttttcttgaagtggttcacctcgtgctggatcgctgagagcaagttcaccctattcctcttcctccttgtgcagactgctccatagtccatgtctccactccatccatgtgtatcaatggtggtcggtggagatgatctgtcagtgcttttctgttttctgcatcgccctgtactgtatgtgcattgtacatgcactgtgttatcttgctcggatcagatgttccgacggcaaatcttgccggtttgaa

SEQ ID NO: 118644 - DNA, 2079 bp, Zea Mays
gaaagagagtgagagcacggttcgtcgcgggggaagcagagcaggagaggagctgacgcggcggcgggggcgagagtcggcggggaggcatggacgggcacggcggcggagccggtaagctgacgaggacgccgtcgtcgctactccggtcgcctaccatgcgcgcgggtcccggcaccgcatcgttccacgcgctcgacgacccggaacccgacgacaagaaggcgcaggcgccactgggcaagcctcgggcgctgctccgccgggcccaccaccggttccgccccggcccggcccagtccgcgctcctcctcctcctcccggtcctcgcgctcgccgcgctgctcatgcgcgggggcgacggcggccaccacctcgccctcctggcggccgcggcggggttcgccctcgccgccgcggccgccgtcgcgcggctccgcggcgctcgcccgcgctccccggcgctcgaggcctccgtgcggtggttcatcggcgaagatgacgacgaggagcagcgggactggaagcggagggcggggctcgggctggggctgggactggggcgccgcgcggaggtgcgggagggcgtcgagttctacagcaacggggaccgctacgagggggagttccacgggggccgctgcagcggcagcggcgtgtacagcttcttcgggaagggcaagtacgagggcgactgggtggacggcaagtacgacggccacggcgtcgagagctgggcgcgcggcagccggtaccgcggccagtaccggcagggccttcgccacggccacggcgtctaccgattctacagcggcgacgactacgccggcgagtgggccggcggccagagtcacggtatcggcgcccagacctgctccgacggcagcacgtacgccggcgagttcaagtgcggcgtcaagcacggcctcggctgctaccatttcaggaacggcgatctgtacgcgggggagtacttcgcagacaagatccagggtttcggtgcgtacagattcgccaatggacacagctacgagggatcttggcacgaaggaaagaaacaggggttcgggatgtacgtatttgggagtggggatgaacgagccggggagtgggattctggaattctgaagagctccttgcctctgtcagacccagctgttcagcgtgccctgcaggctgctcgaagggctgcagacagcgcctttcacctcccaagagtacaagagcaggtgaacaaggccgtcatggctgcaaacagagcggctacagctgcccgtgtcgctgcgatcaaggcagtgcagaacaggatagatggcaagctctgtttcatcgatgtgtgaattgggttcaagaattgtgcccttcacctgttaacaggatagactagccaagagcggcagtgactagctgctgagtttcgcgaccggagcagcacaaccgcatgctccgtgttggttggagagaccagtacggttggcggcagccaccaatgggctgaactgctgctgttttcttgaagtggttcacctcgtgctggatcgctgagagcaagttcaccctattcctcttcctccttgtgcagactgctccatagtccatgtctccactccatccatgtgtatcaatggtggtcggtggagatgatctgtcagtgcttttctgttttctgcatcgccctgtactgtatgtgcattgtacatgcactgtgttatcttgctcggatcagatgttccgacggcaaatcttgccggtttgaacttgtggcgccacgtgcagggattctccattcgtaatcgtacttgagcgtgcacatgggtgtttaccagccaataatccctcgctgccatatcatgcagcctcttatctgctgttccatccactgcacctgggctacctacctctctacctgcaccttctcggacatttccattctctccgcagattatggcgtctttcggtccacttgctgctccatgttctcgcctcgcattagaggcatgaagaaatgaaacatgcaagtgttgaggtaatgacaaatgcgttgcaatacactgggtccagtcacagcctttcaatttc

SEQ ID NO: 118645 - DNA, 913 bp, Zea Mays
ccttgaggtgttgcctgagaggtgctgttgaccgagtagcatcattgaagagttactgtcgagcacttggattatgtgatcgatgtgcagagatgtggttccaagggcacaagtgtgccaacacggtgcaacttcacgccattgaggaagtctaggatttgctcaccttggatgaagctacaatggaagtcattgaaacaacagaggaactgatgatggttgtatccctgtctaatgcggcatggtccggatctgacacgatatcaaccatgagattacagggtcagattcaacaacataatctcttggttcttattgatttagggtcttcacatactttcctcaatgacagtcgtcgaccactattgtttggagtccaagaattgacaacaccaattacagtttaggttgctaatggccaagttattacctgctcacaccaccttccagcagctcaatggaccatcggtatagcccgatgagagtggattggacaaacaagtggatggttatttcttaccaggaaaatactatctaccttcagggtatcaggctgttgacaaaatattactactccatcgtcctccctctcacccataaggtatttgatatattactttgtccagtcgatgcagcttacaaggctgttgacaaaataatccaggctctcaagccatcttctggacctcccaagtccagggagtgcctgcctctgatcctcatcatcaggaacatgctcaagtatgcactgacgtaccgtgaggtcatttctatcctgatgcaacaccatgtacttgttgatggcaaggtcaggattgacaagacctaccctgctgggttcatggttcaagctctgcaaggaaaacatagaatggaattcaaatttggtggccgcaaaagtgtggagacttga

SEQ ID NO: 118646 - DNA, 334 bp, Zea Mays
ctggagatcgagcaacaagttgataatctgcccgcgaatagaaacatccagcgccgaaacggcttcgtcggcaatgatcacttttggattcaatgccaacgcgcgagcaatgcagatgcgctggcgctgaccgccggaaaactcatgcgggtaacgccaggcatgttcaggtaacaggcccacgcgctccagcaaccacgcaacgcgtgcagccgcgtctttacctggcaataaaccgtgtacacgcagcggttcgataatcgaatcaccgatggtctgacgtgggtccagcgaagcgtaagggtcctgaaaataaactgaatatcccggcgta

SEQ ID NO: 118647 - DNA, 315 bp, Zea Mays
atgaggaagggccacatccttcagccacaattgatgttatctagagagccaggggatgttattcttgttgaagtacaagacaacaatagggttgtaataggccatgcaaagaatcaagtttcaacattgattgatactcaagtacgtcgtgatgacgaagaaaaacttgattttaaaggtgcaaatgttcatataataacaagcaaagagggctggaccagaagattgcaggagcaaacagagatgagaaaactattgaagtacacagcgaccaagtcatgcgatcctaaatccaaatcgaagctactctactag

SEQ ID NO: 118648 - DNA, 498 bp, Zea Mays
atgctgaggagcgacacaacaagaagccacctgattctcgcggttctgaaggtgtatatgctggaggccaagcccgcagtcaatcgtgacgtagtggagcacgctttggtggtggtcctggccacgtcgagctggtgtcgaatggcgttccggaaggacgagcatggcgtggtgaacgcagtgccgcttctggacctggctgcgtctggtcttggtgcagaacaagagtatggaaaatacaagcacattgtggaactctcgaaagcaacatttggtctaagagtgaattctgtacaatgggaaccagagctccaaaaatcatgggacgataatcaggtaaatcccgagaatgcttcattggtagtacgacgatcccaagcatctaggacacattcactcacccaggtttcaatttttagcaggaacactttctcgacttccttcgtcaattattatgcttcaatcgaggccaagtgtctccatcttacgtccgcttga

SEQ ID NO: 118649 - DNA, 101 bp, Zea Mays
actttaatttaaactatacttttgaccttagaatgctaacatgtctgattttcgattttgtacttaaatttaaattgtattttaataagtaaaagaagtca

SEQ ID NO: 118650 - DNA, 110 bp, Zea Mays
gtggggctgagtcaccagggtcgcgaccaggggttggacagagccatgttgtgggctggccgcgagaggcatgggcgctcgccgaggccgagctccgaaggatgcacagt

SEQ ID NO: 118651 - DNA, 2893 bp, Zea Mays
ccagcactaggctggctgatgagcgcctcagagagtcagcggacagcggtgcgcgggtagccaccttctgtctggcactccggccgtcctccggctccgtgcactctgtagtcatagggagcaagagcaaggttaggcgctcggattagctgccagcctgcccgctacctctgacttgaagcaactcaatgccgtacagtactgtagaacgcaccagagctccagaatgaatgtacaatgtaggcttttcactgacgcacgcaccatataggccgccggcggtgaaaaagtacggcgggccgggcacaatcactgcggtaggctggcaggacaggcaagcgcggcgtgaattccagcgtgacgcagttattactagacccccacaccacacccccacgtttgcatccacctcgagatgcccgtacctactgcgactttgctactgctggtgtctgtctactctactgtacagtctgtactctcctggggaagggaggcgtggccaccgcgggccgggggatggaccggaccgtggatggattcatttccctcccacttcgcctctgctattaaaccgccacctccctcacccgccatttttaataccgcgcgcgtctctcgctgcgccgtgccgtgccatgctgtctccgctgtccgctctcagtagtgctgcggctgccgctcacgcagtcgtcgccggggacggagagatgcgggttgctgatggcggcggcggtggcggtgctggtgagactggggcggggctccgcggcggcgtcggcggcggggccgtggtggaggacgggcacggggaggcaagcggcgggtgctcggcgagtcgcgggagcagcgcgcgcggatcgtctggcggcgactcgcctttaaccaggttcgtgcgccggggtggtcgactggggacgatggatccggagcgggacgagatgctgacttcctcgtcctcctacgcttctgcaggttccacggagccacaagaggaggaggaggagggcgccggggcattagaagcggccaaggacaacaagcgggtacatggtgcacgaccccaggggcagaccaagaatgcagccccctgtttcactcgagaacgccaggaccagcggcatcatcggttgggagctgttcttttccaaggcaggaagggcagggcgcagcggccggcctcgcttgatttcggctgccctggtgttgccagatcctcgacgcattctccggggttcccggccgccggtgtcgcggtggtgaacaaggggatgggcgtatcgtatccgtcacacagtaggccggacgtgctgtctagtccggggacgccgagctgcaatcggcgtgggatggcaggcgttggctaccagcagggtcctcgttcagaaagagtgatcccgccttggaccggccatacaagccattctgggagcggcatggtgttaccttacagcactgggactgggaggacgctgccatcgaaatgggaggatgcagagaggtggatcttcagccccaaccccaaccccaacaatgcactcgggaggtcggtcccgcaactctggcggccaaaatccaaaagtgggcctcttggacctcccggtagattttgtggggcgtactcttgtgtttcgtcgtcggctcagtttcttgacaacggtagagttggaaatctcactgtgaatgcacattacatggctgggatgttgctacctgagcatatttgcgggggtgttatggactgggaaagggatgcaagtggagcatcgggtgaggatagtagcaatggccagggaggctgcaggcctggtcaaatgaatgttcggcatcctgctatgcagcccaccagggtttctcagcaacatggtagtgcaatggagtcatatcagtcattgcatgcttctcttcaatctatacaagatggtggaattgaaagcataaaagactctgccactagcagtgcccccattattctgaggaaggatgtggcaacacaaacaagccctgctattagcaggtcatcctctcccagcacgaggacttcgttctcccgttcactatcgtcacaacaagtcaaagagctggagagttgtttctctaagctcgaggtcagggatgtgcaggtggatgatcgggtgactctgactaggtggtccaagaaacatgtcacccgaggctctgaaaagaatgctacaaatattattgagtgcaagaaaaaaaccgtggattctaaatcttctgcctgggaagtaacacaaactgcaaagtgtatttcaatgattgagggagaggaagcaaaaatgactgcatgggagaatatgcagaaagctgaagcagaagcagccatacaaaagcttgtgataaaacttgaaaagaaaaggccatactcgctggagaggattttcaacaccctcaggtctggctctcggaagacacaggtggtacgcagtacatcaaccgcaaatcaggatcagcatatttccagaactatcaaaacggcgccaaacctcagcaagaacggtcaaatgagttcattgagtggatgctttacatgtcatgctttctagagatgtagctccatggaaaacacaggtggtccatgcacacttaacagtagtttccttgttttcaggcactattgttagtttaaagtgtagaggaaaaaaatagatccttgtcagtaaccaactagggactgaatcccccctcccccttttccaatggtcaatctatagcatcgatcataatctggattgtccttaagtttttattgtgctaggggaacataagaaagtatgtagagcaaaatgagaggagctgttgttaccctcaattctttgtgattattggtattccaccatataataataaaagaggttcctcttctactagt

SEQ ID NO: 118652 - DNA, 1853 bp, Zea Mays
aggggcagcgtggcagtgggtgtgcgggcgcgtgcatcaacgcagacgatccgggcgacttcacgttatcagttagcacgtacacgcacaccgccggcaccggcgtcgggagggacacctgtcgcccgccgcactctgacctccgcccccgccgcgcgagacgacagcgcccgcaccaagacgaggcaactcggcgagcgggacaggtgctgccagcgcgagcctcctcccacccaaccccaacaccaccaccaccagacaccagtccaccactaccactgaggcgagccggaggcgcacacaggcacagcacagtccgggcccgtgccttccaattcggtcgtcgcacacatcgattgagcccgcgcacgagcccatcgctttcgctttggcgtcttcgagaacccgcaagcaacctatatagcccgccgcgaattccgcctggcttcctcgtcgcccgcctcgtcgtcgcgccgcagtgagaggagggggaggcgatggatctcaacgaatgcgagaggagggggccggcggggccggatccgctgtcgaggcaggggtcgatctactcgctcacgttcgacgagttccagaacacgctcggcgggatggggggagggcttggcaaggacttcggctccatgaacatggacgagctgctgcggagcatctggaccgccgaggagagccaggccatggcgtcggcttcggcctcggcctcggcctcggtgtccgcgctgggggcagccgtcgacggcggggcggcgctgcagagacaggggtctctcgcgctgccgcgcactctcagcgtcaagacggtggacgaggtctggcgggacttcgtgcgggaggcgccgcccgggacggctggcggcgaggagccgcagcccaaccgacagccgactctcggggagatgacgctggaggagttcctggtcagggccggggtcgtccgtgacaaccctgccgcggcagctgctgctgtccctgcgcagccggttgctccacggccgattcaggcggtcagtaatggcgcctccatctttttcggcaactttgggggcgccaatgacgccggggctggagcgatggtgtttgcgccggtggggatcggggatcaggccatgggcaacgggttgatgcctggggtggctgggatggcaggtggtgcggtcaccgtgagtccggtggatacgtcggtggcccagctggattctatgggcaagagcgatgaggatctgtcatcgccaatggctccggtgccatacccctttgagggagtgataaggggaaggaggagcggtgcgggtgtggagaaggttgtggagcggcggcagaggaggatgatcaagaacagggagtctgcagctagatcccgtgcccgtaagcaggtcacacccttttcctgaactcttgcatgtgttgcatcagtagtagttgtttcttattgcaagttgcttctgataaataagcacattggccttgtctatgccctgtccaaatcaacggatatttgattaggtagtaaggcttatacaatggagttggaagccgaagttcagaaactgaaggaacaaaatgcagaattgcagaagaagcaggaacaaataatggagatgcagcaaaaccaggtcccggaattggtcagcaatccatatgcacaaaagaagcgatgcctgcggagaacattgacaggtccctggtaactgagttgttgttgatcggactcgacaggatatttaacattatggtacttgtacattcttcaggatttggagaacccaaatttctgttgtatattagcgatcaacagagtcgaatgtaccagtgcataactttcttctcctgacact

SEQ ID NO: 118653 - DNA, 1707 bp, Zea Mays
aggggcagcgtggcagtgggtgtgcgggcgcgtgcatcaacgcagacgatccgggcgacttcacgttatcagttagcacgtacacgcacaccgccggcaccggcgtcgggagggacacctgtcgcccgccgcactctgacctccgcccccgccgcgcgagacgacagcgcccgcaccaagacgaggcaactcggcgagcgggacaggtgctgccagcgcgagcctcctcccacccaaccccaacaccaccaccaccagacaccagtccaccactaccactgaggcgagccggaggcgcacacaggcacagcacagtccgggcccgtgccttccaattcggtcgtcgcacacatcgattgagcccgcgcacgagcccatcgctttcgctttggcgtcttcgagaacccgcaagcaacctatatagcccgccgcgaattccgcctggcttcctcgtcgcccgcctcgtcgtcgcgccgcagtgagaggagggggaggcgatggatctcaacgaatgcgagaggagggggccggcggggccggatccgctgtcgaggcaggggtcgatctactcgctcacgttcgacgagttccagaacacgctcggcgggatggggggagggcttggcaaggacttcggctccatgaacatggacgagctgctgcggagcatctggaccgccgaggagagccaggccatggcgtcggcttcggcctcggcctcggcctcggtgtccgcgctgggggcagccgtcgacggcggggcggcgctgcagagacaggggtctctcgcgctgccgcgcactctcagcgtcaagacggtggacgaggtctggcgggacttcgtgcgggaggcgccgcccgggacggctggcggcgaggagccgcagcccaaccgacagccgactctcggggagatgacgctggaggagttcctggtcagggccggggtcgtccgtgacaaccctgccgcggcagctgctgctgtccctgcgcagccggttgctccacggccgattcaggcggtcagtaatggcgcctccatctttttcggcaactttgggggcgccaatgacgccggggctggagcgatggtgtttgcgccggtggggatcggggatcaggccatgggcaacgggttgatgcctggggtggctgggatggcaggtggtgcggtcaccgtgagtccggtggatacgtcggtggcccagctggattctatgggcaagagcgatgaggatctgtcatcgccaatggctccggtgccatacccctttgagggagtgataaggggaaggaggagcggtgcgggtgtggagaaggttgtggagcggcggcagaggaggatgatcaagaacagggagtctgcagctagatcccgtgcccgtaagcaggcttatacaatggagttggaagccgaagttcagaaactgaaggaacaaaatgcagaattgcagaagaagcaggtcccggaattggtcagcaatccatatgcacaaaagaagcgatgcctgcggagaacattgacaggtccctggtaactgagttgttgttgatcggactcgacaggatatttaacattatggtacttgtacattcttcaggatttggagaacccaaatttctgttgtatattagcgatcaacagagtcgaatgtaccagtgcataactttcttctcctgacactatgcctcctcgattcatttctg

SEQ ID NO: 118654 - DNA, 1875 bp, Zea Mays
aggggcagcgtggcagtgggtgtgcgggcgcgtgcatcaacgcagacgatccgggcgacttcacgttatcagttagcacgtacacgcacaccgccggcaccggcgtcgggagggacacctgtcgcccgccgcactctgacctccgcccccgccgcgcgagacgacagcgcccgcaccaagacgaggcaactcggcgagcgggacaggtgctgccagcgcgagcctcctcccacccaaccccaacaccaccaccaccagacaccagtccaccactaccactgaggcgagccggaggcgcacacaggcacagcacagtccgggcccgtgccttccaattcggtcgtcgcacacatcgattgagcccgcgcacgagcccatcgctttcgctttggcgtcttcgagaacccgcaagcaacctatatagcccgccgcgaattccgcctggcttcctcgtcgcccgcctcgtcgtcgcgccgcagtgagaggagggggaggcgatggatctcaacgaatgcgagaggagggggccggcggggccggatccgctgtcgaggcaggggtcgatctactcgctcacgttcgacgagttccagaacacgctcggcgggatggggggagggcttggcaaggacttcggctccatgaacatggacgagctgctgcggagcatctggaccgccgaggagagccaggccatggcgtcggcttcggcctcggcctcggcctcggtgtccgcgctgggggcagccgtcgacggcggggcggcgctgcagagacaggggtctctcgcgctgccgcgcactctcagcgtcaagacggtggacgaggtctggcgggacttcgtgcgggaggcgccgcccgggacggctggcggcgaggagccgcagcccaaccgacagccgactctcggggagatgacgctggaggagttcctggtcagggccggggtcgtccgtgacaaccctgccgcggcagctgctgctgtccctgcgcagccggttgctccacggccgattcaggcggtcagtaatggcgcctccatctttttcggcaactttgggggcgccaatgacgccggggctggagcgatggtgtttgcgccggtggggatcggggatcaggccatgggcaacgggttgatgcctggggtggctgggatggcaggtggtgcggtcaccgtgagtccggtggatacgtcggtggcccagctggattctatgggcaagagcgatgaggatctgtcatcgccaatggctccggtgccatacccctttgagggagtgataaggggaaggaggagcggtgcgggtgtggagaaggttgtggagcggcggcagaggaggatgatcaagaacagggagtctgcagctagatcccgtgcccgtaagcaggcttatacaatggagttggaagccgaagttcagaaactgaaggaacaaaatgcagaattgcagaagaagcaggaacaaataatggagatgcagcaaaaccaggtcccggaattggtcagcaatccatatgcacaaaagaagcgatgcctgcggagaacattgacaggtccctggtaactgagttgttgttgatcggactcgacaggatatttaacattatggtacttgtacattcttcaggatttggagaacccaaatttctgttgtatattagcgatcaacagagtcgaatgtaccagtgcataactttcttctcctgacactatgcctcctcgattcatttctgcaagtctggtagatttattgcacttctgcgccctcgtgctccttaatactccctgatgaacgactagtaactgtgggatttcataggaacagagatgcgtgtcaggattgaagtggtaagtttcaggattgaagtttg

SEQ ID NO: 118655 - DNA, 389 bp, Zea Mays
atgagattagaggctatttccagtcttgaccttgctctaggaataataggttccacatcatttctttcttttctagaatcgctagcaggatcaacccttatagttaccttacgaagaacaagtgccacatcaccagcatcacttgtagagtccgtagccaactccccttctgagctagttctgggaacaatgacagatctattattggagctaactccaaccctttgtggtgtgcttgggaccaacccggtagcttcagtatattaagaacaaatagaagactaataaggcatgtgaaatgcttcaaccattaaatgtgggaatgagtagatagatatgagcaggaacatacagggtgttgatttagtctctttgggtgcagaatctga

SEQ ID NO: 118656 - DNA, 109 bp, Zea Mays
caaataattagaaacaatcctagcaggtcaggtatttggaggtttatcactacaatagccgctctattgcccaaagggaatgcagcgaggctgaggaaaaaatctaggg

SEQ ID NO: 118657 - DNA, 1252 bp, Zea Mays
tccttgcaccagcggaggtccagcccgagcgcgtccgatacgtcctccgagctccatccggcccgccggagcgagtcggagcactggtcggccttgagcaggagcgcatcgagcactgcgtctgagtccaccacggggaccgccgcctcctcaccgtcgaacaccccggaggccgccacctcgaccatctccgtcacctccgtgtccctccacccgccctgcctcagcacgtggcccagccggtcaaggtagctgtcgacccagtgcgggttcctgggccacctagcaggcggtggcgatgcgcaccctgaggacagcgacgacgctgtggatgcatccgagaacgacgagttgcggcggcgatggtcggacgccgcgtcgctccagaattctatccagcgcggcgccttaccgcggcaggccgcgtcgaggctgcggcgcgtgcacggcgtggcgacggcctccccggcgtactgctgctgctgcgccaccggaggcggcggcgcccgcagatccggcggctggaagcaggagtcgcgggtgacgaagtggaggatgtcgaggccgcagcagaggacgcggtcgtcggtgacgaagaacaccgggttgccggcgaggcaggggcggcagggcaggaagcagcggtcgaagagcggcacgagcagcggcgcgcggcggatggcggagcgcgcgagccgcagcgcgcggtcggggtcggcggggcgtggcccccagcagcgcggccacagcgcgccccgtgcgatctgcagcgacgccgccacgatgggcatgtcgaacgcggagcggagccccgcgcacgagcgccagtcagcgaacccgggccccgacgggaggcccgcggcgaggacggcgcggaggtcgggcgggaacgcgaaccccatctcggcctcggcgtgcgccagctcgagctccgtgaggcccgggagcaccgccaccccggaggcccggaggtggcccagcaccgcagccgcgagcggggcgaaggagtgcagcccctgccgcggggaggccgacgccgaggacgggctcgccgcggcgcgcgtggaaaggcggcgcagccccgccgcgtgcgccgccggcgtgaggctggccatccggcggtcgacgtccaccattgcagccgcccaacgccgccgccaagcctcctgccttggacagaggagacgctgagctgtagctaaaggtcggttgggaaacggggaggcgggactgtatagtgggcctgtttctg

SEQ ID NO: 118658 - DNA, 1804 bp, Zea Mays
ggggtcgttgtctcgttccaaactagcctgaccaggtcgtccaacgactccgctcacccttcgcggtcgcccgcgcgatctctccaccacttccccgccggcgcctgctaggcgtccgcgaggagggccagcgatgaagggctcctcccactcgcaggcgggggcgcaggcggtacggaggcggcgctgggggtgtcttctgccgctcctcgttggcgccgccttcctcgccgagatcgcgttcctcggccgcctcgacatggcgaagaacgccgaggcggtcgagagctggaccacctccttttaccgccgctccgccgatttgggcgatgccgttggcgggggcgcagcctcgagggcaggcggcgacagcgaggacgaagagatccggctgtgcgagcagcggctcgagagggaggatgccgtgccctacgaccgcgactttgacagtgatcccgtgcttgtcggtggcgctgccaaggattggaataaatgctacgtaggatgtgaatttggtttttctgcgagtaagacacctgatgctacatttggaattgcaccagatccttctgtagatggtatcctcagatcaatggaatcatctcaatattattcagagaataatattgatgtggctcgagggtgggagagggtacaagattgtgatgacaaccagcctttcttcagacgtaccagttggctacttttcatgggctgaatatgatatcatggcacctgtgcctccaaagactgaagaagctcttgctgcagcctttatttctaactgtggtgcacgaaactttcgtttgcaagcccttgagatgcttgaaaacttggatgtcaaaatagattcatatggtagttgtcatcgtaaccgtgacggcaaagtggacaaagtggacactttgaagcgctacagattcagcttggcatttgagaattctaatgaggaggattatgtaactgaaaagttttttcagtcactagtagcaggttctattccggttgttgttggtgctccaaatattcaagagttttctccgggagaaggcgcaatattacatattaaggagcttgatgatgttgcttcagttgctaagacaatgaaaaatattgcttcaaaccctgatgccttcaatcaatctttgaggtggaagtatgatggtccatccgattctttcaaagctcttattgacatggcagcggttcattcatcttgtcgtctttgtatacatattgctaccaagatccatttaaaggaggaaaggactccaaaatttacaaatcgtccttgtagctgttccaccaaaaagggaacaatttaccacttatttatccgagagagagggcggtttaagtcagagagcatttacatgagatcaggccagttaactctgggagccttggaatccgcagtgctcggtaaatttaggtccctcaaccacgttcctgtatggaaggatgaaaggccaccgagcattagaggtggggatgacctgaaattatacagaatttacccagtcggtctaacgcaacgtcaggctttgtacggttttagatttagggatgattctgaactcgagcaatatatcaaagaccatccctgtgcaaagcttgaagtaatttttgtgtaactactatgccctaggcttaacgttttccccccgattcttactgaactctgtgtgcgagtttcagttgtactgtaatgtagagtgttatgtgtagcaaagaaactcatgccagtacggatcatgtgtcggttgtaaattttccatgacagtaaacatcattccttcttttc

SEQ ID NO: 118659 - DNA, 1847 bp, Zea Mays
ggggtcgttgtctcgttccaaactagcctgaccaggtcgtccaacgactccgctcacccttcgcggtcgcccgcgcgatctctccaccacttccccgccggcgcctgctaggcgtccgcgaggagggccagcgatgaagggctcctcccactcgcaggcgggggcgcaggcggtacggaggcggcgctgggggtgtcttctgccgctcctcgttggcgccgccttcctcgccgagatcgcgttcctcggccgcctcgacatggcgaagaacgccgaggcggtcgagagctggaccacctccttttaccgccgctccgccgatttgggcgatgccgttggcgggggcgcagcctcgagggcaggcggcgacagcgaggacgaagagatccggctgtgcgagcagcggctcgagagggaggatgccgtgccctacgaccgcgactttgacagtgatcccgtgcttgtcggtggcgctgccaaggattggaataaatgctacgtaggatgtgaatttggtttttctgcgagtaagacacctgatgctacatttggaattgcaccagatccttctgtagatggtatcctcagatcaatggaatcatctcaatattattcagagaataatattgatgtggctcgagggagagggtacaagattgtgatgacaaccagcctttcttcagacgtaccagttggctacttttcatgggctgaatatgatatcatggcacctgtgcctccaaagactgaagaagctcttgctgcagcctttatttctaactgtggtgcacgaaactttcgtttgcaagcccttgagatgcttgaaaacttggatgtcaaaatagattcatatggtagttgtcatcgtaaccgtgacggcaaagtggacaaagtggacactttgaagcgctacagattcagcttggcatttgagaattctaatgaggaggattatgtaactgaaaagttttttcagtcactagtagcaggttctattccggttgttgttggtgctccaaatattcaagagttttctccgggagaaggcgcaatattacatattaaggagcttgatgatgttgcttcagttgctaagacaatgaaaaatattgcttcaaaccctgatgccttcaatcaatctttgaggtggaagtatgatggtccatccgattctttcaaagctcttattgacatggcagcggttcattcatcttgtcgtctttgtatacatattgctaccaagatccatttaaaggaggaaaggactccaaaatttacaaatcgtccttgtagctgttccaccaaaaagggaacaatttaccacttatttatccgagagagagggcggtttaagtcagagagcatttacatgagatcaggccagttaactctgggagccttggaatccgcagtgctcggtaaatttaggtccctcaaccacgttcctgtatggaaggatgaaaggccaccgagcattagaggtggggatgacctgaaattatacagaatttacccagtcggtctaacgcaacgtcaggctttgtacggttttagatttagggatgattctgaactcgagcaatatatcaaagaccatccctgtgcaaagcttgaagtaatttttgtgtaactactatgccctaggcttaacgttttccccccgattcttactgaactctgtgtgcgagtttcagttgtactgtaatgtagagtgttatgtgtagcaaagaaactcatgccagtacggatcatgtgtcggttgtaaattttccatgacagtaaacatcattccttcttttcagtaacaaccgcaaacaaattaacacgtttcttcaagaattcatgcc

SEQ ID NO: 118660 - DNA, 111 bp, Zea Mays
taacaaactaattctaataatatgcatcaaagaaagaagaaacataccttcacggagatcatcaaggtggtgatggtcaaggagacgcgggccggcccgtagttagagtgg

SEQ ID NO: 118661 - DNA, 313 bp, Zea Mays
aattaccattggacaaaaacataacgagccaatttatggattaaacatttgagaccattttatgcactactataatgggaatattttatatgttattgtttcataatttttttgccgtatatgcatcctacttattggtttgtaacaaagttgaactgcaaagggtaaaacagacaatcgccacagaccaccaactttcagaagaaaaaaatcagtttacttgccaaacagttttaaaaataattctgattctctaggagaatcaggaggatcaactcctcacgaggatcaggatctgaagctaaagaaacag

SEQ ID NO: 118662 - DNA, 2138 bp, Zea Mays
acagtcaaaagctccccattcctcttccccttctcacccggcactcgaactctgcggccctgcaaaccctagctttcgctccatggccgacggcgatccggagccggcgccagcgccggcaccggcactggctaacgagaagctccatgtccgggcggcggcctacgtggatgagacgcgcccgccgccaccgctggagccctccgggggtccggacgaggagaagcgcccgcccgaagaggtagaagcggaggtggagatgcacccgccgcgggaaccaaccggggagccgcccgttgatcgcccgggggtggaggtggtggcggacatgaaggcgaacgaagtggagaaggaaaggggggatcgggcaaaggagaagcgggagaaggataaagggaaggggaaggaggagaaagagaaggtggacgaagaggcgaaggggaaagtgactgcggtgatgaaggtggatgggacggagaaggaggtcaagccgacccggcggccagctggggccagcgcggagacgcccatcctagcggtgccggtggtggccgtgccttgcttcatcgcgcctccagggtttgcgggccagtttgcaatgactcatcaagcagctttggcaagtgttacagcacaggcacaaatgcacttgcagtcaccaactccatctgcatgttcggaagtgccatcaagtccattttatatgacaccaagatctctagtgccattgcagcattcaccatcagtaactgaaggaaatatttgtacaccaattgctgacaagtcattttcatctgattcaaaatcacaccatgttgtaaatatggtagctgatggcttcaactggaggaaatatggtcagaagcaggtgaagagtagtgataattccaggagctactatagatgcacaaactctggttgtctcgctaaaaagaaggttgagcatttccctgatggccgcgttgtggaaatcatttacagaggagcccataatcatgaaccaccacagaagaccagatttgcaaaggaaagagtgactcctattagtgttccctctggaggcgaaaccttgaggcttgtgaacacagaaattgtagaatctagcacgcctacctgtgaattggaacggagtgccatctcagaaacttctgagcagcatctcttttgctcaagtgactgcgaaggggatgctggtaacaaatctgaagatgaacatcctagcgcggaagccctgccaaagcgaagaacacttgaggctacagcaccaaatttaacgccggttcgcagaactgttagagagcaaaagattattgtgcaggctggaaagatgagtgatggatacagatggcgtaagtatggacagaaaattgtgaagggaaatccaaaccccaggagttattaccgctgcacgcacggtggatgccctgtccgtaagcatgtggagaaggcgccagatgatgttaacaatattgttgtaacgtatgaaggcaaacacaaccacgacgaacctttcagaagcagcagcataccagtttctgtaatcagtccatcagcgacagccactgagcaacccaacacatcaagtacgtcagatgagagacctccaaccattacccagaaggacgccaacagtgagtctgataaggagacaaccttgaaatttggaggcgagaaggcactcgaatctgcgcaaacgctgctcagcatcaaaactaactccgatgacatgaagaactctgtcctgaaggaaacttctgctgcagttccagtccaaaacaattgagcatgctgagatagggtgattctattgacatctcttaggctgtcatatttattggttgagtgatatgctattatgttaacttgtatgacgtgaggcttggtgttcggtattccgtgtggagcatttgaggaagcattaggtttcaggaagccacgactggttgtttctgcctgtatagattcccattccctagtgtgtacaggtactgtattttatctgaggccagataacatgtgtggggtggttcttgagaacctgtgtgtgctgtattgttctagctcgatctattgcaatagctgatacgagattgtcatttatttatcggtataacacatcgtgcgtgccgtttgcagtt

SEQ ID NO: 118663 - DNA, 104 bp, Zea Mays
atgagtgatgatgttaatatacaagtgaattgtctacctctctccattagcttaattttttgggttgaactggttggtacatacaacttaatatggcatcaaag

SEQ ID NO: 118664 - DNA, 486 bp, Zea Mays
atgcgaaagcgacgcttggctcgtgtcgccatcgggtgcaagttggttactggctggacagcaaccgcacccttgggtagcaacagtggaggggatgacggtggtgctgatgttggagatggttcggtcgccacgcgttcccggcgcgtgtatacattggtgatgacacgcgttgaggcctggagaggcgggaatcccggcggaggacttcgcgtgcaggtgcctggcgacaaagcagcaggtgatgatgacgttgtcacgcatggcatggaagaggacgtcggcgaggcggcgcatggcgtgaaggtcgtcaagtctgtgcatggcgtggaggaggtcagacagcgtcgtcctggtgggatgtacagcgcgggtgtcgacacaagaggcggcaccgtggtgtctgctgacactccaagatccccgggaagagttcctgtaggaaaaagcttatgttgtggtccaataggatcaagcacagtgtga

SEQ ID NO: 118665 - DNA, 372 bp, Zea Mays
atgggagctctgtccaggtcacccgaaagacacattagtatgaaaatcccaattcatatgatcattaacaagtttattcaaggtgccagtgagcatggtggagggggtggacgtggactggagctcgttccaggtggtggaggtggaggcaatgctgaagctctaataggtgatgatgttggggcaggcggtggagggggtgcagcaggcctaacaggagatgaagtagatgcaaatagaggcagatgtgatgcagcaggtctaatggtagatgaagtagaagcaagtagtggaggtggtggtggtggtggtggtggtgcaggaggtttactgagagagcacctagaaggcggtggggaaggtggggattga

SEQ ID NO: 118666 - DNA, 2013 bp, Zea Mays
atgggagctctgtccaggtcacccgaaagacacattagtatgaaaatcccaattcatatgatcattaacaagtttattcaaggtgccagtgagcatggtggagggggtggacgtggactggagctcgttccaggtggtggaggtggaggcaatgctgaagctctaataggtgatgatgttggggcaggcggtggagggggtgcagcaggcctaacaggagatgaagtagatgcaaatagaggcagatgtgatgcagcaggtctaatggtagatgaagtagaagcaagtagtggaggtggtggtggtggtggtggtggtgcaggaggtttactgagagagcacctagaaggcggtggggaaggtggggattgaggtgtccctgacagtataagagatgaactcaaagcaggtggttggggggtcagcggttgtggtgcatgagaccttacaggaaaaggcctaggcataggtggaggtgggggtggcacaggtggaggttgtggtgcagctggcgctggagatctgaaagaagttggagatggaggcagatgataaatcctagaactgaaaactgatgatggtgggggcagtgggggtgggggtggagcagaagttggcaacaattcaattgtgacagtagttgaggatttctgatgatttgtggccggagtagtagttccaagtgactgaaatgtcaattgtctctctggatgagatggaaggcctacaacatgaaaacagtttaattataaaaaatacatgaaaattattcttaaaatgcattccgacttaacctgaattgttgagggtaggttgggatgagccttttgcttctgacatcatagtagaatctgataccagcaaatctagtggcgatggtggagggcgtagcagtggcataccctttgttacaacaggagtacctgttgtgtcaaaggtcaaagtagttgaaccacaacgattctcagcacttccagcatggtcttccaacagagctgtaattccaagggctgaaggtgcactattaaatcttggacaagctgaaagtaatctaggactggagtagccagaaagagcagggcatgaactagaaattggaaatcgctgtgacataattatagtgggaaaagagtgttggcctgaaccatgttgctcatcaagtttagcattttgatccttaagaactggatcaatagatttcatggtagagggaacagccttttccagtgaaattgactgttttgcgttactgtcaaccttgtgaactagagagccaggattttcttggacaacagaaattccagttttaacttcagaattagtggtttgctccaacaagaccaatctctcttggccaacattttccagtttgttcacatagactgtggggtgttcaactttgcttggttcttgttgaacattgtcaaaatgcttgtctattggagagattgaaccaagctctaacgattctgcttctttcttacttggggacaagaatccttgcctcagctgaatattttctgatgaagtaagtcgctggaaaagctggactgcagcatccccagttggatctagccagtccacattgctgaacatctcttgaacctttgcaaatgcttcaactggtaaaccccccttctctcctatacctgccacctccatgggacctaactgattggcagtgtccatttctgaaagaagaacctttaaccagaagacaaaacaaattatcgacttttgcataacttctagataaaaaaacactgattcactgcaacaaatacatacctcagctctgaattccttcgggaatcgatctttggcatcccacaatatatcgatttcatcacggtttaacatcagaatgttagatctgataaaggctgtattgaacatgactcggaacatcatctcttctcgttcttgatcaacatcaatgctaatgcattcaaggacaacatcaccttgaatatggcaatggatgtcaatcttaatcagttcacagtctgcctg

SEQ ID NO: 118667 - DNA, 2030 bp, Zea Mays
cgccattccgcgcgagatcagtagggtgcgcgtgctggtgctggctacggccatggcgacgcccaccagcaccgtcacccgcggcggcaacaggcattggcattgtacccaagtgcttccactgctgttgctagtaccactatgcttcgcgcttctggttgagagcggcggcatccccacgacgctggacgggccgtttccgccggccacgcgcgcgttcgaccgcgcgctgcggcagggcagcaacgacgtcccgctcacggatccgcgccttgcgccccgcgtgcagcccccggcgcccgagcagatcgcgctcgccgcctccgccgacgccgactcgctctgggtctcttgggtcacgggccgcgcgcgcgtgggctcctccaacctcgcgccgctcgaccccgccgccgccggcagcgaagtctggtacggcgagcgcagcgccgccgacgccgcatcctatccgcacgtggtcacggggtccgccgaggtgtacagccagctgtacccgtacccgggcctgctcaactacacctctggcgccatccatcacgtccgtctccgcggcctgcgccctgccacgcgctactactaccgctgcggcgacagcagcctccccggcggcctcagcgacgagcactccttcaccaccctgcccgccaccggcgccggatgctacccgcgccgcgtcgctgtggtaggtgaccttggcctcacggggaactccaccgccaccgtcgaccacctcgcccgcaacgacccatccctggtcctcatggttggggacatgacctacgcgaaccagtacctcaccaccggcggcaagggagtcccctgcttctcctgctccttccccaaagctccgattcgggagtcctaccagccaagatgggatggatggggaagattcatggagccgattacatcgaagattccgctgatggtgatagaggggaaccatgagattgaaccgcagggtcacggtggagaggtgaccttcgcgtcttacttggcacggttcgctgttccatccaaggagtctggatccaacaccaaattctactactccttcaacgccggtggcatccattttatcatgctcggtgcctacatcgactacaaccgcacaggagttcagtactcgtggttggaaaaggatttgcagagggttgatcgacgagccaccccttgggtcgtggctgcttggcacccaccttggtataacagctattcctcgcactaccaagaattcgagtgcatgaggcaagaaatggaagaacttttatatgaatatcaggttgacattgttttctcaggacatgtacatgcatacgaaaggatggaccgagtatttaactacacattggacccctgtggcccgatttacatcggcattggagacggcgggaacattgaaaaaattgacatggatcatgctgatgaccctggaaagtgtccctcaccaagtgataaccaccctgaatttggtgggctctgccatctgaacttcacttctggccctgccaagggcaaattctgctgggaccgacagccagaatggagtgcatacagagagagcagttttggtcatgggattctagaggtcctgaattcaacatatgccttatggacatggcaccgtaaccaggacgcatatgcagagaacagtgtgggagaccagatctacattgtacgacagcctgacaagtgccttctgcagccagctagtgcgtcgtctctcaattggtgatttgatttgatgacaaaatttctgctattatgtattaattaatatatattcatatccattagattctaagttgttcactatcttggttatttgttttagatagccccattggaggatgcccttctctagtgagtagtaacagctccggtgggtccattacaaatggccagctctcctacaaaatgtttgtaattatgtgtgtagctttaatgtgaaagagttaggtggtctgagcagtactcatctcctttttaatataatactttagggttgtttt

SEQ ID NO: 118668 - DNA, 2014 bp, Zea Mays
cgccattccgcgcgagatcagtagggtgcgcgtgctggtgctggctacggccatggcgacgcccaccagcaccgtcacccgcggcggcaacaggcattggcattgtacccaagtgcttccactgctgttgctagtaccactatgcttcgcgcttctggttgagagcggcggcatccccacgacgctggacgggccgtttccgccggccacgcgcgcgttcgaccgcgcgctgcggcagggcagcaacgacgtcccgctcacggatccgcgccttgcgccccgcgtgcagcccccggcgcccgagcagatcgcgctcgccgcctccgccgacgccgactcgctctgggtctcttgggtcacgggccgcgcgcgcgtgggctcctccaacctcgcgccgctcgaccccgccgccgccggcagcgaagtctggtacggcgagcgcagcgccgccgacgccgcatcctatccgcacgtggtcacggggtccgccgaggtgtacagccagctgtacccgtacccgggcctgctcaactacacctctggcgccatccatcacgtccgtctccgcggcctgcgccctgccacgcgctactactaccgctgcggcgacagcagcctccccggcggcctcagcgacgagcactccttcaccaccctgcccgccaccggcgccggatgctacccgcgccgcgtcgctgtggtaggtgaccttggcctcacggggaactccaccgccaccgtcgaccacctcgcccgcaacgacccatccctggtcctcatggttggggacatgacctacgcgaaccagtacctcaccaccggcggcaagggagtcccctgcttctcctgctccttccccaaagctccgattcgggagtcctaccagccaagatgggatggatggggaagattcatggagccgattacatcgaagattccgctgatggtgatagaggggaaccatgagattgaaccgcagggtcacggtggagaggtgaccttcgcgtcttacttggcacggttcgctgttccatccaaggagtctggatccaacaccaaattctactactccttcaacgccggtggcatccattttatcatgctcggtgcctacatcgactacaaccgcacaggagttcagtactcgtggttggaaaaggatttgcagagggttgatcgacgagccaccccttgggtcgtggctgcttggcacccaccttggtataacagctattcctcgcactaccaagaattcgagtgcatgaggcaagaaatggaagaacttttatatgaatatcaggttgacattgttttctcaggacatgtacatgcatacgaaaggatggaccgagtatttaactacacattggacccctgtggcccgatttacatcggcattggagacggcgggaacattgaaaaaattgacatggatcatgctgatgaccctggaaagtgtccctcaccaagtgataaccaccctgaatttggtgggctctgccatctgaacttcacttctggccctgccaagggcaaattctgctgggaccgacagccagaatggagtgcatacagagagagcagttttggtcatgggattctagaggtcctgaattcaacatatgccttatggacatggcaccgtaaccaggacgcatatgcagagaacagtgtgggagaccagatctacattgtacgacagcctgacaagtgccttctgcagccagctagtgcgtcgtctctcaattgatagccccattggaggatgcccttctctagtgagtagtaacagctccggtgggtccattacaaatggccagctctcctacaaaatgtttgtaattatgtgtgtagctttaatgtgaaagagttaggtggtctgagcagtactcatctcctttttaatataatactttagggttgttttactctcggcgggtcgaaatttttttgtgtagctttaatctgcacagttgaaggaacatttcataccaccattacttttcttgatttt

SEQ ID NO: 118669 - DNA, 2152 bp, Zea Mays
cgccattccgcgcgagatcagtagggtgcgcgtgctggtgctggctacggccatggcgacgcccaccagcaccgtcacccgcggcggcaacaggcattggcattgtacccaagtgcttccactgctgttgctagtaccactatgcttcgcgcttctggttgagagcggcggcatccccacgacgctggacgggccgtttccgccggccacgcgcgcgttcgaccgcgcgctgcggcagggcagcaacgacgtcccgctcacggatccgcgccttgcgccccgcgtgcagcccccggcgcccgagcagatcgcgctcgccgcctccgccgacgccgactcgctctgggtctcttgggtcacgggccgcgcgcgcgtgggctcctccaacctcgcgccgctcgaccccgccgccgccggcagcgaagtctggtacggcgagcgcagcgccgccgacgccgcatcctatccgcacgtggtcacggggtccgccgaggtgtacagccagctgtacccgtacccgggcctgctcaactacacctctggcgccatccatcacgtccgtctccgcggcctgcgccctgccacgcgctactactaccgctgcggcgacagcagcctccccggcggcctcagcgacgagcactccttcaccaccctgcccgccaccggcgccggatgctacccgcgccgcgtcgctgtggtaggtgaccttggcctcacggggaactccaccgccaccgtcgaccacctcgcccgcaacgacccatccctggtcctcatggttggggacatgacctacgcgaaccagtacctcaccaccggcggcaagggagtcccctgcttctcctgctccttccccaaagctccgattcgggagtcctaccagccaagatgggatggatggggaagattcatggagccgattacatcgaagattccgctgatggtgatagaggggaaccatgagattgaaccgcagggtcacggtggagaggtgaccttcgcgtcttacttggcacggttcgctgttccatccaaggagtctggatccaacaccaaattctactactccttcaacgccggtggcatccattttatcatgctcggtgcctacatcgactacaaccgcacaggagttcagtactcgtggttggaaaaggatttgcagagggttgatcgacgagccaccccttgggtcgtggctgcttggcacccaccttggtataacagctattcctcgcactaccaagaattcgagtgcatgaggcaagaaatggaagaacttttatatgaatatcaggttgacattgttttctcaggacatgtacatgcatacgaaaggatggaccgagtatttaactacacattggacccctgtggcccgatttacatcggcattggagacggcgggaacattgaaaaaattgacatggatcatgctgatgaccctggaaagtgtccctcaccaagtgataaccaccctgaatttggtgggctctgccatctgaacttcacttctggccctgccaagggcaaattctgctgggaccgacagccagaatggagtgcatacagagagagcagttttggtcatgggattctagaggtcctgaattcaacatatgccttatggacatggcaccgtaaccaggacgcatatgcagagaacagtgtgggagaccagatctacattgtacgacagcctgacaagtgccttctgcagccagctaccccattggaggatgcccttctctagtgagtagtaacagctccggtgggtccattacaaatggccagctctcctacaaaatgtttgtaattatgtgtgtagctttaatgtgaaagagttaggtggtctgagcagtactcatctcctttttaatataatactttagggttgttttactctcggcgggtcgaaatttttttgtgtagctttaatctgcacagttgaaggaacatttcataccaccattacttttcttgattttataattgtagagcggcagaatgcaagatgcaccttactgaatattatactgcaaggtttgttgagtctttttttgtgtttattatcgatttattgtaaggaggcaacaatctttgttttattgttgtataaagaaatgtgaaacaatagcatttggtacat

SEQ ID NO: 118670 - DNA, 129 bp, Zea Mays
tcaaaagttgaattcaaacttaattgcgaatttaaacttattttaattatgcaatttggtcaaaccctcgtagcaaggttttatttatcccatattttgtttagtttccttcacttctccaaattctag

SEQ ID NO: 118671 - DNA, 106 bp, Zea Mays
gtcaatgtcttattgctggtttagatttgttttggttcattttaatccatttcatccactgcgatcccacaaattcaatttccaaaatagatcccatgaatgttca

SEQ ID NO: 118672 - DNA, 162 bp, Zea Mays
tttattttatatataagtaatatattgtttagtggcagcgagattatgctgccgaaattttattcgggtcctgctagctagcttgtgggtttagaacctatccttgcttatacatgtaggaccgatacccttgacgaagttgaataatgttttcacgatatg

SEQ ID NO: 118673 - DNA, 592 bp, Zea Mays
ttttttttctcctttgaagcatgttcgatcggcatgattagagatggcaatgggtacccgaaacccgaaacccgatgggtttttaccctattagggtacgggtttgggtcaattttcatacccatgggtttgttaatgagcataaatctatacccagcgggtttatgggtacgggtttgttcctatagtacccaaacccgtgaacccgtgggttttttaaacccgaccaaacctagtgcatattgtcattttattttataaacgaacaacaaacttgttattccttatttacttcataatttttatcaattggtgaatgtatcagtagtcggtgagagtgttgcttgcttgctattatagtttttactagcgttatatatgtggtggatggataacttagtgcaaggtcacttaattatacaacttattatttgtatttcattttctctactaataatttttataccaaatcatgaactcgttgttcattacataaattttggatcatgatatcattaatcattacgatacttattgattatgagaagaacaagtatattggagatgaaacccgcgggtaacccatgggtac

SEQ ID NO: 118674 - DNA, 752 bp, Zea Mays
gagtagcagtattaacagacagtcatcacgatggccaccggcgacgacagaaaggacttcctcttcttcattgatgtggtgacgaatgaaatcaagcaatggggacggggctctctaggccattcgggacaaacgactggaacacgtccccttatcctccaaacgggaaccccgggctggagctctccagcgagaagagcaagcttgctgaagggccgcaggcttggaacatctagattttgttttgctagggggagcgctatgtgagggtgggcaggttgctcaggtcaagtgggttcacggttgcgagcttcatggagagactatcgagagcagttgtgtcttgcaacattctttgatcaagattgatgagggcaagatcagtatgccgaggatgggcccgggttgtagcttgcgagcagcaatgctagatctgctcatcatgaaacccatcatgactaatgcctttatctgccatttaagtgtacattggattctttgtatgtttgctgcttactgtgcaaaatggcagctaaaagaagccctaaagcatgcgagctgcactcagacctctaccggtttagtggccaaactggctgttactacgtttcaggtgttttatctgtaaaatttattctgttctttttcttgttactcacttatttatgaacaatgaagtttatatgtcactaaatttagtgctagaatgcagatctggcatgtttggggactaacctgcactattggttgtt

SEQ ID NO: 118675 - DNA, 516 bp, Zea Mays
atggctgctgcttggaatctggatggacagattgacatggtgaaggtggtagagccactgcaggctatgattatgggttcacctttagagaatgcaagacaaggcccagagaattcttgcctggaggcagtatttttgacatcctttacaatagacgaggaatttttcagctgccggatgactagaattgcatcttatgtgtccaatggaatgaattacttccatcggattaatattgttcatatggagttgaagactgcaaaccttcttatggatgatcaggaaatagaagtctactaccacactcacttctcaagaaagtggactcttagctttggaagcaagtattatgagttgtacagaactactgatgaagtttgatttttgatagttaccatgaggttggttgtgtatatttttgaacttaatgttcatcactggaagttgatcggctagcacaaagatggcaatgttttctgttaggtacttatcagcatacacacacatgattcttgc

SEQ ID NO: 118676 - DNA, 699 bp, Zea Mays
ccgctatttttttgctcgccctccaacctcctgtgcactcactctgcccctcctcatcccttccatcaggatccctgaagtccacccgatccaaagctagttaagggagaatggtggaggaggctgccatggaccggggaggcggaggctcccatcgatggactacgacgaggagtcctcgcgtgcctcccccttgacacagagtcgatggagaggctggagctcggtggggatagggactggtacatgaaactgatggagcgaccaagtgaggtggactgcatttactacgttcgcttgggctcatgtggctacgaggagcgctgccactacaaccaccccggctgtgaccacgatcatgttgcatcaaaaaatactcatcatatatctcagtgccccaaagtgagaaataaagaggagagaaagaaaaaggaatttgataagtcttctattgaagccagttttgttgaaactttggatagtggaaaagctttgtttgttgcctctgttgaaaaaccaattcagggcgataaacgacgacgagatgtcgatcttgaaggggaagctctaccttcatttcacggtggagttctggcaccggagcagtgcaaggctcttgagtcggtacttctaccaaagctttcgtccaagcggatatacatggagatagatgaatgtaaggagacaaccatgcattga

SEQ ID NO: 118677 - DNA, 112 bp, Zea Mays
ccataaaatttcagtgtaagaaagattttaaggcgccttttggagatgctctaatgttccaaatgcttttcttcattgtttcaacgctaggaagattatcacagagtttttc

SEQ ID NO: 118678 - DNA, 899 bp, Zea Mays
cacgtccagattgggaattccatcacgcctcgtcctctccgtcccgaccagaatcatcgcttcttcctgctccggcgatatccgccgccgcctgcggtccggccgagatggggagcacttcctctatgctcacccaatacgatatcgaggaggtccaggaccattgtaaccacgcattctcgcagcaggagatcgtatcgctgtaccaccgcttctgccagctcgaccgtaacggtggtggcttcgtctccgctgacgagttcatgtcggtccctgagttcgccgtaaatcccctctcccagaggctcctgaggatgctggatgggctcaacttcaaggagtttgtagcatttttgtcagcttttagcccccgcacaagcctgcagcaaaagattgaatttattttcagggtttatgatactgactgcaacgggaaggttgcttttgatgacatcttgagcatcttgcgagatctgacaggttcatttatgacagagcaacagagacagaaagtcttgattcatgtgttagaagaagctggatacacaaaagattcacattttacactcccagactttatgaagattattggcaattctgagctcaagatggaggttgaagttcctattgactaaaaacctaacaagcatcatctagttgcttcaggcctgtatcttcatttgtgttaaattaagtagatggtatatttatatccttgcaactcaaatcatgatcagagatgtaattaaggaaacatatgtacctgctatttggaggtttagttggctcgcacttatacacaacgcttgttatacgccgtgatatcttccagataaccttacggatgtaaggttcactacaaatgtgtcaaaaaaaattaaatgatcaaggcattactg

SEQ ID NO: 118679 - DNA, 991 bp, Zea Mays
cacgtccagattgggaattccatcacgcctcgtcctctccgtcccgaccagaatcatcgcttcttcctgctccggcgatatccgccgccgcctgcggtccggccgagatggggagcacttcctctatgctcacccaatacgatatcgaggaggtccaggaccattgtaaccacgcatgtcagtcgctaactctgacacctaattcgctcccctgatctggtctagtctgatctaatctggtgcttcgccgtcgcggctatcggcgctagtctcgcagcaggagatcgtatcgctgtaccaccgcttctgccagctcgaccgtaacggtggtggcttcgtctccgctgacgagttcatgtcggtccctgagttcgccgtaaatcccctctcccagaggctcctgaggatgctggatgggctcaacttcaaggagtttgtagcatttttgtcagcttttagcccccgcacaagcctgcagcaaaagattgaatttattttcagggtttatgatactgactgcaacgggaaggttgcttttgatgacatcttgagcatcttgcgagatctgacaggttcatttatgacagagcaacagagacagaaagtcttgattcatgtgttagaagaagctggatacacaaaagattcacattttacactcccagactttatgaagattattggcaattctgagctcaagatggaggttgaagttcctattgactaaaaacctaacaagcatcatctagttgcttcaggcctgtatcttcatttgtgttaaattaagtagatggtatatttatatccttgcaactcaaatcatgatcagagatgtaattaaggaaacatatgtacctgctatttggaggtttagttggctcgcacttatacacaacgcttgttatacgccgtgatatcttccagataaccttacggatgtaaggttcactacaaatgtgtcaaaaaaaattaaatgatcaaggcattactg

SEQ ID NO: 118680 - DNA, 944 bp, Zea Mays
gaaatacccgccgctacatcctactgctggacatctaagggcccacctgaaaaaacccttgcgccgctgagctgagtctccttcctttctcccgtcgcctccgcctccgccttcagtttagcctccaagcaggggcgccgcgcggggtattctgtccgtcgttgagggtagagagtcacttgcaccgggggagcggagatgaagccggttgtggggatcgtggtgtcgaacaagatgcagaagtcggtggtggttgcagtggaccgtctcttccacaacaaggtatacaaccgctacgtcaagcgcacctccaagttcatggcacacgacgatgacgactcctgcaacattggcgaccgggttaggctggatccttctaggcccttgagcagacacaagcactgggttgttgctgaaattctccgcagagctaaggtgtacgttccaccagctgcaacagcgtccagtgaacgtggtagcaaatctcaacaagctggtggtgctaccaaatgatccatctgaagttactcagaacaagatgcagtcacggcttgtttttctttcgctgtatgtttgtttccttgtggaatgtggttgccatgtttagcatgggagaaaaaatagcaagcagccagcatctttgcttaattactgttgttcttctgtggtgtccttcgtttaacggtactagccattaaggatgtagttaccagattcaacaagaccaatggattcatattgtattggttcacttccgatacccgcttgcatttgcatgtatggttggcagctgtctttgcaactcccctctgacactgaattgagcgggcggaaaacatcagagtgcataatacatgtcaaattgactggttgagtcgttattgtaaaataatgagaagtatcgagggttccattcttatgtgcatgatcgaatttaccacata

SEQ ID NO: 118681 - DNA, 276 bp, Zea Mays
atggaagaacagttctccatttttaaccaaatgaaaatttctagtaccgcagcatatagaatacagatcacgcgccaaccaatcaagagagataatccagtactacccacctgcatgatggtgtgctgtggtccggcacctcaagcgaatgctggcaactccggatttagatgcgtgactagaagcagcggaggacccagtgaagaagattgggtgcacaccctggcggtgctcgccgccgaagaagacctggcgaagggtctgacggagacctga

SEQ ID NO: 118682 - DNA, 115 bp, Zea Mays
ctaattcatgtttttcttttctattttgaaattttagttctccaacaaattcaaatttcaaactttaaagtaaatgcacaaacagaggtccaacatgggacgcaaatattttaaa

SEQ ID NO: 118683 - DNA, 3936 bp, Zea Mays
caaacctccccgtcgcggcgccctccccgccttcccattcccggccccgcccgcccacatctagtctcccacctcgccctcgcggcgccggtgtagcagccatgctagtctccgtcgccgccgacgactccggctggcaggagtccccgtcgcaggccgtcctcttcgccgacgagatcgctgccgtccgcgctgtcctgggcgggaccctctccgaggccagcatcattgccgcgctctcccagtgcggtggcaacgctgagcgcgccatcaacgcgatcctcgacgacgccgaggtcgtttccgcccccaagcgggccaaggtcgagctcgacgtcggtggtgttccggtgcaggtgccggtagctgtcaaggtgaaggccgaatccatcgacgtcggggccgtggcgccggcagctgtcaaggtgaaggccgagcccattgacggcgatgtcgtggggagccaacaatccgatggctcctccgcgaaggccaccgccaagatgaagagcgagccggccgaatggtccgccaagacacccgaccgattcgtccccgacgcgcgcagtgtaggtgcgcctgtggcggtggcgagcgccggcgccggcataagcatcgtcccgcggcagaataagaggccgaggcaggaggtggggaccatcgaactcactaccacgcacccggtgccgtacctcaactcgcggcccatccgggcgctgccacccatgccacccatgggcggggacggggaggtgtacgacccgaagcctatccagatggtgccgcccctggaaatccagatgcacgatccgaggaccaccctacctgcgccgtcacccatcgacatcgagatgtaccaacaaccgccgcggccgccgcccgtggacgtcgagatgtgcgagcagaggtcgcggccccggccccggcccctcagggcggttgtgcctgcctcggtgacggacatgaggatggtggtggcgccaccggacggcgagtttggcgacttccctgtggagcgcgactggatgctcgtcggcaagtcctatgtgcccgggctgtccaccaaccgtgggaggaggaggttggacgctggggagattgtccatttcgccttcccttcgtacgagaagatctatggcgggttaaagatgactgccaagaaggcggcggctctggcacagattgttcgcttttccaccaaacgagccggagagattgggaagctgtccccagagtggacgcaatgccttgtcccgcttgtcaactcgtccaaggtgaagattcaggggaagctcgtgttcccaacaatggagctgaggctgatgcaggagatattgctctatgttagcttctacatccacaaatctgtgctagccgaaatggacaactcaccctgtgacatgctcgatcatgcaaatgttgatttcactcccagtcctctccataaattgcttagtttgctcaacctaaagccatccaacaaggatgctttctcccttgacgatctcaccactagaaagctgaagcaaattctaaggggtaacaataataatggtgatgattctactccggtgcttggccatacatttctcgagcaaggcgctgatgagcaggcgatttcagaggctgccttgaacaaacttgttggcactgctgaaacatttgacttagaggaagcagagcctcccactacccttgtctctgttctaaagccataccagaaacaagctctcttctggatgtctaaattggagaagggaattgatgctaatgaagagacaaaaactcttaatccgtgttggagtgcctacaatattgcagacaggagagctcctccagtctatgttaatctttttactggtcaagcaacaacacaatttccaagtatgactgagactgtaagaggagggatactagcagacgcaatgggtcttggcaaaactgtgatgaccattgctctgatactttccaatcctaggggggagttctctaactgtataaaaggagacacaaggtatctaggagatcgtgcgaccagaggatacacctcaacatcctctgtgagaggaggtacccttgttgtttgccctatgtcattattgggccaatggaaggatgagttggaggcacattcggcacaaggagctctttctgtgtttgtgcattatgctggtgataaaactagtagcctcatgctgatggctcaacatgatgtcgttttaacaacctatggtgtcctctcagctgcatgcaaaacggaatgcaacagcatttttcacaggatggattggtataggattgtgcttgatgaagctcacacaatcaaatctcctaaaactaaaagtgcccaagcagcttatagattaaagtcggaatgcagatggtgccttacaggcacaccattgcaaaataatttggaggacctctacagtcttctctgcttcctacatgttgaaccatggtgcaatgcaaaatggtggcagaggcttattcagaaaccttatgagaatggtgatgatagagggttgaaacttgttagagctattcttaggccactaatgctaaggaggaccaaggaaacaaaagacaagattggcaatcccatactggttctacctccagctcgtattgaagttgtagagtgcgaacaatctgaacatgaacgtgatttctatgaagcacttttcaggagatcaaaggttcagtttgacaaatttgtagcacaaggcagtgttctgaacaattacgctaatattctcgagttacttctccggctaaggcagtgctgcgatcacccttttctggttatcagccgagctgaccctaaaaagtatgctgacctcaaccagcttgcacagcaattccttgaaggggtgcagcagagttcgtctggaagacagaacgtagtgccttcactggcttatgtagaaggggtcgtcgaggaaattcgccagggtgctacgatggagtgccctatctgtctcgagtcagcttcggacgatccagtgctcacgccttgcgcacaccggatgtgtggcgaatgccttgtttctagctggaggactccagacggagggccatgcccactctgtagacgtcacatcagcaagtctgacctgatcatactgcctgctcagagtcgtttccaggtggatgccaagaacaactggaaggactcgtgcaaagtgaaaacgctcgtaacgatgctggagagccttcagaggaagcaggagaagagcatcgtgttcagccagtttacttccttcttcgatcttctggagatccgcttcacccagaagggtatcaagttcttgaggtttgatggcaagctgagccagaagcacaaagagaaagttctgaaggagttcagtgagagccaggacaagctggtgctaatgatgtcgctcaaggctggaggtgtagggctaaatctaactgctgcctccaacgtttttatgatggatccgtggtggaatccggctgtggaagagcaggctatcatgagaattcaccgcattgggcagaaaagagaggtccgagtcaaacgcttcatcgtcaagggtactgtcgaggagcggatgcagcaggtccagatgcgcaagcagaggatggtttctggggcgctcaccgacgaggagattcgtggcgctcgcattgagcatctcaagatgttgtttaaataaatgatcattgccgatgtgtatagctgacgctacgccgttgatactttggtagtgtcaagtaggttgtcgagggcatgtttggtaggagtaagatctgggtttagaccattgtagatggggatggccggatgggagtgggtggaaccttgcccttccgatatgacggtcttcctttctaacgtgaatcagactggcatagagaatgggcattttggaaaacatgactacgataaatcacttttctcttgagtct

SEQ ID NO: 118684 - DNA, 860 bp, Zea Mays
tcagaccttactggtagtttgccggccgatgttcttatgggcttcttttgtatataggatgtcactcggggaattcatttgcaacctggaattttagatcagcatagatggctgccaatggccagtgggcagtattcatctaagtcagcttatgatcgctacttcgctggttccgtttattttgaactgttcgagcgaatctggaggacctgggcacctcagaaatgcaaattctttacctcgctagcatcccttaataagtgttggactgcggatagactggctcgtaggggattggaccatcctgatgaatgtcttctttgtgattagcaagaggaaacaacacaacacattctggtggcttgcatttttgctagagacatttgggcccagattttgaacaaggtgagattgctgcctttggctccagaaataacagatgtggttttccaagattggtggaggaaggctgagcagaaattgccaaatagtcagagaaaggggtttaattccctagttatctgggtgtcttggcggttgtggaaacaaaggaatgcttgcgtgtttgatgaggtacccccgagtatccgcaacattttgcaagagattcatgaggatgttaagctttggggaatggcaggagcaaaagatatcagacagttgtggccttaatttagatggtgtggtgggggttgtccccctttttcctcttgtttctagtttcttttatttttcttcttctctttttttcttttttgtccccctcttctcgtttgctgtcttctcgggcactttgttttcttggtccacttgggacctttctttcctcttaatataatgacgcgcagttctcctgtgtg

SEQ ID NO: 118685 - DNA, 618 bp, Zea Mays
gtgatgggttcaaatagattgttgtcatcacaattacttgatgaatcatcatctgatgacgacgaggatttcatactttctgctgcgcaaatcattcatactgtttcacaagttcgtagaaatccaggaggctctgttccaggccgtgcatatatttatcgagatagagaagcgggacacgcgagattgtaccaagattacctggctgacattcctacttatggcccaaacttgtttcggcggagttggctgcaactcaactggtgtttcagatacatcctcacaagtttcaaaagctccattgacaagattggtaaaaaccaaactttcattaccaccacctacatggaggcacaaatgtgcaatccagtggcaattgcaacctcaaagtcctcattacaatccactagtcagttgttttctgaagctttgagcgacaagctaaagagacagtcgatgaaactgagacagtgccatcaaattcgagttttaacgaggcagttcctccaggaaatggtgaagaaaaacataaaaggctttcaagcagtgcaaacgcagatgaccctgaaacatgtacagcaaataaagtaccaaacaatagagtccgtacggtcgtag

SEQ ID NO: 118686 - DNA, 3089 bp, Zea Mays
cctcgacctcacccccgcccgcggaaatctcgcccgcgagatccctctgcccacacaccgccccctctgctctccgtcgatggaagggcgccattaacacaccgcgatcctcgctaccgcccccacgaggccataccatgccctcgccccctcccagatcttcgaagaggccgccaccccgcccctgttcttggcccctcgtcggcgtcggcctcatcgcggcacgggctgcactccttcgccccgctcacggccgcggtgcttggccacctctgggcctccggggtggcggtgctcccgggcctgacagagctagagttggtgcgcaccaaggctgagatgtggtttgcgttcccgcccgacctccgtgccgtcctcgccgcgggcctgccgtcggggcccgggttcccggactggcagtcgcgcgtggggctgcggtccgcattcgacctgcccatcgcggcggcgtcgctacagatcgcgcggggcgagctgtggccgcgctgctagggcgtgcgccccgccgaccccaaccacgcgctatggtctgcttcatctatggcgtggttcctgttttgcctgcctcttgctcctatttgaccaccatgcgcgccgcgaggaccaccactaggtggagcgtgtctccgtggtcttcttcaccgaccacgaggctgctgagaccctaggggggctcgacctggacatcatcgcagtgctccccaccgtcaggtgccatcgtcggtcgaggtccgtgactaagtgtgacgtgtacctgggcgagttcgcgcacagggagcggctcaagcagttgtctctcttccagatcccctacctcctctttgttccctcggcttagccaccaccttggccggtgctccttgcacgtcgggataggaggatgccgaccaagttctagatgaagagcaactgatttgcttcccttggatggattccactgttgagccattcaaaatttgagatgcggattaatttttacaattcatgttttcagatttaccttccaattttcttagtaataataataatgtataggtagtgcaccatgttttgattctaatctatcttgggtcacctgttttataccgaggtaacacctgttttataccgagataattagtatgtattctgagcttcaatcattgttctttatggtgagattcaatgtctccagttaattcattttgtaaattttaggttacagaatgtctctcgagtgtgctagagatgctttgctgcaaaagaccatggacaacaaagaaaatacaagtgaattattttcccgatctcgtgataagctcagagttgatctcatgaatatttctatgactactcttagttgaaaaatactttcccaagacaaggagtactttactaaacttgtgattgatgttgtcttgaggcttaaggtgtacaaatggtttaatgaaagttggttatcatttacattgaactatgatatcttcatctataaaattttactcttcaaaaaggtagcacccacttggaatctattgaaattctgaagatacatggagaatctcttaaggactgggatgtgccaactgccgagacttgcacacgtcacaaattaaagctgtttgcattgccggctaaccaagctccagggtataaacttcataattagacattctagatcttagttggccgacttgatcataagccactacccaaagcaaaaaaaagtatattattgaagatgcaactctcccctatatttgagagaagatgaaggatatatcagtgtgtttggtaccctgtagctcctcgtcgacctggtgcaacagcttaagctcaggaagaatgctttacaaatccgaatataagttcagtacgatagtgcaaatagagagcatcaggtactccttaggttcctattgacgtttaattgtcctaatgaggttgatccatgttctattacgaattgtatgtgtgctattttcccacaattttctaatcaaaatattcagcacaaaaggatgacctcgtatatgggatattcaattaattgtccatgaaatttgacaaaattagaaaaatgaaaaatatagcaggcctgtagatctgagcaaatgatatgaagtaaatgttgttactttctcaaaacgtagatgagctttttttgcaaggactttagttgaaaattggaaaatctaacatgcctgtagatctgagaagacgatatgaagtacatgttgttactttcacaaaatgtagatgagcttttttgcaaggacttcagttgttatgttgctcctcattaacactaaaacttaacctgcccgggttacaattatacatctcaatccagatcagccttttcattgttctggttctgctcatttatcctttctagtcacataaattcttgccatttgacaccagcactaaagaagatagggagagttcaatgcatgatgtttgttttgttgacactggaagaggcgactaattgaggcggttgtcattgccaccggtgtgcacacattctttgtcaaggccgcatatcttgtcgattcaacaaaccaagttggtcattttcagaaggcaagctaagtgtgatgccgccacataagaccatgcccactgtatttatattttatactaatttttaacgtccaaaggacaccagatgtttcaatgttaatggtgctattgttatacactgatgttttgttcctgtttgcttgcaactttttgcagctgttcatgctatcggtttggaaagaacatgtggaaagccaatctcggatcttgcttccttcagggattgtctccatcctcttgatagcgatctatattggttatttccgaagaagaatcaagaagcaattcaacattcatgcaagtgtggtaccagattgagatatgtctgttagtttgtaacaatataaacttgttagttatgtgtcagagaaaacatagtaacaatgatttgtgctctatttctacccgtcattgtgtcctatctcaatggtgacttctttgtacacaactgtgtggtctctctatgtcctaataaatacatgcatcatcaatgaacttaatgg

SEQ ID NO: 118687 - DNA, 1008 bp, Zea Mays
agaacaacacctcctatttctcaataagttaatctgccacattgctgattaagagagcaatgatcgccattcctatgaaaactaaagttaaaggttgtttaaattaaaggggtccgaacgtgtcttgttacctggactgatcctatttgcaggatgtgccaactgccgagacttgcacacgtcacaaattaaagctgtttgcattgccggctaaccaagctccagggtataaacttcataattagacattctagatcttagttggccgacttgatcataagccactacccaaagcaaaaaaaagtatattattgaagatgcaactctcccctatatttgagagaagatgaaggatatatcagtgtgtttggtaccctgtagctcctcgtcgacctggtgcaacagcttaagctcaggaagaatgctttacaaatccgaatataagttcagtacgatagtgcaaatagagagcatcagcactaaagaagatagggagagttcaatgcatgatgtttgttttgttgacactggaagaggcgactaattgaggcggttgtcattgccaccggtgtgcacacattctttgtcaaggccgcatatcttgtcgattcaacaaaccaagttggtcattttcagaagctgttcatgctatcggtttggaaagaacatgtggaaagccaatctcggatcttgcttccttcagggattgtctccatcctcttgatagcgatctatattggttatttccgaagaagaatcaagaagcaattcaacattcatgcaagtgtggtaccagattgagatatgtctgttagtttgtaacaatataaacttgttagttatgtgtcagagaaaacatagtaacaatgatttgtgctctatttctacccgtcattgtgtcctatctcaatggtgacttctttgtacacaactgtgtggtctctctatgtcctaataaatacatgcatcatcaatgaacttaatggatattgtcaatacagtgttcta
